United States Patent Application Publication US 2014/0057251 A1 - sequence listing, part 87

SEQ ID NO: 149846 - DNA, 716 bp, Cannabis sativa
  modified_base (29)..(44): a, c, t, g, unknown or other
  modified_base (403)..(406): a, c, t, g, unknown or other
taaaaaagagggtaaaaataaaagaggannnnnnnnnnnnnnnntagagtgtaatttcctcaacaatataggtataaaatgaataagtttgaggaatacattttttttttgtattgattaattaaaatatcctcatattatatttcattgaaaagtacctacttttgggagtgggttgcccttcaccctccacttaactctagcacataatttacatcaacctaaggggtataatagagatattatctataaaagtaggtatatcttaaaagatatgaaaaataaaagtaaaaattaaaacagataaaataagagattatttcacgaatacacaaaaataacaaaaaatttacgaaatacggtttcgcagaattttaaatttttttacgatttttttgatttnnnntacagaaaatacggtatttttatgttgtacttttattaatttgttgttgattttttattatgtgtatgttatttttaattgttgttttgatattatttaaatgttattttcctgttacttttatataattttttttattgttttcgtgttgtttctatggaaaaccgtaaaaatgtgaaaaataatcttaaaacgtaaaaatataacttttttacaaaaactcgtgttttatgtaattactttataaaacttaagcccagccccatgctgtccaatagttaccaatctaaaaggggtaagttgaaaaata

SEQ ID NO: 149847 - DNA, 797 bp, Cannabis sativa
  modified_base (535)..(551): a, c, t, g, unknown or other
  modified_base (678)..(682): a, c, t, g, unknown or other
tctcctggttcgtgagccacgaggtctgcctcgtggtcttctcactctaggttcaggtcgattttgagcattcgtcccctatgtcgccctagccgaggctgcatcacgctctaactcagtgtttcaacgctgcgcctcttccagacggcatctcagacggcggtttttcatttcataagttccttctctcacaaattgggcacctccacggttgagctcttcatccctcgtcccggggttctgaccattcccacgttgagctctcctcgagcgtgttgtccgcgtactaggactaacgtcgggtcaagtttttcgggaacgtgtggttcgtgcactagggccatcctcaggttgagccctcctggaacgggtggtccttctggactgcgggttgatagatcttttggagcccatgggctctttcccaaaacgatgattggtttcctcatgtggggtgttaatattttctagattttcagccatgaaggaggtggtttttcttcaaaaagagggagggttttttctgagctttttnnnnnnnnnnnnnnnnnaaagcaccaaactattaacgtagattttcgttaactaaatgtgagcctcacagtagtaatttcacacagaaaaataaaagctatagaaataaaaatatgaacatagggtttttttacgtggttttgnnnnnaaaattctgcatagtccacgagttaatcttgttcagatttctgatttttttaggaactctctcgtatgaattttttagtccttttttgatcttgtttgtcactatttataattac

SEQ ID NO: 149848 - DNA, 650 bp, Cannabis sativa
  modified_base (167)..(167): a, c, t, g, unknown or other
aacaaattcatcattttaaattcatatttcatgaaagtaaatcattaccatggctttgataccagttgttgaaacttattttaccaggatctaaacttactaacatgatgttgattagcaattaaaatataaattatctaatacgataaaattaaacacataagagnttagaaaaccttacattgatggaatccaaatactatgaatctttttgctcagatctctaactattgttcctttctatcgtagagtaataacaatatctgagcttggatctctttttctctttcggttttggttaaccaccatcttcgacactatgattgagtacttgacttggtatgtgtgggcatggtactctatcactaaatgcttgaatatggtgaagaacatcaagagggagaaatcactatagaatgagtctctcatctactagttgtttgacaaagttagaaattatgtttttgattgaatgttgagttggatgacaatgacaacatcatgcttccttttatagtatttcaactagagtttaggatttaattatatggaatgaaaaaaaatactgggcaaaaatacactctattggtcggccacttaatgggactcactagttacaattttgtcactttatttcaaccacttatcct

SEQ ID NO: 149849 - DNA, 801 bp, Cannabis sativa
  modified_base (160)..(181): a, c, t, g, unknown or other
acttttaatatttttttaaacaattttttttttcttgatcaatattttggactccgaccagatcgacccagaaccaaatctcccccacagttggcgctgaactcggcctctgagccaaatccgaattcaaccccaaacttagacccgacttaaataaaannnnnnnnnnnnnnnnnnnnnnaactttacagaacacacttttgctttttgtttttaaaatagaaaaataaaagtggttacaaaacgtacttttgtttttcaaaaacagtgattaaaaaattagaaaacaacaattatttcaatagttcggggggaatttttaacagccaaaaaagtttagggggcacgatttactacatgtcaaagttcagggggaaaaattactaattagcctttaaacaaatgcacaataacataaagtagaatttacatattttatatcttttttacaatgtatgcaaaaatatgattatttttccaaaaaaaaaaaattattttacttaatgaggcaaccaattacccttgggttatcctaaattgtttccccatatttttgattttttttttttaaaatttttccaataaaatagttttatcttaaaaattccatatatttttaaacttagccacccccaaaaaaaactataaaaataaaaaaaaaaattcccctaatatctatacatatatatatggaagaggtttcaatgtttacatttttattgtaaccatcatgcatggttacatttatttaagccattggattactattaaatggttgtgattaatttggaaattaaataa

SEQ ID NO: 149850 - DNA, 804 bp, Cannabis sativa
  modified_base (231)..(232): a, c, t, g, unknown or other
tctgaaaatattttatttggatttcttgtgaaagtttaagcaattttgtttttttacagaactcgattccgataaaaattgagaaatatgtaaatatttttttttttggcaagttaaatgttaaaatattttttcttttatggtaagatttatttgcattcataaccaattttcttaccttgtttattcggtttttatttctcttttctatgttaggaaagatgcattttnnagctgaacttttcttgtatggaaatttcttgtaagagaagtaattctcttatggaaagttggtttttcaaggaaactttgacaattgcatttttccttattaattttgattacgtcttgatacaatcagagtatacaaattgtttatggcaggtatcaagtcccaatataagattggacccgtttatggcaagtttccttttttcgtctgatttgttgtgtcagattctgtttctgatgctgcatatcatgtttatcttaggaaagttttgtacagctatagattcgattttgtggctatctctagggtttttatgttctataaatagagcctagagagcagccattcgaatcaactcttctagtattatttttttgcatttttcttatttgtgagaagagagtttctttgtttcgtgagaacctagctgttcatctaggttctagtatttttcatattagttcttcctctgtcttagagtttgttagaacgacttgactgaacaagagagtggtctttgggagaagacttattcaagccttacttcaggaggaggtaagcacgcacacttc

SEQ ID NO: 149851 - DNA, 1029 bp, Cannabis sativa
  modified_base (49)..(55): a, c, t, g, unknown or other
  modified_base (441)..(446): a, c, t, g, unknown or other
  modified_base (942)..(982): a, c, t, g, unknown or other
atattattaattttaaaattatgatattaaaaaaaactaaaaactaaannnnnnntaacatacgtgacttggcacgtaaaatttatctagtatataaaaatgtatatatttgttcatgattatagagtcatcagcacagtggaatataatcatgattataagttcaaaagtttaattcctatgatttgccagatcattggatttaaactgacatgataatcggtgataaggtatacttatgttaacgcaaattttcgttaaccaaatatgagcctaagagtgataatctcaacacaaaaaaaaaaaaacagtaaaggaaaaagtttgaacacaaagaatttttacttggttttgctgttataattctgcatagtccacgagtcaatcttattatattttttattgttttttagggccttttctcttatgattttttcgtcnnnnnnttaatctaacttgcctctatttataatcacatagttggcagttaattatagagttgaccgtaatctttacaacatttatcccctgaaatcgtggggtttgattacgtatgacgtagtataaatgcggttaatatacaaaaatcacacagctgtgattaatctgcttttactaggtcaaaatgatcatgtatttaaacactttttaaattatagcgttctgggatgtctcgacaggaactcagtaccaatgaccttgatagcgagctggagctttttcccctatctttctgaggtcgacaatgtacgcctcgttacttctttatttgaaggcttaacgcttcattttgacattcgtagttcttattaacagagagtacttcagcagtcatttgaatgtcagcttctgacttgtcaagactataagtctcactgaaagatgtctgaaactgattggtgaaagtaagaggagcgcaccttgttgggttttatgccctannnnnnnnnnnnnnnnnnnnnnnnnnnnnnnnnnnnnnnnntagatcagaaataacatttaatataaaacgattctttgtatgttctt

SEQ ID NO: 149852 - DNA, 1042 bp, Cannabis sativa
  modified_base (42)..(48): a, c, t, g, unknown or other
  modified_base (208)..(214): a, c, t, g, unknown or other
  modified_base (286)..(308): a, c, t, g, unknown or other
aataatgagctttaatcaaagagacattcgatctccattgtnnnnnnnacatagttcttattttagtgagtaatcatccctaatttatgaacattcattaacaatttaatgccgtagaatctcgaaagataagtattatttgtaagtgttttatttttagtaacgtccaccataatggtggctgctaagagtaagacttacaaaagtnnnnnnnaatggtgggagctcatgaaataagaatgacattgactctcgcctaaacaggacaacgtcggattctcttttnnnnnnnnnnnnnnnnnnnnnnnatgtttatcattttagatgagttgactactctattcaatagatgatatctttgactctctcctaaacgggacattgtatcagtttgttggaaaccttagaaaataattaaataggttttatttaggtatttttacaaacatgtttacttaattgttattttctgaacttgtgtatgaatttgagtgaaccaaatgatttatttttgtttattgatatttttagtctcaaaatggataacccacaccccgaacctctccttgaacatgcctttgtaaatgaaccctatagtgtgaaaatgcttcctggtaagagcattaattcacacctaatgatgatgaatctgaagttccagaaagcaaatttgctgggaattgatttatcaagagaacaatgggttcaattcattcttaatagtctttctcttgagtataatggattttttgtatcttacatggtcaacaattttaactcatccgacgtagataagctggaagtagaattgcgtgcttacgaacggagtttgcctgcaaggaggccaccctccagctttccaaacttaagtaagaggaaaataattaagtatgatgctctaacagtgctgcttatcaagttcaaataatgaaacaattgatattagtactcttcaatgttcaaattgtgatgagaagggacatcaggaagaaagatgtccgagacttctaaacaattcgaatgaaggtaacgcttttgtttt

SEQ ID NO: 149853 - DNA, 627 bp, Cannabis sativa
  modified_base (592)..(597): a, c, t, g, unknown or other
taatccatttcttaattccaaggtattacacctacagcagagaagaagctagtcaacaactttgtggactcattgacagaaaatgtaaaacctctttgaactttaagttgcattacagtttcctaatagttgtttttcagtttcccgtacagattgaaaattgattatattgacctaatttgcaggtaaaaccaataaacgagatcatgttcgaagtagtagaactaacaagatcatgggtgatcaatctaaaggagaaaacatgcagttgcaaccgattccaaattgacgaattaccgtgtgctcatgcggttgatgtgattaaagagatgaacttgaatgtttacaactactgttcaagttattaagcgacaagaacatggcttgaatcatacagcggctcaacatatctggtacacaatcacacaacatgggatgtaccacagaacataaaagatatccttgttctgccaccaaaccagaaaataagatctgaaagaccaaggaaaagaagatttatagctgtttcggatacaaaaaaacagaacaggtgcagcaaatgtggtcaacacagtcacaaccgaaagacatnnnnnnatcaagcaataaaatagatacaacagaatt

SEQ ID NO: 149854 - DNA, 610 bp, Cannabis sativa
actaggtagatgttacgtgccaaggcacgtatgattaattttattttaggttatatttttttttaagaaaaaatatatatatcataaataactttaaattaaataatatttattttagattggaaatagttgaaaccatggtagtaatttgaaaacgatagtttaagtaatatatgtgtaagtgcttgtaaaaagaaaaaaaaaggctatttcttaaattctggtaattaaaagaaatggtgaagtgtttgtattttacattcttcattcattctagatccatagacataaataacaaaacatgaaagaaagaagatgagagaaagtctttacaaaaaaaaaaatgttaataaaaataatttagcatattttaacagccaataaatgagtacagcatactgtaacattactataatagataaataaaactttactttaattacattgacatgtgtacataccaacatggaacttaatttggaagcaactgcttcaatcttctcaccacaacttttgaaactctagaaagaaaaaaaaaaaataagcttacctgaaaattataaagttaacataagaaaacattagtattgaaaaatgaaaggagtaagtg

SEQ ID NO: 149855 - DNA, 1018 bp, Cannabis sativa
  modified_base (294)..(301): a, c, t, g, unknown or other
  modified_base (658)..(661): a, c, t, g, unknown or other
  modified_base (729)..(732): a, c, t, g, unknown or other
atgggccatcaactttaagtttgtagttcctcgtctttcttcgatttcttcaagtgattctgctaggagtatgttattggtaccttgatcgtatgccaatcttctatgggaaggtgcctcgagttcgacgggcagcatagcttcataactgtacgccattgcgaatggtgtctgtccggttgccatttttttcacttgtacggtatgaccatagaacttcaataagctcttctggccagcttcctttggcatcttcaagttttttcttcagcgtatccttcaaggttttgttgnnnnnnnnaacttgaccatttgcttgaggatacgccactacggagaaacttttgatgataccatggttcgcaaagaaatcagtaaaggattggctgtcgaactgcttgccattatctgagactattttgtacggttgtccgaactggcatattatgttcttcacaataaagtcttgaactttatttgatgtaatggttgcgagtggttcggcttcagtccacttagaaaaataatcaactgctacaactgcacactgcactccacctttacctttgggtaattgtccgatcagatcccccagatggcaaagggccacgggctttgcatctgtgttaattcattgggtggagctcttggtatcttnnnnaatctctggcatttgtcacacttcttaacataggcttttgagtcttcaatcatcgttggccagaagtnnnnttgccttagaattttcttggataacctctgtccggcagcatgatttccacagaatctgtcgtgtacttcggataggagccatgcaacctcttcttgagtgacacatttgagcaatggcattgagactcctcttctgtacataactccctctactatgatataccgtgcagcattccttctcatttttcgagcttcctttcggttatctgggagtttcctagactcgaggtaggcggctattggtgtcatccagtttggggatgtatcaatcctttcgatttcttcc

SEQ ID NO: 149856 - DNA, 681 bp, Cannabis sativa
  modified_base (190)..(196): a, c, t, g, unknown or other
attttagtatctatggtatttgaatcttgttcatagtggttttgataagatcattctctgtaaagagttaaacatgcctatatccacttggaactaggatcattatattggcatataaatgtacttttaggggtggatatgagttttcgttatattctctagacaactactctagattttaccttatgcnnnnnnntttgaaatgtttgagaaattttattaatttctagcaatgttgaaaaatattaagtaagtggttaaagatcttgtgaaccgacaggggtggagaaatattttgtagatatgcaactcaaagatcattaagttgatttttttgaattgtatccaaacttacctccctagaaattcgatttgcatatttatgatagtataaggtctatgattagttactagcagtcgcctaagtccttctagggaaatatcctagtgataagataatttaagaatgatgaaatggttgtgtacttaatgaaaaccattactagattcatggatgacctaatcatgatcttaagaaaagctaaacttgttaactaaggatttcatgtttgatagttattcttagtgattaggggcggaccatcccatagtcattagataataaagtgtttgtttcaacagatactacttttctaggaatatgactaagtctgaaaataa

SEQ ID NO: 149857 - DNA, 811 bp, Cannabis sativa
cagtttggtggactcccttctgaagatcccaatctgcacttatcaaacttcatggaactatgtgagacttttaaagtcaatggagttagcgatgatgccatccattttagactgtttccattctcgttgagagaacaagccaagagttggttaaactccttgccaccaaaccccatagccacatggaatgacttggcaacaaaatttttgtctaagttctttcctccagcaaagtctgccaagttgcgaggagaaattaacaacttctgttagcaggataatgaatttctccatgagtcttgggaaaggttcacggatctcatcagaaagtgccctcatcatggtattgagaagtggatgctggttcacaacttctacaatgggcttcttggtaacacaagaacccttatagatgcagcagcaggtggagaatttatgaggaaaactgcaaatgaggcctatgatttgttggaagagatggccctgaataatctgcaatggccaactgaaaggagccaaataaggaaggtggctgggatgcttgaggtggatgctatcaccaagttgacagctcaggtagaggcccaaacaaaactgatgtctgttcaagtaaaacaagctcaagtggtctgtgaatgtcaagaagatgtgaataatttgccaatggatgaagaaaaagccattggaaattactctgaaaacaacaacaactatgggtttagtcaaggaggaaaccgaaggaatagtgggttctatcaatagataaatcagaaccaacaacagaatcagcaacaaagctctagtggaaatt

SEQ ID NO: 149858 - DNA, 518 bp, Cannabis sativa
ataccgtctggcagtatttttgtaaaaaaatggtaaaagttagtataccatgtaaattttcctttaaaaaaaggtatgtttagcagtatatatccacattgattgttaagaaaaaagactcgtgtttaccttcaaaaaaaaaaagactcgtgattagtcgctctaacaccaaaaacaaaactaataaataaaggtaaatagcggtataagtacccaaagttttatgtttgtaagcgatataaacataatatttatttttagcggcataattaagtatttaatgtttgtaaaactgtaattttcttccagttttgtcaatatagactttgttttgaatttattaaaagaacatttggaagtaacggatactacatatttctatctacacgcaatgatctaggatttaggccttatatgtatcttgtttaagacaataacagaatctgtactaacaaaattagataaaaattacagttttacaaacattaaatacttaattatgccgctaaaaataaata

SEQ ID NO: 149859 - DNA, 532 bp, Cannabis sativa
acatcgtccagctcctcgatctcttagacctcagcgtccccttcatgatccccctccatttcaacggctggatcctgttcgccgctgggcaaagtggcgtgctgagccacttgacggtcagatacgtcagccagaagcgtggttttctttgcacgcgccatcattctatggttggatacagggtttgaagaatgtccttcgctaggggaaggtgggctagaacaaagacgaggatgatcctcatgcagaagttgaagcaggtcctggttttgatgtccgttttcccaagactcacttgagttcatatacaaaagacaacacacaagatgagtgttgggtcggaatatggaacgataaataagcaaatatgctgaccaggagtactcaacagatttaaagaacgagaatgtttgaagaaaattcagaacttaagaagttaaagattttcttgagttagggaaaaaagttcatgaagcttagaataagcaagatgaaagacagatgttacaaagttcagaaacaagcattatga

SEQ ID NO: 149860 - DNA, 509 bp, Cannabis sativa
aattttagtgtcccataatgcatgtcattaaaaatatgaggtgtcactaaagagaaactcccaaaatttatattatcttttttttaaaaaaaaaatattggcttacagtgacacgccaaacgcgattgggtaaacataccccaacacatttagtgtgtcactatatcatgtattaaaataatcttttaatttatccaaaaaaaaagtagctaagtacctttatttaaaaaaagaaaaaaaaatgtaccactatatataataaatattaataaaataataataagtaaattaataagtaaataaaaaaaaaattaatctattattattattaattttttttgaaaaaaataatcagttaatattaattttttttattatattaaatatagagtataagaaaattctaatataaaaattaaaattaatgctatatatatctctttctctctctcttcacttaaactaaaaaaccctaatctactcttttaacatacagccgctctcatcac

SEQ ID NO: 149861 - DNA, 509 bp, Cannabis sativa
tttcccttttaaattactctaatgttaaacatctctataagttgtctgcatagatctacacacaattaattaatatatcattcaaatattaaattattaaactaaagagtaaattacgacaaaacttaacaaaacttccaaaactcatttttttgcgtcaaaactcccaaaactcaggttctgttagcagtttgacattttcatccatcttttgctattaattgacacggtggattgtccattaattcataatgtacacatgtaattggcacatgtaaataaatatttataaataaattaaattttaaaataaaaaaacaaaaataattttttctttcttttctaccatatctttttcagagattttttttttcttcttcttcattctttttcaaactatcaccaccaccaccgcaaccaccatcactgttactgccacctccaccacacaaacacaatcccatatcttatagcacaaacaaacaaatatacacaccacatttatcacg

SEQ ID NO: 149862 - DNA, 605 bp, Cannabis sativa
ttgatgtatacacagtgaacccatctgatccacatgttatcttgtttgttcgaaattgcccaaacatactttgtcattgctgcagtgttccactctgctattttcctcaaaccaatcgcccctactgcttttggttgacatacagaatcccaggcaattggtccagagccttgtgtcacatgatgtcctttccataagtaagctctgcatatagcctcaatatctctaattgttctctttggcaataccatgatctgactccaataggaatggattgacattagtacagagtttacaagaatagcccttccagctaaagacaggttcctggagctccatactttgattcgggctgtcattttgtctgctaacaccgtacattctttccccgaaattcggttagcacatataggaatacctaaatatttgaaaggtacttccttctcgctaaagattgaacaatcaacaatacgttgtacctcattgtcatcaatactacaacagtaaaagctgatttattagggttcggattcaatccaaaagaggctgagaagagctttaacccttggagcatataatagatactcttgtaatcaccatgacaa

SEQ ID NO: 149863 - DNA, 999 bp, Cannabis sativa
  modified_base (787)..(790): a, c, t, g, unknown or other
acccaatgcaacaccaagtgcactgttgcacaaaatctcttcgcgaagttctcaacattggccctccggccctaccgcacacccacggcttcatgcaaaaagctctctgacccactacatacttgctcctctgagcttctctaacgcggcaaatgataaataatcaccgaaaaccatgaattttccctctggctcctgcttgtgtcggctctcaaaattatgtcacaagtctatctcccaatatcaaccctgcatcctctgacgactcgctaacttttgacaaacttgataacacaaagtcttactcttaagacttgaagtcatcccaatgcgctatctcccatcggcatgtgctctttgaaccattcggcttacagtgtcccatacaacactagtgttcccataaacacaaaaatgcccaaacatgccgcaaactagctcagtcttgatctcagcctacacccctgcatattgtctatctgtagcttgcagcaatcatgcaagtcttcacactgaacaaccaatatgttgtagtgtttccctctggattcacacaccaaaagtgaacaagtaccctgattcttcaaacacatgaattagtgggctcccccacttcaacttgggaaaaacttctctcttaaaggaatacccctcaagatatagctcgcaagctacccgcatacggttgctccgttccaaatgttactttgatgaagatgttgaactaatgcctcggtcattcacactcttcgcccctcgacatttctatgttgccttagtaccttannnntgctgactttcaccttaggccaacattgccatggtgttatcttagtacctgagtcgtagactttcaccctagataatcggcactgcctgtgtcccgagtcttcttgactttacatcctaaacaacaatcaatctctagctatgatacccatttcgatgcttgtaatgaataactagtctattgagtgaaccgtgaaggtctctccccca

SEQ ID NO: 149864 - DNA, 611 bp, Cannabis sativa
ggcataaaacccaacagtttggtgttgggggtttggggttttacgatttggggtttggggttaagttgttttacattaggtgtttggtgtttgggtttggggttttgagtttggggttttgggtttttaggtttgggatttagggttttggggtttgaggtttggggtttggggttaggggtttggggtttggggtttggtgtttagggtctttggcttttggggttttttagtttgaagtttagggtttggggttttatgactagggtctagagtttaggatcttggacctagtatttggggtttgaggttttaagtctggggtttggtgtttgggttttaggttttggggtttgggggtttggggtttaggatttggggtttggtgtttttgtgtttggggtttttaggtttgctatttttgggattagggtttggggtttagggtttgatgtttggggttttggggtttgtggttttgaggttttatgatttaagggttttagggtttgggggttggggtttgggatttgggttttagggtttggggtttagggttttgcagttttggcgtttggggaatcgttatgggaatggggtggggaatggga

SEQ ID NO: 149865 - DNA, 882 bp, Cannabis sativa
agaatgacatcgctgagtatgttgctaattgtcttacctatcagcaagtgaaagctaaacatcagaggccaggagggttgctgcagccattgaatattccaaagtggaaatgggaagacattgctatggactttgtggtaggcttgccgagaaccacgggacaattcgactctatattggtcatagtggacaggtttacaaagttagcacacttttcgcctgttcgaacaaacttctccattgatcagtatgctgagttatatgctagagaaatcgttcgtcttcatggtgtccccaagtccattatttcagatagagatccgaaattcacatcaagattctgggagactctgcatcgagctatgggaactcagttaaagtttagcactgcatttcatcctcagacggatggacaatctgagaggactattcaaatcttagaagacatgttacgggcatgtgtgcttgactttgatggatcatgggtaaagtaccttcccctgatcgagttctcgtacaataacagctatcacgcaacaatcgagatggccccttatgagcttttatatggaaggaaatgtagatcacctattcactgggatgaagtcagtgaaagaaagttcttgggtgtgaaagaaaggtcttgggtcccgaggttgtttagagaacaagtgaagcaattgataaaatcagagtgcgaatgctcgcggctcaaagcagaaagaagagttatgctgatccaaagcgacaggacattgattttcagattggagacatcgtatttctctgagtatcgcctatgaagggcatcaaacgctttggtaagaaaggaaaacttagcccgaggttcattggacatttggaaatccttgagaggatagg

SEQ ID NO: 149866 - DNA, 517 bp, Cannabis sativa
ctctctctttgtcccttttctctgcagatcttcaacggagaggcttgctttagggttcgcggagttggccggagtttgggttcagaagcggttggtggggagatcaggatttattgggcttgagtttggtttcgcttgttttgttaatgctgctggttgaggctgccttgttcattattttctctattttgattagtctatgttgtgttttttatttgctcaattagtctttagtttctaaatttgtgtttttgtttagtttttgatatagatctagaaacttttgtatattatttttttcattttgtcatataatttgtttgtaacttattccacatttgatttacacttaataattttatttaattttaccaatctgaaatgcatagattaacttgtaaaaatttaaatgaaagttattctgatttttttggtaccacactaagaatgaatcataagttgtttggaaaattggactggtatttcacctttcagtatcaaaacaaaaaaaaaaaaa

SEQ ID NO: 149867 - DNA, 602 bp, Cannabis sativa
agttctcttcattgaaatcaccaactattatgcctgctacttcagatattgttggcatattgtattgacgaccatctcttgtcctgctacttaagagttgtaaacgaaaagtagattctggttgtgctttgaatctatcccttgcattcgaaaggatttgaccaaattattatgttgatccaacattttagataattcatgaacgatttcgttttcaatttcaatgttcctcccatatttttgcaatgtgtcaactctgttccctatttcattttcagtatcatagatgtatagttgagcaaattgtggttttttcccaacttctggcaacaaagaaccaataagatgataattctgaccactcattcgaaaaacataaggtccttttgattggttgattgttgtatcaactcggccttccattgatgtgaatgcaaacatagagttataagcatttatatttttttcgaaatttaatgcctttttgtccagattctgctccgaggagaaatttgagtaatgaaggttcttctttcaataatggtgtaacaccctaactaccttaggcctattacgtgatttttaaacgtactgtgcagctc

SEQ ID NO: 149868 - DNA, 1193 bp, Cannabis sativa
ctaaaaagaatggatggaaccatggtgccaagggcctggaacgctgatcatctctggaagtattaccaatagtcaaaaaataacttaggctttgttaatggaatttgtaccgaaaagtatatgcaacctctaaatttatgaataaaactaactgccttaaaaacagtgttttcatgccactcagggggggtactaaggcataccacacggacaaatgtaaaacaggccaaaaagtaaaagcagaatcaagcagaatatatatctaagaaaagcatatatatatttagatgcaaatgtaaaagatgtcctgacccaaaagcaggtcctaaaaaaatattaagggcctggggacgggccttagaaattgtctccccttagaagataatatctaaattgtctagaaaaaaaaaaggaaaagggactgtaaatgtaaagaaaaagaaaaattattgtagtggtggactggttgaactggtcggcctaatcaatgcggggaggaagacgagggccctgacgttcttcaagcatagcgtcaagcattttcttcttctcccggaagcgaacgagggcttccttaggtttaggataaaagtcaagcttgatcttctggtcattcgactatcaagccatgtagacgccatcgtcaaaacgcttgacgcagtgcttgcaggagacgggggtcaagagctcatctcttttggccttcttcaaggcctgatctttaaagtccctgagctccttcacctccatggtcaggttggctgtcgactgcaagtccgcctggtgcagctactccaaagattttaacttagcggccatttcatccatagcctccctggctttccgcatctcacgcttagccctggctgtagcctcaccctccgccttcagctcctcccgatgctttgcctccgcctgagcctccctctgctgggcctcctcccggaatgccctcctctcagctgacaagtcccgcagactcttcacggcctcgtccatgcccccgaattcggacatgacgtacccatgatcaatcagggtctttgagaggcggccgatctccgtagtgatttggaaaaagaaacaagaatgaaatcagatgccttaagacaaaatacaagcgaaaagaaaggaacgaatcgcaagaactcaccgcagccatggcagcactgatatcttgaacctggtagaca

SEQ ID NO: 149869 - DNA, 532 bp, Cannabis sativa
ttgtcattattatatatttaatattaaataaaatataaaataaaaataattaaaatccattacccttaatgacattccttataaaattggtgggggaagttctctatttcttttctcccttatttaatagttttccctttcctaattttaataatgtaagtaagggaatggttaccttatcattgatttccattacttattagtaaacatataggcatgtcaaaaagatccatttagttggagcaggttggagctccgatccgaaacattcagatacttattggatcttggatcagatatgctccgccctgcctaatttttttcaatttatttaaaaaaaaattaattcaagactcggaccccaaactcggacccagacccggactcagacccaagacctgaacctgaacttgaacccataacaaacttggacctgaacctagactcggaccgagacccagaccgagacccaggaccctgactcaaacccaaactcggacccggaccagacccgttgttggtgttggggtag

SEQ ID NO: 149870 - DNA, 561 bp, Cannabis sativa
tgtctttctttgtcatgttcaattatatgttaactcttgtatacaattgataaattattatcttgttctcgtaataaaataaactttaacttgtattgaattactcaggccaattaatagtagttaacttgtatatgatatagcatagggataactaacgcagttttgttagtattacatatcggcattatgagattttttaaagtttatttaaagtttaatattagttgcctcacaataaatataagtgttgtattacaatttcatgataattatcccaaagcagacttataatgattaaatttttaaactattagataaaggatgcaattgcgtctctcatattttgcatggataatttgatcaaggaataaattatataaattacgaagttactgtccaatacatttcaataaattgtaaatataaagaactagtacacaagctgaaacaagtgttgaaatgcaaccaaaaaagcactcaactgtaactaaaataccaagtaaaagaaggatatcaaccgttgaggattaaggtcgatccaagcctattcctctacat

SEQ ID NO: 149871 - DNA, 519 bp, Cannabis sativa
gcgttggtggagatgccatcaccaactaagccaaaagaagtccaaagcctcacaggtaaagtcgccgctctaaatcgctttatatcacgatcttcggataaatgcaaagagtttttttcagattttaaaaaatggaccgaaaaatgcgaggaggctttccaagccttaaaaacacatttggggcagcccttaatcctatcaaaaccaatgaccggcgaggtcttatccatttacctggcggtgtcagagtatgcgattagttcggtactaatttgcgaagatcaaggacgataatacccggtgtactatgtaagtaaacacttgctggatgctgagacccgctatcctcaaatggaaaaattggcgttcgccttggtaatatcatcgagaaagttgcgaccttattttcaggctcacagtattacagttttaacgaactaccctttgaggcaagtcttagcaaaaccagagacgtcggggagattgttgaaatggtcagtagagttaagccaattcgac

SEQ ID NO: 149872 - DNA, 522 bp, Cannabis sativa
agaatttatgaggaagcacatatgagcaatgtcttttactcaaggtttacaactgcattaatactgaagatagaatagaggtctataaaaggaataagatttttcccaaaaaaaaaaacaaaaaagatttttctagtgatgattatagttgaggatttcgaaagatataggagttcaaaagggcaaaagtctaacaatacaaattgaataaagggaagagtgaaaatataattgagctatgtattgtgtaataatttttagtgaaaattacattatagtacttggtaataaagttacacaaatatggcattcataagtttactaatttcttgtggtatttttttacatttaaatttttttatggtatttgatatgttacatttttgtaaatctaatatccaaactcatattttattatttttatttttagctttattgattttattttttttagtttattttgcatttacatttgagaaatttacatggtacactaacttttgctaattttttacaaaaata

SEQ ID NO: 149873 - DNA, 622 bp, Cannabis sativa
tgttccccacttcgcaagttggagtagcgagcagctatttcaacaagtttactcaccattcaatcacctcttgggaacagttgtctaaggacttcaaaaaatagttccaggccgcaagggataggcgaccctaagtgtcctcactcactaacataaagcaacagtcgggcgagacgcttaaggcctaatgaagttgttttagcacagctgctgggagggtgacgaacctggacgatagtacccaacttactgctctccaggcagggataactactgatctctccactgctggaggcgagttatgggatgacctacagggtcgcctagtaaaaaacattactgagttcaatgaaagagctcaagtatttgttcgaaaagaggaaacaagaaggagatgaagttgttaaaaactggctcagcaaacaaacccagcagtgtctcaacaagtaccgtctcgaccaaggctgataatccaggagcctctagttcaaaaaggaaggataactctaaagagtcagtcaaggacaagaaaaaacaaaagaagcacgacgggtacgtgccaatctacgccatttataccaagcttaatgaaactcgagaaaacatctatctcacacatgag

SEQ ID NO: 149874 - DNA, 530 bp, Cannabis sativa
ttccatgtgctaaggcacaaaattatgcttctgcactgctgtgagctaccatttgttgcttcttgcttcaccaagatacgagatttccccaaacgtaggaatagtacctagaagtggatctttggttagtgagagaaccagcccaatcagcatctgtgtatattttaagatctttgttgagagttttcttgaacaataacccttttcttggtgttcctttgaggtacctaaaaatctggtagacgacatccatgtgttcctcaaaggaattattgagaaattggctaacaacactcatagcgaagcttatgtcaggccaagtgcgagttaggtatattagttttcccacaagacgttgataccttcctcgataaacttttgttccatctgtctgtacttcaagtttggtattagggtccatcagagtttcacttggcttgcatccgatcatcccagtttcctataagagatcaatgacatatttccactgagtgactgagataccttggctggatcttgcaacttccatc

SEQ ID NO: 149875 - DNA, 735 bp, Cannabis sativa
tgccccacttttttgctttgtttgatgagttcaaaaaggataacaaatcggtttctttagaccctttcgatgtggttaaggttgatggtttacctcagcaaacctcgaagtaagttgtttaaagtttatattttcaagtgttgttttgtttttttataggtatttccttttttgtttctcttatgttgttttttggttgttttccagtgactgtggttgttttgtggcatcatttgctaaatacttcattgatatgaaactaattccttccatatttgatgttgagaaacaccgtgataggctggttgtgttgttcttcaagtatggtcgcatgaaagaagtggattttattgatagtgaagacgaggctcctctaaagggtccaaagaagaatttgttttagttatgtctttgttgttttaggcaaaatgactaattgtttagtttttattatttttataataagattatgttgacaatttgttgtttctatcaagtttttttatattgtaattgtttttattttgtatctactttttgttttttactttatatattttaacccacgaaagcatctcattatcaacctaattacaaccatcatataaacaacgaaccttgcattttaaacacttttatgtaatattttttggtacaacttaattttaacttgcctttaattgatcatgcaaacatttaatcatttaactgtaatatttatgtcatttgtatatt

SEQ ID NO: 149876 - DNA, 600 bp, Cannabis sativa
ctttattagagaaactttttacttgttttgggtatccaaccctgttctggtgccctaattgaatggaaagtggagaatgtgcgtcaattacactgacctatataagtcttgctctaaaggctattttttgcttcttagaattgatcaactggtggacgcaatagcttgccatgaactccttacattcatggatgccttcactggatataaccaaattagcattagaatatcataactaattattaagtaaaaataaatcttgttgtaaatatgacatttttcatcacattaaagagatagtgaaaaagaggccgggtgggatagagagttcccttagcactcctcgcttttagaacgaaacaaaaaatatttatcttcgtaaaattgcgatttccatacaatcatcaaatatgcacaaaaaccaacatgaacacatccaaatcaacacaatcattgttttaaatccatattttatgaaattaaattaataccattgctctgagactagtttttggagattattttaccaggatctagatttactaccatgtatgctgtttaacatcctaaatattcatttccaaaacaatagaatttaaa

SEQ ID NO: 149877 - DNA, 886 bp, Cannabis sativa
aactaagcgggctttacactatttcaaaaaaaaaaaaattaaataaataaagaaaataaaaaaaataaaaacctttcaaagcgaaatataaataaaataaggatagtagtcaccatatgacgaagagttacttaagatgtgatttctcgacttggcttatacttatatataaaaatctagagcattgctactgggcacgggtgttcatcactttttatatgtagtgtcttactattagttagcgatattatctaaaagctattttattaagttatatgagactcgatacttaattacaccaatagtagtatgacaccaataatacattttagcatttctaaaaaatatatattttaccaagtgattacccaacccatatggtccatgcaagaaatgtcacttttaccagcacagttcactattgttgtaaagaccgcttagctttaattgagaaattagcagataattagggcttaattatgaaaattatctattactattgaattattaatttatgatggtttatttgaattcagaatgcattttatatgtcatctatagaaatttcataattttgcatgttttgtgccttgcaacattagaacgcagtgtttggctattagaatcatatcctagtatttttttagtatagtgaaatgttaagaatagtcgagagtttagaaatgaccattttgttgattaaccatgtgggggagggtattttagtcatttaccctatgttttggtggctgaattttagagtggcagctggccacactatgttaattaatctaagtataattttgatttattgggaaattaagaaaatagaagaaagtggaaatttgagagaaaattattttctctctttctcttgttcgaaacc

SEQ ID NO: 149878 - DNA, 625 bp, Cannabis sativa
aaatttgtcacataataaaaaaataattcaaatttaaatcataatataacatgatttaaaatatacatcacataaatatcatgttttcatatttattattatattatttttaatattttattattaaattttagttaacatgctcctttacatttaaataatttatatttgtattactattatcattttataaattattatatgaacattaaatgatatattaaattttacatcaaaaatttctaatggaataattacatgaaatactaatttttttttaagatttttatatatatatatatttacagtattctataaaaacacaagaaaaaaacaagaaaaccacataaaagtaacaagaaaacaacatctaaacaacaacaaagcaacataaaaataatatacaaataacaaaaaaatcaataacaaaataacaataaacataaaaatacaccaaaagactgttttttatacaataaaatattaaaaatgttaaaaactacttacaaactatatttttgtaatttttttgttgtttttgtatttttttaaattatcacatttataattatatattagagcacaatagttaaacttgatgtaaaaatatcacaaaactattttt

SEQ ID NO: 149879 - DNA, 664 bp, Cannabis sativa
ataaggctaaattggatatgcatccacctattactgagatggatactggtcgtatggataggcacaatcccaatcaatttgctcttaaaagtcagcagggtgttcacaacaatgcactctctattaatccatctcttccacaatttaaggaagttcatccttctctggttcgtggaaagaacaaggttccatcatctcccaatccttcaccatcttccccaaatgagagtgacttgactgacattttcatgcctcacattggatcaccactgggatacattgcaacctacccgcctgacacaactaacaccaacatcattaacactgcttctacaatggctaattcaccagcttctactcccatcatctccgattccactgtctgcatgactactggtgtttcttttgacaaagaaaaccagtcaccaaaccgttcttcaaagaggctgcctgaaagcatatcaatgaggaaggctttaaaacgttgtaggggtctttcacttgcgccctcaaattcagatttgtccactgatgctgagatgaaccggatttcttctgtttctgctacagatccatccgtttcctttgacaaaattgcggaggctgcctcacagccccgcaaccagccatgaaaattctcagctggaatgcgcgtggtctgggg

SEQ ID NO: 149880 - DNA, 554 bp, Cannabis sativa
tttttatttttagttttttttgttttgaagttttatatcttttaatttttaatttttagtttttattgttgtgagtcaatttgcttaatgtgagtcactttaaaagtaggtagatagtatgatttaaaaagttaatttatttttcaaaaaatcggtgtgcttggtggtgttatactcttgactaattttaattttgtgctttaaaagaacatagaatcatattaggtaattttttagtaattaaattagtttatgtatgctaattgggacatgtggaaagttgtttgataaattctagaacttgcttgctatttgaggcgaaataataaattatgcatgactagaaaagtgatttaggtatttttttggatcgattgtgcctttcaagtcatccctgtaattttatcctacttaccctttttgagtcttaacatgttctttgtttctacacattatgagcctaaaaaagataaacccatgaatatctaaggatttaactctaattataccataagtaaatttttagtttggaggaatttggatggaaagtttgt

SEQ ID NO: 149881 - DNA, 769 bp, Cannabis sativa
ttcaagacgcactttgggcataccacacagcttacaaatcccctcttgggatgtctccctatcggcttgtctatggaaaagcatatcatttacctgtcaaacttgagcacaaagcttattgggctatcaaggccctgaactttgatctaactgcggcaggtatgaatcagaaactccaattttctgaaattgaggagttgagaaatgatgcttatgataactccaggatctacaaagtaaagctgaaagttgctcacgataaacagatcctgagaaaacattttgagccaaatcagaaagtacatttgtacgattctcatttgcatctccaccctagtaagttgagatcaaggtggactggtccatatgtggtgaaacaagtattccccaacggttctgtttaggtcgaggacccaaccgatggcaggacttttcaagtcaatggccagacactgaaacattacattgagagtatgaactttgttgaagaggtccttcttgaggacccagattatacactctgaatgtttgtttttcctatctatatgctgtagtattttattttatctttatgtttttattttattttgcactttttctatgttgttttaagttaccattatcaggttatctccactctcgccccatccatatcgtcaataggtgtactcttttccctatctttttcatttcatattttgtgacattgaggacactgtctaattttgagttgggggtggtgagctctggtgagcgttcatttggaaaa

SEQ ID NO: 149882 - DNA, 522 bp, Cannabis sativa
atgtttaatatgtgttggtgtttcctttctaccactgagttttgttgtggtctttccacacaagagtgatagtgaatgatgcctttagaagcaaaaaaggaagccaagtttaattctttggcattgtccgatcgaattgctttgattgtagtggaaaactgagtgcaaaccaggttgtaaaagttaatgagaactgtaggggcatcagctttgctttttagcatatatgtccatgtaaatcgtgatttgtcatctacaatggtaagaaaatacctatagccttcaacactaatgatgtgaaaaggaccccatgtatccgtatggattaaatcaaagatattagtggaaaaattattgttagatataaatggaaggcatttttgtttagctaaatggcaaatggagcaatgctgatttgaatttggagaaaaaaaatgagtcaatctttttattaagaacattggaaatgtacattgaagggtgaccaaggcgattatgccattgatctacattattttgtaa

SEQ ID NO: 149883 - DNA, 724 bp, Cannabis sativa
  modified_base (586)..(589): a, c, t, g, unknown or other
aagcgagcaaatggtactcccggcgtgaaaaagaataagcgagcaaatagaactcctaatcgcgaacaaaaataagcgagcaaatagaacttctaaccacgaataaaaataagctagcaaatgatacattatgataagatgactcaagattggtaagcaaaaaaataaccactattttgagggagaatattagataatattgccccacaaatattgagccatatataaaaatatgcgctactccacttataaccaattagttttgagatggaatcccataattcttaacaaagaatgatttttttttctttgattttctttttacattatatttgtattcgagttatattatttttatagtagtattttttcgcaaatctttttgtttgtatttttttttcaaaaaataacattgtttttactttgttttaatatagcaataatataaaattaatataaaaataatgtttaaaagtttaaaattacaaaaaaaaatattaaaaaaaaattgtacatcacacttactagttaccaagtcaaaataataaaaaaatgacttttttatttttatacttcaaaatagttnnnntttttttttttgtatttttacgaagtactacgtagaaacacctattgcaactatcactgcaacctaaattgtaacaaaaaattgtatagaaactcttattgcaactagcaacactttagaaactcaaacagtaaa

SEQ ID NO: 149884 - DNA, 1068 bp, Cannabis sativa
ggcataaaacccaacaccatgatctccccctcacccacacttattttcaggatgggtcttggtgcatcataattcacgtcccatattgttacttctcttttagctgaacttactactagatttttgtctcaccattgtactacgtttgagaatggaccattgtgtaacgattcacatagatcccattggatacacttatcaccatctcttatgtcatacatgcttatagtattgccaccctcaaccccgtacaataaattttttgtagctacatcgtagtaatttgttctacaaggatattccgatacaattggattatttttgttgaccttagatttggtcaactgacagcagattcaaatttaatattaatgatcacggccatgtgttacacaattagaacagaataataaatagtcatgacatttaatagaggttcgacctccttagttaccgggtaatgacatactctccttttagttgtattgataccagagataatactactaagatcacatagtaatgggatctgaagtggctctcttgagattacaatgtgagaatcagagttggaaattctcgagtgacagagacaggctatgcagagagagagagagatgagatgagttattagacttagagtttaaggcttagggtttgagagttatgattttagggtgtgaataatgctctttaatagtagagcttacatccctaatatcccttaagaataggaaactaaagctattatttacataataaattaataaagttcaaatgactaaattgcccctaaaaaatatggaagttgctgatactttccctttattttgttaaggcccatttcgtggtttgacttgctatccacggatgaaagctgcgcacctaaaagctgccaggcaaaaagttggctggccatgcaccagccagagtgcatgctggccggccatatggtatctggaagctggccagcctatgctggccatagggtcggccaggggtagctagctagcccccttgaggtggctgggttgtagcttgtcgtcctgtttgagtgttgggaccccc

SEQ ID NO: 149885 - DNA, 576 bp, Cannabis sativa
gtaatagaactcagtgaatatgacattacattccaaccaaggacagcgatcaaatctcaggtattagctgactttattgctgacttttccagtgacatgtaggtacatgcagaaaaagagttattgtgcttgaaagagcaatttgactctaagtggaggttatcagtagatggctcaagaaacagcagaagatgtggcttaggcattgttctcacctcaccccaaggagatgtcattcaacgagcaatcaagtgtgacttcaaggcaacgaataataaaacggagtacgaagcactccttgctgggcttgacctcgccaaagagatgaatatcaaagctcttgagatcacatcagattcccaactcatagtcaaccaattcaatggcacataccaggccaaggactcaaagatggtgacgtacctccaagctgttaaagaaagactgttgagctttactaaaagggaaatttacactaatatatacattatataattttattacaatatatgtgcataataatttattttcatataatcatacattttatctattatgaagaaaattattttcaat

SEQ ID NO: 149886 - DNA, 512 bp, Cannabis sativa
ttgatttcttaattgttgttgaagttgttcatatatttcatcttaataataacataacaatttagataaacccttaattatgagctgaaacccaatatattatatatgtaacatgaatgaaaagagggcaagaaatcaagagaagtgcttaagctactaaacagtcccttctttactgtagaaagttttcttaaggattcatttatttataaaatataagtatacacataaataaaaacaattacatacaaataataatattacactatgttaatatttttaataaaatttagatttgaaatattgtatatttatgcggttaatttttattttagttaaaactgaaaaaaaaaaaaacaacttaattcggtttgggcgggttaacccgaccaaaccgcccaaaccgcggtcgggttaaagtttttttttttttaaattgggcgggttgcatgcagaattttacaacccgatctttatgtcgggttagaaaatatgtagtataaaccgactaa

SEQ ID NO: 149887 - DNA, 737 bp, Cannabis sativa
gagagagagagataaaacaagtaaagaactttttcagtttgaataactttctagtgccttttttttaaaaaaaaaaaaagacaacttagttaattagtttcactggtggaactaagatattatagattggtttttacacccccagaataatttttccacgcccagagtaatcaccatctcagataaattttgagttgatgcaaattgaaggattcagaaacatcacccatatcatctaacatatatgtcacttttaatctagagattctttcttgactatctccctatgttctcttttgaattacacttttgataactcctactcaatagtaggagtagtttaacgcatacacaagtgtgcatttaatctcttaccattggtactaagagacattctgttgtgacatttatcttctttttattgaaaaaaacaacgataaattcttctttctagactaagtcatcaacatagaatcgtaatattacattagtgtagaatactttcttaagaataactagagataccataaaattatttcgttgtaaacaataattcataaggaccaagaattgtgcttaagtcttttgaatatcgatagtaagattttcccatcttttcctcataattctgatagattataactatccatgtgaatggttggaataacttccttagctttatcttaaagtttctttcttgaacatatcattgtaagtcatcactagtgtcatccaaa

SEQ ID NO: 149888 - DNA, 812 bp, Cannabis sativa
  modified_base (532)..(536): a, c, t, g, unknown or other
atttaatgtcgcatgggaggaggcatattggaactgccacacgcaataaagtctaacgacacaacctccgatctgtacctacaaggctatggccaataaagtctagcgactactactctgtgaagaatcaaatcagtcaaaagggattaaggactgccctcacaaaatccctaaggcacctagggattagatcatgcattacccatggtatattcattgggaagatacaaccttactgatagttacagaaatgcatgtaccttacttctgtggatcacccatcaaaaacactataaataccccccaaagcttattaaagaggggtcgagaattctgggttgaataagtactagaagagtaaaaactcaccaagcacattctctgtattaactacgatcataaatacacagactcatggactaaggctcattaacgcaccaaccacataaaaatctctctcttaatttcttacagctctctaaactattattattttattggttgcctaaaacctcggtcaacattttggtgnnnnnattgagagctgaagaaagcttttgtaaacacacaataagtacattacaacagtggtggagactcgaagcacacgtcaacctcaccctcttgaagatgctcaagacccaaataaggaacacgtggcctcaagggaaactgagggttccaaagaagaagaaggaattcttgatggcgattaggagggaaacctcgatgagtacgcctacgatgaaggtagctactcggaattggtgctcttaagacaaaaggctgtcgatcatgaagctgaaatcgca

SEQ ID NO: 149889 - DNA, 607 bp, Cannabis sativa
  modified_base (206)..(207): a, c, t, g, unknown or other
acaatcacctagtatatatatgtggtgttaattaatgacctcgaagctagtatatatatagcttagtgaagagacttgtggttgtgggccatgcatcactaagaaaaattgttactgagatatttttttttattaaatgtaaatttaatcacaacaaaatgttatttgtgataaattatactttttagatacaagttgtcactaanntaattttagtcacaataaatattgtgactaaaaaatacatttagtcacaaaaaattataatttttatgactaatacgttttgccacaaattttttagttacaatataagaataaaaatttataattagtcacaagttttgttgtgactaaaaataaaaaattttatagtgcatgtatatacatataactattattattctcatgatcttaaaattttttagggataattttaaggaaacaaaaataattacaaaattattgagtttttaatatttttacaattttatagattttatttacattacatatgattttacagtgtatttttttgtaacgcccttccttacataaaataagatgccataaataaactggcgttaagatactaatgttgccttta

SEQ ID NO: 149890 - DNA, 532 bp, Cannabis sativa
ttgattagcaacgagctgcacatcatgtttaaaaatcatgtaatacgcctatgctagttagggtgttacaataaataagatcaaggctcggatgcttgcttcacaaagaacgtagaaaagtgattctgatcctaagcacaaaggcatagaatttcaagtaggataacatgttttcctatgagtctcactactgaagggtgtaaagcgctttggaaagcagggcaagttaagttcttggttgttagggtcattcgagatactcgagaaagtctagtaggtagcatatcagctaacctaatcattaatgttatcagctatacataatgtattaaatatctcaatcagacccgactcatgtcttgaattatgaagccatagaactacaattgaatttatcttatgaggaacaaccagttcaaatcctcgataggaagaaaaagattcttttaatggagggataattataatgatcgctgttggaatttattttaccaggatcttagatctacttacaagtatgtttattaacacc

SEQ ID NO: 149891 - DNA, 1311 bp, Cannabis sativa
tttgcctaacattttgtattggaagataaaattacattcctttagtagttgtgcaaaataatcttagatgtcacttacttgattcgtcatacctcccatagtagtattaaccaccatagttagttttatcgactttaattttcttgcctagttgattagtcgactatggttttgaaaatttaaaagaaataaagtctgaagattaatgtccttatgaacaaaataagtttcattagtctaaagacaagatactattattgatcattccatgaaaccatgagaaaaaatctaccaaaatatagcatatattcttagatgatgaaactttattttgtcacttgatttctttatgtttttttgttacccctttacaaaatttaaaatttattaaatcaatgggtcaagaattctattaaaatataagtctttctgttctccttttgggagatataatcttaatacttatacaccaaagtataatagaattctcatgattcaatttatattttgtaccataagaaaaattatgaggtttctttatatgaggtaaatttcaataaatttataaattaaagaactagtagaactaatattggaaaagactttcaaattctaattgaacaagaatgacctaatttatttaaaatagaattcaaaaccaaaaaatcaactaggtgatgatagtgtataagtcttttccaaatccaaaaataactagtcattaattatagtttgaatattcttatagcctcaactataggtgttttcctattgcaccgaaagatgaatctttcatcatcacttggtttttagtttcatagatacttccatagttatacttacataagtaatgtcataaaattttgcttactaagtatatatataggtcaataaattaagtcatttacaaaacaaaccatagtgaatgacatacttggaacactttaaccttattttaattccttttgcaaaagtcatagataattcagtatctaatatcttttgtactttctttaacagtgttccatatgcaacatactgaattttatctttatccttatcttttatttaaacaaggtagctaaagaagcatgcttatttttaatatttccttaaaatttgtcatatttggcatgagaatcaaatttatgctggtagatataactgaaatatgaatttaaaagagaataaaaaaaaaacaggttcacaaaggaattcatataacataataagttcaaataatggtaaatcccatctcaagataccaaccacacattaatatcaagtctttggacagtaatattaactgta

SEQ ID NO: 149892 - DNA, 862 bp, Cannabis sativa
attagggcgttagggcgttacattacaactttacaactttgtatcagagtatcagagccagagcagcccagccatggttttaaaggtcctgaagactggtcaaatatgtacatttggtgcgaggacagctcgactcatggtatatattaagtttttattttatttgctattggattatctgcctaggctattataaagtatgctgggaaaagtagcatagtgatgattgtgataagaatatgtgtgataagttatacaacaagggctatggaatagtcttgttagcgagctatttgggctcgtggcaaacggtaaagaagagaatcctttattgctgtaatattggaaacatgtaaattctactatgcaggatatgattagacaacaaggggaaacagatctcagaactaaaagaacaatatgctcaactagagtctattcttatattaataacatttcatgttgcaccactaaatgtggtggaatatatgaagccaatttactagtagatcaggaagcaaaaactaaatgaaccaccaattatgggacatgacagaaaggttctagggtggtcaaggtgagaataagaaatggtgaccttatcctgagtgttcacgatgcaaaaaggtgccatttgaaccaatgtagagccaaattttgttttattgtagggtagtgggtcatctgaaaagaacacgtccacacttaagaaagattgatgttaaagaagaaaagtgtacggatcccatccaagtaccagttatgattcaagggacccgaatatcggtccttcggccaactcaagttagaatttatgggcaatattaaacattgtacatttagttagagacatcaagaaatc

SEQ ID NO: 149893 - DNA, 526 bp, Cannabis sativa
aagagagtccaaaaatacatcaatcttgaagaggcccaaatagtggcctatggaggatattatcctactgggatagcagggtatgtgcccggagcccagccgttaggcactgtgccgacagcagctcccccgatgagcggcatacaattctctgctactcccggatatagccagggccaggccttggcccccgcatcgtcccattttggaaatccctcagggataaatggacaagccccctcgcactccgctccaactgtcagcctagccggtccttcccagggctcgaggagtaaaaggtcctccaaaggcagcacccggacggaggaaaagcgacaaaaaaggggatacactccccaatatacccagtacacggagttaacagactcccaggagcgtgtgtactttgctactaggaaaaatacacactaccggagaccacctcctctgtacaaggatagttcccgaggggaccccaacaagagatgcgagtaccataacggcattgggcacagcaccaatgaat

SEQ ID NO: 149894 - DNA, 812 bp, Cannabis sativa
gttttacggataaaatacattgaaagggtgtaacggtaattttgggaacctagctgttgatccggttaataaattttacagggcctgtaaaatcggttaaccagttttacaccaggtaacccaaacaattcgaaaccccaaccaaatcaaatctaaacctcaccaaaccttccatacctgcttaaaatacgccaataaacataaccgaagcaacagaacaacataacccgctcaaaatcaaaattcaccattaaagaggcagcttgagttctaaaactcaaggcttgctcaaaccttacaacaaccatcaaaaccagcttaattcaacataatacaccataaataaactctagaaaacaatatcaagcaccaacagcaactacagaaccctatcacaagaaaacatgcttgaactcaactaaaagcttaaaataaacataaaggagagtctaaggaagttataccttggattggatcattagaaccttgctagaaacctctgaattaagcagaaaaagcacaaaccctagttgcattctatggtgcgaaaagagagagagagagagaactttggagagagagtgttttatgtgatttcttctaattgataaaaatgtaaataaaaaagagttttatctaagtaattaaagaataatattcataatgtaatttctatctagtgtccactaaaggacaaagacacaattaggaaaaatgaccattttgccctccacttagccaaaaagtcataaaatcacttaggggtaatttggtaaattctagaatctcaactatatcaccccgctatacta

SEQ ID NO: 149895 - DNA, 1007 bp, Cannabis sativa
taattatcccaatataaaattagtggtgagtccggaattgttgtgcataatatgcgggagttgtgaaatttgactttgtaggattttgaatttcgaagaagaatggaatgtggaaaggcattactcactgctaactataaatatttattgtttatttaattgaaaaagtactaataataaattgtaggggtgcacgccaaatttatacagtaatagattagctgtaataggcttagcttctgtcaaatattgaagaatatgaatagttgagtaggcttctttttgaaatgacattaattattaacttagtaattaagtattaattttttaattaaaaaaatttataatttcgggttacgggttataacccgaccagaaaaaaatcaaataatcaaatccgaacccgaaacccattggagtctttttcgggttgaacccgacccgaccacacgggtttttggatgatcggtttttttgacggcgggtcggggcgggtagtcaggttttttgggtttgtgggtctaaatatgcacccctagttgtaaataatgaatcaaaaagtgtattttattcaatagaataataagtatttatatacaaaactaggaagactaaataggaaactatgaagaattggaaactaagtaattacaattctaccattaatatacagctaatatatattttaacacttccctcaagctggaacataaatattaattatgcacagcttcaacccgcacactattcaaagccttagtgaaaatacctcctaagtgttctctagtcttcacatatcctaaggttttagcataacccttggcaacaagaccgacctttaagtgagctcttgttccatctagattgactttaaccgtaaacacccatttacacaatatggtccgttttcctaaaggtaaattaaccaagtccaaataacattcgcaagcattcatctattctatcattacagcaagccaactaggatgagacataacttcacgaac

SEQ ID NO: 149896 - DNA, 634 bp, Cannabis sativa
aagggtgctttatgaagcactgagtttaggtgattatggtattgtgtaagtagagtgctaagtgaagtaccgaaattatgtaattacaataatgtatggctagagtggtattcaatgcactgagattatatgggtatgggttaaatgaatgtctacttagtgaaaaggtgaatttaataattatgagtttgtatgattttccttacactgtgttatgaaggtgttcgcgtagacaaactgatatgtatatgcatgctgaatatgtattgatccactgatatgtatattatgttataatgctagtacttactatactattgtctagtagcttttcttgctgagtcattgtgactcacaagtgcttcatggtgcaagtaagcagaatagcagttgtgttcagccatgagtcagaggtctcccatcaatgtacatatcagctgtcgtgtcttgggttctgggatgcaggattgacctctttttctatatttttatatgtaaccttgattttgtattagtcgttttgtaaattaattgtaaaagaatttttgtagcaggggatccccatattccaacagtatttgatttgtaaagttttattttaaatttaattaaaagtttttaattaaaccacact

SEQ ID NO: 149897 - DNA, 577 bp, Cannabis sativa
  modified_base (421)..(421): a, c, t, g, unknown or other
tttttatcctttagtacaattaattcactagtggaagtattggaagtataatttagatcccatctatttagatcccatctaaatttgtgcaatcccatctaaatttgtgcacaatattccacttctagaattaacacttaaagggaaccatcaatcgttagaaaagtcaagattctataattgtaaatcatgttcccagcaatccacattatttgattaagttgtaagaatcatcttctctgagaaactttaaggagtgaatcaaagaaactaataacatgaataggagttcatgataactcaagatttaggccgatctactattgatcatctttatgatatgaattaggtatttatagtaaatgacatgctaataaagacagttttattcatattggtccttgtcatatataatctctantatatacaacaccttcactttgatatcatactacatccataatgcaaactaagattacttgcatcgaagaacaggcatcgttaaactatactagcaaccattgattaaagattcttaaactttaatatgttgctaattgttttattcatagctaag

SEQ ID NO: 149898 - DNA, 509 bp, Cannabis sativa
  modified_base (101)..(101): a, c, t, g, unknown or other
  modified_base (334)..(338): a, c, t, g, unknown or other
actggtctgttccaggccccgttacctgaatcccgagtcaaaatctggatcactatgacgagtctcggtctagtttttgttcaggtcccaggtcccatttntgagttttggttcgggatcgagagtggggtgcggttctaggtcccgacaatggttctgtgtccctagtctggtaccatgtttgggtctgagttcaggttcaggttcgtgtcctgggtccacgtttgggttgggatccgggtccgggtcccaattcgggtctatgtcaaatttggagtccgggtcctggtccggttgcggttcttgatctatgtccaatttcagttatgattcnnnnnccaagtcctagttccagtcctagtcaacttccggttctggttccaattttgggtcacagggtacgggttcgggtccacttttcggtttgggactaggttcaggttcgagtgtgggttcgggtccaaggcttggtcaaaaatccagacaccgactacgggttttgtccaagc

SEQ ID NO: 149899 - DNA, 688 bp, Cannabis sativa
  modified_base (203)..(209): a, c, t, g, unknown or other
  modified_base (656)..(663): a, c, t, g, unknown or other
taattaacaaataaacccaaaaaccttttttcttcacaattaagccattggataaataagacatagtctaatttttgaattataattgattaatcaaaatcaattaactgagtgaagaatttaaccaaaattcaactagtgtggggactatgaacctatataaccaagcttccaataggtagatctagaatttaccaagtaannnnnnnaacttattaatttctccttgtgccactattagaattacactcttagttttatagaacgctctatatgtttcacaatatagatacgctatgaattatctatcgttctaatccaaataatcaaagatcttctatagatgatttacatcaagtaaggataaatttaacgttccacccctcaatgtatttaatccttaaaacacttagcttcctataaataatatttcactaaactaatataattactgaaataagagctcttccatttatctctactaagccaagctcgaaggaaattatcatttcacttctatgtcaagataaaagctatagattttgtatctatgattagcgctcccactcaattgtactatcatgtccccaagatgtatgtgttactcaaaccaattggtaggctttaacgaacaactctaagaacataaataacannnnnnnnatcgaacctaaccatattaggatta

SEQ ID NO: 149900 - DNA, 896 bp, Cannabis sativa
cacagaaaagtttctagtgttaagggttgcattgtcacatgtccctgaacttctctactatatcaatgacatctggcaccgtgttgcaaatcttggcgacgaaattagatacacaacattcatatgtgaactatcgcttgacttccacaacttcattttcgaaaagacatatattatggaaataaaaggaacagatgaagaacacgttaagaacgtacaatataaattaagtgatggtaatatggagggcataactgaatctgtgaacataacaaataaacgagatttggaagaattagaaatgacagattattttaaggtgacagcaaaaatgttggaacttgaactaaaaagcctacctcaaatataagtagaggaaatagtagaagtaatagagattccttcagatgaagaatccattgcgaggaaatgtgaaaagggtccaattagccagattactctccaataccgaagagcaaggacttagatccatccatagcacccaatatcgatgaactagaagacgacatacctgattatcattttgaagtacaaattgatgagttagactctgaatctgagaacacaccagcaccaattccagcagatgtagaaatggaaatagactcgaggaacacctagaagaagaccctgaagaatctgaagccgagtcatgcgtggaggacgaatagtagtctcttttaacttgtcaaattttatccaaggaaaatatttttgttcctattctaataatctagtaactatgtaattagagatctagtacgcttttaaataaataaagatttttcttcaatcaaattcttctcttatgatcgaagtaactcgctacgaaaaaaagtatgagaaagacaatttgcctctacttaggaatctac

SEQ ID NO: 149901 - DNA, 713 bp, Cannabis sativa
  modified_base (536)..(538): a, c, t, g, unknown or other
  modified_base (627)..(649): a, c, t, g, unknown or other
tgaatagccttctgcgagacaaaaacatacgaactgctaatttatgtattgacgagaaaccatgtgagtgcatacgctcatgacgaggctttaacctcgctgcatgaaaaagaaagcgacaacactaaaaatacttagcgtatattatgtgatatacaaactaagtacaaataatatggcgcgtcaagataacaaacaatgaggcctttatcccgctaaaagatgttttgcatgcgaggaagatcttctcgaccccagaaggtgtaaccatcagggttaagacaatactagtcctgagaagctaaaatgacaagcagctgctcgctatcaaagtgatcttggctccctcctcgacgaggcatccctatgagacacgacttaccgtatgtctttaattatgcgctcatctcggcccaataagggcaggatattcatagctgtgtaaaaacctcatttatttggcttgatttgtaatcaattcctataattttagggataatagccataaatgtattttggtcagctttgtaattaannnccactatgcaattataaatagtagcagataagatcaagaaagaggacaaataaaaaacaaactgagaaatctaaataagattgactcgnnnnnnnnnnnnnnnnnnnnnnncaaaaccacgtaaaaattcggtgttcattttttttatttttctatagtttttctgtgttgaatc

SEQ ID NO: 149902 - DNA, 516 bp, Cannabis sativa
  modified_base (484)..(490): a, c, t, g, unknown or other
tcttcttcttcttcttctttgttgcgtgcaagaccaaacccaccaaccgaaaccctagccctcctcttcttcttttcttctctctccccaaccggaactagaccagcccttcttcttgtaccgtcttcttgagaacgtccccgagttcagaaacggagatcttaccgtcgtcgtttgtgtggaattggctgaagactttttggagctcgtcagggttttggaggtagacggatgatgattttgattgaatggcttcgttggtggtggtggccgccatggatgaagcttgaattttagttttgaggtttctctttttaggttttgggaatttgcagtcttcactatttcaacaagtgaacgatgttgaaattgcaagggacacatcgcaagaagaagaagggctggtctggttctggttggggagagagaagaagaagaagggcggttccggttggggacacatcgcaagaagaagaagaagaannnnnnnaagaagaagaagaaaagaaaaaaaga

SEQ ID NO: 149903 - DNA, 1063 bp, Cannabis sativa
  modified_base (132)..(134): a, c, t, g, unknown or other
gtttgacccccttagttagtgcgtaacgacctactccccttttagttgtattgataccagagataataccatttagatcactatagtaatgggtgtgttagagagagatgagatgagttatcagacttagannntaaggcttagggtttgagacttagggttttagggcttgactaatgctctttatatagttgagtttacatccctaatatctctaaaaaataagtaaagtgtactatttacataataaattaataaaatacaaataactaaattgctcctcaaaaatagggaaggtgttgatattttccctttatttttgtggattatttaggtccaattcatggtttgacttgttgtctacaaatgaaacgtgtgcaccgaaacttgccaagccaaaggctagctagccatgcacctatagagtgcatgctggtcagccatatgatgtccaaaagctggccgacctatgctggccaagggcaggccaggggttgctagccaacccccttgaggtggctagtttgtcatttctttgtcccttctaagtactcagaacccttaattgttgaagtgctgagtaaatgatttggccttcttgctgacaagttgtactcccatgtggcattgatattggccacgtggacatgccacatcaaatggacataaattaggataacataatcttaattgattaaataaattaattaattgagattacaaaacaatattatcctagttagtgcagggaccatgggcctatgtaataaagctcttaataagtagttctagaatttaccaagtaaattttctatcttattaattcctcttgactccactataaattcagaattacactcctgattacatagaatgctctattcaccaagaatagatacgctataaattatccattgtttcaatctaaataatcaaagatccactatagatgatttaaatcgagtagtaacaaaccccttcaatgtattttatccttaaatcaattagcttcttataaatgatattttattaaactaatataattacttaaataagagctctt

SEQ ID NO: 149904 - DNA, 585 bp, Cannabis sativa
  modified_base (477)..(494): a, c, t, g, unknown or other
gtgttttacgaaatttttccataataataattttattttctttctgaaaaatattttatttggattccttgtgaaaagttaagcaattttgttttttacggaatcaattctgataaaaattgaggaagttattaattttggaagattggatgccatggctgtctaagcttcgtgcacgcacacaccaggagctttggacaagacgctcatgtgcgcgcgtgcgtggggacagatgttgtctgaagcgcatgccttcggacacgagatgctgcatctcgtgtacacgcatcctgcatgcaccgaggattgccgctcaaccccctgctagctcctccttccgcgcgcgggtatgggcatttgcagtctctcatggctgcaattgtagccaacaccaaaaaatgtgattttcatgggattttttttcccaattttgaatttctgcaattttcaaacctaaaattaaaataaaatattatnnnnnnnnnnnnnnnnnntaaatatcaattttaaattaataacatttagttttaatagattattgttaattttatgatattttgaggtttaaatttaaaaattgattat

SEQ ID NO: 149905 - DNA, 1019 bp, Cannabis sativa
tcaaaggtaaggttttttttttgaaaaaatatatttttcatagatttggatgccaatcattccatgttgttgagattagtggaatttttgtagattttgtgctctttcttgtgataggttgtatatgttggatatgtttcaatggtgtttgtgttttttacagtgttatcgatgcaatatcgataggatatcgatatatttggatgtctgtttgtgtgtttgaacaatgttgtcgacaggttgtcgatataatgttgaccaaacatgaaagtagtttgaccattagatttgtctttgttgttatgtagttttgacctgaaatgtcgacaatttgtcgacggtatgtcgataagttgtcgacaatgagttgtagttgcttcctgtgatagctaagtttgataatgtcgacctcatgtcgacatgatgtcgacgattttggtttgctacaaattatgatccatttttcttggaatatcgacagcatgtcgacagtatgtcatgtcgatagtatgtcgatatgctgtcgacaatgttattttattgcttcttgtgtgataatgtcgacattgtgtcgacaatttctcttgctgaataagtgtgatgatattattgaaatgtcgacagcatgtcgaccaaattatgtggttgctaactgtttgataatgtcgacagaatatcgacatgatgtcgacgttatgtcgaccattttttaattttttggcagtaatattactttgttatttattttttcaaattgctcccagactcataattccagaatccgagcattttattggtcgagtgacttatagaggcaccggaacttttgcgaaaatcaagtctcggtttcaggagttcaacttgaataacatggcgaaggaaagtcatttcggcaacttttggaatgtcatacccccgacattctcctcggtgttatttcaccaacttatgttgcacaagatgaaggttgatgctcaggaggagttgaggatgcggttttacattggtcggaaggagct

SEQ ID NO: 149906 - DNA, 672 bp, Cannabis sativa
cgacaagctctctcctccctcttcgattcttctcaggtagttcaccaccaagcctcgcccatcatcgcttcctccgctgccatttttctctttggtcgttgttcgcatttgttggaggtaatgatgtcgtctactctgcactcagctagaggtaacaacgtggattaagcattgatatttttaatctccatgctctgatttttttagtgatgtttctttgagttacactaatggtattgttgtagtttgaatttgaaattgcataatgagattcttttaatggtaatgttatactacttgaataaaaatattatgattcttttttttttaagctttatactacttgaattaataattttcaactaatctatcattattttacagtggaattggcagactatagtaataggggtaacattcttggcttttgatacctatgattcgccgccacagatagatattaattgatagctttttaatttctattgttactgaattgataacatgcagtagtggttgacctagtttatttttctctccgcaagccattgatggaaagataagagaactttcaaatgttacattgcgtaccagggaatgactttcaaaaggtataaaaaagtaatagtattcttaatatttgtttacagggataattgcggcaaaagtccc

SEQ ID NO: 149907 - DNA, 817 bp, Cannabis sativa
  modified_base (564)..(564): a, c, t, g, unknown or other
taaggacctcgaggcctccgaccagcttgaagctaccattggcaccctgtcggcagaagtgaatcaagaggaaaggggagttcttcggtctgtcttccgtcgactggaagaagagaagaagactaacgaggaggagcttacagctgaggtggcaaggctagaagagaaagttcatgccttagagacagccggtctcgagatcttttatgatttttagaaggctaaccctcaggaaaatttttattacttggacgaagccaaagacatgtatctcgagtactgcgcctcccaagtggcttatggtgaacccgaggcgactgcttctacctctggccagaatgttggtgttcctttcgctcaaacaacagatcctccagctcctatcgacctagaagacccaaaccgagagcctgggactccaactgtttaaatacttctctttttatctttcttttttatataagttttattcggccataaggcctttttctaagacatcatgaccgaccaagcggtctttaaattggaattatttttcatttacagacaacaggctgaccgggnagcttttaatcccagtgttacgtgcttttgttatctttaatgaatttcattctctgtttataatcatcgtacaattgtgtttgttttatctttaccaaatgttttgtacaggtataggttccccccaagtgaccgagcagacttatgactcttggtcactagttttttgacaagtatactttttcatctgttcggggtcttgggttcgaccagaccttttgtacacactgaatggtaaattagcaacatgtta

SEQ ID NO: 149908 - DNA, 645 bp, Cannabis sativa
  modified_base (470)..(470): a, c, t, g, unknown or other
tggaccgagatcatgacccagacccaaacttggacccgcactcgggacccaaacttggacttggaccaaaacatagacccagattaggttccagatctggacacaaacccgaacacagactcggatccggacccaaactcgaacccagactaggatcataaccaaggacttagaccgagaactgaatccagactcagatcgggattggaacttaagactcggccccaacctagaccaagactcaagacgtgaaaccacacccggagcctgatatggacctagactgaaatccggacccgacccaaaaccaaactcgaactcagaatcgcaaatggaactagaaccagacaaggactaggaccaggtcaaggacctaaacccgaacccgaacccagatcaaaacaaaaacagagacctaatcccaaaccgagactaggactcgaacgcgaacctagaccgggacccaaacncacacaataaccgggacctggacccagaatgaggatagggacctgggaaatagaactaggactgggacctagtaccggacccacagccgaacttgaacctacgacccacctcgtgacccggcaccagaaatggaaccagactgggacccgagatagggatccagatttggaccca

SEQ ID NO: 149909 - DNA, 505 bp, Cannabis sativa
gtcaacactatgccgtgaggcacagtgtattcctccgcctcggaaggaatcccagagtcatggctcggggctgcagtgtccatcctacggggccgcttagaaggctcctcctccaccatcttccccttgcgcttgcgctcaagggcggccggttcctcttcttcacattcttcaacttcctcaagaacctcctcctcgtccaccaagacaatagtgcccgaaggggcattggaggaggacctcccgggagtgaccgactgagaagcagcaagaggtggggaagcatcgggactgtgggttccagcaagagtggccaacagttcatccatgggcctggctgctacaacaagaaaataagtcaagtgttagaacattcgtgagaatagtatacacttagcaaaaaagaaataaagctagtcctaccctgactctctaatttggccctagcaaagtcccgaatcatagcactggcttcatcatccccgagaaagctgtccgagggaag

SEQ ID NO: 149910 - DNA, 723 bp, Cannabis sativa
gtatatgtgaaaacctctgatacttatcacatttcttgacaaactcatgggttttcttattaatcgttggtcagcaatatccttctctaatgatctttttagataggcttcgccaacaagcatgatccccacaaaaaccttcatgaatttttctgatgatttcattcgcttctatagggagaacacaccgaagtagaggcatcaaataacctattttataaagtttgccttcaattattgtgtagcgaggcactgaatacaaaagttttcgcgcctcttctttgttagtttgaagttgtacgttgagtagataattgattataggagtcatccatgtaggagagttatctatcatctttatgtcttccgtttaacatatgcttgctcgcttagcatctctaccggaaccaagtttaattcatccaagtcgttctgtgaggccagttttgccaaggtgttagcgttagagttttgttctcttggaatttgctcaattttaaagtaatcgaatctttccaagttcttccgaaccttctttaaatatttttccatttttaagcctttgtcctggtattccccgagaacctagttcacaatcaactgcgaatcactatggcaaatgagatttttgaccttcaacgcctcgactatcttcaagccagcgatcaaggcttcatattcggcctcattttttgatgcgtcaaattgaaatctcaaagcata

SEQ ID NO: 149911 - DNA, 613 bp, Cannabis sativa
  modified_base (582)..(588): a, c, t, g, unknown or other
aataaagatatgaacacagggtttatttttacgtagttttacagttaaaattctgcatagtccacaagtccatcttattcaaatttctgattattttttaggaactctcccgtatgagttttcgtctttttttttatcttgtttgtcactatttattattacatagtggacagttaattgcaaagttgaccggaatatgtttgcaataatcatccctaaaatcatgggatttgattacatatcacgtagtgtaaatacagtttaggattggaaaatcatatagctatgattttcccacttttacttggtcaaaacagtcgtgtattaaacacgactttagctgttgtatctagagatctctcgacagaaacttgattccagtgatcgcaatagcgagctgggaccattcttccttttgaggtcgacgatgtatgtctggtgtcgatcgcggttcttatcctcaaagaattcttcgaggctcatttgaatgctatcttctggctcgccaggattgtaagtctcactaacgctaacaggatgaagttatattgtaacgctctaatgctaaggcacgctacagtnnnnnnncaattatagtgcaatctttgctaat

SEQ ID NO: 149912 - DNA, 730 bp, Cannabis sativa
ttttttttttttgtttttgaggtatttttatagtatttgatatgtcatatacatataaattaggtttttaaatcccatatttaatatttttatttgtttaggcattttatttggaacttatgctggaaattcgctgcagtttgctaccgacgccagaaaaatcaccagagtagttgtcgatgctgaaaaagtcgttggtgatacgaaccacaccaacagttgtgatgaaacccaataccaattatggcagcctctaagaattctcgaaatttggatatggaaccgcgacccaatgcttagttaagcatgaaccatggtatgagggaagacgccacaaacggtggtggaaatccgtttgataagtcaggttgaacgccacaaggaatactccttgataagttcgaatagttctcttaagaactcaagaagaaaacctctcaaaattttattccaaaatattctgatttttcaaagtgtttacacggctttatatagccaacttacaaccaagaaaaaaagaaactaaaagaaagacaattttccaaataaaacaaagacaaaataaaagaaacaaaattaaaaaggaaagttgctaattgccttggaaaacgtggttagcttaatttgggactaaattgagtctactttgatgagaaacacaaatttttgctctccttcagtgttgaccatggtctcctcttgtttgaaaattctgttgactaagttgttg

SEQ ID NO: 149913 - DNA, 693 bp, Cannabis sativa
ctctggttctaggttttttcctagacggatgaccttggtggagtcgaggtcgcacacacttacttcttcagtgtcttccataggttctacagttgtttctgatcccacacgaggatccaactcgtcttcttccattaaacttggttcagcactcctgtgcaccatcaacacagacaagtgcattgtgacgttgtagcattgccttgcctctccctggtttcccatcattgtccccactccgactgcccgagtagggaatttgaggcataagtgctggatggaggtgattgctctgaaatcgaccaaggccggttagccaaggatggcattgtacgctgttgggcaatccactactacgaaagtgcagtatttaaaagtgctctgtagggcgtctgggcacagggtgacaggaagtcacactttccccattaggatcagcgttgtcccgttaaatcctgtgagctgggagccgctgggtgacagatccctattcatgagcctaagtccgtgaaggcttctttgaacaacaagttcacgaagctcccgttatctactaatattcttaccacaattctattggcaatgggagtctctataaccagaggatcatggtgggggaaacgcaccagctttgcatcgtcttctgtgaaggtgatgggttggtccatgagtcggggcctttgtgctgggagt

SEQ ID NO: 149914 - DNA, 868 bp, Cannabis sativa
  modified_base (42)..(51): a, c, t, g, unknown or other
  modified_base (274)..(291): a, c, t, g, unknown or other
  modified_base (399)..(407): a, c, t, g, unknown or other
  modified_base (627)..(630): a, c, t, g, unknown or other
  modified_base (693)..(695): a, c, t, g, unknown or other
  modified_base (782)..(784): a, c, t, g, unknown or other
tattcatttcgaatttgtttacatagtatatcattggatgannnnnnnnnnaatcatctgcttatgatgtcattctattttcttttatgaaattgagtggtgcatataattatattttcgatattctatcctgaaatgatataaatgttgggattttatgccctaaataaaacccattacaatgtattctgatttgttatcaataaaagattagaagtcatttatgtttacatgtagttttcatgtttgtggtttaatatatgtacaaaatctnnnnnnnnnnnnnnnnnnagtcatttacaattacagtgatgtaaacacagtgaaatgtgattgtgattatatgcttcgaaagacaaagtccctgtttcattagtgtattggatttacactgatgtnnnnnnnnncgatgaagtgtacttacactttgcataagtattatgttctttccagaatattggcaaagtatgctagttttgaatgtatggtgtatacattggactggaccgatattgatcttagttaagatattataatcttaccgttgtatctttctgagtcaatatcactagttgatcttagatcaaaatatcttaatcctgatatgcttaggttcgatctcaagannnntattcatgttctttgattttttagttaaacctactttctagtcagggtgatacgtacattttnnnaacatggtagtatgattgagtgggagcgctaaacatagatacgacatctatagcttctatagctacttagaagtgaaacgatgattnnnttcgagcttggcttaatagaggtaaatggaagagctcttgttttagtgattatatttcactaaaatatcatttacaggaagcta

SEQ ID NO: 149915 - DNA, 1030 bp, Cannabis sativa
  modified_base (827)..(851): a, c, t, g, unknown or other
aatcttattcagatttctaattgtgttttttctttagggcctctcttgcataagattttttcgtccctcttttgagtttgtctaccactatttataattacatagtggatagttaattacaaagttgaccagaatatgtttacaacaatcatccctaaaatcatgggatttgaattacatatcatgtactgtaaatgaggtttatgatttgaaaatcgtatagctgtgattttcctgcttttactaggtcaagacaatcgtgtattaaacacatctttaatggttgtatctggagatgtctcgacagaaacttggttatagtgatcccaatagcaagttggggccattctttcttccgaggtcgacgatgtaggtctggcgtcgatcatggttgttacttgtaaagacttcttctatctcgctagggttgtaagtcgtgttaccgttagtgggataaagctatggcaagtcttcccatagcgagacgatcatctcgcttacttactcttgagccgatctgacttttatacttactttgttcattgcatgctaaggaatttcatggttgatatgtgtcgctttctccggtgcctcgctatgcatatttagcaacatattgtttctcgctaacacactaagtgccagtttggacattaattcatcgcctaagaccttacagtcagcgggttacaaatatactctaatacttacgtaattaatgagttattccataaaaagctattacactgactcacattccctttatcttgacacatgtcctccagccgaatttcgagtataacatagagataaatggaagagctctnnnnnnnnnnnnnnnnnnnnnnnnntgaaatatcatttataggaagccaagtgttttaaggataaaatacattgaggggtaaaacagtaaatttatccctagttgatgtaaatcatctatacaggatcttcgattattgcgattagaacgatggttaaattttcatagcgtatctatatcgatgaacatatagagcgttctata

SEQ ID NO: 149916 - DNA, 1214 bp, Cannabis sativa
tacatgacctactcgcacaattcagaagctacggtctcaaacaaattccaagggaagaaaacatgactgcagacgcgttagctcgattggcaagcagtaatgtaagtgttaaagagaacttggtccctatctagttcctcaaagatcctagcattactggcacggaagaaatcaaaatgattgatacttccccaaactggatgacaccaatagtagcctaccttaacactggggaactcccagataatcgaaatgaagctcgaaagatgagaagaaaggttgcacagtatatcatagtagagggaattatttacagaagagggttctccatgccattgctcagatgtgttactcaagaagaagttgaacgacttctacctgaggtgcacgatggatcttgtggaaatcatgccgccgggcagagtttatctaaaaaaattctaaggcatgtttatttctggccgacaatgattgaggattcaaaggcctatgttaagaaatgtgacaaatgccagagatttttgaagatacctcgagctccgcccaatgagttaactcaaatgcaaagtccatggccttttgccatttggggacttgacctcatcggacaattacccaaaggcaagggaggagtgtagtatgcagtggttgcggttgattacttcactaagtggacggaagccacacctctagcaaccattacatctaaaaaagttcaagactttgttgtgaagaacataatctgccaattcggattgtcgtacaaaatagtttcggacaatggcaaacagtttgacagccagtccttcactgatttttgtgcaaaccatggtatcatcaaaagtttctccgcagttgcgcatccctaaggaaatggtcaagttgaagtagtcaacaagaccctgaaggatacattaaagaaaagactcgatgatgctaaaggaagttggtcggaggagcttcctaaagttctatggtcgtaccgaacaactgagaaaacaaaaaccggacagactccatttgccatggcatatggatatgaagctatgctgcctgtagagctcaaacaaccatcccacagaagattgacgtacaactaagaagaaaatcatgtactcttggccgaatcacttgatgaaatcgaagagaagtgaaccacaacaaacttaaagttggtagcccatcaacaaaaagtagctcagtatttcaataaa

SEQ ID NO: 149917 - DNA, 534 bp, Cannabis sativa
tttgatgtcttttaaggaagatttggaatgtcttgatccccaagctgtcttgatgcccattttgtaactttataaatatgtattttgtgtgtgtgtgtgtgtgagagagagagaggtatgtatgtagagaaaaatagggatttttgaaaagagagttgtgtgtgagtttgctatgtggtgagagtaagaagcaaaaggtgtattgggatttgggtggagagattgaactagagcgtagatgtgtaattttgaagtgataagtgaaatatacctctctttgttggtttggtagttttaccaaactgagtaatttttctttgatttgtttctttgttattttgctgcgcttgaagtttatcgtttttcctaacaagtggtatcagagccaaggttcagatcaacacaaaaaatttcaaagatggtgtcttccacacaaagtttgagattgagcatttttatgggaagaataatttaagtttatggcagagcacggtgaaagttgtattggtacaacaagggctcctaaaggcactg

SEQ ID NO: 149918 - DNA, 575 bp, Cannabis sativa
tgataactaatcaaattgtaatggattttatttagggcacaaaacccaacagtctctgacaacgagctccaagaacaagttcctcctccaattgtctccgacgtcaatgctcctcacctataggcaactctcgctaccgcctcttcgagcaaggccattgagaccttgtttgtcgcagcaggggaggttggatctaaatattcccaagcatatggagtcacctgttggcgcaaacttcaaactcttcttttccctgactgggattttctcaatcttaagaatccaaaagagatgctttcaaggagcttggactatcacttcatggtacgttggctttgttattataattatgttattcatttatacctctttcatatttacctattcgtaattctccaggcttcttttgctttcaatctacaactctctgagtggctcgagtatttggagggcgaggctcacaaattgttatctcaatgcaaggttgtgagtgagcaacgagacaacacccaatagaagaatatccgcctaaagcaagaagtcgagaaagtgaaggaggaagctgagaaggcaaa

SEQ ID NO: 149919 - DNA, 844 bp, Cannabis sativa
taagctcggtataaatggtgtaaactggcacgtacttgtcgtgcttcttttgtttattcttgtctttagatgaccccttagagtcgtccttcctctttgagtcggaggcccctggattatcagctttagtcgagacagtacttgttaaaacaatggtgggtttgcttcctgagccagtttttaacaagttcatctctttttgagcttcttccttttgtaaaaacacatgagccctctcattgactcgatgatatttttcactggagggccctataggtcgtcccatagtttgccttcagtagtggagagatcagtagtgattcctgcctgaagggcagtaagctgggtactatcatctaaattccttaatctcgcagcagtcatactaaaacgacttaagtatgccttaagcgtcttaccaggatgttgctttatgttagtgagtgaggatgcttcgggtcgcctatcccttgcagcctgaaactgcttcttaaagtccttagacagttgttcccaggaagggatggaatgatgagtaaacttattgaaccagctgcttgctgctccaactagtgaggtaggaaacaaaatacaacgtagattgtttgtaacattgctaactcgcattatagtactgaaattattcaaatgcgagatcggatcaatggtcccatcatatgacgagatgtgggggtttttgaatccctagggaacaagattattcatgatatctggatggtattgcttgagttcctcatccgagtcatatccagattgtttttcttgctccccgcactactacaaaattgggttttagtgacactctttagtgacacgcacaaaa

SEQ ID NO: 149920 - DNA, 601 bp, Cannabis sativa
ttttgaaaatccaatcggattggacatccaatccaatggataaccgaccaaactgatccaattatcatccaagggcagagctaagattaaattcttaaggaggcaactattaaaattttatagttcaaacaaaatatgttttattataatattgcacatcacaaatattatttataagggcgtgtttgaatataagtgtttaattactagttatattacatagcctagtaattacactatcatatttaaaaatacactgtgtgtggtaattatatatgaatttttatagttttatttagcaaaataattagcatttacatataaaattaatattatttagtaattaacatttaaaataaaaaaaattagtaacaacacaaataattacaataatttttttgtaatatatattattaattaattaattagtcaatattttcttctgttatttaaaaaagaaaagaatcatgtgtaaacgttttagatcattttgtatgaacctacaagataagacttataatttctattaaaaaatagttaataccattttagactctctgttttacaaaagttaccgactgaaccatctgttttgtaaaat

SEQ ID NO: 149921 - DNA, 835 bp, Cannabis sativa
gacttgatggacgacttcaacactgaagctttgaggcgccaactcatcatgcctcaaaacccaatggccaaccaggtacgtatttctcttagctacactacacaacaccaatatattatttgtagtttaatatatacgcaaacccggactcggggtcaggtccgaggtcctgggctgggtttgaggtctggcggtctaggttcgggttcagatctatgtatgggatctggtccgaatgagcatgttatgatatgaaaatgagtcattaaactaacatattaagaatgcgatttaaattatttctaagaaaatgaaataaaattatacaactccacaggtgtgcaccttcttttccagctccaaccagcttgcttttcgtttcaagatgagtcgtagaatacaaggcatcaagaaaagactggcttccatttccaatgataaaagcttctttttggagcaaggacgtcaagaaactactctaactgctagaagagtgagagatgctgacttctatgtacgtaaggaagatgttattgggagggacaaggatagatcgttcatcatcgataatcttttgttggagagttcttatcaagagagtgtttcggtgattgccattgtaggaataggtggtctaggaaaaaccactcttgccaaaagtatttataatgatccgcaagtccaaaaacaatttaagttaaggatttgggtgtgtgtatccgatcaatttgacttcagagtaattattaaaagtattattgagtctgcaaaaggtgaggctatttcgagagacatgggaacagaactgttagtaaagaagcttcgagaagtactt

SEQ ID NO: 149922 - DNA, 524 bp, Cannabis sativa
  modified_base (62)..(63): a, c, t, g, unknown or other
caaggcccctgacaagttctgccactgggtacgccagtgtatcacaacaacttccttcaacnnttttctcaatggaaggaaatttaacagtttgacctcggaatgtggcattagacaaggagatcccctatctccgtacatctttatctaggctattgaaattctctcgcgcatccttgagcacgcccttgataacggtaccattagtggtataaaacttagcagagagggccccaaactctcccatcttttctttgtcgatgatctgatccttttggcagggcaaaccttgaagaagcaagaggtatgtggcattgcttggtacagttttgtgattggtctggtcagagaattaataagctaaaaacttcaattttctttagcggtaacacaagtgatggtatgaaacgagctatcaggcaggctctggtattgaattgtaaaatgggtagcataaactatttaggcctcccgcttttagatcccgccaaaaggatgcgaattttaacttcatccttgataac

SEQ ID NO: 149923 - DNA, 525 bp, Cannabis sativa
cataacacttatccaagctgtaagaaagctttattgctgactatcacatcagtgtaaatctagtgcactgatgaatcatgggacattttttttttgaagcatataatcacaattatgttctattgtgttgttatcactgtaattatgaataactatatgttttagatttaacagaaattgtgtacattaaactataaacatgaaaactacatgtaaatataattgatttctaatcttctattggttacaaataggatagtattgaaattggttttatttagggcgtaaaatcccaacaaactcccacttgcactaacataaaataagaagtgcattttaatcaatctattatcttgatatccagatcaagtgtagtgtatttgactaaactcaaattacaggaattataagactgtggtaagtcactgctttcttcaccattacttcctttctactcataaaacattatgcaacatcatttcctatatgcattactcctttagggatactgaaatctttagtatt

SEQ ID NO: 149924 - DNA, 513 bp, Cannabis sativa
tttctctaacaatgataccctaagtaaaaactaagaagttttgtagcgttttatttttaagagcatgaataatattaagacaattggattttttcaataatatatataaaggaaagcacaaagggagtttaggtggcaacctatttttttttcttcatattttttctattttatcacacattctcttattttatttgagaaatacactacacatataaactaaaagtcccacattatttaaaaatcgtttagatgttatccatgtaggttataagtagtagttttatcattttactttcttttgtctaaaaaatattatttttttatgagtgattgaaaaatttcttacccaataaattttttatatacatatttatttatataagtaattatttattttttaataattaactttgtagtaaatttttttaattttatatacatttatgaaatgaattttagtttaaaaattttattttactattctaaatttttatatgttcgagttaaaaa

SEQ ID NO: 149925 - DNA, 595 bp, Cannabis sativa
  modified_base (274)..(278): a, c, t, g, unknown or other
aagtcataacagggtgagttcctagaaaccctcccactaagagaaggtactgtgactttctgtctaagaacataagtggtattatcctcttcagttttgtcaattcaacagaggcagtggggccatcttatattgaataagattatagaacactttggaatcaagaaaaaaaatatctcctctactttgctactttgttttcagacttagtcattttcttataaaagtagtattggttgaaacaaacactttttttatcttaatgaccataggnnnnnccacccctaatcactttagaataagtattaaacatgcaaaccttaataagtagttctaacttttcttaagttcacaatcaggacatccatgaatctagtaatggtgtacactaagtacataactattccatcattctgaaattttttctatcactagggtattccttagaagatttaggcaactgcttgtaactaatcataatcttttacttccatcaatatgcaaatcgaattttcggtaagataagtttggatacaattcaaaattcaacttaatgatctttgaactgcacatctaccaaatatttatccacccc

SEQ ID NO: 149926 - DNA, 523 bp, Cannabis sativa
ggccccctccggacggttgtcaacaagaaagccttagaaggttttcctggacaaaattcgggagcaagaatctcacagatggtgacattacgaataagcaaataaaagaaaagcaaaaaaaagggtaaaattctagaaagacaaagtcctctctgaacccttgaaggtcatcccgtaaagaaaagatgggcctttggaaaaaaatataatacgcaaaataaaagtgactcaaacaccagaaaagaggagtctaatgtatttcacaaaaactcaagacgaaacttccaagaaaattcaaacatcaaacccagaaaaagcagatgaacagtgaagcatgcaatgaacacgaacaataaagtacgggatgcgaaagacttacataaggctttagaactgggcgttgttgttgattgacagtgaaacatagactgacaatagcaaaggaaggtcaataaaaaacctatggtgtttgaaggttttctggttcgagggtttcttcctctctgaaaaatttgaagaaatt

SEQ ID NO: 149927 - DNA, 591 bp, Cannabis sativa
agtatacgtgcctcgcacgtagtttttgctagtagtcttaaaaatgtaaacaaaatgctattttaagtactttgtattaaattttatttttttcaattatacatctcaaatacaaaatagcttgaaaagtcttaattataataatatatggccacatcttaaaatatacttttattctaaattgatatgtaaaataaaaataatcccaaagtattttatttttattcttctaggtttttaaaagtcatttttttgctacttatgataaactattttttaaagggtaataagaaattaattagttatttcttcataaaattaaaaatttatttttatatcatatataaattgagatatatttttagttaccatccaaaacttatttatagagataattacataaaacactatttttggtaaaaaaaaatatatatattttacgttaattttttttttaatatttttacggttttctacaacaacaaaaaaaatctgcttgaaaataaccagaaaactacataaaagtaataagaaaacaaacaaataagaaaaaatcaacaagataattaccgaactgcctataatcctatt

SEQ ID NO: 149928 - DNA, 543 bp, Cannabis sativa
  modified_base (189)..(194): a, c, t, g, unknown or other
cccgtattcggtactgggaccaaaggctttgctctgggggtccttcgctccagcggagccccaatacgaagggcccttccggcggtcacctgggccttaatgtaggccatctccagttctctcttgaagaggtacttctggtacttatcctctgtcgtggcgatgatgtcatcccggaataccttctcnnnnnncggagccctcacattcgggcagacgactttggaaaggttggagtcatccacccactgatgccccaggatcagcttggccttccgacagtgctccgtcgtgaccaactccccgacatcaagggccttcttgtcatacatggcgaaggtcttggcccgttgaaggaaaagttgagtaggttcggtccgcatataaggggggatcctaacccactccgtgagaagctccggataatccacagcctggaaaccagaggaggagaagaagcggtgacggtattccttcacatgcttctgataattgaaagggatcgggccctcattcaaaggatgggcctggagaccgtaaaaa

SEQ ID NO: 149929 - DNA, 505 bp, Cannabis sativa
caaaaaaaaaaaagagaaaaattataacaaaaaaaaaaaaagaaaaaaaatatagaaatatagcaacatcattttatttcaattttcaagtagtctctatcttttttaaataaaaatatatatattataataataataaaaaaaattgagagagaacttgagtaacattattttattctctctctaaaaaaaagtgtttcaatttagtattttattcaaaaaaaaaaaaatactttgatagaaactttcaatacccgtgaggaacttggagttgagacctttacacttttgagatttttcaatactatttgtgttaatgcctaaaaaaataaataaaagtttggtgcacacacacacaaaactctataattgcaactgaaataacattgatagaaacttttcactctctaccaatattttgaaaatgcttggatgattttgcttggtttgacttgtttattcaactcgattattatttttctctgctcgaattgctagggactag

SEQ ID NO: 149930 - DNA, 705 bp, Cannabis sativa
aatgtatgcaatgttatgcactaaacctaacatttgctatgcagtaggaattgtgagcaggtatcagataaacctaggagaggaaaattggaatgcagttaagcatattctaaagtacttgaaaagtgcaaggcattatgtgttagtctactagggtggtgttttaaatcctgtaggctataccgactcaaatttctaggcttgtcttgatgacaagaagtctacatctgggatggtatttactcttgggcgtggagcagttgtttggagaagtgttaagcaaactgtaatgtcaaactctaccatggaggcggagtacatagataacgccgaggctgctaaggaacttgtctggcttagaaagttcttctcagaacttggtgttgttcctggattggaaaaacatctcgttttactttgtgataacactggagctatatccaacagtaaacatcctcgaagccacaagaaaagcaaacacatagagaggaaatatcatatcataagggaatatgtgacaaaagatgatgtactggtggagaaagtggatacagaagacaacttagttgatccattcaccaaagttttgactataacaacatttgaaataaacaaacggaatttaggattaattgaaatgtactgatagttttatgttagtgcaagtggcagtttgttggcctttgtgccctaaataaaactcta

SEQ ID NO: 149931 - DNA, 774 bp, Cannabis sativa
gggttttgctagtgaagcactaaacaagatcttatgccttatagtaatagagacacagggataaaggagagagagaaacagatttttttacaggcaaataggaaatatgaaggtagttttatgaaaaagaaaattaaaattagaaaaataaataaataaataaagttgatgagagggttgctttagtgagtagtgtgtctaagaattgtcacatctcacctccaatcaatcactttaataaaacaaaaaaaatttaaattttgatgtggggagacacaactactcattattttctattttattattattattattataaaatgatgaaaacataaatatgacaacaatgcataatacatattttatataagactacgaagaattaatctttagaagaacagtataaacatgtcaaagtaagaatgaaagacattgtaaaaataattgacacagtagagaaaaaaaaaagacagtataaaagttatatactccgtgcgactgtataaatgaaaaaggcagtaatgagtgtaaattttccttttttttattaataaactaagaaacaatatcgtttcgcccgattttataatataattgagaattatatatgtttgaagaaattatatattaattaacatgtatcaatatatatatatataaaggaaagcatcgaaagatttaggtggcattctctatcttttttattctattttttctaatttttgagggcttaacattttctccaacaaaaataaaatcaaagtgtgtttgcat

SEQ ID NO: 149932 - DNA, 836 bp, Cannabis sativa
taacaataacaattaagccccttactaagaccctaagacctaaaaaagattttgatatgtaatctaataacaacaattaagccttgtaatgctcccataacttaggaaatcaaaaaattcctttggaaataaacaaaataatgaagtaagcaacgaataatatttttaatgtacccacaatgactaacttttgaggggtttgctctacgcaacgtggctcttctaacaatataacagcacataatccaactaagctcctggtgctcaatatcacaaaaatttccgttgaaaacttttatttctcatgaaaacatagaacaattaatcatattaccctaaataattaggggcacaagctataaaaataagtgcaaaagccttgaaaggcatcaaagccaacaaaattgtggcacaacaaatcttcacaatgtataaaatattaattcggtgactatttgagtaataataattgcttacagaaaataataatagaaataaatataaagacaattatgacttaatgtaaaaccaaagggaaaaataaatataataataatatagtaaagtataaaattaattattaataaaattacttaattaatggacttaataaaattcaataaatattgtttcaaaccaccaaattaaaatatttttataaactacattatgtccatataaattaataaataattaataagattatcaaatctaataaaaccccttaaaataagacacaaaataaaaaatctagcatacctaacttttttatcatgtaataaaataattaattaatgcctatatatagaaactgttatatgtttttaaatctttat

SEQ ID NO: 149933 - DNA, 762 bp, Cannabis sativa
tagagatcaaatctaaacaatcatactcaaatgaaatgagagggagtccaattccaacaaccaatccgatgcaatcatcattagggctacaacttccgcctgtgagatatccttgagtccatctcaatccaaccaagaaagcaagaactgttgctagaaaagttgatacctagaccaaaaatatcaaataaataaattttaataatttaataaataaacgttaaaataataattttaaaattatgacatatagattaataatatagtaaaatttgaagaaagataattgtaataaaacttattttttgaagtcaccaagtgagtaaaataaaaacatacctatataaaatatataaaatttaattagcacactacttaatggtaatattaaaatgagaatttttattaaaacgaaaaatattttgaaatattatattatgaagaaaaaacttatctctactaactgcggaacagatcatgtatcactattacttcacgacaaccttaggataaacacaaaacaaccaccacccactacaagaaatgtcacttttaccagcgcattttgtaaactgcgctgggaaagaggtcaaagttttagcaaacgtacatttgcaatggctaaaatctaactttcactagcgcatttacacgttgggaaaagtcatttttgcccgcgctaatcattttatgttggcaaaaattctaataccaatattgatttgccaaccctcttttaccaacacatcacaagtaaattct

SEQ ID NO: 149934 - DNA, 826 bp, Cannabis sativa
gacccttttatcacctttaacagccccttttcaatctttactttgaacccttcatgatcaagcattgcaacagaaataagattcctcttaagatcaggaacatgtcttacttgcgtcagttctaccacttttccattatcgatatgcaacttaatagttctagctaattccttgtatggagcatgaatggttgtcccctaacttgacagtgccaccatttctggattggtagttagaaaattgactcttatctgggcaagtatggaaagaacatccagagtcaataatccataccttgtccctgtcattcttggtgatcacaagaacacttacactgtcatagccatcactatcatcaccatctgagaccacaccagcatctccatctttcttcgaattgtaaacccttgagaattggacaatcctttctcaaatgtgatggtttgttgcagacataacaccttctcttagtctttgagtttcgtttccctttacttggactaccctgtgccttgtttcccttcttttggatttttcctcgaaccagtaagccatccccagcattttcctctgagttctcagatttcctcttaatctcttttgacattaaagcagtgacaacttcttctaatgtcaaagaactcttaccatacatcatagtgtcgacaaaatgctcatactgttctgaaggcagtgaattcaaaacaataatggcctagtcttcatcttcgatcttgattcctatgttctccaaattaagaacgatcttgttgaaatcatctaaatgatcttcaacacttttccctggttgtaaagaccgcttagt

SEQ ID NO: 149935 - DNA, 556 bp, Cannabis sativa
tctcattctaatccaatatttcataacctagttttgtaactctgtcaaacaactagaaattgagagcctccttctatagatttcgaattctcctctctttctcttcataacttttgaaccctttattgatagagtacatgcccactcatatcaagttgaattgaaaaatatggtatttgtgaaaaaataggataaatagttgaaaaataacaaaattacaagtggtgggcccacatcctatggtcggccacttaaggtctcttttaccatttatttatcaattttttaatgtcaaataattcaaacctaaacttagaatgattcttataaaaagatagtgatggactcaaattaacagttgatgacagcctaatttacactagccttaagtcaaatttgagccttctcattctctctctaaattttgaatccttctctctctcgttctctctttgattttcaaaccctataatgatagagtacatgcccacgcatagcaagttggtactcaatcataatgtgtaagactgtgaagaatacaatcaactgaaggagt

SEQ ID NO: 149936 - DNA, 649 bp, Cannabis sativa
ggaagtgactttatcgaaagtcaagtacataatttttggtataaggtatgctttctttaacttacttttataagaatatttttttatatatatatttaaataatttttaattactgagagtgattttagaataatattgatgtaatacataggatagatttttgtatgctaaggatagatttagttagctaaaaaaatacaaaaaatagtctattggaatttgaatttgtgaccgaaaggatagattgataagtcgttaccaatataccaaaacataaatttatataaattatctactatgattttatttgaatattataagaaacataaaagtaaattagtattgcacatttcattgttgtcgaattaacaaatacattataaacattgattctaatacttaacatcagaattctattagtttattttaagtaaaataacaaaatacataacttaaaaaattataaaaataatactaatatactataaaaaatacaaacacatattataaaatataaaatatcaataaaaagatagataatatacaaacaattagattaatgtaaatgggtatttatttaacttttcaatttaatttttatttatgcttattatatataatttatacttaatttaattatattaataa

SEQ ID NO: 149937 - DNA, 684 bp, Cannabis sativa
  modified_base (531)..(531): a, c, t, g, unknown or other
tagtgtatttctcttatactataagaaccacttacaataaatgaggatgacattaattaatgttaaaattatcttttcatagaaaaaagaaaaagtagttgatcatcaatggatcagagccatcctttgtcttactgtaatggtttattacaagctattaacacaataaaagaacttgctgtgtgcctcaattgatgggatattttgggacgggcacaattttcttatcatccacaacaaacttgcgattcaatctagaaataataatgatgttgggattcgcacctaatcatggtatacaatgtatatggaaatttgattttctgtgatcttttataattaaatttgttctttaaagtaatagttatagctactaaaaaaatgggtatacttttctctaaactttaaaatactcctcttatttttctcaactctctctctctcttcctcctttttctctcaaatcaaactcaaaattcacaaagcctccacgccgagccacctcttccaccgcacaaaacccacgccganccacctcctccaccgcaccgctcgaccaccgtgaccactatgaaaaccgaccacaacgaaaccccacgccgatccacttcctccaccacgaacccatctcgaccgaaccaccgggcccgatgctcatgcgaatgggttggggaagacgaagac

SEQ ID NO: 149938 - DNA, 514 bp, Cannabis sativa
  modified_base (63)..(65): a, c, t, g, unknown or other
cctaaataaaactatcaaagtgattattttatttagcaatctagtccatttaaatatctaaannnaaatgggcttcctatatgcatcttagcccaattgcaaacatatatgctcataaagacaattgatttggatgagcttaatcatctaactaggtttaaaacagatgaaagagaattacaaaattacatgttataaattatttatttaatctattgacaattggactatgattcatttagatcattagatctatcaacaagtaaatcatagaaatttgaattaaataaatgataggtttagtaaaattttttgaataaataattaaataaacaaacaaatatgtaacaacatatggaaagttggttaagatatttctatattgataaatcaaacattattaaaaaatgtcataatttgaattcaaattaggtagttaaaaaatatttaaaaatatgaaatctaacaaaatcttaaaatatctcaattcaaatttaaatatccaactaatttt

SEQ ID NO: 149939 - DNA, 520 bp, Cannabis sativa
agagagagagagagagaatttgtgcgagaaggagaatggaagagagacagaagctgtgtgagaaggagaacagaagagagagggagtgctgtgggaaattagggttaggaaaaaaaatgtaaaagaaagagaaaaagataaaaaaaaaaaaaaaattgttaaattttatttattatttttaattatttttcatattttaaaattatttatttaatattacaataattaaaattatgtaaattaatatgaacatgacatatgtacatttttatacatgtccgctatcatatttggcacttaacaatgtcttttggacaaaaaaataaagaaatttttacatcaaaaatctaatttactcaatttattacaaaaaaacccctacacgcttacatcatcatttttacctttcttcttttttttattccaattataccacttacacatcaattccatgcatgcagtcacgtcattgattgatgacttatatcaatcacatcttacatcattcacttatcttttt

SEQ ID NO: 149940 - DNA, 550 bp, Cannabis sativa
attttgattaaaatgattgtaagtgcctgaaaactacattttctctcaatgtgtccactataaaagtgacgcacaacggtctttgcttcatccctgtgaaatttcacgatttttcgagaagtgaagggtgagattataacagaaaactaaagagtgtaagagtaagaaaagaacttgttaaaacttaacctgaaaagaagaatattttcaatttttaaattaggaggcttttttaaaaaaaattaacaagaaaccagtcctcatattcacgttttagtagtacgaatttactgtgactagtgccaaaaaaattcaagatgggtccgggccacatttcataatgggtagcactatcgaaaatgtgagattttaactattttcattaaaataattgttagtgcatgaaaactacgttttttctcagcctgtccaatagaaaagtgatgcacaaccgccttggttttgtccctatgaaatttcatgatatttggaatgtgtagggtgagattttaacaaaacattaactagtgtaagggtaaggaaaaaactt

SEQ ID NO: 149941 - DNA, 796 bp, Cannabis sativa
acttgggtccgagtccgagtctggatttgagttcaggaactggaatctgactaggacctagacccaggcccggactgggacgcagacccgaatcaaaactcttatcagagtcaggacacgaacctgaaccccgacactgacttggacccaaacccggaccaaggacccagaccgggataggagactcagacctagattggggacccaaactcaaaattagagccagaatcgagagaccaaggactgagactgggacacccaacacctgaccccgatctcgatcccagacccgaacccagacacgaacacggaacgagatgcaagattcgaatcaaaacgagactgggacaaaagatttggatcaggatcttgacccacgactcggggcttggacccaacccgtagtcggtgtgtagatcttgaaatcgttccaagacccgaacctggaaccatttccagactaggacccaaacaaaaactcggacctgagacagaaattggaacaagaaccgaaagcgggacctcggaataggaattggacccggaaccaaaattggatctagacgcgaaactgaacacggacccaaactcagaccgtgatcgaaactcgaacccacaccggaacccgaatccagacttgtgccagtacttgcgacccaggacccatgacccgaaaccttgaccagaacccaaactcgtaccaaaacccagacctaaacctagtcccagacacagacgaagacccggacctagacacggactgaaacccaaacccagacccaaacccacacccaga

SEQ ID NO: 149942 - DNA, 537 bp, Cannabis sativa
ctatcaccgacgaggtatcaccaatgactttttaccaatgacatgtcgccattgataatcaatactgacgaaataaccatcttttactgacaaaattcattctcattaaaaggcatgattcttgtagtgtgttggagtttgacaaaaaaaaaaggagaaaattttaaaaaatacatttcttttatgttttatttacaattttaaggcttagaaattttaattacaaaagtacgttagtaaaattttaaaattacgaaaatacacattgttcagtaaaaagtaaaaaaaataattaaaaaacaacgaaaaatcaatctcaagacaattataaatcaatcataaatgaactataaaataaccaaaaacaactagtgtggtggatttgactcaattgttccctgccacatcagcaatcatctatcctaagtgacatgcaggtagttatttcggttggagcctacaagctacaacaacatataaaaggcagccacttccactagtctaagttgaggctttcctagatttgtttgtacatag

SEQ ID NO: 149943 - DNA, 525 bp, Cannabis sativa
  modified_base (473)..(477): a, c, t, g, unknown or other
ctagcttgaatttgaaaaattcagagcttctggaaaagtgcgtgtcgcgaccatgaaaaagggtcgcgactagctcgaaccctggtcgcgaccactggaactaattttttttctcgtagtttctgtaatgtccaagtcgcgaccagggttgcgtccaccaaaaaaggtcgcgacccaagaacctggtggtcgcgaccactggattcccagtcccgaaaagtaaattttttttcacgtttttcacgattcaactggaaaaatataatgtctggtacttaaataaaaattcaaaatactaaaaatactaacacataaactaaaaaacataattaaaaagtctaaaaaattaaagaaaacacttgggttgcctcccaagagcgctgtctttatcgtcatctagtcggacgctctagagaggcgccagaagaatggcggacttggcttggtcaatttgacctcccaagtagagcttnnnnngctgtccattaactttgaaggttgttggaccttcacctttcaactcca

SEQ ID NO: 149944 - DNA, 564 bp, Cannabis sativa
ttatctaaagatgaccataaaatgaccattgtcgccgcggttagaccaaaaagtaaactttggaacaacatgctcaagagagagctagatgaccttgaagacttctatgaaagagccaacatgtacatcttggtggaggacgtgcatgcgaacttaggagtgggaaaagacgaacaacccaagaagctctgggttgaagggttgcataaaaagaggggattcagatacaaagatgataggaaagacaagaaagtcgaaagagagttagagccactgcctcacgattatactcactacacgaagttaacccactcaagagagcacatcttccttactaatgagcaccgagtacccttcaaaaggccactgcccttgaaaaaagaaagatccagaagggacctaaacaagtactgctgcttccacaaagatgttggacaccccacggaggagtgcaagctgttagaaattattttaccaggatcttagatctaatcacaagtatgttgattaacaacctaaatatgaactttctaaaacgatgaaatattaaacacatataaagtt

SEQ ID NO: 149945 - DNA, 551 bp, Cannabis sativa
tggagagctaacaccagggtacccacttaaagagcattttgagcttttttagccttctaccacgaacatacatgattttggctctgtagacaaacgaccgaaccgtaacccaaaccacagagtttctccaatccgattgcatcattgtatttgtagacccaaataaatggcgaataccaagtcccgtcccattctagacaatattgaagatatttacaaaaatgccactgcatacaaactaagcatcaacatgccaccagcatgcactacaacatgcgccaccacttgaccaccacttggccaacttgtggacatcacctagcttgtaacgtggcatcttggcacgcacgttaccctaggcactatagtgcccaattcctgcgctataacgccagtctagaaataaaacacacacaaaaaaggtaatttcagcacatgggttgtttagaaaatatctcatgggcggtatagcgcccaattcttgtgctatagcgccgatttatcatttttttaaaaaaaaaaaaatcctaattctaaggggattcatctat

SEQ ID NO: 149946 - DNA, 820 bp, Cannabis sativa
aaacgatgatatgtgttgatttggatagtttcatgttggtttatgtgcttatgtgatgaatgtatgtgttgtacaaatttttccacgaattttttttttgtttctcaaaatattttatttggattttttgggaaaaattaagcaattttcctttttacggaactcaattctgataaaaattgaaaaacttatgaattttggaaaaatcgagttgaaagggtgtcgagggaggtgttcatgcgcaccagaccctcggacaaggaggcccaacgcgcgcgtgtgctcagacaacttcttagctgaatgcgcccaacgatgctgcacctcgcccacgatgaccctacgcctgccgaggattctcgcccatgtcactctgttccgcgcgcgtttgagcctagttgcagcctctggaggctgcacgtgcagcctcctgagccgcaacacccctaacccaattttcacgggattttttcccaaattctgaattttccaattttcaaaccctaaatttaaaataaaatatcttttttaaaatatatttgaacttaaatatcatattttaaattaacaatatttatttttcaatagattattattaattttgatattttgaggtttaaatttaaatattgattaatttattttttaaattatggtcagatttaaaatttgttaatttctttaatatttatatataatttaattataagattaaatattgtgatatgtaatatattttaaattaaaagataactttatcttttttatttaaaatattatattaaaattatcttatatgacaaattaaataattaataaa

SEQ ID NO: 149947 - DNA, 552 bp, Cannabis sativa
gaccgatcgattaccgcacggagtcaaccgagtattccgaccgactaccgcacggaggagaaccccaaacccaaaattgttgtaccgagtccgattggggctcgatgggtacccaaaaaataacaaatttcgggtttggggttctcctctgtgcagtagtcggtcaggatactcggttgactccgtgcgataatcgatcggtccaaatggtgggtgggggtcaggcggaatggtgctgaggggtgggcgttgtgggtcggtgtgttcttgcgatggggtatcgcacgggcaaagaaaaaaaagggggaggggtgattatgagaggggtatttttggggtttaagtaaaatagtcatattttaacaattacctttaatttttgtttaccaaacctattatgctttaaaaaatacataaaaattcaaatttccctaagtactattatcactcttaattattactagtggagaaaacaagtgatatgcacgtgcattatataattaaaatagaataaattatataaaattactttaataataacacatttaaaaa

SEQ ID NO: 149948 - DNA, 559 bp, Cannabis sativa
aatttaatagtagggtcgcaaatgttcaacgttccagtagttctttattagcgagccatcaggtcagcaaatttatagactctgagtccaactactacttcgataacatatggacccttcaagtttgagttgaacactcttgttgatgcatctctcatatttgcaaacactcgtcttaacaccaagtctttaacattgaatagtcttttcttgacttttttgttgaagcatcttgtgactcggtgttggtatgctgcgttggtgatttgcgactcagtttgtttttcctcaagtagatccaaggataattttaaaacttcttggttttcttcttgattataaaactctcttctatgagtcgatatattcacttcaataggcaacattgctttcgagccaaatgctagcgagaatggagttgtcccgtggctgttttctcggtagttttgtgggcccaaagcacttgaggtagctcgtcaacccctctgcctttggtagcatcttacttcttcttaatagtatcctttagggttttattaacggcttccacttgtccatt

SEQ ID NO: 149949 - DNA, 1152 bp, Cannabis sativa
tttttttttttaaattttttttactaacttgtgcttctagttgtggttttaattttcagatcttcctttagaaatatggcaatgtacaatcaacaatcctatgatccttattatacctcaccacaagagtaccaatataatccctactatgacacttacacatacaatcaacaatggagagattattctagcacttcctacaatgggattaatcaatatgttcaaccaatttcttactatcatagtcatgttgcaccatatagtgaagagccaactactgctgaggtgattgaaatgttcgcagctgataccttgtagtttcagcaaagttgtcatgaaattatgcagagccttcaacaatctctgcaaaagttagagagtcttgcggagccaatggaaacatctatgagtgagtataaaattcaatgttcaaactctatgccttcacatgtagaaagtagcccaatggagaatgtcaaggccataccaatccaaagtggtacacaacttgaatcactaccacaccaagaagttaatgatttgattccaagtcatgaagtcaaaaattcatcccttgaagagtcatctccaccaaagggtgaatctcctattttagttggtccaccatcaccgaaaaagtcatacaaacaaattgtaccaacttatgtccctcttccaccttttccaagtagattgaaaaaatcaaagaaagaggagcccatcaaggaaactcttccgaaagttgaggtaaaaattccatggcttgaggaaatcaaagaagagcctcattttgctaacactcttgaagagttatgtccaaatgagataaagttgaatggtggtgagaaagtaagtgtgggggagaaggttaatgtagttctccaaagaaagttgtttcctgagacaagtacaattccatgcacaattagtaaaaccaggtttgatcattgcatgatagatttaggagaaattattaatatttccttatttaaatcttggtccatcaagaaaaactcaggtttttattcaatcgactgatcaaactaatgttcatcctttagggatagttaaagatatttttgtgtaggcttatggacttgtcattccaggtgattcttacataattgagatggaagatgagggtgatcccaa

SEQ ID NO: 149950 - DNA, 1664 bp, Cannabis sativa
ctcatggacattattgggctgacctggtagtgcgtttaagaagttgttgaagatttactagtatgtttctcttggcttgccgatatgctgcttgcatgggacgtggcctagatcctccaagagacattgtggtgcgccttggccacgagtctcaacacgagatgacacgggtagtcatttgtgggctagcttgcatgcacgcatgggatggatgcaccatgatggaaggggtcaggggtctagtgtatggaactagtttggtggcttgtctcgagggcctgccaacatgcgtggaggcatggcgcatgttggctagagtggggcatgatagaagcgtttgcacgtcgacttggtgttggcatcttaccacacatgctaccttggtcacaagtgacaaggtgagcgtcggtgttggcatttgccttatcatagtgggaacatatggatagtacgagtatcttagctagaaacccgatgcacggatgcactcttggatgcctgcgagcatgacttggcaggagttgttcgagagacaaaagtgtgcacgaggcacacgatcgcgtgaaaaatgagcccattgttactcagatggttggaaggctgaccttggcttagagaagtcaaggtgcggcacgggtgttccgctacctaaaaaggtgaggccgtgatagttggtatcagagccaagttcatctcagtagaggtgaaccttgttggcctatccgagagaggatgtaggcatgtggaaggatgctagaaagacaactaccacgtacaattgtagagaggcgcaacagaatgtttgaaattcattggcatagtacaagattgaggggatagtccatactgtatgcttagtgcactaggctaagtttgcctgagtgatatcgtaagtcgcaggaggcgcttttgttgaaaaggaagcttgttggcaggcgtatagaagtagtgcagggaccatcagattcttgtgagtcacgacagaggccgagagttgataaccgagatggttcagatggggatagacatgaaatgcttcagtttcgacatgtgtgtgtcaagagggacgtacatggagaccaagggggcagaggtcacaatcgttagaggatggttgtacttacaggtattcgcatgtgacttttatttgatccatatggaagtgccgaggcagttgagtggaatgtgttggcttgttaaagcgccagtgggcgtaagtcacacaaaggcatcgacagagatgcccagttatggaatgaatgcatcaaagaagcctacaaggctgagaagaccgagtgcaagcgttgagatggcgctagagtttgagtggaagctggagggctgtgccagtaatacttagtagtcatatgagcctgcgagtgtcgagaagtgtggtagagtttgcatgatggccagagggccacatcattgaaacttagtgcatcgagggagcttggaagggcgtgatgcaagtgggaatcagttggatggttgagcggacattgcatgcattttgaaatcaacatgggtgctatatgagatagttgactcaagagtcacatattgcgggatgcacttttagattgcatggtgtgcatgaagagttgggtggtcaggcatttgtgtgtgggcatgttgtcgaggacgccaacagatgaagtggg

SEQ ID NO: 149951 - DNA, 508 bp, Cannabis sativa
gtcacatattttcaattttcatatgtattcaattaggaaattatcccccaattaatgtatagatattcaaatttctctatataattaaaaatgtataaattaaatttctatctatatataattaaaaaacttaacagaaatttctatgtacagattaaccaagcatttaatattattttttattaagtaactgattttttctaaattatacaatatatatttttatattagaaatttatttatttaacagaaaatttaaaatttactatacgttatcatataaattttaagctaatactatataaataagtatgatagagaattttaccaatagcctaacaataaaattaataaaaaaaatagaataattatcattaaaattaataatatatatggtaaatagacttataaaatagactttcttattttgtggattttattttttgataataataataataataataacaacaattgttgaccgaggttttcgacaaccaatataata

SEQ ID NO: 149952 - DNA, 1277 bp, Cannabis sativa
  modified_base (30)..(35): a, c, t, g, unknown or other
  modified_base (1215)..(1217): a, c, t, g, unknown or other
taatacaaaattaaaatggatataaaattnnnnnnttagatataaaattaaaattcttacaaaaatagttgggtcggatcaaatcaaatccaatctgaataagtcggatcagatatgattctatccgagtatttgatctagtgggatggggctaggcgaatcattacatgatctagatcgggtcggatcagattcgactcgatccatttagactcctgggtgtcaagtggtctcgagatgcaagagtagtggttgttgtgcacgcttagtcaggttgtcagggcttacaggtttgttgcttccactacttgtaccttcttgctctcagaacttgcaagtgtggtgcctccactacttgtacatccttgccctaaaaacatgtaggagacgtggttgtacccaccttgcatgcatgccttgtccttgtgaccgaaaccttgttgccttctattggagcttattttaccaagatctagatttactgatatgtatgttgattataaatttataatccaacatcctaaacatgactttcctaaaacaatgaaataaatatatataaagttgtagaaaatcttacattggtgacagcataatataatggctccttcctttcaaatctctgatccttgtttctttcagtcgtatattattaccaagatctaaacctggatctccttagatgatggaattcttcacaatctttcatactaagattaagtattaacttgaattgtgtgagcaatcactcagctcactatacagttaaaaaatttgaagaagaaagagagaggaatttgaattctagaagtggctctttattttctcaattgtttgacaaagtagtctaataagcttatgaaaataagagcctatcattatctatttatagaatttcttctaagattaggatttagattatatgaaattaaaaaagataaaataatgacttcataatccctttaagtggtcggccatataagtgggccctataagtttcaattttaccatttatataagaacttatcttttctttcacaaatgtaatattttaattttaatcctataaatgtcaaatctatccatttaataattataattaattattaaataaaattgtcatttaattttatttattaattaaatctaacaaaatttcttaattaacaaataaaccctaagtcctctattaaactcttgcttagtgaaaattcnnnaataagacatagtctaatttaaaattctaattgattaattaaaaccaattaactgagact

SEQ ID NO: 149953 - DNA, 603 bp, Cannabis sativa
ttttgtaaccaactgagcacacgtaggcaacacattagaagcagctctccaaataaaatttctcaccttcggcggaatgtttagagcccagatgttcttccaaaaccagcagaattatctgtagaaaagccattctttaaatcatccaagtaccgataggcactcttgatagtttacagccccgacttttcaaaactccaataccatgagtcttcttgaatggaagaactgagaggaatagagagaatagccatcctatcacgagtcttaaaaagatcttcaagaatctcaacatcccaagcacgctcatcgatcctcataaggctagaaacttttttaccgattaaccccgggtgtgtagactcaatataaggatgatccatctcaacaagccaaggatctgtcaaaatgataactgagagaccagcaccaacactcttacgcacccctgccgccaccaagtctctagcttcgaaaatactacaccagaagaaactcggatttgaaccaatctccgctgtaagaaaagaaccagtaggaaaataacgagccttcaggattcgtgtagccaaagacgaaggatgagttaataaccgccaacct

SEQ ID NO: 149954 - DNA, 534 bp, Cannabis sativa
  modified_base (502)..(509): a, c, t, g, unknown or other
ttagaatgatgaccttgccctaccaattttttatatgggggatcgatcaaattggggcaatacccactaggcgaggtggagctaagtatgcggtcgtagcagtcgacttcttcactaaatggacagaggtcgagccccttgtctccataacctgcaagaaagtccttaactttttcgtcaagaacattatctgtaggattggaacccaatttgatggcgacttgttcactgaattttgcgagaagaatagaattatcaaaagcttctcgttagtatccaggcctcaggcaaattaaaggatactatcaagaagaagttagacgcttccaaaggtagatgggttgacgagctacctcaggtactctggtcccacagaacaaccgagaagatagccacgagacacactcctttctcgctagcatttggcttggaagcagtgctacctgttgaagtgaagatatcaactcacagaaaagtgttttataatcaagaagaaaaccannnnnnnntaaaattgtccttggatctacttga

SEQ ID NO: 149955 - DNA, 615 bp, Cannabis sativa
aatcaaaatcggataagtagacctagcgcaccaggctatttgtgaaccttggagatgggtacttcatttctgagctcctgggttgtcgttttgatactttcaaggttcttgagcttgaggacgaggtctactacctcgttttggaccattttggattcattggtcgaattcatttgtcgaaaccagtgcaccaggttgattttcaacctgggtgctaggctctatttcaagggcctcgagtttgtggtttcctccctgagttttcttaaatcttcattaattttgatgacggaaagaatgcccaaaacacttttttgagaacttgattggaaacagtccaggttgacaatataggtgttgggcctagtgctaggtgccaacctgggcgctgggtcccctttatggcccttcaaaaattctgtttgatccccagaaatagttgaatcttaaactttgctgaaaatagagaagatactcggagaatttctcagaaaatatcattaaaatcaaaaaatatcataaaaggagagctcctctagctcatttccacaaggtaagagcatctctctttagtttctctctctagaaattagagcatctagacttagctatttt

SEQ ID NO: 149956 - DNA, 742 bp, Cannabis sativa
gctcgaggagaactcagcgcgggattggtcagaatcccgtgataagggatgaagagctcaaccgtggaaatgcccaatctgtgggagaaagaacttatgaaacagaaagctgccgcctgagacgccgtctagaagaggcgcagcattgaaacactgagttagaacaagaggcagcctcagccagggcggggtaggggacaaacgctcaaaaccaacctgaacttggagtgagaagaccacgaggtagacctcgtggctcacgaaccaggagacaagaaaaggcccgggaagaaaaacccggggaaaatgagacaccccttgagaatcaggatgaacagccaaaatggaggcaaccggaaactgatgaacgagaaatcccctatgaaaatggggaggatcttggaactcaactgggagaatggagatcacctgctaggaatcaccaacattcttcccaaacccatagagcgaggactcgtacgtaccctaatgggggaaatacgacaaaccgctctcgggaggaaagaacagagcgtgaagaagcaagtgtgacttcaaggcgatctagaacccatagccgatcaactcaaagaggagaaagtactcaacgagctaatgatcgggaaagcatgggaacgaataaattcccaagccacttaaagacaaagtctatgagtaggacgcagtctatgagtaagacgagatctgccagcaattactcccaaccagatctgcgagagca

SEQ ID NO: 149957 - DNA, 709 bp, Cannabis sativa
tgtattctttgtaaatggatgtgtggctttgtggaaaagttgaggtaaaattttgattagaaaagaataaaaattaccgtgaagtgaaatgagtaaaattagtacaatgattgaaaaaataggtgaatataatataggttgaaaaagagaataaaaattaacggcatcaagttaaaagaggcatgttgtgtaatttcctcatttttttttttttttggatatattatagtaaatgacccaaaatcatagtaaatgtatttatttcaaaatttgtagaaaaatgatcattttatattgtttattatttatattgtcttttatcacataaaaaattataatttatttttttatattttttttttttagaattagaagcaaattacttaaatattatggtccatctatattagttttgttaaaatattttttattttaaagttatgtcgatttttttaaaaaaatttataaattattgtgagttgttggtatatttattttgttgtacaatatatttttattttgttatatggtatattattatttttagatgatatttattttttattttactatatataatagtggtatctaattttattcgcataatataaatattttaatgtaggtatataattttagtggcatgttacatatatttaattattatttttatatattttaattgtgtgatatattatttattttaaat

SEQ ID NO: 149958 - DNA, 564 bp, Cannabis sativa
attttatttaagacatctttattattttaattgtggttaagatatcatattagttttgtgttaaaataataacatttattattttaattagggttaaaataacttttgtcttaatatttataggttttgaatttgaatttgaaatctatgactaagttatatttatttaattcaaaattaaaatataccataaaattatatcattttgtcttaattataataaaaacttttattaaataattaagatagttgttaacttaaatttaaatttcaaactagtaactttaatattcattttgaatcaaattaatttgaaaaataaatattccaacaaaaataattaattatttttattaaataataatgttatacctaaaatttggctttataccagaggctgacactgtcctatagaaggaatatgaatcaattctgataatataataatgatgtatcattaaatgcaatttaaaataactcgtccatattaaatataagtttgatagataatattcaaactcgtgggctgcttagtcttatgcgagacaagaataataactatta

SEQ ID NO: 149959 - DNA, 906 bp, Cannabis sativa
aatcaatcacaatgcaacacacaatacacatataaatatataaaaatattttaaattagagtaatttgtagcgtaaatatctaaatttaagtcttagttgcaaataaatacttacgtttaatttttggtggcaataatatctaaattataattctagaatttttataggtacttagccgttaaatgtccaatcaatttttttattagttatttaaattaaattttaaataaaaaataaaaaatgaataacatagaccaattaggaattaccatgtggcaatttaattgacacttgacaggtaggtacctatagaagttctaaaattataacttaaatattattatcgccaaaaattaaacttaggtatttatttataactggaatttaaacttaagtatttatgccgcaaattactctttaaattactatcaatttgggaatagttaacccaataaattgtataaatttagctttaaagttaaagggaataaactcatactttttttttaatattttttttttaaaaaaatttacagtttatattatttcaataatttttatgtgagttactatgtgaattttagttacgtaaaaaaaataacttttaagtgtaaaaaaaaaaaaatccttaatgtaatacaattatcttttttttcttaaaatgaaatacaattatcttttaaacaaccaacaagttacacaagttttcttattttttaacctaaatttacattttcaatataaatacctaatgtttaggtgtttatgcataaaactaaaaacattaagggtgcgtttgaaaataactgtataattactaggcagggtaattactagggtggtaattacactatattttaaaatgcaaggtatgtttggatatgaggtggtaattacatatgaat

SEQ ID NO: 149960 - DNA, 527 bp, Cannabis sativa
  modified_base (235)..(235): a, c, t, g, unknown or other
caccacactccggcaacccacctccggccaccgcccgacctcacgcgctggaccactcgaacctcctagtgccggcgacctcacccccaagcggtgccacttctctcgacgccgttagcttaggatcgcaagtcaaagtttggggtttcaaactttgaatggatttttcgatcacctccggcgtctgtttgacgagaggttttcaccaccaaactcagctcgtcgaggagaacancctacactaaaccatttttcccggtttgctactttttccggtgacatttttgtagctctgcccctttccggcaactttccaatgacatcgtgtaccgttttgacaaatggttggcatgggtgtgatctactcgtcgaggtggtcattttgatatacactactcctatttttggcgacgttttcggtataccaatttttaccgctaccgattgttaatgtgcaccgcttaggtgaggtttcggaaccccaaattttaaatatagtcatattatatgtcgttggactcggtttt

SEQ ID NO: 149961 - DNA, 724 bp, Cannabis sativa
attttttcaaaaccaccataacaattgttgagtacagcctaccagcagcaatgtactcagcctcgacagtagataaggtaatagaattttgtttcttactatgccaagaaaccaaattatttccaaggaagaaacaacctccactcgtacacttacgatcattagcattgccagcccaatctgtgtcaataaaacaagccaagttagaattagtatctttagaataccagattccacaatcaagggtactataaacgtatcatataatcctttttactgcagatacatgagattccattggataactttgatatcgagcacaaactcccacactataactaatatcaggacgactagcaatcaaatacaataaactaccaatcatactacgataaagagtagtgactacctttactccatgctcatctttagttaatttcaacgtggtgctcattggagtacttacatctttagccgattcaaggcaaaactttttgacaaggttcttggcatacttactttaagatacaactgttcttctttccatcggtctcacttgaagacgcaaaaagaaagtaagttcaccaaccatgctcatttcaaattcatttatcatttgactcacaaacacatgcacttcatggttagatgtagacccaaatactatatcatcaacataaatttgagcaatgataaaattagattttatatgtttgatgaaaag

SEQ ID NO: 149962 - DNA, 672 bp, Cannabis sativa
  modified_base (240)..(243): a, c, t, g, unknown or other
atcataatcgagtcaaacgatgataattgtttcataacacttccctcgatcataatcgagtcagacgataataatcgtttcataacactttcctcgatcataatcaagtccaacaataataatcgtttcataacacttccctcgatcataatcgagttaaacgataataatcgtttcacaacattaacctcgattaagattaaatcataacaacatatatcgagatttcaatcttaatcnnnnttgtaacaatcataatattaaccttatacagtatttaatacttttcttacctcggtcaagaaatttagcgtacatgctgacctaagtggaatcaaaacttgacgatccagggtcctatgtcacgacaacaacattcaataaataccttaatccataaatttgggaataaccctacttctcataaccagtgaacattaacttctattagctttaaaataggttttacaacttccaaacaatctataccagatacagaaatcacaccgagctctaaaatcgaccctaacaaaatttgaaaaaaatttcccctgtaagcaaaccggtcgaccggttctgctccaccagaaccaaccggtcgaccggatctggcaggattgcaaccaagtgttttctcctccaaactcaaaccaaaactaaaccaaacctgtc

SEQ ID NO: 149963 - DNA, 574 bp, Cannabis sativa
aaatagcaataaataattttcataattaaaccctatttatatgctaatttctgaatttaaactaagcggtctttacagggaaatttacatagattactaacttttcttaatttattacatttatactgtcagacggtatttttatcttttttactgtgtatgttttttttaatacgacagtttagaatttttttttttttttgaatcaacagtataaacttttttctgcagaagttttttatttttttatacttacctgtatctttataagatttttccacatcaatatttaaagttttttgttttattagagaagttgattggacgtgggatgtgacaaaagtgacaccttctttacttttttttttttaatctaattttattattttttaatatttaatagttattatataaatcccactttctaatatctttttactcatcttcttattctatgttttttccaactagaaacttctccaactcttcaagggcttcacttaaatccttgttctctccttctctttccacttgatttgaagttagaagagggatttggattgtttggctctct

SEQ ID NO: 149964 - DNA, 897 bp, Cannabis sativa
  modified_base (294)..(294): a, c, t, g, unknown or other
atttttcgagcttcatttcgattatctgggagttccccaatgttgaggtaggttgctattggcgtcatccagtttaggaaagtatcaatcatttagatctcctctgtgccaatgatgctaggctcctcgaggaactgggtaagaaccaagttcgatttatcactcacattactactcgccagccgagctaatgcattcgcagtcttgttttcttcccttggaatttgtttgagaccgtagcttttgaattgtgtgagcaagtcgtgtattttgctcaaatatgctatcatcttntctccccgagcctcgtattctccagatacgtgatttaccaccagctgtgaatcactgcagatctcaatatgctcggttttcatctcccgggctagctttagaccggcgacgaaagcttcatattcggcctccttattggatgctttaaatccaaacttgactgcagcgtgcaagtgttgccccctaggtgtgagaagggcgattcctgctccgaataattgatctgtagccaacctgtccacatgtaatttccaagtcgacttgccttcactgttacttggttgaggtatttgtactggctcgggattgcctttcaatatgctttcttccttgcctgtacattctatcacgaaatctgctaaggcctggcctttgattgcttttcggggttggaaagtaatttcatactgacctagttctattccccacttgagtaaccgtccagaagcatatgactttttcaatatttggcgtaacgtttggttagtatatacccaaaagggatgagcttgaaaatagggccttaactttcttgttgctagaatcaggcagtaagtgagtttctccatcaatgggtatcggctctcggcctcaatgagtctt

SEQ ID NO: 149965 - DNA, 952 bp, Cannabis sativa
tatatatatattatttagaaaagatggaggctacttgaaaattaaaataaaataatgttgctcttgttatatatatatatatattatgatttttctttttttcttttttttttgatttactcttttttttattttttttatttattatttttttttttgacaagagacaacatatacaaagaaataaaaatacaaagaaataaaataagattacaaagaaatatattaaaggctctttattacaaaagaaattaatccctctagtaaatgtcatgattggaattctaaaagttcaatgaccaatgaaagttcaaaaagttattttctcaactctcacaactcacaaaaaattgaactttacactcaaaatttttctcaattatatgtgttaacaacaatttctccacaagtttggaaagtgcataaaataactctgaaaatcacaacttggtaacaaaatatagcaaaaatttgactcaaaccgcaattttataatcatgctcaaaaaattttgaaaaaatttaacttaaaaattcaacaagataattaaaattttccaaatgaacgctcaccagagctcaccacccccaactcaaaattagacagtgtcctcaatgtcacaaaatatgaaatgaaaaagatagggaaaagagtacacctgattgacgatatgcatggggcgagagcggagataacttgataatggcaacgcaaaacaaacatagaaaagaaaaacacaaaaacagaaaagataaaaataaacttactaaaaacatagaaataaaacctgatttttcattggtagacagaaatgatttcctcgggtaagtctaatttttcattggtagacaaaaattgatgcattggtgacattttcaggataaagaaaatattcgttctcaatgtcatggacgaagtggtatgcttagttacttgagaaaattttacaaat

SEQ ID NO: 149966 - DNA, 760 bp, Cannabis sativa
  modified_base (89)..(109): a, c, t, g, unknown or other
aatttgagcctgaatgataaactttcacagaaaaataaaaacagtatagaaaataatatgaacacaaaggtttttttacgtggttttgnnnnnnnnnnnnnnnnnnnnncacgagtcaatcttattagatttccgatggtttttcaaaccctttttttatggttttttcgtccctttttcagtattacttgcctctatttataatttcatagtcagggagttaattacaaagttgactgtaatctttacaacaattatcctctgaaattatggggtttgattacatatcacgtagtataaatgaggttaatatttaaatatcacaaaattgtgataaatctgcttttattgggtcaaaatgatcgtgtattaaacatgttttaaatcataacgttctaggatatctcaacaggaactcagtaccaatgaccttgatagcgagctgaagcttttcccctatcttttcgaggttgatgatgtacgcttcgtagcttctttgcttgaaagcataacacttcattttgacaatcacaattcttaataacaaagagtacttcaacagtcatcattcgaatgtcagcttctgctcgagagaactgatttgctaaaaataataacctcactaaaagatatctgaagctgattggtaaaagcatcatgagtatgccttcttatagtgagataagcgcctcgctattacttgtttgggttcgtccgactgttatacttagtttgtatattatacgctaagtattttcac

SEQ ID NO: 149967 - DNA, 912 bp, Cannabis sativa
  modified_base (430)..(437): a, c, t, g, unknown or other
gtaataaaaattgataccagtaaagttcttggacatagtatcacagtaccttatcttagtgggagaatttaaaattctaggccattattatttggatgatactagtgactagcctactatgttattttaaagataagaactttaatttaaaacaaagaaagtaaatctaacacttcatatgaataaaaatgacttatcaggattgtaaggataagatagaaaattttgcaatgtctattcgaaagactcaaagcacaattcctgtttcttatgaaatgttttgtggtatctacattgattatagattcttaagcaagtagtttacattatactagaatgctatgttgatgaattagtctagaaggaacttattgtttccaaactaagatataatgtcacaacaaaaggtccctaagcaccaatggtaagnnnnnnnntgcacacttatgtatgaatttaactagtcttttactgttgagtgggagccatcgaagatgtaatcaaacaaggaatattaggacacaatccaaaaagaatctctaaaagtgacctatatgttagatgatgggggtgtatactagaattcttttatctacaccagcttaaaactatgtattagagatggtggttactcttggggcggagaaagtattctgtctataataatttagttccacaagtgaagctaaataactttgttgctttcgaaaagcactggaaagttattcaaactgaagaaagttcttaactattttatctctattccatttggatagaattagagatgtgtcttgtgtatattcagatgcacttaataataattgtaagcctatggtaagcaactgctttatccaccattatttctttcgtgttcataaaacattatgcaacatcatgtttctatatgtatta

SEQ ID NO: 149968 - DNA, 576 bp, Cannabis sativa
ttagcatagaaatccttaacaatgtttgcaatgtacacattgaaactagtgagagtgttttcccattgatggaattgaataaacttaacaattacatatacccgatgagcatgtaaatcgtaattcctctcactttcaaacttacgggtagcatacaaattccaatcacgctcattattacgataataaaatcgaggacatggagaaagggttgtaggaacgttaccaggagaggattccttcatttcctttggcatcagcagaagcttttgctgctgaagaagatcgagcaggagttggagcagattttgtcaattgaggctctggctcgagttcagtgtcctcaccgtttgaggaaactcccatgtcctctggaatctccttctcggaatggagagaaacatatttgtcagaggagacttccattggttcttcttcttctgaactcaaagaaactgaaggaggattggtcttaaggttcttcttggctggaggcactggcttatcacgacttcgagatgatcgaagttccttctcgacagaggcttgctgggcacgagttcgagtagaaggacc

SEQ ID NO: 149969 - DNA, 990 bp, Cannabis sativa
aatccctaattccactttcacatagtataaatttggcattcaaaatacagataatcatataaattttggaacgaactttccgacgatataaagaacgtccaaactggagtcccgagtcaaaagttatggccaaaacaaaatcgagaaaagggatggctctctgctaggtttttggccgcggccactggattcgaaaaacgcagaaaaccagattttaaggtcttaaaatgctcacttttccatatattcgaaccttaatcaaaccatacccaaaattaacttcttacaaataaaatcatcacaacagagagaaaacaacatcaacaacaactctaaaaattttgattgcacaaataacctaaaatcatgctttaacttagcaaagttcaagctcttgaactagagcttcaaaaccatgcatcccaataaatttccatcagcaacataccattaacaaataacttgaattcaaggcaagagaaaaaccctagaattccctctagagatcaaaaaactaatacaccaaaaatctaagcaacacgaactcaaattaacaaaagaacatcactaccatgcaacatataatcatcttcaacaaactcatgcttttcaacaataaattcagtaattaaaactaagtaaaatcatagaaagctacctcaacttcaatccaaaggtaagctcaaagatccaccaagattaagcttcaaatccaaccaatttctcacccatttcttcaaatttaacttgaaaaactcaagagggttagagagggagagagggtcgggttagagggaaagtgaactagaattttctaattcctttcctcaaaatttagcttttaccaaaataaatcaaataaggtcaaaagaccaaaatgcccctagggccaaataacaagcatattcactcacaaggcataattgtcaattcaccctcatttatttccaaataaaattcagatttcttattatcaaataaaatgccaat

SEQ ID NO: 149970 - DNA, 576 bp, Cannabis sativa
tgtcacaggccaacttgtcaattaaattcgtccaacatttcatcgtttaggaacccataaaagcactagtactcacaaccttcttggtgtggtctcccaccattcttcaacggtggcctctacttcattaagccgcgcaggagtaaccactatgtgattttaaaagcagacactaagctgtaagctttttttacacgttagaccaactgtgtctaaaccacttgctcacaagattaacttctttaagttactctttcagttccacatttgtactatagacaccactccaaggaagaacccaagcaaagtctatgaaacttggtgaatagcaagtgaccaagagacttgcctgaatggtcgcttgaggggtgcccataacgtacagtgtgtaacgccctcaccctcagggacgccacgtgtgtgctttgaaaaacttattattactaatctataaatttttggaaaaacgtgattattttaaatcttgatataaattcaaaataaagactttcattttaaatactgtcgtaatatagggatcccctgtttataaaataaaaatattcttttacaata

SEQ ID NO: 149971 - DNA, 673 bp, Cannabis sativa
attcaacaagaaagttaaatttcgatctttttcagttggagatctaatgcttactgtaaaaagaccaattgtcataactagaaggatgaaaagtaaatctgatgcaaaatagaaaggaccttatgttgttactaaggtcttcctaagaggggtgtatgaactttcaaattcagaaggtcgacgcatttattcgtgtgttaatgggaagttcatcaaaaaattctacacttaaacaaaaaggtatttacccatggtgtagacagcgcacttaaaaagacgagtgtgtaatgaactacgcaaggcttgattccactccaggtacatagacaatctagtttataactaagcccaaccacataaataaaaatcgatctcctaaaaaaaaatacatgcgtaaaaaatgcaaagaactacgaatggcttgatcccttaaaagggtacgtaggcaatctgaacaaaattggatgcagccgcaaaatatataaaaaaaatatagattattcattcctcctaacaaaggagtaaaaattctaaaaggtctaaatgacaaaatactattagtcctcaaggctaataaacacaaaaaagctaacaaaaactaaaactaaaactaaaatgttttaaaagaaaaatcataagatcttcagtccatctggagaaataaagtcaaagc

SEQ ID NO: 149972 - DNA, 1261 bp, Cannabis sativa
  modified_base (121)..(127): a, c, t, g, unknown or other
  modified_base (178)..(178): a, c, t, g, unknown or other
  modified_base (810)..(816): a, c, t, g, unknown or other
  modified_base (923)..(929): a, c, t, g, unknown or other
  modified_base (1214)..(1219): a, c, t, g, unknown or other
aatatacagtttggatccattgacagaaaatggatattaacaacttgtgaaagttatactgtattgttcaatgtattctggaaactaaaaatttataatttctatttggaatctaaaattnnnnnnnaaagacttaaatttataccaaatgagtaattattctagcttggaccaccantactaatctaactctaagtttaggttgtctttagtaagcatatacaagtaggagattctataagattgagaatttatatcatttcgggatagaatatctagaatatagtcatttgtaccattcaatttcataaaagaaaataggatgacatcataaacaaatgatgtataaaccttctatccatgatatactttctaagcaatttctaaatgaaaaatctaagagaaaaaactaaaggacaattttgattaaaataagagtccaacgatgtcccgttaggcgagagtcaaagttattcttattttataaaattcttcattgtttcatattgtaaacactagttgaagttatcatctttggatgtacaactagatgtcgcgtttacaaatacttatttgtcgagatctaacactattttgtttgtctaacggatgaaaatcctttgggatttgtcccattaaaataataaacgaagttagaccaacaatgaagatttgaaattatattacaacattaataacggaaaataacatgattcaatataaatttatacacaattcagaaattattatacatttagcaagtaagaaagacatgtgaaaatacaaaacaaacacatcttaaataatttnnnnnnnttccaacaaactgatacagtgccccggtaggcgagagttaaagatatcattcattgaatagagtagtcaactcatctaaaatgtacaccattctagcaaccttttannnnnnnaaaataagaatccaacgttgtcctggtaggagagagacaatgttattctgattttatgaacttccaccattgtttcatgctttgtaaattcatctctaagtattccccgtaggggagagtctaatagagacgaaaacttacaaaatactttttatacgagatcattacgatgttaaatgcttcaacgaataatctgttggaatatcctttaccaggatctagatttactaacaagtatatttttaacaacctaaatatgaatttctaaaacgatgaaaataaacnnnnnnaaggtatgagaaaccttacattgattgcagcgaaattaaatg

SEQ ID NO: 149973 - DNA, 1184 bp, Cannabis sativa
cgcctcgtacttctcctttatataaactaggaaacatgctgcgcttcgcgagcggctaatttaaaataatttttagttttttaccgataatattaataaaatttcaataatgaacaataaatgaaacacattaatatatcatcaataactattcagttattatttttattagcaattcattataatctttattaatttttttcttacatttgaattttgtaaagaattatatgttaggctaatttagatttttgccctctaaactttgatatgtaccaatcatagtccctaaacttttaggtcgttaaaaattctcctcaaactattaagattattaaatttaaggacgtttatctaattttactaaaaaaaaaatctgacgtagataaaaattttggggtacaatctattacatgttaaagtttcagggcatgatttagtagatattatgggacatgatttgatacatatcaaagttcaaaggacaaaaatcataattagtctatatattatttttttacaatatattaattatcaatattcttagaggttataataagaaataaaatattaaataaaagataaatttatagaggactttatagaaatatatatacatatatataaaaaaaatcatcataccattttttatctaacaaaaaaagcacaataagagatttctttagttatagtgaaaaataatattagaactgaattctcacacaaaataaagatctataaaaaaaaataataaaataaatctataaaatacttttatatgacttcaaaactgttattgttactgtaatttacttgtaattaccattacattcaaagttggtgtcatcaccatcaccgtatctcatcattactgtatattgaaatttatattaggtatgtgaaaattatttagaatttttactgaatttaaattatatatcgtaaagatttttaattaatatttatcaaatttagtgaactcgaataattttttattttctatatgctaatatatatttttttattttttaatctaattttgaaatcgatttaaatctttaaattaaaaaatttatattaaaaattcctaaagtaatttattatcaaagtaatttgaaaggttattaatattaaaaaatgattaaaaaaacttaaaaaaattaaaaaaaaaatagatatgcaac

SEQ ID NO: 149974 - DNA, 518 bp, Cannabis sativa
ttctaggtcgaatactcgcacttgtcgtttctctgaaaattctcttttgtattaatcaaataatatattttggtgttgcgaaattcactctacaacacagccaatgtaaatatcaagccagtcttcaggatctttaaccattggtcgctctgataccatgctgtaaaaccttaacccatagggatgccacgtgtgtgcttttacaaacttattctcaactaatctattagtttaagaaatgtgtggtttaattaaaaactttttgattaaattaaaataaaactttcgtacaaaataccaccataataatgggatcccctgtttataaaattcttttataacaagttataaaactgctattacaaaagtaatgttacatttccaaacatagaaaaggggttgatcctgcttcccggaagtcaagacaccacgactaatatgtacgttgctgggagacctctgactcatggctgaacacagctcctatcttccttacctgcaccacgaagcacccgtga

SEQ ID NO: 149975 - DNA, 650 bp, Cannabis sativa
aaatacaaagttgaattaatggtgcaaatgactattattataaattgatgatgtcaactaggaatttaacatgtcataattctttttccaaagtatttatggttgaattctctaataaattaacatattcttatgccaattagagtttaataaaatcataaaaataataaatttcacatatgatataaataatacacttagagtttaacaaaatctctaaaattgagaaattataaccataatgcctattttttaaaatatgacccataatataagatattcacatataatcataaaatataaataattaaaactaattatcctagtaattcatattcaaagtatgtggcaattacatttttagtttaaattttttcatagtcatatacgttgtagttatttaagattttttgcaaaattttgagacatttagagaaatttaacactataaaaatagggttcaaatagtttcacgtgtgactcttttattataaacaatttctgtagtatacattatttcgaatttcttagaattttacaggatgtgttaaataagtataacatacacgactataaaaaaattagactaaaaaattcttccgaatgccgaaatagataaggggtgatgtcattgtatgcgttgtagaaat

SEQ ID NO: 149976 - DNA, 1134 bp, Cannabis sativa
tatgactgtgagattctttatcatactgggaaggccaattgtagttgatgccctgagtaggaaaggacagagtcagatgaatgcagtgaagcagatttccaaacagctaacagattagatgacccaagctaggattgagtttgtcgtggggcagttggctaacattaccctgcaatctattcttcttttgcgaattaaagaagcccaattgcaagatctaaatttagtgaaatcctgagataaggtttcggctggaaatattagtgactttatagtggataatacgagtatgctacagtttatgaatcgtgtttgtgtgcatatggatgatgatattagaagagaaattctaaattagtctcatacgactccttacttagttcatatgagaataataaagatgtaccaagatcaagttttggtggccaggaatgaagaatgataacacggattatgttgcgaaatgtttatcttgtcagcaagtgaaggctgagcaccaaaggcctgcagggttgctgcagccactgaatctcctggaatggaaatgggaagacattgccatggactttgtggttggattgcctaggactacgtgacagtatgactttgtgtgggtcatagtggacaggtttaccaagccagtgcactttttacctgttcggacgaattactccattgatcagtatgcagaactgtatgttagagaaatagttcatctccatggtgtcccaaagtccattgtttctgatagggatccaaagttcacatcgagattctggaaaagtctacatcgagctatgggtactcaattgaaattcagcacagcatttcatcctcaaacggatggatagtccgaaaggaccattcagatcttagaggacatgcttcgggcatgtgtactagactttgaaggatcatgggtaaagtaccttcccttgatcgagttctcgtacaacaatagctatcagaaaataatcgggatggctccttatgaactattatatggaagaaaatgcagatcacctattcactgggatgaagtaggtgaaagaaagttttcaggacccgcggttgttcagagaacaagtgaggtagctgataaaatcagaccgcgaatgctcacagctcagagta

SEQ ID NO: 149977 - DNA, 957 bp, Cannabis sativa
tggtgctccgttacaatctgcgcgcggtagcgattggctgctgccctgaggtagcggtggcttggcgtggcgatggagaaagtgggagagaggagatgggcctgcggttgagaccaggaaacggttcttggctttggccatacatcaatggaggtgggttttggtttatagggagatgagatagccccgataaagaagaatatgaggaaaatgaaggctttaatgatttcactgagaaagttataatgaggcattgtgttttgtgtcaatatttggtgagaaatttgttagctataaatatagagatgatcatatgaagaccaagaaatttacattagacatatagaatacaaaacaaatttaataactcgtaaattatataaatctattggcattgttgatttgattattcctttgtttccatttcgtaatttgtttggattcgtttgacttgttactattatgcaacaattttcttgaatttatctaagtcaacttcgtcttatcgtcacatgtgtgtgggacggctatttgaacacttgccctttcaattttaaacaaaaggtttgggtaaaataaacaaagaagaaacacataatttatcgaaaataaaattacttataatatatacaaatatatatatatttttttttttgaaaaaattcatcatctttattaattgcaattcatagtgattatatgattaaatatttggagtaacatcactattcctgataatcagcaactaaataggatgctcaagctgagaaatgagcaactctatttgcagaacgtctaataaaattgacataaacctctcgcaagtcatttaacaacatctttcaatcagcaataacactcccaaagtatgaaaccataggaatagagctacgtaacgcttgcaccacagtaagactatcagtttcaatgacaaccttcctccaatctttccgttta

SEQ ID NO: 149978 - DNA, 635 bp, Cannabis sativa
ataaataaaaaaatatattaattttggtgtagttttcaagagttgatttgaaccattggattaaatcaagagctataaatcactatccctattgataagtaaaatacctcatccctaccataatagcccccattatgtatttacttatatgcttagcaaaaataagtatttacatcaattagcttataggagaaataatgttttactacgttatttttttgatggttttagtttattggaaaatctgtaatttatttgttattagagttataaagttattaagttattcaagttattaaattatttgaagtatattgttccaggatctattgttgtcatcgtatctgacaagataagttttcttattttttaattatgactattgttacaatttatcaatatagttattaattaatttgtagtgaaaatattttgctaattttttatataattatttattatgattattattttttttatttctgtattttctttactaattaatgtatattttaattttgcagttaaaatattttctcttttttgagagagtcatcttcacaagcacaagattctctctgtcatgcaactaagacgatcccctcccacccaaagttgttctttgctgggtcttt

SEQ ID NO: 149979 - DNA, 617 bp, Cannabis sativa
  modified_base (26)..(28): a, c, t, g, unknown or other
tttcaaataacatagaaaaaaactannntaaaatttagtatacgtgcttcgcacgtaatttttgctagtatttatacaggggcagactcacgtataagcgacgtgggacagtcaccctttaaaaaaaaaaatcgagaaagaaatatccatgtattttagttagttacaacatatatttgtaataaaagatcacattcataaatataatattaactttggtgtaatggtcaagttatttagcataaaggttagaagacataggttctaagaccacatccaatgtttttaagtctattcagatccgatctaattatatattgaatgttaggttttaccatccgatccgatccagcaatccaatcaatccaacttccaatgaatgttggattggatcggttttatctgttggatgtatttcataaatatttattggtctaatttgggtttattcaatatttagacctagtcttttttggatcaaattggggatccatccaataattttagaggtccagtatgtattagattagattggacctatccaataaaaagaaagagtaaaatttaatattaattttcatatatacatatatattttacgtatagcaatataaaat

SEQ ID NO: 149980 - DNA, 530 bp, Cannabis sativa
cttatagggctaggttccctagacctctgcttttggatacttggcgaggattcctctagttcttttccaagtccagcagggatggctttaggatgcaagtatattcctgctgcccccatggctttttgcatggccagcatcacctcttgcattttttggttttgctctttttgggctgcgatttcagcctcgtgatcggcaaccttttgtcataagagtaccagctctgagtagctgccttcgtcataggtatcgtactcatcaaagtttccttcatactcatcatcaggggttccttcttcttccttagagcccacatttgctcttgacgcgacatcctcatcatttggatcttgagcatcttgaagagggcaaggttgacgtgtgcttcgagtctccaccatttttgttttgttgtaatgtattatctactttcaaacgcttccttcagctctcaatgaaagtactaaaatattgaccgaggttttcggcaatcaatgtaatagtaataattaagagagctataaggg

SEQ ID NO: 149981 - DNA, 1107 bp, Cannabis sativa
acccaacgaaagagtggctatgatatctggtggaccccatattggagggaccactcgaaagaaactaaagcgctatgtcagggccattaaacacgatgaggtgtgggaagtcactcagctttcggctcaaaggccccgactcatggaccagccaattactttcacggaagaagaagcaaagatgttgcgttttcctcaccatgaccccctggtcatagagactcccatcaccaacaagatcgtggccaaaatactgatcggcaatgggagttccgtgaatttattgtttagggaagccttcacggcgatagtcctcacggaccaagatctgtcaccaagcggttcccagctcacaggattcaacggaaccacacttatcccaatgggaaaagtgaggttgccagtcaccctgtgtccggacgacacaccaccccaagagtacttttaagtactgcacattcatggtggtagactgcccaactgcgtacaacacaatcctcggccgactggccctagtagattttggcgcaattacgtccatccggcacctgtgcctgaaattccccactcaggaggctggagtaggcaccgtgagggacaatcaaggtaaggctaggcaattttataatgttgcggcccacttgccagtattgatggtccgtgaaggaatcgagccagaattggcagaagaagatgagttggatccccgtgtgggattcaaaaaaattgtggaacctatagaggacgtcgaggaagggccagtatgcgacctcgacccaaccaaaatcctccggctgggaaagaggctagaagcggagggaaaagaaaaaattagttaaagcactaagggcagccagagacgtttttgcgtggtgccagacatgaccgacataagtccccaggtaataacccatgtccttaatgttaacccggatatgccatcggtttagcagaagcaacgccccctcgatcgatccagtgaaggcagaaggaagctgctctggagaaagaggtggataagctactagctagtggaataatccaggatgtatattacccagaatggttggccaatccagtactggtgcctaaaccaaatgggacatg

SEQ ID NO: 149982 - DNA, 1005 bp, Cannabis sativa
ggcctaacttgtactaataatgttgtagatggttaatgacaatttataaaataaatgcataaacaaaaagatggtcaaaaaatatctatgacaattaagttagtacgttggagcatcatggtacaattggaagtagagatgggattgggaattaagaggcatataatagagagagttgagtgagttaagaagtgagaattttgcaagtgcaagtatagagttgtttgtaataacaaactctttctttcctttgttaagttacgagatttgtaacttattctctgtatgtgtattggagttacacattttacttgaatttgaaatatatgtaacttatgcgcagacaatattaaatcatcaattataattagtataaatgataggagttacatgcttgaattggtgagtgaatttcacttattaatttacgatataaatatttaagtttaattttcaattgtagataaatacttaagtttaatattttatgataataatactgaagttatatttctgaaacttccataagtacttggacattaattgtcaaatcgatggccacgcaacagcccttgaatggtctatatcattagtttttttttattaaaattaatttaaatataccaataaaaaaatgacacgtggttcgtagataatgacttgacacttaatgacaaaatatcactggaaatttaaaaatataacttatgtattatcagtgacgaacccaaaatttttattttgtgggagcttatttattattaaaaaatatttatacctatattataattactcttacgaaatttatttaattttgtgggggttttttctactattttgatctataattatcaaattaaaaagtttacatttaattttttaaaagacagtatttttgttagtagcccccacattaataaaagtgagtcggtccttgtgtattattactataaaaaattaaatttaagtatttttccacaactcaaaattaaacttaaatattta

SEQ ID NO: 149983 - DNA, 805 bp, Cannabis sativa
tgacactttacaattgaccagtgcaattagataccacacacgggttagcctcagacaaaagccaaggtgtgtttaacacttcaatagatgaactagatcctattctcctacggtcaccatctctgagcaactgttgtgacgcaaagacactgtgccaaataaagctcagattaccacctaactcggcctccaagaatgaacatttaggaaaatatcgagccttatatatccgaccaacaagggaatcctggtacagatgtaaccgccaaccttgcttacccaacaacgagagattataatcatgcaaactctgaaaacccatcccaccagatttcttatttttgcatagtttcctccaactaaactagctcacacccttcctacaactcgaactccactaatacttagccataatctttccagatgggaacaagttttcagaggcaataaaaacacagacatagcaaatcttggcaaagcttgcgctacagtttttattagaacctcacgcccagtgatagacaagaaatgaccctcccatctttgaatgcgcttctgcattctatctttcaaaaaccccaagatggcatcctgattttgtcctattgcacaagggaggccaagataagtactatgttcatcagcaagtctcattcgaaggatcccacacaatcggtctcgagtagtattaggcacattaggattgaagaagacagaggacttactgaagttaacttgttgtccagaagtgagctgaaacagctgaagcagatgtaatatattcgaagcctctctatcatttgca

SEQ ID NO: 149984 - DNA, 578 bp, Cannabis sativa
acccagaactgaatccagactcagatccagattggaacttgggactcggacctaacatagaccaagacccagcacgtgaaaccgggaactagaccaaaatcaagatagggacctgggcagcaaaactaggaccgggacctagtacccgactcagacccgaaaccagaaatggaacaagacttggacccaaagattgggatccagatctggcatcagggcttggacaaaactcgtagtcggtgtctggatttgggacccagccctggacccgaacccttataaggacctgaaccaacacccgaacctgaacccaatctcaaacccaaaagtggacacgaacccttaccctgtgacccaaaattggaacaaagccgggaagttgaccgggacttgaactaggacttggacttggaatcataacagaaattggacctagatctagaactgtaaccggacaaggacgcggactcaaaataattcctagactcgaattgtgagccacacccagaccccacccaaacctggactcgggaccgaaactcagacaaaaacatggaaccagactagggacacagaac

SEQ ID NO: 149985 - DNA, 782 bp, Cannabis sativa
tgatccaaaaatagaaaatgattggaaaatataccaaaaaatattccaactgctataaatattatttatatgaatgtctaaatcaactaaattttttctattaattactattaattgtaataaatatttttctctatgactcacataataggagatcacccattaaaataaaacactaagtatatctctcttcatcttctttttttcttatctattttatataattaggttaattaggatttttaccccttaaactttaacatgtaccaaattaggtctctgaacttttaaggtgttaaaaatgctcatgaactattgagattgttggattaaaggattttttttttctaattttagtaaaaaagtttgaaaggacaaaatttagtatatgtcaaaatccgagggacataatctgggaaacatggtttagtataaacaatcactgaaatagtaaaattaaataaaatataatataattttgtctatttattttaattaaatcattgatgaaaattacttgatttaagttgatataaaattaattattaaattaatttttaactttaatctaattttcaaaatttcgaaatatctaatttatataataaatgcatttaaaaaaaattatatataaaaatgattattaaaatgaaataaaatatactttaaaattattctaacttaagtttatctgaaattgaatttttttaacttaaatatgattttctatttaattaaatttattaaagaaattattacatagaaaatataaaataacattt

SEQ ID NO: 149986 - DNA, 979 bp, Cannabis sativa
  modified_base (306)..(307): a, c, t, g, unknown or other
  modified_base (941)..(952): a, c, t, g, unknown or other
gccagggtggaacttggagctttcggatggagctaggtgaagtcaacaagaagctttttactgctcagaagaaaataaccgagttgactaaggatcgaggcttctaacccacttgaagagaccatgaagaccttatctgcagaagtgaacagccttcaagatgaaagaacatccgttcgagcactccttcgtcggcttgaagaggagaagaagtttaaggaggatgagcttacggcggaggtgacgaggctgagagaaaaagtccatgccttagagatagctggtctcgagctcttttatgacttnnggaaggctaaccctcaggccaactttgattacttgggtgaaaccaaagatatgtatctcaagttctgtgcttcccaagtggtttgtggtgaaactgaggcggttgcttctacctccggccaaaatactgatacacctcccattcaaacaacagatcctccagctcctactagcccagaagatccaaaccaagagcttgggactccagctgtttaaatacttcttcttttatccttcttttttttctatatatcttatttggccataaggtcttttttaagacatcatgaccggccaagcggtctttaaacttggaattatttttcattttacagaaaacgggctgatcggtcagcttttaatcccggtattacgtgcttttgttatatttaatggatttcattctctgtttataatcatcgtgcaattgtggttgttttacctttaccaaatgctttgtacaggtataggtgccccctaagtgaccgagcagacttatgacccttggtcacttgtttcttacaagtatacttttttatctgttcaggattttgggttcgaccaaaccttttatgagcactggatgataaattagcaacatgttaataattttgactcaatttgaattttgaaannnnnnnnnnnnttcatttattgatcgaaaatgtgtttg

SEQ ID NO: 149987 - DNA, 525 bp, Cannabis sativa
aagacagtaacgggacacactcctttctcgctagcatttggctcggaagcgatgctgcttgttgaagtgaatatattgactcatagaagagatttttacaatcaagaagaaaactagaaacttttaaaattgttcttggatctacttgagggaaaacaaactgagtcacaagttaccgacactgcataccaacaccgagtcacgagatacttcaacaaaagagtcaagaaaagattattcaatgtttgagatttggtgttaagatgagtctttgtaaatacgagagatgcatcagcaggagtgttcaacccgaacagggaggatccatatgtcatcaaagcagtagttggagtcgtagtcaataaattggctcaacctgatggctcgctaataaaaactactagaacgcagaacatttgcaaccctactatcaataaataaatgatgtaactcgcattacttatgtaagctttaaatttagtaatgaataaagagaatcatttatattaagtaattacaaatttt

SEQ ID NO: 149988 - DNA, 1142 bp, Cannabis sativa
caccatgccacactggaaacatgccttggctcgacattcaccctgatggtgcttcttacatttaagacactcgggataagatcagaatgaagatgtgcgaccctgacggccacctctatttctccaaaactatctattaccccctaatgttccgaaagcttcagccttctgtttgtgatcggggttgccaatgtcggtccccttactgacattaccactagcaggagggtttgatgccgtgacgacatcctttgcagtttgctcttgtactacatgttgctcagcctcctcagctatcaaggctagctctaccactttcttgtacaaagtgtcatgtaaattggtaattttcaagtcccgtctgatcgtggcgttctgtcctctcaaatatttctgtttcctggtgaaatctatgggcaccaaattaccagcaaacttagacaaccgatcaaactctagagtgtactcggccacagatatcttcccctgagtaagcttcacaaattcttccatgtgtgaagttctcatagcaatattataaaatttttcctcaaataaacgcttgaattcttcccaagtcattgtactgacgtctcgggtctgtcccacagtattaaccaaatgtgggcacgatcttacaacatgaaggctgcacaatttactctcttaattcccatgaccctcatattatcaaggatacgggtaatagtactcatctactgctcgaccttaattatgtcaatacctccgagaaaagtttgaggttccagcttcacaaaccgctcaaatataaaatctctatgcggcattataaacccctggttacccaccactagcataggtgctagtggtaacacttgatcaacaggggcaatcggtgtcgattgccttaatcgacgcaacgcttccttttgacgaagtataatacctcgcatttcttgaaacgtctacagccagtctggaagaggattagcattgccgaccccacattatcccccaaattctgcagaggttgaggcggtgtcgatggattggtttggtcaaccccacggtctacttgctcgccatgtggtctagatgattgcagagggtccattactagttcccctgtaatcaacaaccccagcgagttaagcaccaat

SEQ ID NO: 149989 - DNA, 516 bp, Cannabis sativa
tgagggagtcttgtaatgcagcctacccattttgtagcacagtgatagcagcccacatttctgttgttgcttgttccattgccctgatgcgatcctccagttgaggcgcacctgatgtttcggtagcggcgtctctcctctcgatcgcagctaccttggccaacaagttagcataatcttgagccaatatggcaacttgttgttgtgtcgtttttggccctgagttctgatttctagaggttagatccctgaccctctcgtctaggccatctagttcccctatgcgcttctcaagctcttgaattctttgagtattgctcaccattatgagcgtgttaccaagcttccctttctcttggctctgataccaactgtcacaggctgtctatttggacactcccaagtaggtggaacgtgctgcacttgctggcatactgagctagcaagtcagcctaaacgcgcctgcaggcaaacaagttcaaaggttaggcacgatacatgtctcgcacatgttga

SEQ ID NO: 149990 - DNA, 867 bp, Cannabis sativa
attttgtagtatttctttatgttgtaggttgtgaggtcaatttgtaaggatccgacttatttggtgttgatcggtttctagcaagctcgaggtatatatttactaatttttattattaattaattatgaacgcttagtagagcttgaatatcttaaatattcatctgtagtgaagtaggttctacaatatattgtaatctggccagatagatggatgaaataatatgcatgttagatgagtttgaatattttaaatattcatccatagtgaagtaggttattgaatacatgtacttccgtcggatggatggtaaattttatattgctaaatgttattgtaattattttatattgtttgaattgtattttgttgttattaataggttttaatttttcgaaaacattcaattatagtcgttatgctgccaaaattttggtagaataaggataaaattatttgagtttaatttcacttaaacttggttgttaggattttatcgaaactgactttatcggaacatttagccgctttggtataaggtatgctttctttaacctacctttataagaacattttatatatatttttatatatatatatttagatattaaatactttgagtaattttagaataatattgatgtaataggatagatattgttgagtgctaaggatagatatagtaagctaaaaaaaatacaaaaaagggtctattggaatttgaacttgtgaccaaaagaatacatagataagtctttaccaatataccaaaacacaatctttaaataaattaactactattgtaacgccctaaataattaggcacgctacccaaaaatacttatgaaaccctaatcccctaaccg

SEQ ID NO: 149991 - DNA, 889 bp, Cannabis sativa
  modified_base (211)..(218): a, c, t, g, unknown or other
  modified_base (324)..(348): a, c, t, g, unknown or other
  modified_base (623)..(624): a, c, t, g, unknown or other
gcagttcggtaatagcctgatcctcgttatttgtattaactcaagaacaaggagaaaggttccttttcttatagctcttacaacaatatctttgaataagaattctcagataatatcttgtcggtaaaatctctcgacccttttcccagtgaacatgcatcactatttatagggctatgaggttgaagaggaagtatttcccttctcgttnnnnnnnntataagcagaaagattgcataatatatacagaatacactgatcgtgggatttggatagctttccatatctctgcaatctgatccccaagttatagggatttctttnnnnnnnnnnnnnnnnnnnnnnnnnttcgctaagtgttggtcgctctgcacgaattgctgattgctttgcttcaggcatgcatacgaggcatcctgttcgaactatattctcctagcagatacttgaagtcatttccacgtgtgaccatcatgtgatgccacattagagtgcaaaaattgggataacatttgccccccaagtctgtacgggactgccgaagttgcgtgtagacttcatctgagctgcttctacatttggatgggtgacacgtgtaaagcgcgtctgttcgcgactcgatnngaggctgactgggcgtcccttcagctttcggctaataaatgctctgacaaataatatttcaaaatcgcattttctctcaccacggctgacggctgcacttgattatttttgatttcccatattcacttttaagggagaactgaggggtttgaggttcttttgaaatgattaccccttttcgttatttgcctataaatacagtgagcatttgtacacaaactcatttttaccatccttcttcgctaagtaagttcagagcgaaaag

SEQ ID NO: 149992 - DNA, 588 bp, Cannabis sativa
  modified_base (46)..(62): a, c, t, g, unknown or other
tttattccattccattcctattcttattcccattcccattcctatnnnnnnnnnnnnnnnnntcccaaccaaacgcctcctaaaagaattagcaataaaaataatgactgcattctcttaaggttgagatttttttctaaaacaaagacaagacattatgaaccttaagtcgatgcaaaaattaaggactaagaacaatatatacattaaacagtacagatccctaaggatttccttagatagataaaatgaaccgagttaagagctttagcaaaaatatgtgctatttgcttgctagtttcaacatattctaagacaagtttttcatttttcacaagctctctaataaagtgatgacgaatgtttatgtgctttctacgagactgttgaacaaggtttttttgaaatatttatagcactagtattatcaaagaaaatagttaaagttttcaaatcaaactaataatctgccatcatttgtttcatctataacaatttggtacagaaacaacccgttgcaatatactcagcctctgcactggagagagagattgatttcttgcttcttgttgttgttgggttttatgc

SEQ ID NO: 149993 - DNA, 527 bp, Cannabis sativa
aaaaattaagtaaattatgtaggcaataaggaattaaattgaaacggacacttagtaaaaatttatttaaaaaataattaaatagtaagaaaaattgagatgtcaataaataagaaaaaaatttcataaagttcaccatgtcacttttatttgtcattttctctatataattatattatataatatataatgaatataaaaatttaaataatatatgcaagttgttagtacaatctatctattatctatatatatctataaaggaaaattttaaagaaagtgatgtggcatcatatattaattataacggtaaattgcttaaattttattagaacttttttatttttaaagattgaaaatcttcctcaaaaattaaatagaatttgtaatactacttccaatagttatccaaattagagacattgtggttttatttcttattgagattaatatgaaatgagattcagataatttatatttatatatatatatataaacaacaaaaaatcaaaatagaagatcaaaat

SEQ ID NO: 149994 - DNA, 686 bp, Cannabis sativa
agttatttaagttcgaaatgacctcctcaattaaatagagattaaattaaatcattaacccaaaaagacatgctctagcaataatcatttatatttagtctaaactagagtaagtatatataacaagatattttaagtctgtaattatatgtatagttatttttaacaacttttgttataacttagttggattaagttatctttgtgtataagtataactatttatgtataatctgtaattaattaacttattatctttttgttttaacaagatattttaagtctgtaattaattaagtataagaacattttctttgcagttaatcaagatagaaatattatgttctttctcgagctctcttgatcatttctcacatggtatcacagtaggttttcaatttattttttctataatttttgttaattctaaatttaacatctttaaattgacaagaatattttataaaattaattattaatttcagctaaattgtattttttattttcatatattagtatttaattgattaatttatataagatatgaaaaatgattatcttttcttttctatacttgaaatgtttgtcacaagggtaagttttatgaataaatcaatttttatctttctagatgtattattctgatcctatatgagtttcctaattagtttgatcagatttcttgt

SEQ ID NO: 149995 - DNA, 546 bp, Cannabis sativa
aagtaaaggcttactgaaccgcgaatcgagcttgtgttagacgaagaatgtatatatcttggcagtctttggtaaataacctaatggctctgataccaaaaattgtaacgccctactgcttaggcacgctacaatgactttctaattacttttcttacctttgctaatcaaagggtttcttaaaaaacgtgttaactttaaactttttatttaaattttaaacctttataactttatacgtatatccataaaaaaatttggatcctgcttttaaaacttatatttataatcaagatacactttacaaaacatgtcgcacaacgactacaacatgaagcccatgtcgtcccaagactaaattctgtaggtcaaactacttgacatgtacaattatccctgagctttggactcatgattgctcagccttagcctgtccattacctccacatgcaaacaatatatgtgagtcaacagactcagtaagaaaaccatatccacataatatattactgacctgtactaaggcacccatacacctatccataa

SEQ ID NO: 149996 - DNA, 1817 bp, Cannabis sativa
taaattagccttatcagctatgtttctgctcgcaagtcgggctaaggcatcaacagttgtgttttcttctcttggaattttcctgagagtgttactcttaaattgtgcgagcagatcatgtattttgcttaaataggctatcatttttccctcagccctcgtactctctgggcatatgatttactacaaactgtgaatcactacagatctcgatgtgttcagcgtgcaaatcccaagcaagttttaggccagcaatgagggcttcgtactctgcttcattcttggaagatttgaatcctaatttgactgccccgtgcaggtgttgcccctaggtgtgacaagggaaattcctacaccagatagttgatttgttgttgaccagtccacgtgtaatttccaagtaggtctgtcttcattattatttttctggaattcttgtactggctctcggttgtcctttggactacttttttatttgcctgtgcactcaactacaaagtttgccaaagcctatcctttgactactattcagggttgaaagattatttcttactgacccaactctactgcccatttgagtaaccatccagaagtgtcgggtttttgtaatacttggtgtaatggttggtcagtgtatacccaaacaggatgagccttgaagtagggccttaacttccttgttgctaagattaggcagtaagtaagcttttctatcaatgggtatcgtccatcagcttccatgagttgttttctgatatattagactggatgctggaggttgttttaatctttcatcaacacgacacttacaacatattatttaacagctaagtatattactaactcttctttgtccaagggttttgacagtacaggaggtttcgcaagttgtctttttagttcttaaaaggcattctcgcattcctccgtccattcaaatttcttattacctcgatggatgttatagaaaggaacacacttgtctacctttgaaacaaatctactgagtgtagctatccgaccagttgagctttggactttagtttttgttggccatttcatatccagaagggcttgaattttctctggattggcttcgatacctcgagcattaacaataaaaccaagaaacttactcgagttgactccaaaggagcactttaagggattaagtttcatgttgtattttctaaggattttgaaacattcgtctaggtcatttatatgcccccagccttcttggatttgacgagaatgtcatccacttatattttaatattttgtccgatctggtctttaaacatttgattcacaacctttggtaggtagcaccagcattctttagaccaaacgacatgactttgtaacattacatacccatatttgttcaaaaactcatacgttccttgtctagtggatgcattcttatttgattataccacaaataggcgtccataaagcttaggatctcgtgtcgggctgttgcatccacgagctaatctattcttggaagtggaaaacagtttttggagcacgccttgttgagatcagtgaaataaatacatacttgccattttttgttggacttgggtaccagtacagggttagctacccaagccaggtagaaagcttcgatgatgaactcgttattacgtagcttttttcctcttcttttaatgcttgtgctcgttctttgtctaatagtcttcttttttttttttgaacattacaaaagtttggatcaatatttagggcatgagatattacagaaggatcgataccgaccatgtcctcatgtgactaggcaaaaatatcta

SEQ ID NO: 149997 - DNA, 501 bp, Cannabis sativa
acaattagtttccaccgaaagagcgaaagagcaaactgtgtcaataaatgggcagcagtattaacagatctaaagacatttgcgatttgtgatctagaaaatttagatactaaaagcgaaatattattcaaaagacaataaaagttgtatacactgataccatattagagaatgtaaacttaattttatttatgaaataaaatggtatatatacaagtgtaccgaacggaattattttccaagctgaacaaataaagaagaacaacttctataactaacttctatctaacttaaaataatgaactcttattagtttccctttttttaattatggttattaataaattattaattataataaatactaattaaaaatttctataacaataactaaatctatatgtgaatttaaattttaattcaaacaatttataattttggtatagattttaattctaaattattagatatttaattttgataaatataggggagttaccc

SEQ ID NO: 149998 - DNA, 885 bp, Cannabis sativa
  modified_base (842)..(845): a, c, t, g, unknown or other
aatcatcttacccttaactcgactttcagatttaaaatattgctcccactcctacaaaagaaatgaaaacaaaaatcagcatagacatattgtaaactattatgcaaacagatttaacaaaaaaatcacttttctgattatacatcataaactaatacgtatacagattttaccaaaactaaaccacaaaatcaaataatccaaacatttcactgtctaaaaagtactgcattaagctttatcccaaatcccaaaaatgagcttgatttcttcataatcaataaacaaaacaaaacacatatggcattttaatcttcaataaatataacacaaactagattcattttaaaatataatatgacctaaatctagtttatgttaaaaaaagtataaaaaaaatgaatctaactgtataccataaaaatacaatatacgaattatatacaaactgaaaacaaaataaactaaaaaactaaaatagaacaatcacaaaaacaaattaatatttgaaatatatatactataatttattgaaaaatcaaaaaaaaatataaatccataaaaaaccctaacacaaacaaaataaacaaaattaaaaaaaaacacatgcaaatacaaaagtcgaaaaccgaaaaacaaaaaaaaaacaaaaacaaaaccataaaccataaatccatcaaaacaaatattaaatcaaaaaataaaccaaaaaaattacaataaaatagaaattatatacaccttaataatatctggaactccaatctccaaatcgtcactgacctgcgatccggttgtcatcaacttagaatccaggaagaagatataccaaagactgcgtnnnnaaccagatatgggcactacgagtttttggtaatgtcattc

SEQ ID NO: 149999 - DNA, 1475 bp, Cannabis sativa
  modified_base (220)..(223): a, c, t, g, unknown or other
  modified_base (927)..(929): a, c, t, g, unknown or other
attaaaataaatattattttcactaaaataatatatttttttccttaagaataatattacatttaacgaattaatatacttttatcaaataaaattagatagtaaatactatctaattatacaatttataattttcataattattcaaaataataatttctattaattactattttgcccttaagaatttatttatcatagaaattaattctcactcaannnnactcatcaaataaaaccttctcctgtacagtgttgtatagagatgacttgggaaccctgaacctatattttgaagttccaataaacacttgattattatcaatctcatcaatagaataatcaagtttatctattccattattactctactataaatatggaattggactctttgacaatacataattatatttacagaatgtaatcaatataagtagtcgccttccaattattaattcataattagagttggtcaaaattaccattttacctttctaattatctcgtgactccttatgtactattaattcaatgtgaacagttaatctataacttatgatagatttaaatccaattgttagcattcccagaattaacaatataagagaattattattcgatctgttaggaaagctggaattccattattgtataatatgttcccatgcactcttgttattaagctctcaaaacaaaagttgcaagaatcatcttctctgagaaactttaatgagtgaatcaaagaactcaatgaacataaataggagttatttatactcaggattcagattgatctactaatgatcatcgttgtgatatgaataattttttcatggtaaacgacacattaatgaaagatgttattacatatcggtccactcatgcataattaaattctgcacaacatatttactacatgtctannnacatatgtgatctgaatcaaaatcttccatattaaagattctttttactacaatacactaccgattagttttattcatatcgtataatcttaattctctagtacatccttacaagattatatcttctccatatgaataaagaatttttagatatttattaattatacttctataattaatgtattcatttatcttataattgtatttcatatattttgtatatattatccattaattacttgtttttatggcataaatctcaacaacttttactttgacattattcacttttgagttctagccctggtattatcgtagtaagagcttatttctagagctctatgtttttgagaatgaaggaaattggaattcgagatgttttgatgctcgagcagcttcaaattttgagcgtccttagaatttgggtggcttcaaggatagaggaatagaactcgacatgctctaggacctgagcgtcgtcgagatctgggtagcttcaaagtctgagctagcgataagatgttgagaatattttaccaggatcta

SEQ ID NO: 150000 - DNA, 722 bp, Cannabis sativa
ttttatggaaaatatagaaagagagaagactcagagagtcagacctagataatagataagataggagaataggagatgagagagcgtaaaagaaggtcagtaaaaattttgatttattttttgataaattggaagttggacgacaaatgagagcgaatagaatattttatttattattattacttttattgtatttcttaaatattaatatttccaaaataataatatatattatataatctaaaagtaaaaatagtaaaaacgctatctatatttatataaagtaataaatgattaaatgatcggttttggtttttttggtcggtttggtactgaaaaaaaaaactgaccgcccagtggcggttttaactattggcgatttttttagttttcgattttggcagtttcagtttcagcggtgttagacaggtcggtttgagcagtttttttagtattctggatttcatgctcagccctaattattgtagtcgatctttcatagaacgaaagctgtcaaagctaattcttcttcctccactgtgaatgatgcttttgcgtcccattcttcatcacttgccttttttgcatttgatgtggcggcattgccctctgtaattttcttcttgaaccagtaacttttagccatgtggccatactttccacagttgtagcattttccatcaaatttattgttattctttgattgaccaccccgtttgtct

SEQ ID NO: 150001 - DNA, 554 bp, Cannabis sativa
  modified_base (524)..(528): a, c, t, g, unknown or other
ttatgttgcattgttcacatgattgatttcatgattatatgtttaatgtataaactctattaagtccataacatatagttattcatggttatagtgttgtccacagtaaaattaatcatgattatatgttcaaaagtttaagtccgatgatttgtcagtatacttgatttagactgacatgataatcaatgataaagtatacttacacattggataagtgttatatcttttccaaggtattggcaaagtatgttagtatctgatgtatagagtatacatcatattggaccgatattgaacttggataagatatcacaaacttaccattatatctttttaagtcaatatcactggttgatcttaggtcaatagatcttaatcctaagatggttaggttcgatctcaatcgtattatttatgttcttagagttgttcttgaaagctaaccaatggttcggacagatacttaaatcttgggaacatgatagtataattgggtgagagcgctaatcatagatatggannnnntagcttctataagtatttaaaagtga

SEQ ID NO: 150002 - DNA, 792 bp, Cannabis sativa
aagatccaacgatgaatacttcccagactataaatggttagccactaaatctccggtcacaggttccgcctgtgggccaagtagtaggtgggcataccttgtctagtaattcataaggagaagtcgtacttgttggttccaattaggccaacgatgtcgttccacctgtcaattaagttaatcaaccactgagacagccaggcttttctgtattcgaaagattggcgacaactcatgatcccaaaaacgatctcaatagaaggagaggagtagacgatcaacctagcatgacgatcgtacagcccagaacccgtgctcaaattcccgctcagaatgatactgacgtgactcaaattggccaaaatgccgaacaggttagtccacttgtgcacgcacagctagacgaactaaagagtatgttccaaggtatggccgggcagagaaacagtgatctcaagttggaccgtgcacgtggaacccctttctctcctgagattaatctcctggcgttgccccacaagttcaaaatgccaacctagaaagtgtatactggaagagaagatccgctttcccacctcaagtatttcgagatgcaaatggatctgtagggggttcgaggtgatgtatgttgcagaatttttcctgctaccctctcggaagccgcccagcaatggtatttcaagctcgccactggaaacttcaactcatggaaagccttctccttggaattccatgcacagttctcctcctctcgccaacttccgttgtatttaggagacctggtcgaagtca

SEQ ID NO: 150003 - DNA, 1125 bp, Cannabis sativa
  modified_base (492)..(500): a, c, t, g, unknown or other
aattttccccctcccgccaacttctgttgcacctagaagacctggtcgaagtcaagcaaagaccaggcgagcatcttcgagcctacatcagcagattcatgacgaaggcgactaaggtttcacgggtaactgaagatggaaagttgtccgtgatacttggggcattgaagtccttggtgagctctggaaagacataaggaagaacggtctggtagactcaatgagcgattttcttgaccgtgctgaaggcttcatcaatgagcagaaggtgagcaaaaacctggcaagccaaattctccttccgctgggacatccgcccaactcccccattacccaagtaattcaagctcaaacggtaaacattccagcaacaacaatacacaagggaatgggaagaagggaaagttcaccagtaaaaccgaataagctctgcgggagaatcaagccaagtacacggcatttaccatcttgactgaggatatagaaagtgtnnnnnnnnncactcagtcactagcctcgtacaagaagcctgcgcctatgaaaaaatatgtcagcaagagagacatgaccaagttctgtcaatttcatggagactacggccacgacacaaatgaatgcaacaatctgaagcgggaaattgaattcctgataaagaaaaataacccgcatgtatgaaagtatgtcaaggacgatcaaaatcagagaggtgataataaccaagacttgttacctctaccagtaaatgggcatctccaagtcattgtttgaggcccgcacatagcaggagattcgggcaaagcctaaaatcccacgggcaggggagcccaccataacattcaacgacaaagatgctgtcaagatcaggtttccgcacaatgacccgaaggtcgtggaggtccagatagctaataagatggttgccagaaccatgatagataatggaatttcttccaacatcttattcaagactacctatgaaaagatggggctccagctcaaagatctaaccccctgtctcctgcatgtgtatggtttctctggtcaaggagtcgcacctctagggaaaattcgcccacccctcactgttgggaaagctccgacgagcataactataatggcacaatt

SEQ ID NO: 150004 - DNA, 503 bp, Cannabis sativa
tgtaactcctttatttatttattttttttttctttcagagcttctatatctcttttttttttcatatatatatatatatttttctctcttctttttaacttaaaacatcatttttgagcacattattgctcgattaaacttaaaaaaaaccatcataatttatttttaaatgtaaatattttaatacataagaaacatatatttattattttttatcgttttataaatcaaagaaactattaaattacttataatatcaattatatatactcattagttattattatgttattatttttttagttaacaatttaaatttatttttaaaataacaatggataacttagatattttacaaatctcgctaataatttatgcaagttattttgtattattgtaacatattagggctcgtttggaacgccgtattaggccgtattgtattgtattgtattatattgaattggattatatatcatatttttatataatactatgttaaa

SEQ ID NO: 150005 - DNA, 500 bp, Cannabis sativa
cgcttccccagcgtgaatctcaactcgagaagccaaaacgcatccctaagcaagtggctcaaaaatctgtacgcccttatcgaacctggtcttcttcgtcttcatcttcgaaggaatatcctccacctttagcaatccctcctcctgctgcatcagttcctgctaccactccaaccggtccttctactcgaacccaagcccagcaagcatctgtcgagaaagaacttcgtgcatctcgaagtcgtgataaggcagtgactccagccaagaagaagcttaaggccaatcctccttcgattttttcttctttagaagaagaagaaccaacggaagtctcctctgacaaatccgcttctctgcactccgagaaggagattctagaggacatgggagtttcctcaaatagtgaggacactgaactcgagccagagcctcaattgacaaaatctgctccaactcctgctcgttcttctccagcagcaaaggcttctgctactgcc

SEQ ID NO: 150006 - DNA, 628 bp, Cannabis sativa
  modified_base (349)..(360): a, c, t, g, unknown or other
  modified_base (452)..(478): a, c, t, g, unknown or other
tggtgcctagtactctcttatgtattagtatcgatattggtccaactaagaatcgggtcccacataatttaatataatagcttttaggaagtatcgctaactaatcgcaacgtgacatgtcgagaaggtgctcgacaccactggtacctaatagcaatgctcattaatatttacacactataaaaaactgttacttttagtaataattttttagtcataacattttttttttgattaaatgtaacttttagtcacaacaaaatattgtgactaaaacatagcatttagttacaaattgttactaatttagttttagtcataataaatattgtaactaaaaatacatttnnnnnnnnnnnnttgtaatttttgtgattaatacttctggccacagactttttagtcacaacataagaatgatgatttctaattagtcacaattttttttactnnnnnnnnnnnnnnnnnnnnnnnnnnnaagtaaaaaaatttgtagtgacaatagcaattataattaagaaagaatagcaggaactggtgcgattcttaatcttctcttttttttaacaacttcattgtattacttgaaagttttggggtgtagtaagaaaatacccttttggtaaat

SEQ ID NO: 150007 - DNA, 626 bp, Cannabis sativa
tgacaccattgctttttttaaatgtcagttataaaccgacaccataaaattgagctactctatggtgtcaattttttaaattaaatgattttagaactgacaccaaaagtgtttttttgtagtagtgatattagttaaaatatattgatgttgaaattataattaacaagtccaatttttaactaaatctaattaagtgttatcaatgtgtccatcaaagagttttcacaataatggagtattaacactatcttgaccatttttggtcgagctagttgagctctattagaattatcatatctattgaatgttactcttttagcaaacattgatgaaaaaattttaataattaaaaatataaattgggatcaaatctagttgagctctaccctaacgcctgtcatctagaccgacaccagtcgagctctactaaaactgtaatctcaactaacatagtcgagctctactaaaatcactatctcaactgacatagtcgagctccctgcgattcatcttcaacctcaggttcactttgcaaaaacaagattttcaactcaaaaactataaaatagtaatatggctagtataatattttattattgtttctagggtaaataccattttgg

SEQ ID NO: 150008 - DNA, 669 bp, Cannabis sativa
taactgacattccctcagtctgcactaactcagtgaattccttccgcttagcactgcggacggcttcattataactttttgcgttgaataattcccagaattcttcccaggtcataacagtgacgtcccgggtgagggacaccaactcccaccactcgagagtgccctcttggaactgaaaagtggcgcaggtcacccgatcattaccaaccagccccataaaattcagaattcgcttaattactgtgagccactgctcaaccttcatcacattaggacctcccagaaacactggaggtgcttgcttacgaaacctttcatataatggctccatacggttgccagcaacaggttgttccgctggtaccgctggagctgctacagcctgagcttgctaaggaggcacgacagtaagaccctactgccttaatctctgaatttcttcatcttgttggcggattcgatcttgcatttccgcaaacctctgctcccaattcggagaagcttgtggtggatttacaagacgaccaccctgagctctgccacggccacggttgcgaccacggggattctagggaatttgatttccttgaccgcctctagcgtcaaccatattaccctgacttcttgtattccgctgggcgcccattttataggacttagcctgcg

SEQ ID NO: 150009 - DNA, 592 bp, Cannabis sativa
aatttaaattaaatgaataaaacttttatttaaatttttaaaaaataattgttattgtatttttaaggtggtataaaaaattaaaaataatgaataaattttaatgaatttgttctataaagataaatttaggaatttaggaattaagcatataattagtataaatttgaataattaatatgaagtttttaaattaataatagttaaattaatttaaaaaaataattattttatatttatttaaatttaaaaaataaatttgtttttatataaataataaataactcaaaattaaaaaattaaaaattaaaaaattagtaatttaatgaataaaatttttatttaaatatattttaattcataaaatattcataaaattttataattataattaataataagtggttgaaaagaatatattaatgatttggtatacttataaatatataccataacttgttatatttaaaaatatatcatggtttttgtatagttgcaaataaagtctagaacaaaattgttctgctctttttttgcaatatacaagagcgatggatatacatggcataatttttattcataaaatttcata

SEQ ID NO: 150010 - DNA, 563 bp, Cannabis sativa
tctggattattgttcatcacgactaattgagattgatctagttcaaacttggacacgagttcctttcccccttaatcctctatcaacatcatctgggtcagtttttggtttactaatttcaatttccttaattaactccggccatgtactataaataaaattccacaacctcatcaaataagtagcactcaaccatagatacttctggtcgatagtggttacacacataactttcaagtacctttatatttctttcaaatggatacatccatcttgtccatactggcctacacaatcttacttctctcactagatgaaccattaaatgtatcatgatgtcaaaaaaagatggcgaaaaaaacttttcgaggttgcacaaattttttagaaagaagccattcgaatcaactcttctagttttcattttttgcatttttcttatttgtgagaagagagttctttttgtgagaaccaagttgttcatctaggttttagtgcttttcatatctgttcatactctgtcttagagtttgttagaacgacttgactgaacaagagagtgg

SEQ ID NO: 150011 - DNA, 771 bp, Cannabis sativa
  modified_base (238)..(255): a, c, t, g, unknown or other
tgcactaatataaaacaaaaatttcatttcaaataatctcaacaccgtgatatccagatcaagtgtagtatgtagtattctcttcgtaataggaccttacaggttgtattcaatacaatctttcctctaccattacatttcctgaatcacaaaatatttgatattgtgaaattcctctctatatgtctactctacgtatattcgattctttaatttttggcaactacttttgtgttannnnnnnnnnnnnnnnnntagttaataaattgttggtacaatgccaaaattgtatagaactttccataggatgaataagtatatttcttgcaactttaacattcagtctcactggtagagtaagagaccccagatcgatttttacacttctccaaaatcacagctccacacccagagtaatcaccatctcatcagcagacattctagcactaaggcaagtctagaaacttaatttggtgaagttgagtattaaaataccacccttatcgactaacatttagatcctcttcttgatcttaagatttacttgattgacttccaatgttcctttcctggattaatctgataccaactcatttctcccactcaacaataggtgtctggtctaatgcatagcatagcatatctgagacctctcattgttgatccttaggaaatctttccttagcctttatcttttttggaatagttgaaacttttccttagataaataaaatttatgtctagaagtcgagaagcttctacagattgcca

SEQ ID NO: 150012 - DNA, 608 bp, Cannabis sativa
ctatcatgatcataacatagtaatatatcactagtgtcatccaaataaagatgggcttggaattttaaaattcccccactcaaataaggcactgtgatactatgtctaagaacttcattggtatctattttgattactatagtaacatattaattggaacaattacgtgatcaagaataagttctaatagtttgttaatttgttcattatactatatccatgtctaataaaaatatgtgtgtcatagagatattgtggtgtattgagtatagtctagagttcagagtcaaaaatatttgagctgcatgtatcaatagcttcttccacccctaagtgttgtagaggtcctgtgaagttatgaatatagtctagagtgcaatagatatatattatttcttaacatcttccacccctatcagatcagaagatctttttattaaacaaaatcttaataattgcttaagaattaacaattattcataaacaaaatctttgccgagaataacatactataaattttgtatcaataataaaactcaaacacatacaacatgataaacatataaatataattggtattggcatacaagttaaagaaatatgaagct

SEQ ID NO: 150013 - DNA, 521 bp, Cannabis sativa
cttcaacacctattcatgcttttcgataattaaattccagaaaaagcttcaagtaattaaataagaaagctacctcaattcacacaaaggcaagagcagtgatttttcctccaaactttaacttcaaatcaagccaacaagcttttctttccaaaactcaaaattgaaagcaaagagggtttgagtgagagagagagagagagagtggtttggtgagataggggataacacaagaaaattcccttttgttttcctcaaaattcaatttttccaaacatagaaattagaggtaaaatcaccaaaatgccccaagggccaattaacatgcatactcacttccaacgacaaaatggtcatttcataccatttaatatccaaactaatttcagatgatcaaatttaaaataacatgccaacacttaatcacaaattgcatttcgggcccgaacccggtttcgcccgaaatacccggttgtgactataccgcaccaacctgtcaaaacacacctgaaaagataaca

SEQ ID NO: 150014 - DNA, 1367 bp, Cannabis sativa
  modified_base (218)..(222): a, c, t, g, unknown or other
aatacatataatacaattatatatatattctattcttatatatattttttaacatacaatttaaaattaaattaaatatcttttatacatagtttttttcttcctttgaatttagtatttgttattatttattttaatgtgttgttggagacataaaatgacaataatttattttattttgttgctagttatgtgaatttttttttcataaatattannnnntttaatattaaaaagtaaccaatcaaaagtaatcgatccaatccacacttttgcggattggatcatggattggatttgagctattgtgcggatttgattggatccaaaaaatgaaatccacacttagtgcggatcggatgcactatgagcaaaatagtggggattgaattggacgaacacccctaactagatcttggctttaatgattgtgagtaatcgtttttcaacaattggtatcaagagccaaagttattgattttagggctcaaaatttttcccaaacccattttcccaaatttgaaatttgtggtgattttcggattaatatgtttaaggttgtgtgaatatgagtattatccctctaaatgtgttcatatatgtcttggaaataatcttttacattttctattacgatatatatgagctttaacaatggataaacctattttggattcatcatttttggatgtattgttctgtgttttttgagtaaatatgggtattggaaaaatgatagaggattaaaaatgggacaaaacgcctcaaacggcatcgaatttggtggccgaatgtgggagatatggtcgggtcacgaatcaggtcgcgctgattcgagtttcagacccacggacccgtgtgtgcaattttgggtgacagggacgacagaaaaacaacatgtcgtttgccaatgtcgggcaaaacaacatgtcgttcgccctattggttcagccccagccgagaaaaaatgatgggtcattttctgactcttttggatgtcgttcggggaaaatgacatgtcatttctctaaaacgacatgtcgtacgcacaacgactcagccccccttcactgcgaacgacgggtcacgcatttttgatcctctggcttgtcgttcttccaccaaacgacatgtcgtacgattagtgataaaaaaaaaagaggaagaaaatgggcgcgtgggggcgcgtgcaggggtgtttttgggccgttttccactattttcatgttttttaattctctattatttatggtatgaaaaatactaattggatgaattttattcatatttggttgataattttagtattgtggcataaattttgtgatttatttcaacaattagtgcttattttcttacctatcgta

SEQ ID NO: 150015 - DNA, 739 bp, Cannabis sativa
atacttgtgagtatatctaagatcgtggtaaaataatttccaacaaagcagagaataaatcaccaaaaaaagagcaaataatctcggtcattccttgcttcgaagtgactgcaacaccagcagcatcgtgcaacattttaattgtgttattggactttcttgaagacgcataagcatgaaaaatttttgtgttctcatctccactttgtagccaatcaattctagatctttgttgccaatatacttcctcttgtgacagcaattcatccaaaatgtcctccatttttttcagattgcacattgatgcattggttcgggtttgttgattattcaggatttcaatttctttatcagctgctgtgattttctttttaatgttgccatatttgttgtggtgccactgttgtaaagaactggaacaagcttctaaattattgcagaagttgtcgattaaagtgcctgccaagtttgtcttccaaatctgatggatgatatctgttgctgcagaatcggatagccaaatcctttcaaacctgaaccttgacagtcgtttaacttcatgattttgggctgccaagggaataacttcaacagagattgctctatgatccgatttgtaatagtccagatgctttgttataatcagctgaaaagagttgtgccattgatcattgatgaaacaccaatcaagcctttctttgattgcattgacattgtggcgccctttaatccaagtgaa

SEQ ID NO: 150016 - DNA, 622 bp, Cannabis sativa
  modified_base (463)..(474): a, c, t, g, unknown or other
caaaatcaaagaaacactctctctttctcttctctctcttcgaacccaacaagaaccagggggaattattgctgaatttctcatttcagcaaggaattctgtaatatccgctttctttgttaattaatttttttttatatatacttttagtttattttgtttgtgaatggggataatttattattttgaataattattagtttagtggtgtatgtgtttttttagtgataataaaatttattatttttattttattattattttattttaaggctatgtataatgctagataaataattaaattattagagataatttaatattttattatttgtgaattattattgtaggtatattaataataaaaatatgggtaaatatattatagcatattatttaatttattattattattaatactattattattattattactattgttatttattattattattannnnnnnnnnnnttattattattattataagtattatttttaatactgttgtttgttacgtatgtatatatatatattatttttgtttttaaatttttcaagttgttaatgtagggttatgttagggttatgactatatatatataagatgttttaagat

SEQ ID NO: 150017 - DNA, 602 bp, Cannabis sativa
taagaacaaatttggccccaactccttaacaaaaagacccttcccaggcttccacaacccagccaaagtatgcttcatagcttcaaaatctaacgatcgagcattcaaaaatctccccaccaagcaccaccgatcatccaccagagtcgtctcctcaacatcatcatctatctcaatcccaaaactctcctcatcctccaattctatattcccatagctccgctccatatcctccatggcttgactacttgacgccatgttccaccaaataaaacgcaaacagacagaaaaaaacagaggcaaacccgacacaaaacaaacgcaaaaacgacaaacaaaagttgtgaaaataatccagtcacagatgcaagaaacaaacaaaccaatccaggcgcaccagtccaatcacaaatgcagaagaaaaacaatcgcagccttgaaggaaaagccgccagagaaaacgcagcacccagaaagaaaaataaaaataaacagtcgacacaaaccaaacacgaagaagaacccagccgcaacagtcagtcacaaacgcagaaaccaaaaacgatcaaagactttggagaaatccaccagtgaaatcacaa

SEQ ID NO: 150018 - DNA, 512 bp, Cannabis sativa
  modified_base (446)..(454): a, c, t, g, unknown or other
tcaacttgattattggacttgatttttatatgtgttgtataacactagacatattctaaacttttatgatttgcaaattgtttgaaaaattgaaatcctaaactgcatatttttctggactgttctggggcattgagtgtcaaatatatctttgtacaaatattgatgcagattatgatttttgggtttatttaaaatacagccgttatgctgccaaattttctaaaaaaattaaaaggaatatgttcttttgttatgcttattacttacctgctttggttatactgatgagagccatgttaatcatgttcggtgtatattgttgtttcacgacctagtctctgtgtcatcataggtagatcaggagtgcactcacctgtaggtgaaagacctaaaattaatctgtacatggagtgaattaaatctgagccccggtattatggtgnnnnnnnnntgcgactacccggttttggatgtcattttatatgattggtattgagagctaggggtct

SEQ ID NO: 150019 - DNA, 734 bp, Cannabis sativa
cggttgagcaggagatgaagcgactcaaggcagcaaccttttcggttaagctttgcacgtccttgtgtttctttggggaaggcatactcaacaagacttgtatttttttttagagtttgcctctatcccacattaactcactatgaatccctgaaatttttataatttaacaccaaaaatgcattttttggggttaagtttcatcacataccttcggactacctcaaagcattatgtgaggtcatttgcatggcccatgcatggtttggatttgaccagcatgtcgtctacgtatacctctatgttccgtcccaagaggcctttgaacatccggttgaccatacgttgataggttgctctgacatttttcaatccgaaagggcatgaccaggtaatagtataccctcttgtcaatcctgaagctgggcattaatgagccgtagtccatgagtctctgttattaattatagtatttcttatagagaatgttttcgtgttttttctttcgatcccccctaatctttttacgaggggtatttatagcgatttctgggaagaagaaaaggagtatttgtctttaagtgccaactataggcatacacaagttcccagaaggtacaaaaaaagacatgcacaacccacgtagtagactgcgtaggtgttaggtgagattagccttcatcccttcttgattaatgtgattcttcatgatggagtcatcactagctcccttg

SEQ ID NO: 150020 - DNA, 645 bp, Cannabis sativa
tgtttagtattttcttaggtgtcacattgctattggcacaactaagtatcatgtatcatataatttgattaataatttttagagagtatcactaaccaatcataagacttacacacctagatagtgataagcaccactaatacctaataacaatgctctataacaaaatgtaagtagaaaataaataaaatataaaattagtgcttaatacttaatatatgttttctatcttatcaacaaaatatataattattttttttatgattttttaattagcacataaataataatagtagaatatttatgatttttgcctctaacattgacttataccaaattatacttcttgaagttttcaagccgttaaaaattttctttgaactattgagatcgttggactcaaggattttaattcaattttactaacggaaattgaacgtggatgaaagtttagaattggtacatatcaaagtttagaggtactatttggttgatatcaaacttcaagaggcacttttagttcatagacaatcgttggcttagtaaaattaaaagaaatttgaccaaagtccttgaatccattaatgtcactagttcaggaaaaaattttaatgacctgaaaagtttgagagacatgatttggta

SEQ ID NO: 150021 - DNA, 904 bp, Cannabis sativa
taatatttatttttaaaatattggggtccaaaataattaaattcataataataataaaataatagaaattagtgctaattgccttttctaatccgatttattaaagcggtcgttacacacatgaagtgtcacttttttttttttattaaaattttttgagatatagtgacacacaaaaagtgccactatattaaatatttttctataaaaaaaaataatatttaattattttaattcaaattttatatattataaataataatttatattaaatatgtccaaatacaattaaatataacaataataattctaattaaccaaaaaaactattaattacaccattatcataattctaataaacctatctgttactaaacaaaatgtttacccaatttttttttacaaacacaatatttacattattactcactaattcaacaagaaacattactaaaataaattacattattagtaagtacctaaatattaatctaaatttttttttacagacaattacagacaatttattttttttttttaaaaaaagggaaactttattcaaaaagacaagctaatacaaacaaggcacaaggccaacatcacacggcagcaactgaaaacaatagcagcaaccacacacaacctattacattcataaaatacatatttttactacaatatttagaaaaaagaaatataaccaagaaatagacagaacaaacaaaaacctaaaacaaatcagatccatggcgagcttcaaacgttgtcaccacgaactgagatcgctgcacagaaaaataaacactatcaccacaagagagagcgagagagagacgcaggaaaaaaaaaaaaatagaaaaaaaacctatctatcttgggtgatctcaaaactttggctgatggg

SEQ ID NO: 150022 - DNA, 508 bp, Cannabis sativa
  modified_base (480)..(483): a, c, t, g, unknown or other
taatgctattgttgctaaaaaaatactttcaaaaagaaaaagaaatgtaatatggtaaaagtggcttgaatagctaattcctcctatgctggtttttcctagatattatagcattacctcagcattcctaccagtgataacaaaatttttatgtgtttatgagaattttccaaaactccacaatttaagttcaaccatctagatttacatattcctatatcaaaccatattagagaacactaattatgcatcaattcttaagttatgcaaggtaaatgaaatattcatattccacttacaaagaaaaacctaaatctaggatttctcttgctccattcaagttgaactactagatctagcccttctagaacaagatctagcttagcaaattgttattaacggccaagaaataacaatcaaatagaaatgagaagtcacttgaatgaacaaaggcataaatgctaaaatatgcttaaaaannnnatcatacccaacataggagttcata

SEQ ID NO: 150023 - DNA, 567 bp, Cannabis sativa
ggtccgatggggggtccgacgggtccgatgcatatgcgggttgggaaaaaatggggctgagttatgagaggggtatttttggattttaaataaaagtgtcataaattttttagtttgaaatgtattagtttaagaataaaatattaaaattttttaagtatagaaaattaaatttcccttataatattagaaagccgtattatagtttagaataaataagaacttttttctcatcacttttctaaagttttgtcttgagaattttttttttcctgaattataaaaatcattttaaatgcacctttaaaatatattctttatttaaggaaaaaaaaaaccaacttgctgatatagtattagtgtgatgctaatatagtacaattcaagaatctaaaattataaaaatacatacacaaaaagcatagctacataaataaattattttaaaagaattataattctagaaaaagattagtatttttttttttttttttgtaaaaaatcctattcattctaaagtttattcggagaaatgttaaaatgtattagtaataatattttattact

SEQ ID NO: 150024 - DNA, 511 bp, Cannabis sativa
aaatatattttcaagcaccacggattgactaagaggttgtaatagaaagttgatgaatagagtatctccaatgggggcaacacccatagttgtcaaaatacacacatcatcctaattttttttattattttttctctcattcacataagatttagcacattttcctacaaaaattactctaatatattaggactaagcataaaattcaaaaaaccaaaaaaaaaaaatcaaactaacctaccgaacgcggttggaatcgacaccgacggaccgaaaaaatcgctaacggttaaaaccgtcattgaatgatcattttttttataataaaccgaccaaaaaacctaaaaccgaccgttatacatatatattaatttattaagttatttttactttagttactaataatatattattattttattaaaagtaaagttaaaagaataagataattagtttttgaacaattaatttgtatgtttgtagttgtaaaatgtagaataatgtgtttgta

SEQ ID NO: 150025 - DNA, 661 bp, Cannabis sativa
cccccaaacttttttttgactttgttctctcctttttttttttttttttttttctaattttagatttttattaatgttttttctatttcatagtaattattatttaatattaatgccaaacaattaaaacaagtaataacatctatgcattttcatattaacacacatattttttttttttatatatatatatatatatattcttcttttggttgccacaatctcttgatatctctccctcccaactcaacttttcattttaataaaatttattataattaatttaataaataacaacggttgtcaatttaaaaaaaaataataataattaaaattaattataataaaacttaatttttatcgtttcaatcattgcaaaagtctttatctaacccaatatatatgtatatatataagagactcattctctattagtattcataatttatactattaattattttatcgtatgatataatacaatattaatacattgaaaatcaatatacataataggggtgagcaacggtcggttttttacacaaaaaaatctaaaatttggttttcgatttttatagttataatttgaaaaccgaccgaccattatacaaatataaaaaagcgactgttttaatccacggtttgaaccgaccaaaccgaa

SEQ ID NO: 150026 - DNA, 618 bp, Cannabis sativa
aagggggtttttgtagtagtgactacttttgatcattggaagaaagctcaggataaatcaactcttttatcattgttaatagaaaataatgaagaaggggttgagcagtgggtactagatgtaaatcacatcaaaataaacgttaatgtagctctttttcatcaagaaagttcctatggctatgcgttggttgcaagggatagctcagcaaatctcattgaagctaaaacatgttttcaaggtggtcattacactgctgaagttgtggaggctttgggcatcaattagttggattaagagtcagaattggaataatgtacaaattgaaattgatagcttgctttcggttcaggccattcgaagtaaccaaactttttctcaaattttggcttacttatttaggattgccaacttttatgatcctctttacaatctgtgcatttacgtttggttagacgatcagcaaatcgtgtcgctcatgctattggtaggcactcacgatttctttctggttgtagcatttttgagcataatgcttaggctgatttaaaggtccttttgtatttagaatgctaatatttcaatgaagttgagatttcataaaaaaaaaaaaaaaaa

SEQ ID NO: 150027 - DNA, 966 bp, Cannabis sativa
  modified_base (725)..(726): a, c, t, g, unknown or other
cagtaaaactatcataactccttcagttttaatccattttttatgatctatatatcattggaaagataattgaatttcgtataatttttatgaagaaacttgcactgaattcgtgtagttattggtcaaaaatagtgttctttctgctgtactgtaagagtgtgaattttaatgttagggccttgacccatgtattgttatcggtagtagtgatgagataacaagtcttaagcagcaggatttgaggtaaggaaattagatagtttgtatgcatttatcttcataaatttaaattctttatgtattgaaatatgatttatgatttgttattatgaatacgtatgtggtactgagaatgtgtggtatgaacacaatatgagtttgtgaattgatacatagattatggttgtatgactagtatatattgtatgttatatttttatgtttcaggttgtatgttgtatgttgtatgttgtatttgtatgttgcatgttgcatgttgtatgctaacgtctcaggtaaaatgggagagcatggtagggtatgatacgggataaggccgttgaatgtagagataccctatcctacattttactgcaaaagccagacgcttctggacggttactcaagtgggcggtagaattgggtcagtacgaaatcaacttccaaccccgaagcactatagaaggccaagccttggccgactttgtggtagaatgcacagnnaataaagaaagcataccagaaagcaatcccgagccagtgcctcagtcaagtaatattggagacaaaccgacatggaacctacatatggatgggtcggcaacaaatgaactatctggtgcatgaattgccctcgtcccacttgggggcaacacctgcacgctacggtcaagtttggattcaaggcatctaacaacgaagccaaatacgaggctcggtgagaaaaaatgatagcatatctga

SEQ ID NO: 150028 - DNA, 839 bp, Cannabis sativa
  modified_base (809)..(813): a, c, t, g, unknown or other
gggcataaaacccaacacatactttattttaattatattttctatcgcttaccatttgacacactgtcgttggctagaaacgaggtcaacagtgttagttggtcgttcttggacagtctttcgatgtggataagccttagtaaaatgtgattagaattttactttagtttaatcaaaaattatttctgttacacaaaattataaatagctacgcaagtgcacgtaataaattagtactcatacaggtgaggtcgatcccgcaaggaattgagctgaataccactaaattataatttttatttctatttggtaaacaataattttgataaaaataaaaataaagaataacaagaaattaaaattaagcaataaaagtgtttgatcaaggatgagaaattagggaaacgaatcatgttgcttcaattacccaattgttaatgctagttactattcttctttcttaaagtgaatgacattttacaaaaattaactaacttttttcatatattttaggtcctaaataacatattatctaatcatctctaagatggactaacatataattcgcattaaacaataatctaaatgtcacaaaggctatgcaaatacttttgtttcacatcaaaatcaagtttatccaattttagcattcccaaaactcacttttcatattttgaattgggatcataaaacatgcctaaggtgatcaatcccaaacatcgaattaagcacaaatatagataaattcacaatcaagaaataagaaatagcaattatcgttaactcaagatattgttgggttttatgcnnnnnataaaactctttacaatctgattagt

SEQ ID NO: 150029 - DNA, 519 bp, Cannabis sativa
accgtcaatccaaaaagacaaggaccgaatccaccgagtggatacaattaaatctcccgaaggtagcagggtaccgaaccccgaagcaaacacattacatggcttatgaaaactttctattactctactcgatacataggaagaagtagctcctgaatcaattaatacagtatatgaacaaccaataatagataactgacctgtcactgctgacgactagcatcagcggtagcctgagtcatggtaaatagtcatcctgggttctggttggtattcttcttcgcctcttctttcttggcctgaggacaatatctgataaagtgacctaccatgccacagtgaaaacaagtcttggcccgacattcaccctgatggtgtttcttgcatttcagacactcagggtatgatctgaatgaagatctgcggccctgacggccacctttgtttcaccgaaactttctaccccctgatgtttcggaagcatcagccttctgtttgtgatcagggttaccactgtcg

SEQ ID NO: 150030 - DNA, 702 bp, Cannabis sativa
aaataatatatgaacatagggtttctttaagtggttttgcagttaaaattttgcatagtctacgagtcaatcttattcaaatttctgatttttttagggcctctcttgtatgagatttttggtcccccttttttttgagcttgtctggcactatttataattacatagtgggcagtaaattacaaaagttgattacaatcgttacaacaattattctctcaaatcatgggatttgattacaaatcacgctaagtaaatgaggtttttaattataatttacacagctgtaagtatcccgctcttattgggtcgggatgaatgcacatttaaggatatatggtaagccttatctcgtggggatgcctcgctagaaatggagccgggttaactttgatggtgagaagttacttgtcatcagacttcctgagattaacattgttttaactctgacaactatattttttggtgttgagataatcttcctcgcatgcatgccatctcacagcgagatagatgcctcgctatttgtcatcttgattcaccatactgtttatacttagtttgtataccatgtaatatacgctaagtgcttttatcgctatcgtttctctttcacgcaacgaggttgaagccttgtcatgcacacttgcaatctcatggtttctcatcgatacatacgttagcagttcgtacatttttgtc

SEQ ID NO: 150031 - DNA, 1240 bp, Cannabis sativa
  modified_base (106)..(117): a, c, t, g, unknown or other
  modified_base (503)..(516): a, c, t, g, unknown or other
  modified_base (1107)..(1114): a, c, t, g, unknown or other
  modified_base (1186)..(1194): a, c, t, g, unknown or other
ttaaggataaaatgcattgaagggtgtaacggtaaattaatccctatacaatgtaaattatatgtagaggatcattgattaatgggattataacaatggataactnnnnnnnnnnnnatatcgtggaacatatagagggttctatataactgagagtgcaattcaaagttatatggtggatgcaacaaggaattaataagtcagtcaatttacttggtaaattctagagcaccttattggaagctcagatatatgggcccatggtccccatactagttgagacaatactacttgtaagactctgttagttgattttgattaatcaattataattccaaaattaaacaatgtctagtttatgaattttcactaagaaagggcttaattgtgaagaaagagtttctagtgtttaatttgttattaagagattttgataagtctaattaataaatatattatgtgacaatattctttaataattaagttttagttattaaataatnnnnnnnnnnnnnnaagtggttaaattggaaaattgtcatttttgagaaaataaaaaggaaaatgagaaaaatagtaaaattacaaagtggggcccaataaccaatccatggccagccactttgtatggattttactactttatttttctattattttaattctaattaaatctaacctaaccctaggtggtttcctataaatttgtagtgatggcttaagggaaaaagatgatgcatctcattccttcagataaaatttaagcctccttcctaaccctagccgaaacaacactctctctctcttcttctcttctaaaccgagcctatagtgaaagagtgagtgcccacacaaatcaagtagtactccatcatagtgtgtaaggctgtgaaaaatccagtttcaacagaatgatattcggactcagatcttgatgatactctgctataaaaaggatacaagggttagagatctgagtgaaaggagacattatattccgctggaaccactgtaaggtttctcatattttatatgtgtttatttcatatcattttagaagtttatatttaggatattataagatacttgttagtaaatctaagatcnnnnnnnnataattccaacaactggccttagagccatgttaattgattcacttttatgaaatttggacttaaaacgattnnnnnnnnntttggatggtttcatgttgatcttgtgttatttgatgattgattga

SEQ ID NO: 150032 - DNA, 532 bp, Cannabis sativa
tctctctctctctctctctgatactgtcacattgcaccattggaagccaccatcgccgtcgttgaaccaggttacatctctatctctctctttgtcgccctcccctccctctcacactcttttgttctgtaagaaatttagttctgatacataaaattaacttctataattctagcttcatgatcacacttaaataaacaaatattaaatcaaaacaaataaatcaagaatcaaaattagcaaacacatattaaacgaaaaaaataaacacagatgaatctggatagcttccagatacaacaacacacgataactatactagttccgatcctgagttcaatgtgaacttggtcatactctagtttaaaaaaactgacacaaatctttattgataatgagaatcaaagatatcaatctcaggagctacaagaaaataatcatagtaagtcatccatggtgtactgatctctcaacagtcattaactcactaacctgagccaacatacactacaaaaactgctacttttagtga

SEQ ID NO: 150033 - DNA, 745 bp, Cannabis sativa
atacttaaacccaacacgttggtagaaattttaactactcatgtaagcaatgaaaatatatataagatgacaagttcattgaaaatatatttgattgtgctaaaaataagatcattctgatgatcgcgagatggaatggatgatggctcgcaaattgaggaacatggagataagttgctcgcacgtaaagtaggaaattaactacttagcgtcggaggaaaggacaatcaatggaaacccctaataaactttatgcatgtgatagtttatattgtgaatataacgcaagcaaacatccacataataaagtttacacttaaaagtgtgaggcattaaaaagcaaagttggccgtccaaccttgcaaatttgtttttacaaaaaaaagtgccactaggggcaaaacctttgtctcggccaaagggtcgttcctaaaagaaaaaaggagataaaagtctacatgctgggagacttagacatatcttcttcttcttcctcgacctcactatcttcttcctccatcttggtcttctcgcaaagaactaaagtctcctcttccttctcctccaagaagctggtatccatgttagggttccaaatccagacccgatatacatcgcaaaaaccaactttatcgcaccgttctatggtctcaatttctttctcaacaagtttttcagtaagcttcttctcaaactcatcggcttggactttgatggtcttctcagcctcctccttcgtcttctc

SEQ ID NO: 150034 - DNA, 503 bp, Cannabis sativa
tttcgacagtccatcaccactcccccaagaggcgaaaccatggtgatgttacttcgaatagcttggacaattgagagacaatcggactcgagcttgacattatgccattcatgatccttgatccaacttaacgcctctttaatggcgaaaacttcagccatgtttggtgccattgtacaactgttaaagaaccaaaagaagaaaaaaacagagcactggaaactgaaaacatgggctagcagatcactcaaaactaggggtgttcacggattggtttggtctggattttcataatttttgaaccaaaccagtataacggttttttgaatattagaaaccaaaccggaccaaaaaaattgctcaaaccaaaccattaagaacggtttggtttggtttgaaactacagtttaagttaatttataattattcatattttttaagtaattgtactatttttactaagtttttaattttatttttcaaaatatatatttaacatgata

SEQ ID NO: 150035 - DNA, 999 bp, Cannabis sativa
cggactaggggcagttacttcattaagcacttatccctaaagtttcagacaccactaggtgtgggagtagtgcaggtgatcaaatgctggctcgcgaatgctatcacattaagttgtagcacagaaaagccagttaccagctaatggtagtcttgaccgaagaaggcgagaagaaggatgaagatcttgatcctcagattcaagatgaaagaaacttattaaaaccaattgaagagttggaagatgttgttctagacccagaaaatcccacaaagtgtgtttacattgggaaaaacctggatgaacaattgaaatagcagctaataagttttttaagggtgaaccatgatcagttcgcctagagccatggagatatgatagggattaactctaatataatctgccatcacttaaatgtcgatctagactacccaggaaagagacagaagaggaggcccttaaattccgagaggcaaggggcactcaaacaataagtggataagttgttggtcaacgactctatacgcgaggtattttatccctcgtggatagccaatcctattctcatcccaaaatccaatagaacttgaagaacttgtactaatttctctaatctgaataaggcgtgcccaaacgatttctttctactacccaaaattgactagttagtggatgcaactgctgggaacgagcttatgtcattcatggatgtaaactttggatataactagataaaaatgcatgtcccaaatcagaaacacagaagcttcataactaacatgggactttattgctataaggtcatgccatttgggttgacgaacactgggaaacatatcaacgactggtgaatgaagtgttcgcgaatcagactgggcaaaacatagaggtttacgttgatgatgttgggttttgtgccctaaataaaaccctttacaatctgatttgttatcaatataagaaatttgaagtgatttgtgtttgcatgaattttacatg

SEQ ID NO: 150036 - DNA, 568 bp, Cannabis sativa
ttttaaaaaaaataaattaaattaagaaaaaggggtagattagtaaatttaaggtgttttgacttttctttttattttagttgcctattatttttttaaaaaaaaaaaaagaaaagaaagagataaataaaaacagggtctacatgctgggagacttggacagatcttcttcttcttcttcctcgacctcgccatcttcttcctccttcctggtcttcttgcaaagagccaaagtttcctcttccttctcctccaagaagctggtgtccataataaggttcgccatccaggccaaatatacggtgcgaaaaccaaccttgtcacatcgctctctgctctcgacttctttttcagcgagcttcttctcaaattcattgccttgggctttgatggtcttctcagcttcctcttttgccttctcggcttccccttttgccttctcagcttcctcttttgttttctccgcttgttggttaaggtgggtgttttcttgttgcgcgttgtcctgttgcttacttacaaccttgcattgggatagtaatttgtggacctcgccctccaagtattc

SEQ ID NO: 150037 - DNA, 1432 bp, Cannabis sativa
tacgcagcctgcgcttccacgaacgctatttatcaggttcaggatatcagcgctgccatgaccgcggtgagtctttgttattggtttttccctttttgtctgtgttctaccctatggcatttgatctctcatacttaacttgttttcttttccaaatcgttgagagactggtcgcttgtcaaagactttgatagaccatgggtacgtcatgtccgagttttggggcatggacgaggccatgaagagtctgagagacctggcgaccgagcggaaggcgtttcgggaggaggcccagcagagggaggcacaggtggagaggaggcaccaagaggcattgcaggccaaggcggaggagctgaaggcacgagacgaggccgtggccaaagcaaggcgtgagctgagggaggccaaggaggctatcgaggagctgactgtcaggttgaagtcaatggaggagctgcatcaggcagacttgcagtcgacgtccaatttgactgttgaggtgaaggagctcagggatttcaaagatcaggccctgaagaaggctaaaagagatgagctcctagcccccgtcgtctgcaagcattgcactaagcgctttgatgatggcgttttcatggcttggcaaactaatggccaaaacatcaagctcgacttttatcccaagcctgacgaggtccttgctcacttctgggagaagaagaagaggcttgacgccttgctcgaggagcgcagggggcctcgtcttccaacttgaattcattaagccaatccatcatccactactacttttattactatttttttttttcttttacatttacagtctcttttcccttttttcagataatttaatctttttctttaaggggagacaattttaaggcccgtccccaggcccttaatatttttttagagcctgttactgggtccgaacatctttatatttatgcttaaatacatattttgctttaatttcgctaaacttttggcctgatttacatttgttcatgtggtatgccttactacccccctgagtggcatgaaaaattatttttaagacactcaactttacaaatataaatttggaggttgcatatactttttggtacaaatttacttaacaaagcctaagtttacattttttgactattggtaatacttttggaggtgatcggcgttccaggccctaggcaccatggttccgtccattcttttgagcttgtaggtctcggagccgatttcatcctcgatttcatatggtccttcccaattaggcccaagtaccccaacttcgggttcttgagtggctgggaagactcgtattaggactagatcaccaatagcgaattttctacttttaacttttgagttaaagtaattagtcactttcttttggtaagccgccattcgtatttgagactcatcccag

SEQ ID NO: 150038 - DNA, 526 bp, Cannabis sativa
  modified_base (481)..(493): a, c, t, g, unknown or other
aatttagtattaagattggaaatacttagagcaatcccaacaattattcataaatagctaaatctttaaaaatttgaagaatattgtcaaaactcaatccaaagataaatgtcattttcattttagctaagagcttagctactctttcttacacttttatggtgtttcaaacttttttcttttttttctttttaatttttcatcctttgtttctctttccaaatatatttttatttttttttaaatacaaatgttaaaaatataatattaaaatgatgtcaaaatgatatgaaaaaactaatatatgaggtaataaaaaattaaactaaaataaagaaactaaatttttgtaaaatattttgaaaaatagagtactcttattcagagccggccttaggtataggtgagttagacccttgcttagagcccacattttttagaagcccgaaataaaaaataaaaagaggaaattacactctannnnnnnnnnnnnttgtcctcttttatttttaccctcctttttaaa

SEQ ID NO: 150039 - DNA, 1042 bp, Cannabis sativa
ttttccagttgctcaactatttcctctgccacaagttttgcatagtccatgaagtcgaaattttctcctccatcttccagtattgtatcttcaattgtatgttgttgacttgttgagttttctgttgttggtgcattgttttccatcgtttctaatgcgtttgtctgtgcaactaatgcattactattttccaagaacgattgattgatggttgttggtgggttgttgatgacattcacacacaatggatatgttgtaaagtcgggttccttcagtttttagttgtatgtagaaatgcaggctcttttgatcatcctttatcgtcaacggttggtatccttctttcacttggtatttcagttgcagaacagtgttttattggttgctatccaggacctctttcagcttccgttgtaattcttcgtacttacaattgattaaaatgtattgtccactagcttcataattttcataattcattcgatcatcaaattgcccattgcaaaagactaagaatggaatgtcttctttatcctgtgattttgaaattattattagtgtaaggcagcaatttagaaactattttgattatgttattgctaatgttagtaatgtatccgaacattttttatactaataaagaaagaaaaaaatatgatatttatgaaataggatagaaacttacttctatttcctttcctctgttcaagtcttgtatttctgattctggaacctgtttttgtcattttctgttttaataatgttatcaaactatgaaaaaactgaaatacaactattacaaaacgttttatatttattacacaaactaaccatttgtccaagtgttttctcttttttctctgtccaaaataaattcctgcaatattgaataaaacttttatgtaatgatgatgcaactgtaaatcaacttgaaaaaaacaaggaacttaactccaattaacatagttgttgcttgattatattttgaaatcataaaaaaatgactgtgcaactgaatataccttatatgtattgtttatac

SEQ ID NO: 150040 - DNA, 1079 bp, Cannabis sativa
aacctaatacaaagacataattatttaaccgttatatttttagagaaaattttaacaagtcgtatatattagggtagaggattagaatactaattattctatttttaataacatagaaagccatctcttatagaaaatgttaaatttgtccaatattttccacaaaaaatatctctctgaactcttaaaatagagacattcctatcataattttcctataaaacaatttttcctaagtcaattattttgtaatattagtcgaccttcatattcaggaattgatgtacttgaccaaattattagaagacttagaaaaatctaaggtcacctttagtaattatatatatgtatttaagtattaatttaactacttgaccacttgtgttgtgttgttcttactaaacaaaccaaagaaaagtatagtaagaaaagtactcgatgaaagcttatacaataatagtattaatttcaataatatctaacaagaataaaatgttaaaaaagaaaaatatttctgaaatttttttataattataattttactgtctaaaatttttaattataaaagtatgcttgttgagttttaaaattataaaaatacaaagtaaaaaaaaaaattaaaaacaacgagaaattaacctcacgataactataaatcaatcataaataaactataaaaaactaaaaacaacaagaaaaataatctcataacaactataaataaactataaaataagtagaaaaacggtaaattatttttactaaaaatatatttttataaataaaataaaaataaaaataaaaatctgtccctatcgacatatttttgtaaatttttttttaaaaaaatttagtttattacataaatttttcttctacaaaaagaaagatagaactgaggtactatctatatatatatatatataacagaagaaaatagaaaatcttatgctacataatacattactattatcaatggaagtactgaagaagaataataattacttgtggtgctgcctttttttggtgttgttatgggcatcaatatcatcagtagcagcaggtcttactatggtaaa

SEQ ID NO: 150041 - DNA, 857 bp, Cannabis sativa
ttttgaccatagtcctatcttagtatctatttatgaggataagaactatgggaaaaaaccatttaggtactataacatgtggaagatggctcctgagtatgacaaactggttgctaaagcttgggaagaggagagtaggggtacgagaatgtttagaattgtccataagctgaggagactaaaagcagtattaaagcaactgaacagaaaggatttctctgatattcataaggcagaaacagcagcacgaattcaattagcagagattcaaggtgaattgaatcagaacccggggaatgagaatctgatgatgcaggaacagtatgccaggaaagagtatgcaacaataagcaaagcttatgctagcttcatgactcaaaaagctaaactaaattggactaagtttggagatgacaactctcacctctttcatgcttctctaaaattgaggagacgaagaatccacaaaataagattttctcaattgaagatgagcatgggaactggtgtgattctcctgacaaagtccaaaatgcttttcttgagtactaccaaaagcttttaggatcaacaataacaggcagaaggaaggtgtatcagtccattgtggaccttggtccgaaagtaaatgattgtcatagggaaattttactagaagagtacacggctaaagaagtggaatcagctatgttttcaattgacaaagataaagcacctggtccggacgggtttggaagtgcattttttcaagataattgggagttggtgaaatctgatcttgtagaagcagttatctcttttttatcatctgggaagatcttaaaagagataaatactactacaatcaccttaattcc

SEQ ID NO: 150042 - DNA, 544 bp, Cannabis sativa
aaactacaacaacccctaagaaggaatcacccaaccaaggctttgaaaacagcacaaatcgactaaatggattgcacgggaaacctatcccagaaccggttaaccgattttacaggacccggcaaacttattaatcagtttgcactaaatttccccacgcactccaaacctgcccaaaacgtttccaaacctcaccaaaacttccagaacacctataataacatcaaccaacataatccaagcaatagaacccataaattcacacaaaatcaaaaagtgccatggatgaaccaagcttgagttttcaaactcaaacttgtgcatccaccacaccacaaccctaaaccagctgcaagaactcaattctaacttaaattaaacttagaaactgaatcataaacaaatctaaccctagcagccccaaattcacaaatttatataattaaaccaaagtcaaagcttcaatagcataaggattagagttcaagggttacctttgcttaaaaccacttgaattcagctgaaacttcttcaattactccag

SEQ ID NO: 150043 - DNA, 1099 bp, Cannabis sativa
  modified_base (1043)..(1054): a, c, t, g, unknown or other
cccactaaattagataaatttagtaagagtgattataatgtagctataaatatatttttatgataaataagcccccacaaagtaaaaattctgggtccgttactgattattgggtaaatatttggaccttctgttttgtaaaaattactaattagactttctgttttcttaaatgataaaataggccttatattttccaaaataataaaaataagactctgagctcaattttcaacaattttatgttcagggtcctatttgtataattttgaaaaatacagagtttattttatcatttaataaaacagaaggttcaattaataacttttacaaaacacatgatctaaaataatattctaaatatattttttcttgttcctccttcatttttcttttggaggggatttctaaatatcttcaccacaaaaacaaatatataatttaaaatatgatgttgaataaatcaaaatataattataaataatgttctagaaaaagaaaatctataaataagataaaaagtaggtttcggctggtactaaaactatgtgatgttttatcacaatttacaacgtttgtctttagcaatatgatataaaatattgaaaataagaaaattgggacactatttttcgtccgacatctttatttattttttaaaatagtttgtcataaataaatatataataatgtacattagttattataatcactttattagtttttaatttactaaaataatttaccatatttttgttgatacttgttcatgattgtcgtgttttgttgttttccttgagtagtgtgtctttattttttgttaaacggtctgcaaataagactgttcattgtgcggctagagggtcttgttttttgtcagattgtactattagttagcatgatgctcctgatgattcgaactctattgtacttgctgaaagtatttgaataaacaatcatcttttattttaaaaaaaaataatttaccatattttaatataataataatttaccatattaaaaaatagggtaaatactatttnnnnnnnnnnnntttgcaaaagttacagattagaccctgtgttttgttaaatgacaa

SEQ ID NO: 150044 - DNA, 658 bp, Cannabis sativa
ttttttctttttttttttttgcgatttcagagagaggaagagagagtggggctgagggggtgcgacatttgggtggtccgagtggggttgggtcaagggtgttggtgcgggtggtcggaggtggtggtgagggtcggaggtcggaggtcggaggtcggaggtggtggtgagggtgggcggttgggatgcaagatagagtgagagagagatgatgcagagagagaatgggtttgaattgtgagggggtatttttggggttttgaaaaaaaaaaagtcatagtttttttagggtttagggttttggtttaataataatttttttttaattttttaagtatataaaatcaaatttcccataatatttaggtgaaactagcgcatagtactgtttatttaaatgagagggggatttgtggaattataaagtactcactacgagctcgtttgaaacgtcatattaggtcgtattgtattgtattatatttaattgaattatatattatatctatatatctataaaggagaagaaatatgagacagtgacatagcattctaaaatcacttcaaaactatttttctcttctctccttaattctctcaattttaatattttatttaagtataaatctacaaattgatatgttactattattttaat

SEQ ID NO: 150045 - DNA, 578 bp, Cannabis sativa
aaatagaagaagattagaaaatattaaaggaataagataaaaaaaaaagataaaaaaatctcacaaaaagatgatatataaaatagataaaattgtacaagaaaataatgctgaaattcaagcatgaattcgattattttctggttagattttggaaaaagtcaaagcataaaagttttatatctctcttttatctttccgaaacatcttgaatcgtccaattccaagtaatatcgagagagttatttccaaaatactatcagtcaacaaagtagaaaaatcaccgtcgaaacgaagccatgtagtgaaactccaacacgggcaacgacccagcccttgtggggccgcggccgcgcccctaaactgtacaaaaataatatttttctctcatgtgggctttggtggtttcctaattcgaatatgcacttttaacatgtgcattttaacatctttttagtcccggaaagcctatataaagggtgaactagagttgattttagggagaaaatttagagggataaaggagtacaaatttcagagacagaagtcaatgatggaggcattctgtagagggtttt

SEQ ID NO: 150046 - DNA, 508 bp, Cannabis sativa
tcagttttttttcacagttctgctacagctgttttttctcacaacacagctacagttgtttttttctacagcacagctgtgccaaattggcccatagtattgatatgataactgactaagcagttatgtcattattttatttgtcacttatgacaaaatttaataaaataatcaatttacaacactgtaaatagttcatgaatatttttaattgttaaaaattttatggggcacaataatacatttgttatagtttggatagtaagaatcttggcctctagttacaggatcccatgccatgtgtataattacacacagtagatgcatataagttataactactgctacatctataaccttaataaaaatgaaaatgcttatgggcttctactattgaattaccaaaatagcctttaattaattatgaaattgcaaaaagaaatatctcccatttagaagcaaatatgtatagaggaaattacactctataccctttttatgttgtctt

SEQ ID NO: 150047 - DNA, 540 bp, Cannabis sativa
tctgggttcgggtccaggtctcggtcccagtctttatctgggttcaagtttgggtccttatgagggtctggatcctggtctcggtccctggtctcaggtctcagcgagtgttcaggattaggttaggtctaggtcccagtctaggttcgggtcccaagtctcatgtcccaatcctagtcaagatcccagtcctggtcttggtcttagtgggatatggtttgggctcggttctcatcttaagtctgggtcatagtcacagttccaattccaattcggggtccgagttttgttctcggtccaggttggggtcggggtccgagtcttggaacctggtctgggtccaggtctgagtctgggtccaggtcccaagttttgattctagtttgggtctgggtcggtattcgggtctgggtctgggttcgtgtccatgtccatgtctgaatcctagtttgggtctggggcttggtctgagtttaggatcgagttccgagttcgggttggggttcaagttcgagtctcagtcctagtttgggtccagga

SEQ ID NO: 150048 - DNA, 706 bp, Cannabis sativa
ccggtgccttctctctggatggtgttgtctcaccgcccctgaacttcttggccggaggagataagcctgagcttcctcccactctcttcttcagagcttcgaccattttctgaggcatgtttgcacgaaataaaagcaacatagtaagagaaaagcactagaagtatgaaagcataataatcaagaaagttaaaggcaagacggagtatcttgcacttcggaagaagcgtttgcccgagtaagaccagatggctcatcatcatctgacaaatctctttgctcctccaggacggcttttccctttcctactacaggagtggatggccgagcaggtagactgggctccctgatctgaatttcatgttcaacaggcctgtgctcggttggaagtttcttcttccttttgagcggagtcacttgctcctcctcaacctcgtcttcctgctcaggacactcctgagcctcctgagcatactgcttggcccctacacctcccttcaacttagcttcacgcttgagttgaatgagttcattctactgatgagctccctcagcccagcaagcactagatttcctctttttctccttcacaggctaaggaatgaaatccttcgggtagatcccatactccacaaagttgtcctctgaggtcaacaaagtgatattccgggcagcacccggcagctgagcgagtctttgagctcta

SEQ ID NO: 150049 - DNA, 558 bp, Cannabis sativa
tttggtttgggcgggttattcggtttggacagtttacaaatttttttgtacaaccctaccttaaattattttggcaagttggtcctcaaactttattttttggaaaattggtccccaaacttttattttcttaaaaacataaagtcctcactcttaaatgatggtattttatttatttttgtattaattttaaataattttatattaatatattatcaaattaaataaatatattttttatttatatgtattgtttttcaaatatgtcaaaataagaataagaaaagaatatttgaaaaagactaaataataataataataatatattttttataaacttccaaagtaaattatattttaaaatttatttttaacgtatgctccgcagcgaactcataaaattttaccaccgctaatgcaaaattttaaaaattagtaaatatatatataattaaaaaactattaaaattataataccacatattcataaatcaacaataaaatatactataaatacttgttgaccgaggttttcggcaactaataaaatatgattat

SEQ ID NO: 150050 - DNA, 571 bp, Cannabis sativa
  modified_base (510)..(516): a, c, t, g, unknown or other
aatgtgaaggttttggacatattgtgaaaaagaatcagaaaagtttcaatgtcacttggagtgacaatgaaacttatagtgaggaagatatttctaaaaatgttgcactaacctaagttccttctaagtttgtttgtgattcaaaggtgaaagaaagattggtatgtttgaataagaccatcgagaaggaaaattttgattctaattctgattttgatgaatttgacatctgtgaggagtctctggctgagtcttataaggttatgtatgaaaagtggatacatgttacttatgaaaatagatcattgtaaaaaataataaacaattgtctcatcaaactcaatctcttgaattgaaaattaaagaatatgagactgatttttgtttaaaagatgtggaaattattctattaaacaagaaacttcaaaatttcaagaaaaatattcaaatgcttaaccttggatcttctatttttgaagaaaaatattcgacctaaatgtttcaccatgnnnnnnntgtacaaaataaattattttggtaatttgaaattttttcaaaagaaacatagtgc

SEQ ID NO: 150051 - DNA, 615 bp, Cannabis sativa
tctttttcatttcttcctttttatactttaatccaataataataataaaaaaataattacaagttataagatgagaaaaagaaagtggttattaggagtgttcatttaattcaatctgcactatgcgcttatagtgcattcgatccattaagtgtgaattttattttttggatccaatcgaatctgcacaatagcttaaatccaatccaatccaattcgcaaatatgcggatcgggtccgttattttgaattggttactttttaatattaaattatttaatatttatgatgaaaaaaaattcccacataactagcaacaaaataaaataaattaaaataaattattattatattatgtctctaacaacaaactaaaataaataaaataacaaataacaaacttaaaagaaaaaaaaaattgtatgtataaactataaagaaatgtttaattttattttaaattgtatataaaaaaaaaattatatataagagaagaatatacatttgatttattaagttttgaaatataattatattatatgtattagatttttaattattattttttttacattaaaatgttatttgtatatataattatatctttatatatta

SEQ ID NO: 150052 - DNA, 587 bp, Cannabis sativa
  modified_base (480)..(480): a, c, t, g, unknown or other
  modified_base (513)..(514): a, c, t, g, unknown or other
atttaaatataaaaattttatttaagagaattactctatatattatcttttttaatttttttttaaatttactgtttggatttctaaagtggtttatctggtggtttctatgtaggttgttatacgattttttgttgggatttagattacatcactagttgcaataggagtttctatgtaaaatttcgtaataatgcaaaaaaaactattttaaagtgtaaaaataaataagccccttttatttattcctttttttttaaataaaaattaataattaattaaacaccaaaccgtataataaatctatgatttttttttttgttatttgaagtttaaaaaatatctctaactagttaattaatttaaacaacaacgtgaaaaaaactaatttgaaattacttaatttttataatattatataataaaaaaaataactaaataattaatttaaccaagagtatatatctattctatataaantgtgcctatataactgaaattcttggtttatgnnaaattcatgggtgacttttttatttttatttaataaaataataaaatattatttatatatcataaaataataa

SEQ ID NO: 150053 - DNA, 503 bp, Cannabis sativa
catatctattacgaaaatacttttttgaataccaagaatcttcaataaaacaattcattcatctttggatgataaggatagttttttttgaaggatggatgataaggatagttaaatcatgcatgacactaaaaaaaaattaaaacacgacagtaccaacactacaagaagaaggaaataaataataacatataacaattattttttttctcacaatggcacacataagaaataatacttaaacttgaatgacaaacaatcaaacaagggaatgaaattataagagtattagtatatttacaaaaaattgatatgtcaagtatatgttgtgcttttgacagcaattgtccatccaaagcaaccccatctcagaataattatcagcatattggcagcacgtgtatttcttggcactgaaaaatcaaatgaacacatttattacattataatgccactacataatttatcttctattaaattctaaacataaaatctgtcaaata

SEQ ID NO: 150054 - DNA, 576 bp, Cannabis sativa
ttcatttagttgcttagataattatctcgctgtaaatttttgttgtgcatatcttctcttctccttttatttttgtactagtaggtgagtccatcatggatatgttactagcattactcggtgtactcacctcctcactttttcctttttgcagatgcgttatagcgattattggggaggtaaacaccgagtagacgatgaccttcttcagcttttgtttgaagattgtctagcgttgcccccacacaactcgtctgaggacaaggggcttagtagtgtgtcagagacgcccgaccatttctaccaagagagaataggtggtgaagcgtacaacaggcacatttgggagcttggaaaagggatatgatcttatctgctccgggagtggacatacactcttccttttggtgaggtcaacattccagtaggggtgcccatcagccggtaaggggggatccccttggtcgagacttttataaccaccgcaaaactacctaccatgttgaacgctatggctcgcactaaaaagaagagtcgggttagctcttctgacagtcctcatatggcggaggtcat

SEQ ID NO: 150055 - DNA, 787 bp, Cannabis sativa
attatttaatgattaaattgtatggtttcatgtaataagttttcaaaatgtataagtttttaaaataatttttttttgcatattttttgtaattatgttgtttttgttgtacatttatgaaaaaagcccaatttataatgctgtgttaggcagttttgagttttccaaggtgctatacacaatttttcacgactttgttcttttggctgtagaattcacagaaggtataattctttcttcttccgaggcatatttattgaataccaacttcaatatgcgagagtcaaattatattgccaaacttattatctgctcgaaatatgagtataacaattcttgctttgctcgattactctcgatatttaggtgatgtttggttcattgtaatggtaatcgtaatggtaatgaataggtccattacattgtttgtttttaccttttaactttagtaatccattacaatgtaatgcttattacatactaaaaccaatgtaatcaccattacattacactccattacaaagaaaaaaaaaataatattttaataaaaatatagtaaaaaaaaagtcaaagtctatattaccctttttttttaaatattttataattttataataaaagcaataaggttattttagtcaatacacattttattccattacattctcgtaccaaatcaaacacattacaatgttcattccaactacaaaccaaacattgtaatcaattcctattaccattcttattccattacattactattactattacaattatatttttatta

SEQ ID NO: 150056 - DNA, 510 bp, Cannabis sativa
  modified_base (466)..(474): a, c, t, g, unknown or other
ataattttttaaaaatatatattattaagtacggattggattggatcggaaaactttttaaggtcaaacaacatccaatccgcacaagtgcggattttagatttttcaatccaatccaatccgcacaaatacggatatccgcattttgcgaattgaattggattagatcatgcggattggattagatcggatacttagtgaacacccctaattagtaccctatttcaatactctaataatacattgaaagggcaaaaactagaattgttcatcaaaccgctcaaaccgtactataccgaagaaaaaaaaatcaatttaaaattttttgcagtaagatctttaaatttttcttaacaaaaatagtcaaaaaaaaatcgtaccacccgcccttagcaaaaacttaggtggcgtttggttggaggtaatgaaatggaaaagaaacaattttcattccattcttttgttnnnnnnnnntttaaagtattggaatgacattctaatggaatgctc

SEQ ID NO: 150057 - DNA, 1316 bp, Cannabis sativa
attccattcgacatccttcaatcgccatatccctcccagcactttcttgaggaatcccctactgtgttctgagttagtacagaggcgacccctcagattgtatcttgcgatcgtgattgacaagcttttatccacttcccattcttcatcttcatccgtgacctgaatattgtgggttttcttcagtatttcgtccatggcagaggcgatcacctcaatcccagaaaacgggaacccttcgaaagcgagggaagaagacagggacaaggctgagccgaaccctagcagagcgggaaaaaaatttaattagatgtttgattctgtttttcaataaggtgaaaattacattaaatatgagattttataaggaaaatttcactttttgtccttaataaaactcctaatatcaaattttagaccctccactaatttgtacaaattaattccattgattacatgaatttctcattttaaatatgagattttatcagggaaatttcactttttgtccttaataaaactcttaatatcaaattttagaccctccactaatttgtacaaattaattccattgattacatgaacttctcattttaccatttttttttttaaaaaataaaattgttaaaaactgaaaaaacttccatctctcttccctctcgtgcacccctctctctctagaaaaaactgaaaaaacttccctctctctcgtccctctctctcgtccctgtcgaatggttgtttctcggtgggcggtggtagaaaactggagcacaccccaatctcactcaagaatcttacaccattataatgggtaagttgtgctttaagcattttgttagactttatgtagtttgctttcgttatatgtgtcgtatttgtcggaactgatattttttggcttgaaacggtagagatctcgcagatctggttttctgtcgaaatctaagttttccagatgttatcgacagtttatcgatagaatatggatgttatgtcgatatcctactaaaataggtcagggatgaccattatcgacatgttgtcgacagtttgtcgatattatgtcgattaaaaagaaaattaacatacataagttatttgcgaatttgtcgacaagttgtcgataggatgtcgacatttagtcgactgacagtgtcgacaatatatcgatgacatgtcgatatattgtcgactttaagataaaaaattgaaaaaaaaatataacataacataacaaacataacattgaaaaaaacataacaaacataatattaaagagttcattcaaaaaaaaaaaaaaacaaacactaaaa

SEQ ID NO: 150058 - DNA, 989 bp, Cannabis sativa
tttctgtctttgaatggtgcttaccgaatttcaggtataacaactatcaaataccatcatgctcagaagaggaactatcagaattctcttcaattgccttgcccttgcctctagatgtaggcaaggggtgagcaggtccctcacgagtctagccttcaggccttattcggagagaagcatcactaattggatccccgctagccaagcatcattggaggcctttctctctcctctccaaattctttgctatacgagataaaggtacgtcgttatctaggttaggaacttgtccatctccaagacaagctacctctacaactggggctcccacaactagaggagcgggagggtacaaaccatacttctagaagttggtcacacttgtcaacctgagtatgtttcttttctccgccaaaagagacaagatatgattcaccctatccctcatttgtaatgtggggatagagcatttgaagaacagcactcaccaaaactcgtagtgtccaattctcggaaggcttaagcaatatagtacttcttggcatacccaccaacttttgacatagttatactattggtgtcacccaaccactggtgatcgactcggatgaagtagaagtacccagtcctattctccttcagagtagacttaaaatcaaaataatatccgatctcataaggagtaggctgaggccagcctagctccctatataaaacgaacatcgttaaaaggtacttgatactttttgggtgatttgtgtcaaacacatcttgaagtacgcagtaatgtctcggaagtatagatgaagcggcaacactacccctgctcaatataacgctctgaccaagccaaccaacccagggaaagtcggtgtgcccgctaatctctacaaggtatctcacaatggatatttctcactaagccgctagtaagtacattgccaaaagcatcatcagagagggtagaagcgagagagacccaactgtct

SEQ ID NO: 150059 - DNA, 1071 bp, Cannabis sativa
ccttccaaggaaaaggcaccggccggggaggttattgacctttctgagaagctaactattgcggatccttctactccaaaagttggtaagtccaaagattctggaggaggaaccttggacaggcctgagcaatcagagggtggatccgagctggccaagagcggatctgagcagatgcgggctcctactccacctttgccagtgcttccagaggctaagaaaggcaaagagattctcgcccattacatgaactggttggttcctgaggtaagtgagcagctggctggtgctgacaacgagtcttccctggagctgttgatgggaggagtcttgagggaattcaccaaggtaagtctttgttgaaagtttcctttaatccttctttacttggtttagactttaaagttttttctctgtgtaggctggtctgaagttggcttacacctattcctgagctaaatctgctgcctccaaaaatgttgccatgtccaacaccagatggcggaggaggacttggctaggaaggatgctgatgacgccagggtggaacttggagctgttcggatggagctgggtgaagtcaacaagaagctttttactactgagaggaaaatagtcgagttgactaaggacctcgaggcctccgaccagcttgaagctaccattggcaccctgtcggtagaagtgaatagccttcaagaggaaagaggagttcttcggactgtcttcaatcagctggaagaagagaagaggactaaggaggaggcacttacagttgaggtggcgaggctgaaagagaaagttcatgccttagagacagccggtctcgagatcttttatgatttttggaaggctaaccttcaggaaaatttcgattagttgggcgaacccaaatacatgtatctcgagtactgcgcttcccaagttgcttatggtgaacccgaggcgactacttctacctctggcatgaatgttgatgttccttccgcttagacaatagatcctccagatcctaccggcccagaagactcgaactgagagcctgggactccagctgtttaaatgcttctc

SEQ ID NO: 150060 - DNA, 643 bp, Cannabis sativa
taaccgcctctccccttcttcactgaaaaatccgaactacctctcccctctccgacgcaccaccactccgacgcaccaccaccccgacgcaccaccaccgaacactaccaccggctatttttggtaagtattgttttttttatttggatttggtattgtatagtttaaggttttagattggtatttataatgtgtatttaaattctgaatgttatatattttaggttttaaataatttttgagtttataaatgtaggtttttatatataaaagtctgtgtatatatatatttttttatatgaaattgggtatatttatatataaaaatctgtttatatatatatatttgtgtatatacaattgggtatatatataagttttgatttttttatgtgtgtatatatactctataaaaactgtatattatatatatattgtatataacagtgtagtatatatattgtattgtattattatataaaatataaaaattgtatattatatatattgtatataacaatgtagtacatatattatatatattaatctgtatatatatttattatatttatatatatgtttattattaatgtgtagaagttctaaatatatatataagatttttattttttttatttatata

SEQ ID NO: 150061 - DNA, 531 bp, Cannabis sativa
gatttctttatatatggagtatctcccaaccttcttttcttgttcattagagattatgtttataaattcatatatatcaacttaatcttataataaattattaggtacaagtgtaaaagaagtaaaactaactagagcgatttaccaatgttataaactatattatacttgaaatttgttgtcttatataacattttgtctaatcattattctttatgaatgttagagtggagagatgtgtgcgtaagaactatttatacaaatattaacaaaaaggtaattttttaatctatagttaaaaatggtccaaagtaatcatctaataaatttcttttcataatttatattaattatatttttcttaaagtgatatttttatttaataaaattatatacaacataacattatctattatactaataaaataataatatgttatttaattaaaaaattaaatatacaactaattatacgtgcaatcgcacgtaacttcaagctagtattatttggttcatgtgatcatctattta

SEQ ID NO: 150062 - DNA, 924 bp, Cannabis sativa
gaaactatgcctagaaaactcactcactcaaaaccgaaccccaaaaaaccctctcaccatctctttggccgaaacacaacaaacccgaaaatcaaaggtcaactattatttctctaatgtgtatttggtcaaagcagaagcctttgtttccttcaaagtttcggcccacaaagtattcagcccaagaaaatcaaaccctaacaagccttaacctaatatatatataaggtgatgtattttctaaccctagatgaaacacacggcagccacaatcatttcttcaccaaaattaaacttttcaaatatcttttccttctctttctctctaacggcagagacacaaattagggttagggtttctcatcttttctcttcttttcctttaacagccacacttaagttctagggttagggttctaagattttctttgttctcttctacttcttctcactctaatggcaacaatgaaatggtaaggtttttctatcttttcttcttcttcttacagcaagcaaacttctatgggatcttctaatatgtttttcttttcttgctacaggttcttgattttttgctcttctctacttacccgaaactacacccaaaaaaaacacaaagcttctaccttttattttcggcagcagttagaaaaatagtgttctagggttttctaggtttattttcttctcttctaaatgttctacccgaaaatacaaaccaagaaaacctaagctctttctacccgaaataatcaaccccaaatacccactcacggctaaatctcaccaaacccgaaagtctcaagatcacaaatacacacaaacacaaaaataaacaatatagagattagggttagaaatacaaacagaaatggtaaagatggagacaccaaatttgatctcggagttcgcccaaaacaaccg

SEQ ID NO: 150063 - DNA, 728 bp, Cannabis sativa
ttttttggaaaaccgtaaaaatataagaaaacattctttgaacgtaaaaatgtaaatatttttcaagaagtggtgtcttatgtaattattcctaaaaaaattggtattaatttatattaaaagagtgaagagtatttttgtaaataatttaatatacttgtattttgatgtaattttctctaaaattaaggcaatacttcgttgggaggaatgaaaattaaaatagaaataggataaaatttaaatgcataaaaaaattgacaaaaatattttaaattttttttctcatcatatattgaaatgatctttcattccatttcaaaatagaatagtcattgtaacaaaatggtagaaagaccattctattagaatgatatttcaatattttaatatacaaccaaataaagaatgtaatgaagattgttttatttctattctattctattttattacttccaactaaacgccaagagtactgtaaacaacaaaaattcacagtttagagttctattctcatgatataaccctcatatattttgagagtcgaccattcttaccattgatttgtatggcttattagagtatctctaatagtaaaaattttaaaaatacttcttgaggtggatattttagagaaatgctaaagggtattagtggtgcctaacaccctcttatgtgtcaatatcgttactggtctaactaagtatcgggtgtcatataatttaata

SEQ ID NO: 150064 - DNA, 581 bp, Cannabis sativa
  modified_base (529)..(535): a, c, t, g, unknown or other
tctgggtcttggtccgagtcgaggttcgtatccggatccctatagaggtccaagtctgtgtttgggatcgggtcccagatttaggtccaggtccgggtctcagtttcggtctgggtacgtgaccgtgtctgggcctgagtttaagtctcaatttgggtctgaggttaggtctctgtttggttctaggttcgggtcctggtcacggtcctagtcttattctagggtcctggttcggtgattcttgttcaagttctaattttgggtcccaattctaagtctgggttcgggttgggttcttcgtctgggttctggtcctagtctgagtcactatcacgggtataggtctggtttcgattcaggtccccggtcccatttctgagtttgggttcgggatctagactagggtgtggttctaggtccagatgctggttttgtgtccctagtctagttccatgtttgggtctgagttcaggtttgtgttcggatcccgagtgtaggtttggtttgggatccgggtccggctcccaannnnnnnctaggtcttatttggagtccaggtgctggtccggttacggttctgg

SEQ ID NO: 150065 - DNA, 1114 bp, Cannabis sativa
  modified_base (688)..(692): a, c, t, g, unknown or other
  modified_base (784)..(786): a, c, t, g, unknown or other
tatttgatgattgattgatgcttgtgaaattttatgaaaaataattgaattttcgtttcaggaattattttttttggattgtttaggaaaaattaagcaattcactattttacagaacttgatttcgattttattttaattagttatgattttttgaagttttaaaaaaagataaggccctcacgcgcgcggacaccgagcttcactcggtcagaagcgtgttcggactgcccgtgtccgaggaaacatgctcaggttgtcctaaggccccttgtccgtgcgcggaaaggttgcatgcagcctccagcgccgaggtttctcagttgtgtcacttgttgtgcgcgcgggtggtatgttgtgcataccatcagtacagctcacaatttttttcgattttcttctttttttttcattctttttctcggaattaatttcgaattttttgtgtagttttgtattttgatttttacttttcaaatttcaaatctaattatcaaaattaatttttttaaaaaaattaatttaagatattagtgaaatttgaattttgaaataggtaagaatctatctttttgcttaattaattatcttatttttaaaatttgattactttatcttattttttaaatttaaggtcagatattattattttttttaattattctattttttaaataatttgaccttnnnnnaatttaaaataagattagtttaatcatgatattttgaatagaaataggatatcatgctaacttttaaattttgttatttatttatttatttnnnttaaattataaaatcagaaaatgatattaaattatcactttattttattgaatatttaattttttaaataacatgaaacttgaaaggtagttagcatttttttttttttgaaaaagatattaaggttagttgaaacctaatttttcaaaatgaaaggtttaattttaattttttttaattaatttatttatttaattatttattttaaccgaaaaagtatttttttattattaatttattttcgaaaaattattaaataaatcctatatccaactatcaaacttgttgcaggagtgttttagcatgtttgtaagttttataaaaccta

SEQ ID NO: 150066 - DNA, 729 bp, Cannabis sativa
tactgtatatatatggtgatcttgggcatatgatacaatgataatcaaaataactcttccactgcgtacttgatttagtaccataaaaccaaccgaatgttgtttgaatccatgaataacagcattagtgaattatttcgaagtcccctctaaatcatctcgaaggataccaaaagaattacttatagcagccattcccatagcccctttcaatttgacagaaccagatttctttgggagaaatgaaagtactagtggttgcaagcctttgaggttgaataataggttttgtagagacaattttaattattgtccaagacaacctaaaagtcaagaatgtggcttttatgttttgaaatatatgactgacatcgtcgcacgtacaaaccacaaccgttacatacaagatcaaaaagctgtaagttttgattattgattatagtatttattataataacaaatataatatatatataaactaatataaatttttaatttttttaacagtttgggggtaaggggcaatacgatccaaaaactgaattgttaccattacagcgacatggatagaacgattgatggcgatgattcacgatgacgattgaggttgaaaggcccaataatttttcttccctatgtaatttgtttagattaacttgtagttagatttattaacttattaatattttggactaattttacattaatgtttgtgtaatatttaattac

SEQ ID NO: 150067 - DNA, 506 bp, Cannabis sativa
taatttctcctaatatttgagaaatcgatcacaaataattattgtacatacatatcatgcattcgacacgctaaatatatttattctatataaagtgtgcctatataactgaatcttggtttatgagaaatttattgtgactttttatttatatttaataaaataataaaattttatttacatataataaaataataaaataaaaaataaaataaatctcattaatatttgaactgatatttgatgataatcatttatctatttttatttttttaaaaatacttgagcttactaaaatctataagaacaaaaccaataaaaaaaatttaacaaaaaaataaatgaaaaaaaaaagtgtcataaatattattgaataatagcaattgccaacacaaaaatttcagcacaaaaaattatacttgacccctagacaagattattatcttccaatcctagtaacataaataatgaacaacatgacctcattagttattctaggagaatga

SEQ ID NO: 150068 - DNA, 549 bp, Cannabis sativa
aagtcctacagaagccggaagcgtctggaagactcctcaaatgggccatggagttaagccagttcgacgtacactacgtatcgcgcacttctataaaaggacaagccctagccgacttcataacagaatgcaacgaagcagaagctagcgcaaacgtaccaataccacgagccccatcatggaaagtgttcgtggacgaagcgtcaaacgaaaacggatctggagctgggatagctatgatatcttcgatcgggcttcgactctaggcgactctgcgtttcgaattcccggcttctaacaatgaagctgaatatgaatccgtgattgcatggctgaaattagcaaaaaccgtgggagccacaagagtggaagtcttcagcgattcacaattagtggtaaaccaagtctcgggagagtatcaaatgcgtggagaaaaatggctgcgtatgtatcaattgtccgggagctactccatgagttcacggattataaagtggaaaaaatccccagagaaaagaatacccacgcagactgtttggctaagttagc

SEQ ID NO: 150069 - DNA, 801 bp, Cannabis sativa
aattaataaaattaatttacaaaaaaaaatataattttcctattgaattaaatattgaagaaaaattccaaatatttaagtatcatgattaagaagggaaatttgacatttatgcttaaaaatgactaatggtgtttaattataccatcatcctaaaaattttgtaactatgctaatcttttaatggtaaccccaaaatgcccgctcttctcgcactctctctctctttcactttgtctctctttctcatttgctctctctatcactgccgctgcagccgactgccacctccaccatctcaacgtcccggccgactgctaccttcaacattttcaccctcaaagtccaccacactcaacaaagcaatgggtaagtatttttcttagtaaatagtgttattttttgctgtattatatggatctgaacgttgttagttgtaatttgtggcttttgtgtccttcaaatggaggtagagtttgttccgaacagtctgtgtttttttgggtttttacattttttgcgattttatgcgactttgtgcgattatttgtgcgatttcatgagaaatctgaggttagggatgacatgattaattttggcgacattgtacgatagttatgcgatttagtgtgcgattttgatgttaggcgatttgtgtgcgacatttgtgcagcactatgcgattttgtcatgaatgttttcttgtgcgaccttatgcgatattgtcccttttgtgcgcgattattgtgcgacatgatacttcagcatattattgttgtattaggcgacattgtgcgactt

SEQ ID NO: 150070 - DNA, 521 bp, Cannabis sativa
  modified_base (412)..(416): a, c, t, g, unknown or other
agatgcaaatggatctgcaaggagtacgaggagatgtatgttgcaggatttttcctgccaccgtcttagaagctgcccaacaatggtatttcaagttggcacgcggaaagttcaactcgtggaaggatttttcctcagtgtttcatgcacaatttccctcctcccacaaacttccgttgtacctaggagatttggtcgaagtaaaacaacgaccaagcgagcccttccgagcctacattagcagattcatgacagaggcgaccaaagtttcacgagtaattgaagatggaaagttgtccgcgatacttgggggcattgaagtcctcggtgaactttggaaggacataagaaaaaacggtccaatagactcgaagagcaattttcttcaccgtgcagaaggttttatcaaacnnnnngaggccattcaacgagcagaaggtgaataaaaacctggcaagtcaaaatctccttctactgggacatttatccagctcccccattactcgagcaattcaaattca

SEQ ID NO: 150071 - DNA, 632 bp, Cannabis sativa
atactgattggcggagactgttgtggtggtgcagggctatcagtagccttcttttctgttgatgttgggattggcactggttgatctttaatctctgcatccattggttgtatcattttaggcccatcatatttcttaccgctcctcagggtaattgccttgtagttttccttaggattaacttcagttgtactaggcaaatttccttgaggacgggttgctaccttagttgctaattggcccatttgagtctgcaaatctttaatggaagatctagtttcagtcatgaattgtagcaatagatctgtttgcaaactagaatttccaccagaggcttgttgctaagtatactgttggttctgtgtctggttctgatttcgttgctgatagaacccactgtttcttcggttacctccttggttgaacccatagttgttgttgttctgagaataattcccaatgtcttttgcttcatccattggcaaatcacccacatctgcttgactctcagaaaagtgatggggacctccacatatctcacaaaccacttgagcttgtttggcttgccctgcgatcagctttgttagggcctcaacctgagctatcacctttgtaatggcatcaacctctag

SEQ ID NO: 150072 - DNA, 1153 bp, Cannabis sativa
agaattgtaagtattgcaagcatatggaatattttgggattagttgattgatggttgcagttggcatgcataaagtaattcaattgttagttaattgcgttctgaggtttcaggagctgaatgaaaataagttaaagtgtgtcaagggcgtgattgaactgaaattctggattgttatccataaatgaaatttttcaaaaccatgttatttatcttaattgaaaattgctcatgtttcagatgattgacttgtttcatttaggttgggttgttttcagttgttagtcttacttgagggcgagtaaggatttagtttgggggaatttgttaggatatttttagcgtattatttatgttatttttagagttaattttcttcttcattgtcaccttttggaatagaattatgcttgttttctttaatttcaggtttcgacacttgaatgtataaattggtcaaatttcagaaaagatgatttataaaatagaaaaaattgtgcaaaaaaaataaaataaaataaaactgaaacttcaagcctgaattcgacaatgttctaatcagattttggaataagtcaaaacataaaatttctagatctctcttttatctttccggaacatcttgaatcgtccaattgcaagcaatattgagagagttagggccaaaatactatcagtcaacgcagaagaaaactcactgcccaaataaagggggttcatgcctaggcatggaaatcccatgcagcggcccgcccctcctaatcctgaaaaaaaaaatagattttgggcatcttttatctgtttttttttaatcatttttgggctataaaagaagtggacttcaatagttttcaagaaacaatcaaggagtacgaattttggagagcaaaatcaatattggaggctatctcaacagagttttcaacattcttttcttctctattttcttctcttttccaaaattaatatgtgtgaatttgctacaataaacatgagtagctaaacagttcattagggtctagatggagattgtttgatattgatttgcggtttaatatgatttaattttccctcaatttctatgtattctatttcattcgtacttaattacttttgattgtctgatcaccaattaaatgtctatgattttgat

SEQ ID NO: 150073 - DNA, 522 bp, Cannabis sativa
gtaaacatattctcaatttttttgtatttaaattacctcgattttgtttgaggtacaactttattgtccatgatatcccagtcgaattttctgacctgggttttgtggctgtcatttgagggaccattaccatgtaatgggtgtcacatacaccacactagtccacaaatttggacaataaaaggcaccaaacatccatcaacgtcttcagttcgtcttctgttagagttccaatactcgaatcgaagacgaatagcttccacaactcaagattcgcctccatagcgatctaatgtttctattgatccaagaagatggccatgtatatgcactccatatccttccaagacggcataaattggtttggatccccatgaacgagttccaagagggactcatcccagaaaaagctagcatggtcagtagtggtcttccaagcatcccaccgacccttcaacgatgaagcaaactaagatggcatgacagtacacttacgtgggtacaactctgggaagaagtgtt

SEQ ID NO: 150074 - DNA, 778 bp, Cannabis sativa
  modified_base (536)..(539): a, c, t, g, unknown or other
ccatctttattttggatgaaacttatgataggaacatttagaatacaattgagaaagtaaatctaaccattcatatggatagaaataatttataaaaattttgagaataaaatagtagaatatttgcatagtctattcgaatgacttaggcaaaaattcctaatcctcatgaaatattttagggcatctctaatgattacttaatctcaagcaagtattttacattaatgtaaatactagattgccatgttgatgacttagtgtagaaagaacttacagtttcaaactaagataatatgtcacaacaagatatccctgaaaaacaatagtaagaggttaaatgtacctctatgtatgaatttaaccagactcctactgttgagtgggagctatctaagatataatcaaacaaagaacataaggagacaatcaagaatgatttttgaaagtgacctatatgttagacaatagggatgtatattagaagtccttatatctacaccaactcataaaggttttgagatggtggttactcnnnnggtggaggaattattctaaaagagtgttaaaacccatctatgataatttaagctccatcagtgaagataaataactttgatgtttcaataacactggaaagttatttaactgaaaaaaattctatactgcgttatctctattccattgtgaatagaattagagataagtcttctgtatattcatatgcactttataagcagtgaagaattcagtatccctaaatgagtaatgcatatag

SEQ ID NO: 150075 - DNA, 692 bp, Cannabis sativa
aaaatttggggtaagttaatatatacacccaatatattcttatggaaataaaaaaaaaataaagaagaagaaagcgtagagaaggagagtcgtggttgagttagtattaggttagttttatataattttttttaatttacaaatataatgtatagttttaaatatattttatatataatattaattcatgataataatttaaaatatttattgataaataaatattaatttataattaaagatattttaaaaagctaataaaaataattaagatgaatttttaatatttttttaattaatcaatttataaaaaataaaataaatgagaaaattaggagagaataaatagatgcatttagagtaattttagagcgccacgtcaccgactcatacttcttctttatatatatactaggcgactaagccgcgcttcgcgcgggttcgactgtatttttaatataatttatagcaaaagtataaaattattatgattatcataactattaattgctattatgattaatgtaaaaacgataattgacacaaattctcacaataaaaaataagttgaaaaaataaagtaataaattaatccttaaaaagaacacacatatatatacatctaaaattattatatggtgtatagttgttgaccgaggttttcggcaactattaaaaagatcggaagagcg

SEQ ID NO: 150076 - DNA, 574 bp, Cannabis sativa
  modified_base (509)..(517): a, c, t, g, unknown or other
aattttaattattaaatatatagtactaatatttaaaggatgaaaattgaaaaatacgaaatttgtgaaagaaaaggataaatacttgtataaaatggcaaaattccaatttagtgggacccactatgtggccagccacttaaggtgatttttggcaaatttttatcattttttaatgccatataatttaagtttaaccttagctgaattagtataaaagaaataagatggtctcattatgtaactaatgactcataacctagtttacaatttgtcacacaactaaagagttcttcagacttcttcttcttcattcttctatattcgaacctcctttcattgttcttcataaaatttcacccatcttagtgattgagtacatgcccacacatagcaagtctagtactcaatcatagtgtgtaagacagtgaagaatccaacacctaaaagagaatcgaactcaaatcttgacaatactctaggacagaaaggaacaaggattagagatnnnnnnnnnaggagtcatttaattctgttgcaaccaatgtaagttttattaactttatatgtgttt

SEQ ID NO: 150077 - DNA, 638 bp, Cannabis sativa
tatatttactcatctacatcacaaaaataaatatgaacatgtacaagaacatgaaaaacataacaagaacattcaagggagaaggtttagaaaacttacctctaaaaaggttccctctaagacttcaagcctcacttcaccaagagctccaacaaatgtgagcaagagtgaaaatgactctctatatttataggcaaaaggagacactagattggtgacaaatgtctctcatttgatcaatcaaaaaaaaattacatgaaataataataataataagtagtacttgtaagagtaccatgaactcatacctctacaacttacctatcttctttttatgtgatgagatgtattgaccaagacatatatatacatatatatgctcccatgacacacaaacgtgcatgccatacgcctaggagagttgtagcaatcacctttacatatatacatattacttgcatattggtccacatcaaccctttttatgtgatgagatgtattgaccaagacatatatatatataaaaaagctcctatgacaaaaagctatatgccagcccattctctacgccagccctccctcctactgatatatacaacctattacatttggctttaatgccaagcacacatcagtaa

SEQ ID NO: 150078 - DNA, 528 bp, Cannabis sativa
cgatggtggggaggcgtggctggggttgttgagagttaagatttttgttttagggtgtgggaaatagagaagaaataggtgagaagatataggtgggcatgtgggaaatagaaaaaaagagtaggtgagcacgtgcgaaatgtggcaagaagtaggtgatgattttttaatgcacccttataggcgatggttttaaacggtcgcctataaggttccattaaaaaatcacattttattaaaaaagcatcacctattttgtttactacgattttaaaccgttgggaatactaaattttctcgacgattttaagtaggacttaattttttaagtgacggtccccaaaaaaaaatcgtttttaggaccgtcgcgaatttggatatttgtagtagtgataatacaaaatgtatatactaccgtcagaaaaaattgactgagactttggtcgttgtttgggggtaatcattgtaatttggagatgtgagaaaactagaagaagaagaaatgagcagacctttgtgttggaaata

SEQ ID NO: 150079 - DNA, 568 bp, Cannabis sativa
tagcattctcagccatgatttcttctgtttcagcagttgctgaaactctttcttgcctcttgtttcttctgtttctcctacaagtcttatcaatttcagtatcaaccggaaaaatgacaccttgtccttgacgtcgcatacaccttcaattcctgaaatagacaaagacaataatgatagaaacaggttagcaattagcaagaaaaaataaaccaaagtagaatttaatgtaatcttatgcaatatcaatctttaaataattccccggcaacggtgccaaaacttgttacaaaaattataaaacaataagcaagtgcacgtaatcaagtagtaatcttacacaggtgaggtcgaaccacagcgaattggattgaataccactagactaaatttatgattctatttggcaaaccaatagttttcaagattaaaaacagaataaaaattcaagaaacttaagtagacaactaaagattaatcaagatgagaaaatatggaagagaatcctgttgatttgtttacccaattgttaatgcctaattgatatcttttttcttgatgtgaatga

SEQ ID NO: 150080 - DNA, 502 bp, Cannabis sativa
tttagtataaattaaaatttaacgcagtattataaaaaatatgatatataatccaatacaatataatacgacttaataagacgttctaaacaaactctaaatgcacaattttatcaaaaaaaaaaaaaactggcacattctaggagttgatttaaaggaaatttaattaagtgattctttttatcaatatttaatagttatacttgttctgtgtcatatatttccttttatatatttttatatattgatacagccgacgtggaatagacttattttaaaccacgttataattagggttagggcttttttttttttttgctgtgttgaaatcagtctgaactgttaaagagaaaaaaagaaaacaagaaaaaatcagtctctgaactctgaagtttggaagagagaatagttgtacaatatgagactccttactcataacatgctctcctctaacatcaagggggtcaccaatggcttccctctccggatcgaagtggtgaaa

SEQ ID NO: 150081 - DNA, 621 bp, Cannabis sativa
tatgttgagccgctgtatgtttcaagccatgtttttgttgtgtaatagcctgaatattagttgtaaacattcaaatttatctcttttataacagcaagtgcatgagcacacagtaattcaccaagttggaatcggttgcaactgcatgttttctcattcgacacgatggtgcaaactcgtagaggcctgtctgacccagcaaattcacagatgctggatccgacattgtaggttcagggagttcaagggttccacccgttgtcaatcatggacagacgggaagcatatggtgaatggtgggacaaatcctgttattgaaactgcgcctggcatgcaagagactgggaataacagtttcgcacacagccagggcgttcataacacgactattccaccaagactcaacgcccaaacgacaatcggagacgcaactgaattgcaaaatctccgtgctgcgctcggactcatgcagggtcatagcaatactctgcatcatgatcaggaggaattgcgtgccgcagaaaatctcgtgattgatgaacagaggcgtatgttcgctgaatggagagataaagagatggaggcattaagggctcgccatgcagaggtcgaagattgtag

SEQ ID NO: 150082 - DNA, 751 bp, Cannabis sativa
  modified_base (478)..(478): a, c, t, g, unknown or other
aattatattagtttactgaaatgtaatttacaactagctaagtattttaaggataaaatacattgaatggtagaacgataaatttatccctgctcgatgtagaacatctatagaggattttttgactatttgaattgaaacgatgggtaattcaaatcgcatctatttctgtaatagaacattctatgtaattaagatttcaattccaaatctatagtggagtcagggagaattaataagttagaaaatttaatttacttggtaaattttggatctacttattggaagcctgattacatagggtcatggtccttgaactaactggaataaaattattttgtagtctcaattaattagttttaattaatcaattagaaatctaaataaggctatgtattgtttgtgaatttttcattaagcaatggcttgtttgagaagaaaagaggatttagggttaattaagagactttgtaaggtntaattaataaataagttaaataataattttatttgatgattaattataattattaaatagatagaattgacatttatagagttagaattaaaatatggcgtttgtgaaagaaaaaacaagttgttaaataaaataacaaaattaaaattaatggggtccacaatgaggtcggtcacttagggtgcgtttgaaaagccacaatgtaattggatttgtgtgtaattggaggtaattacacaatttgacatatttgtctgaccatgtaaatacact

SEQ ID NO: 150083 - DNA, 719 bp, Cannabis sativa
tttatattttaaaactcttaactataacattcgtttggaccctttattattaaaaattaagatttttaaaaagttaaaaaataagactatatatcagcactgaagcttagtctacctaactcaactatttttaactataaatttattcgaattatctttaatgaagtcagttttagaccgatgcctaattcctttttttttttttctagtagtgggaaaataataaaatagataaaaataataaaatagaattaattaacaatattatgagtatattcacaattagtagttatacccatggcatagatatttatttttaaattatatatgaacattaacaataaataattagaactcattcatttttattgaaaaaattcgtccctatttgagaatgaacattgatagtgaaaaattagaatgacatttgtgtacatgtaacatataaaatagaaaaataattctatttatttttattgtttgagcctgctattaataaaccatccttgcattgattaattcttaaattcatattagtattatacaatatcataataatataaaatctatgattgtagataaacccataaaaaaccattaagatttttttcttgaaaaaaaaaaaaaagaaaagatatctcattagtaaattgaaatgcaccaaactcctaagtttttctttaatttgcaacttgtagaaaaaactaatgtatcttagt

SEQ ID NO: 150084 - DNA, 585 bp, Cannabis sativa
  modified_base (290)..(290): a, c, t, g, unknown or other
ctttaacattagactccctctaaattattgccacaatcatttgtaatctattttatgaatatgacttctgaaacaccttcaaacaacgaactcccttcgtctttgaagtgtgcgtacttacttcatcccgaagtaaggcttgaacaagtcttctcccgaagaactgatatggaaaacactagaacctagatgaacaactaggttctcacaaaaagaaaactctcttctcacaaataagaaaaacgcaaaaaatgaaaactagaaaagttgattcgaatggctgctctctnggttctatttatagaacatagaaatcctagagacagcctcaaggtcaaatctacacaactgtacaaaactttcttaagataaacttgatttgcagcatcagaaacagattctgacacagcaaatcagaccagaaaaggaaacttgtcataaacgagtccgatcttgtattgggtcttgattcctgccataaacagtctgtataatctaattacattaagacataatcgaatttaataaggaatatagcaataatcaaagtttcctttaaaaatcaactttccataagagaattgc

SEQ ID NO: 150085 - DNA, 683 bp, Cannabis sativa
agtattcgctttacctaatttttctagcacatttgaaatttaatgtgatacttctggtataggtattggcattgttcttatgtaggaagggaggcccgttgcatactttagcgagaagctaagtggggctgcacttaattaccacgcttatgataaagagttgtatgccctggtgcgagctttagaaacatgactacactatttgtggcccaaagaatttatgattcacacagatcacgaatcccttaaacatttgaaggggcaacacaagctcaacagaagacctatacgatgggttaagtacattaagatatttccatatgtcattcgaaataaacaaggtaaggagaatgtggttgttgatgccctttctcgcatgtatgccttaatctctactcttgatgctaagttactaggttttgaacacattaaggaactttattctctttaccatgattttggggagatttatggtgcttgtgaaaaatatggtgagggtaagttttataggcatgagggtttcttgtttagggagcataggttgtgtgtacctaattgttctttacgaggtttgttagtttgggaaccccatggaggagggcttatgtgatgagaacactaaggccaaagaaacatgtcaaatttgttgccctgttgacagggcgcgagccaagagattcaaa

SEQ ID NO: 150086 - DNA, 637 bp, Cannabis sativa
  modified_base (404)..(415): a, c, t, g, unknown or other
atattttgtgaagtactcaggggaagatgtctgtggtcaagtatactctggaatttgatcgggtgtctaaatttgctagtgatctggtgcctacagatttcactaggatacagaagtatgtttgaggactgaatgccacaatcagttgagacttgaaaattatcccatcacatgacactctgtataagagagtggtatacttggccttaattgctgaggaggctgagcaacaagtaataaaagagcaggctgcaaaggatgccgtcacgacatcaaatcctctcgtcagtggtaatatcagtaaggggaccgacagtggcaaccatgatcacaaacggaaggctgaggcttctggagcatcagggggaaatagaaagtttcggggaaatagaggtggccgtcannnnnnnnnnnnctcattccgatcatatcctgagtgtcctaaatgcaagaaacaccatcctggtgagtgtcaagccaaggcatgtttccagtgtggcgtggtgtgccactttatcagagattgtcctcaggccaagaaagaggagcctaagaagaatacttcactgaaccggaggcgactgtttaccatgacttaggctgacgctaatgcttgtgacaggtcagttatctatta

SEQ ID NO: 150087 - DNA, 595 bp, Cannabis sativa
aacaactggtatcagagccatggtaatgatttactttcatcaaatatggatttaaaacgatgtttgtgttgatttggatggtttcatgttcgtttatgtgcatatttgatcattgtatggaaatcccagttagacgtaaaattaattaatttaggcttttaaagaacctaatttggattttttatgaaatagttataattttttgaatttggttgaaaatatcttaaatcgagcaacacacgtgcgcacgcgaatgggagactcactcggacaagaggccttcaaacaaggccctgtccgaatttttccccttctgaccgaggtttaccccccatacaggctgcttgcagcctttccctcgcccacatgcagcttcgtgtgcgcacgaggagtatgcaacgcatattccctagtgcaatcttgtttttgtgatatcttttgattcaaaaattatttttcattgaaaaaaaaaaattcaaattttggtaaaattttgtgtagaatctgaattttgaattaaaaatctaattatcacaatgaaattaatttttattaatttttttaattagtgaaaattagttttagatattagtag

SEQ ID NO: 150088 - DNA, 519 bp, Cannabis sativa
  modified_base (190)..(191): a, c, t, g, unknown or other
aaaagttggatttttagggccccagggcctgtcatcgcagccacagcagagctcgccatggtgaggctccagcaggttggagccgccatagcaaggggcattggtcaccgtggcgtggcccctgattttcctggggtttttgtttttctcatttttgccataacttttgactcaagactccgttttggannttcttgatattgttggaaagctcattttgagctctatatgttgatttataaatgaaactcaaattatttctgtatgtgaaaagaaatttgagattaaccctatttgtgaaatctcaggattgtgtgactaagattaccaacgcttgctcaggaacaccaagggatgtggaatctccacatacttggattacaaggtaagacaataaactagtacgtagagtttagcgtagtggcacacatgtaagttatcatgtgtatgttatgtgagaaactgagattagggttattaccctaaatttagcaattatgtgatctagaattattactc

SEQ ID NO: 150089 - DNA, 535 bp, Cannabis sativa
ttcgggtttggttctttgtctgggttctggtcctagtctgagtcctagatctagacaccaactactggtctgttccaggccccattacctgaatcccgagaaaagatctggatcactttcctaagtctcggtctggtttgtttcatgtcccaggtccaattttttgagtttgggttcgggatcaagacttgggtgcggttctaggtcctgaccctagttttgtgtccctattctggttccatgtttgggtctgagttcggtttgggttttggtcccgagtccttgtttgggtggggatctaagtccggctcccaattcgggtctatgtcagatttggagtccgggtcctggtctggttacggttggggatgtaggtccaatttcggttatgattccaagtccaagtcctagttccagtctcggtccacccccggctcttgttccaattttgggtcacagggtactggttcgggtccacttttttgtttgggactgggttcaggtctgggtggaggttcgggtccttgtcagggtt

SEQ ID NO: 150090 - DNA, 1181 bp, Cannabis sativa
  modified_base (785)..(786): a, c, t, g, unknown or other
atgggttatgtgaaatggcttgattcctatgggccattgaacagaaggtattatgaggagttgggagtagtgccaaaagagctgataccatatactgaaaaacctccagagcttgagttgaaggtgcttcctagtcacttgcagtatgagtttttaggtgaagataaaaagctgccagttattgtgtgagcttctctttctgatgtggaaactgatagattgctaagagtactccgagcgcacaacaaggccattgcttggacactaggtgatgtcaaggaaatcagtccttcaactgtgatgcaccgaatcttgatggaagagaatgctaagccaacaattgatgcacaacgtagactcaatccacctatgaaggaagttatcagaaaagaagtactcaagtggttggatgttggagtggcctatcccatctcagatagtaagtgggttagccctgtgcaagtagttccaaagaaaggtggaatgaccgtgatcaagaatgaaaagaaagagttgattcccacaagaacagtcactgggtggaggatttgcattgattataggaaactcaacaaagcaacccgaaaagatcactttcccttgcccttcattaattaaatgctagacagattggcggggcaagaatgttactgttttcttgatggctactctggataccaccaaatagtcatagcacctgaagatcaggaaaatactactttcacatgtccctacggtacttttgctttcaaaagaatgtcattcggattgtgcaacgcccctgnnagttttcaaaggtgtatgatggctatcttttcagacttaattgaatcctgtattgagatctttatggatgatttcttggtctttggctcctccttcgatcattgcttagaaaattttgaaacggtgcttataagatgcgagaagtctaacttggtgctaaactgggagaagtgccactttatggtgacagaaggaattgttctgggacacaaaatttcaaaagcaggaattgaggtggacaaagctaaagtttcaacaatagagaatttgccacctcaagtttctgagaaaggagtaaggagtttcttgggacatgctggtttctaccgaagatttattaaggacttctcaaagatctccaaaccattgtccagtttacttgttaatggcgttcc

SEQ ID NO: 150091 - DNA, 586 bp, Cannabis sativa
aaacccacatgtcttgtcctatgatgggaccacagatccggtctcgcatttgaataatttcaatactatcatgcaagccaaaaatgtcacgaacaatctatgttgtagtttgttccccacattgctagttggagcagcgagcaccgtgttcaataaatttactcatcattcaatcacttcttgggaacaattgtctaaggacttcaaaaaacagttccatgctgcaagggatagacgacccgaagcatcatcactcaccaacataaagcaacagtcgggcgagacgcttaagggctacttaagtcgttttagcacacttgctgcgagactgaggaacctagatgatagcacccagcttactgctcttcaggcacggatcactactgatctctccactgctggaggcgagctatggaatgatctatagggttgcccaataaatacattactgagttcaatgaaaggactcaataatttgttcggaaagaggaagctagaaaggagatgaagttgttgcagactggctcaggaaataaacccaacaaatgtctcaacaagtaccgtctcgaccaaggctgataatcca

SEQ ID NO: 150092 - DNA, 570 bp, Cannabis sativa
aaaaaaaatataatttatataatacaactatttattttatatattaacaaaaaaaatatatacatactaacaaaaaatatattaaagtgtaatatatacattttatattcacagcaaataaaaaaaccatacaactaatatataacacaaatttatattacataccaaaataaaaaatcttaaaaaatcacaaatcacacatttatatatataacagaaattgaaattcatattacatatcacaaaatttcacagaaaattaattttatttagaaatttcaaactaattacaaacacatacatatattacacagaaaatctatcaaaaataaatacaaaacacatacttgaaaataagaaccgacggtgacggtgatgcgacggtgatggtgcgaagaggtccactgccacagtgcaaccgagagaggaacccaaaaaaaaatatgcaaccagaaaaaaaaaaaaagtttgtagaaatgtagaaagtaaaaatgtaaacggaaaattagttacctgaagcagtggtggaacagccggtggtggaacagcggtggtggaacaaccggtggt

SEQ ID NO: 150093 - DNA, 528 bp, Cannabis sativa
cgcgagatttatcgcagcgtggagatcttcttgatcatgatgtagggtattgttataaccctgcatgagtccaagaacgtcacagagattttgtaactcactagcatctccaatgattgtttgagtgttggtaccgggcggaacggctgtgttatgaatgccctagttgggtgcagaactgttattcccagtctcttgcacaccaggtgcgatttcatctatagtagtcgttacatcgtgacacacgcttgccggctgttcaggattaacagttggcggaacctttgtgtttcctgggttctgcaatgtaggacccaccgtctgtgaattggttggatcaacctgacccctacgagtctgcaccaccatcgtatttgtggttagattttgaatgaagagcgactcttgagctcaactctcaatgaaagcaccaaaatattgacctcgcttttaaccaacgacaatgagtcttatttagtaagggataagtgatttatagcgatcgatttatagtaaagcaatgtaaag

SEQ ID NO: 150094 - DNA, 514 bp, Cannabis sativa
tagaccacattaaaattaactcaaggtactagtttaccgagtctagcttaatcatgtcttagacatataattctttattccaacatatttatcatggcataacattcaacatcttttaactactggggtaataaccctagaccaaacaaccgctcatttagggtaataaccctaatcccagttcttaattattcacaatcacaatatccaatatgagcaccactgcgcttaactctacgtgcatagtactaattcagattactaattcatgaaaatcaaagctccaacttgagcttaattccataaaactcaagctcgagaactcatacatcatacaccaatttaagggtttaataacagaataaaaacacaaatatattcctttaaattctgtccaaacttaacgcaaacaaactcaataaattaaagctcaaaacaacccaacacacttgaacatgcatcacaagttcataaacacaatccacatcactttttcatattctccaacaattaa

SEQ ID NO: 150095 - DNA, 718 bp, Cannabis sativa
  modified_base (317)..(319): a, c, t, g, unknown or other
aaaaaaggaggcccttggattctgagagtctaggggcactaaaacaagaagtacacaagttgttagtcaacaattttatatgcgaggtattttatccttcgtggatagccaatcttgttctcgtcccgaaacctaacagaacttggagaacttgtaatgatttctccgatctgaataaggcatgtccaaaagactattttacacttcccaagatcgaacagttagtggatgcaactgttgggcacaagattatgtcgtttatggatgcatattctggatataaccagataaaaatgtatgtcccaaatcaagaacannnaagcttcgtaaccaacatgggacaatattattataaagtcatgtcgttcggactgaagaacgctggggcaatgtatcagcgactagtaaacgaaatgtttgcaaatcaaatagtgtgagacattgaggttcacgtcgacgatatgttggtgaaatcgattaagagtaaggatcatatcttagacctcgcacaatgctttaaaatattaaaaagtataacatgaagctaaacctaaaaaaattgttcctttggagtttcctcgggaagtttttaggattcatagttaacgcgatgggtattaaggcaaatcctgaaaaattaaggcattaatagacatgccgcccccgacaaagcctaaggaagtacaggccctgacaggaagaatggcggcacttaaca

SEQ ID NO: 150096 - DNA, 682 bp, Cannabis sativa
  modified_base (395)..(396): a, c, t, g, unknown or other
caaaatttgttgagggatttatacaaggaaaattatagtaaatattcccatatacatacagtaaaaagttagcaaaataagtttagattatttattatttatattatattttaccacataaaagaatgaataatttttttttagaattagaagtaaattactgaaagattatggtatatctatattagtttcgttaaaataatttttattgaaaagttatgttgattttttaaattttttagaagttgttgtgggttgtttgtatataaattttgttgtacagtatatttttattttgttgtatagtttattattattcttaaatgatatttatttttattttgttatgtataatagcggtatataattttattagcataatacaaatattttanngtatgtatataattttattagtatgctacatatatttaattattatttttatatattttagttgtatgatgtatatttattttaaattatatttaattaatttttattttagtatatataatagtggtatataattttattatcatgacatatatatatattttaattgtggtatataatttgattagtaacagtatatatatatatattagtaatatatattttattattattattattgttagtatatatattttggtggatagtatatgtattttttattata

SEQ ID NO: 150097 - DNA, 506 bp, Cannabis sativa
aaattattaaggttatgataaatacggtataaaaataaatgttattaaatatgacattatctaatcaatcaaactaaaaatatagtttttttaacattaaaaaaaatatgaatttaaaattcataaaaaaataaaaacttaattaaattacaataaaaaatattaaaattctcttcatatttatttttttttaaaaaaaaatataacaaataaaactatagtgatcgccggaaaagtcaccggagtttgctgccggcaccggaaaagtcatcggagttgctgtcggtgccgaaaaaatcgccagagttgcagccagcgtcaaaaaagtcgtcaaaatcaccaagaaaccggtttcttgatgatttttccggtaattttaccggtgacaatgtcaattctaacgattattctgaagtttgatgtcggtgccggaaaagtcgtcggagtagttgtcggtgtcaaaaaaatcgccggagttattaccggcgtaaaaaaagtcatcagaa

SEQ ID NO: 150098 - DNA, 705 bp, Cannabis sativa
  modified_base (641)..(652): a, c, t, g, unknown or other
cggaagtcaagtacataatttttggtataaggtatgctttcttggttgttagggtttgacgtgtaagtctcacaaattatattgaataatattttagaatacctaagaatgaataaattatcacataaaatttaaacataccaatgatgtatcataaaacttaaactaaagtaaagataattatgtttctagaaccagaaccctaaattctattatcctagaaaacacttgactcataaaactcgaattaaaatattaatagaaaatgcaacgataattagaaattacctaagtcaacatcacttgttttatcttattttagattattttttgttgttattaataacttaaaaaattttgagaatgttgaattatagcccttatgttgctgaaatttcagtagttgtatgataaaattatttgatacaagtttctcttaaacttggttgttaggattttttgttaattttcgttatggataaatcatggatgcgtgaggagcaccggttattatatagttagtaatttagagtaaaattaattactagttagttacaaattatatttagtatacttaacagaagaattctattaatttattgttaagtaaaacaataaattaaaatattacacattatttnnnnnnnnnnnnactaattattatacaaaacatagcttaaagaattataaaaatgatactaatat

SEQ ID NO: 150099 - DNA, 742 bp, Cannabis sativa
tttttagaaaattgattggaaacagcctaggttgacaacatatcaacctgggtgttgggcccggtgctaggtgttaacctgggcgctgggtcccagctgtggccctttggaagttttgtttgtcctcagaaatatttgaatatcaatctcttttgaaagtggagaagatgcttaaaagagttcttggaaaacatcatcgaagttagcctaggttgacaaaatttcaacatgggcactaggctggccccgagtgttaacttgggcgttgtgccttgcttttggcatttaggaagttttgtttcttccccaaaagtgccactttccctatttttgatgaagacaaagaagatgaaaaagtcagattgttaatctgatacttggaaggtgcccacattgacaaattgtcaacctgggcactgcggtgctcgcgctttgggtgctcaaaaatgaacttgctccgaatctaattctaatgtctcaaatatgtttgtggtatgcctagttgatgtccccatgtaaagtttgacccatttgcactaagacggtcccaaaaattgaaaccctagttgggtatgtcaacctaggcgctgggtgaaaccctatgtgccaaggttggcttttgggtaataggtttgtgtaattttagctcctgggacttggattaggctgttccatgtcttcatggtacataatattagtaaatagtgagttggattttagttattgaagttcgaacttccat

SEQ ID NO: 150100 - DNA, 587 bp, Cannabis sativa
ttttttaagtaattaaataaatattaaataagaccttttttagcaattaaaatttataaatattttttttatttatataaaaatctgttggctttattattttaacaattaagtcatttaattataatatttacaatttttttttacaaaaattaaacttatttttatataaattaaaattttgactttagaatgaattttttttcaagaacacaccctgcttcattttcgctggatgatcatactcttgccatgcatggttgcatgatactctttgttgaaaatgtctcaattgcattgcatttatattcgttggtcaagtttagtcttacatatattgaatttttacctattcgtacgaatagatccacaaaataacctttatcaatcttgtcacttatgtcctcaagcaggttcatgagtttcttcgctaattcttgcctgcggtattctggagcaacaattaaacatgttactcctttttcattttgattttacttttttttttcatttaatggaggtttggctgttttgggttgacggtaaagtagtacatatatctgttgtgataaatccaacacgcaagt

SEQ ID NO: 150101 - DNA, 758 bp, Cannabis sativa
gaaacttttgctagatcctaccatagtattacccttaatcatattttgttatctttatctgactacggaaaagataagtttattaagtcatttattttatatacaatgagaagttaaattttctgtatgtacattgtatattatatgtacattcatttattgtgttttatttctttttatgcgatcacgtatactgtttggttattattaataataaaatatataatagttttaagtaataataataataataattcaataataattaatttaaattttagtttagaaatttattaaggatatataatattttagttaaattaattgaaacaaaatatcatcaaagtgatctattttgtgtagattaatttaataaaaatattatgataattgtgtgtgtgattcataaatttattaactaaccgaaaagtgagttaatatttggttgaagttcatgcatgtttatggtgataaatgtttgacaattatgaggcattttgtgtgaataatatgttagtccaaaaattgcatattgtttgacataatttattgtcaatatttgatcattacaacaagaataccgcttacaattaatattcctatccaaagacttaatattaatgttgtgtttggtatcttgagatgggattaacccttacttgaatttattgttttatttggattcttatatgagcatgttatttatgtaattatattgttcttttcagctgttggtatctgctaaccttaattcggta

SEQ ID NO: 150102 - DNA, 675 bp, Cannabis sativa
ttttattaactattaattttcttattagtttaattgcttactctttcactgtttttattttctagtttaatcctttcttaatttttattcaaccaaataattgtaaaagtttaattttaacgtacttaactacaatcctcgtgggatcgacctcactcttggtgagtttactacttgtcacgatacgtgcacttgcgtgtgcaaaaatatcacaacaagaagaatttttagagcatctattgtagcgtatttttagtacagttctttaaattttttaaaacttttctattttaaagaagttgttgtgagtgctcttataaatatattaattagtaattgctttccagttatcatagataataacaatacataaaattgtatttaatgctatattgctatatgcaactgcgttatttgtgatatgctagttttaagtgtattttataaattattttaaaggtgtgtatcaattgattatattcattttgtgtagaattacgcttattttctacttgtttcaggtttaaataataaaattcataatatgaattaaaaatgagaagaaacatgttaaatgaaatgaatatgataaatttatcatgaaatttaaaaatctaggatataatggggtaaaagattctaagtttataatgctcaatatgctccatttatgat

SEQ ID NO: 150103 - DNA, 669 bp, Cannabis sativa
gggcgggttgcacttaaattttagcaacccgaactttagattaggttagaaaatatatatgataaactaactgatatacaaccctaatatatatatattttttgttagagtctcacattgtttacaaactatgtgagtattatgcttactaactacaagtaaacacaacatatacactatatttcattaaaaaaaatactacaagtaaaatatttcttcattcacaccgatttgtccaaaaattaatattgtttctctttgtaggggcaattaaatagcttacccaattaattttatatattatatataaatatatattcaattgattactttatataaatatctaaaaattaatattttttctatacatttgattattttttttccatttacttataatatttataattttattatttcataattactttcaatatacatcttaattgagtttaaaaaatatgacactagaaaggggaagagacaaaaaatattcatcaattaaaataataatattagtctaacttaaaaaatcgatacaaacaattaatattataaacaataatattaataaaaaagataacaaatcatgattcattaatttaatgaattgttgcaacaaaaaattaaaaaataatattttagaatatctacctctcattcaataaa

SEQ ID NO: 150104 - DNA, 1084 bp, Cannabis sativa
  modified_base (642)..(643): a, c, t, g, unknown or other
ctaacatgaatgaaaattcaagagacatgatttgatacgtgtcaaaatttgagggacatgatttgatacatatcaaagtgtggggagtatgatttagggcataaacaatcatcgaattggtaaaattgaatgaaattagacaaatgtccttaaatctaacaatctcaatagttagggagaatttttaacgatcataaatattcagggggcatgatttcgtacatgttaacatttaggggacaaaaattctaataaatcttttattaatatatatataaataataattttatcattaattttattatgtaattatttactgagatttttaaaaaattaaatataataaaataagaatttagaaaataaattaaatagataaaaaatgagatgaagaattttacgtaattcgaatattaatgatttctaatccacaaattaattatattgggttgaatagctccactatcgtgcctcccttctgaagacctcctttttataaggaggttttacaccatataatgaaatttttattttttttacttttctactatagggcggaatatttttcaaaaatattgtgtaagttttataatgtgtactgtgttaactttttacggttgttttacggttattttttagtnnttccactgttgttttaattgttctattttgttgttttacaattattttataaaaagacagtatttttgtaaaaaattccatgtgacagtaaaataaaaaccacttttttatagggataagttgaaaaagacctctttcttatatctattaatcaaaaataccctcttattgttttttattaaaatatacccacttttttaactggattgtctaatatacccgcactctctacttaagtttagtatataatttacataacttaatgggtctaatgaaaacatcatccataaaagtaggtatatctaaaaaaatatgaaaatagaggtaaaaattaaaacaaattaagtaaaatgggtatacaatgtaatttcctattttttataatcaatatatgtatatatttatatagaggaaattacacttagtatgggattttaaaag

SEQ ID NO: 150105 - DNA, 565 bp, Cannabis sativa
agattatggtagtaccgaacaaaattttcctaataatagtgatttttttttatcattgattttagatcaatgttattattatgatataaggtcaatattcttaccatatatatatataattattttatttttaagacagaatcaatattcttaggacagaattatagtttatttttatttatttatttatgactgtgtgcattataattattgaaactattaatttttttaaaaaaattacagctgcaaaaataatgttcaaatattttgttacacacatgcaactgtttttttctagtaagtaattgtttgaactttattttcggcattggaaactatacagatttctaaaaaattacaagtggtcttaaaaaattacaacatacatgatcgtaaaaataaattggacgaaaaaatttcttggacactgaaacagatagaaggtgttgacaataaaaaaaaaatgaactataaatctcttggaacatttttatgcattgattatatatctgttaaagtagttttttgtcaatggatctaaaaaatcgtagacaaggaagatgaa

SEQ ID NO: 150106 - DNA, 578 bp, Cannabis sativa
tcgaaccttgccatcgacattctccttcaatctgtgttcttgtagaattccttgatgaatcattgatgagttcttgatgagttcttggtgagggagcaagtgatctttgaatctcctttaatgatcgaagaaccaaaatctgatttgtaggaaatttaactctgatacatacgaattaacctatgtaattccaacttcaagatcacacttaaacaaacaaaagttaaatcaaaacaaacaaatcaagaacaataaaccagctaacacattaaaacagaaaaatataaaacacatgaatctaaatggctgtcagacacaataacatagagatttatattggtttcgatcctaagttcaatgtgaacttggtcatactctagtttgaaagtattgccaccaatctttattgataatgagaataagagatatcaatctcaggagctacaaggaaataatcacatcaagtcatccatggtgtaatccctcaacactcattaactcactagttatgagccaacataatcaaataatgttgctcaatacaatgtcccaatcccagctctctctctctctctctc

SEQ ID NO: 150107 - DNA, 1772 bp, Cannabis sativa
  modified_base (915)..(915): a, c, t, g, unknown or other
  modified_base (1273)..(1274): a, c, t, g, unknown or other
accaagaaagtgcaaagtttgactagtcggatcgccgcactcaacagatttttttcaaaatcaacagacaagtgtgttccattcttgaacatcttccgaggaaataagcaattcgagtggacagaggaatgtgaaaaagctttttaggagctaaaaatgcaactcccaaagcctcccatactctcaaaacctctagacggagaagaactcaggatatacttggctttcacggaacatgctgtgagtgccgtgctgatcagagaagaaaacaacatacaacacccagtctattacatcggtaagagactcattgaggcctaaggcctgtatccgttgataaagaaactcgcttactacctgattctagcaacaagaaagataaggccctattttcaagctcatcctgttctggtgtacactgaacaaccattacgccaaatatagaaaaagctggacgcatctggacggttactcaagtgggcagtggagctggatcagtacgaaattaccttccaaccctgaacaacaatcaaaagccaagctctagcagactttgtggtagaatacacatgcaaagaagaaagcctatcagaaggcaaccccaagccggtacatacacctcagaaaagtaatagtgaaaacaagctgacttggaaactacatgtggacgggtcggctacagatcaactatctggttcaggaatcacccttgtcacacctggggggcaacacttacatgctgcagtcaagttggattcaaggcatctaataacgaagccaaatatgaagcttggatcgctggccaaaaactagcccgagagatgaaagttgaacacatcgaaatctgcagtgattcacagctggtggtaaatcacatatctggagaatacaaggctcggggagaaaagatgatancatatctgagcaaaatacatgacctgctcgtacaattcaaaagctacggtcttagaaaaattccaagggaaggaaacacaactgcagacacgttagctcgattggcaagcagcaatgcaaatgatagagcaaacttggttcctattcagttcctcgaagagcctagcattactggcacggaagagatagaaatgattgatacttccacaaaccggatgacaccaatagcggcctacctcaacactggagaactcccgaataatcagaatgaagcacgaaagatgagaaggaaggctgcacggtatatcatagtggagggaattatgtacagaagaggattatctatgccattgctcanntgtgttactcaagaagaagctgcacgacttttatctgaggtgcacgatggattttgtggaaatcatgctgcagggcagagcttatctaagaaaattttgaggtaagggtatttctggcctacaatgattgaagactcgaaggcctatgtcaaaaaatgcgacaaatgcaaaagattttctaagatacctcgagctccgcccaatgagttaactcagatgcaaagttcgtggccttttaccatttagggaattgacctgatcggactgttacccaaaggcaagggaggagtgtagtacacagtggttgttgttgattacttcactaagtggacagaagccgaaccactggcaaccattacatcttaaaaagttcaagactttgttgtgaagaacataatctgtcagtttggattgtcatataaaatagtttcggaccatggcaaatagtttgacagtcagtccttcactgatttttgtgcaaaccatggtatcatcaaa

SEQ ID NO: 150108 - DNA, 735 bp, Cannabis sativa
gatgagcatgaacgttcaatactagggtacgaccactataccacatacacaacgtaccacactgtacgagtgtttgttgggtttgtttcgtaccctgagtaccactgagtgaaataccacacatctcagcactctcacgtactcgtcttggtatcaccgtattgtactcacaaacaacattcactataccaatgcactctgtatcataaccatacacgtgttggtagtgcaaataacaatctaagcatgcatatacacatacatatacacacattcagataatcatatcacacattatattcagttcttacctgatttctaaattcaagtgtgctggccgacctgaacggaaattctcgcgctagatggatgccctaatcacattaattgtaacacagataagtgactcgctaaatcactttccgaggatttaaacttaaaactaaaaattcccctatcgataaataacatggcaataccctaaatctctcaaaaatgggaaaaactagggtttcaaaaattctcccaaccggcagaccggttcccaaccgaaattccggttctgtgttgggaaaacaaaaaattctccccttgaccttaaaatccatccaaactacaccaaactttccagtatacgtgtacagtgcatttacaacctaaaccaaccagaaaatcacagaacaaaccaataaattccaacttgccattaatgacctaaacttgagtttcaaagct

SEQ ID NO: 150109 - DNA, 866 bp, Cannabis sativa
aagcctgatgttcgagttttctcaaatcaagtgggcaagttttgtctaaatttggagccattcggccgcgggaatgctcctagcagcctccctgtgcggcaaaagacgcccattccccctgatgcatgcgcgtggatggtatgttgagccaaatgcaattttttattttttttcatgctttttcatggaataactttcgattttttgtgtaattttgtattttgatttttatttttcaaatttcaaatctaaatatcagaataaaattaattaattttattttaattgattttatatattagtagatttgaattaaaaatggataaaatctaatattttgcttaattagttactttttttttttaatttgattattttattttatttttaaatttaaggtgagatattttatattttatattatttaataaattttataaaatgaccttatttgaaatttaaaatgagattattttaatctagaaaatattaaaaaatctaacaagaaattttgttaactttcaaaattttgttattttatttgaattaaattataaaattagatgatgatatttatttatcattttattttattagatatttattttattttcttttaaaataatataaatattgaaaagttagctggcatttttgaatagatatttaggtttgttaaaaatctaatttttcaaatttataggttaaattttaaaattaattatttaatttaatttaattattttcaaaaataataaaaaaatgatttagatttttttgaaaataatttaattatttaattagtttaaattaaacaactcctatatccaactatctagtttgttgcatgtgtgtgttttatatat

SEQ ID NO: 150110 - DNA, 1169 bp, Cannabis sativa
atggatctgatgaataggatattcaaggatttcctcggtatatgtgttatagtatatatcgatgacatccttgtgtactctcaatcaaaagcgaagcacgagcaataccttaattaggatggttctgcagaaattacgagaacataaactgtatgcaaagttcaaaaagtgtgagttttggttatctcaggtgtcttttcttggacacattgtcagtaaggatgggatcaaggtggatccagggaagattgaatatgtcagggattgaccaagaccgaagacaactactgaagtcggaagttttctgggttttgctggttattatcgtcggtttgttaaggggttttctaagatctcaacacctttaatcgaactcactaaaaacaatcaatggtttctatggacagataagtgtgaagcaagcttccaggaattgatacagaggttgattacagctccagtgttagccctaccatctgataaagagaagtttgtggtttactatgatgcatccagacagggtctaggatgtgttttgatgcaagttgatcgggtaatctcttacgcttcttgtcagttaaaagagtatgaacagttatacccaactcatgatttagaacttgccgtgataatttttgctttaaagatttggcgaaactctacggagaaaagtgtgagatttacactgatcacaagagccttaaatatttctttactcagaaaaatttgaatatgaggcagagacgatggttggagttggtcaaggactatgattgtgaaatcattgaccatcttgagaaggccaatatggtggcagatgccctttgtaggaaaggccttgggaaagtatccaacatgattttgatttcacccaagctagcaactgatatggtcagatcaagttttgagtttgttgtaggcaaacctaataatttgacattgcaatctgatctgttagacataattaaagtggctcagttaactaatttagaattggtgaagatctgagaagaagttttagctggtcaagctaaagattttatagtgttaggtaattggatgttattgtttggaaccaaagtttgtgttccaagcagtatggaacttagaaatgagattctcgaagaagctcataccactcgttattcattgcatcctagcactaccaa

SEQ ID NO: 150111 - DNA, 517 bp, Cannabis sativa
atgtaatagactgggtgctgcacattattctcttctttgattagtacggcactcacggcatatttcgtgtgagctaagtatattcccaattccttaccgtccagaggttttgagagtacgggaggtttcgcaagttgtgcctttagctcttggaaagctttttcacactcctctatcgacttgaactgcttgtttcctcgcaggatgttgaagaatcagacacacttgtctgttgattttgaaacgaatctgctgagcgtggcgatccgaccagttaagctttgcacttctttggtttttgttggcgagttaatatccaggagggcttgaatcttttatagattagcttcaattcctcaggttttgacaccgaagcctagaaactttcccgagctgactctgaaggaaatctttaagggatttagtttcatattgtattttcggaggactttgaagcattcttccaggtcgtctatgtgccccccaacctttatggatttgacgagcatatcatcca

SEQ ID NO: 150112 - DNA, 626 bp, Cannabis sativa
ctaagggtctgtgttcaggggttagggttcagggtgttgggtgttggggtttggggtttgggttctagcgtttaggatttagggtttactgttatacggtttatgggtttgagggtttaggtgtggagtttagggttcagggttcacggttaaaagcaatgctaattggaatgaaaataatataaaatttaaaatgcataaaaaattgataaaaatttggctgacactttagaggatgatacgtgttaaccttagagaatacgaatcaacgaatgtaatggcagatattaatttccaccctaagaattgaatatgaagattgctttcgcatgaaattttgttaaaatggccccttaattaaaaaatttaaaatatcccattttagagggtaaattttaacaagttctttttttactcttacacttgttagtgttctgttaaaatctcaccctacacatctaaaaaattatgaaaatttatgaggattaagcaaagaatgttgtgcatcaattttccaatgcacatgtcgcgagataaagtagttttcatgcactaataattattttaattgaaatagtgaaaatcacacatttctgatagtggtaccccattgtgaaagatcggaa

SEQ ID NO: 150113 - DNA, 501 bp, Cannabis sativa
  modified_base (301)..(303): a, c, t, g, unknown or other
atatatttttcaaccaaattaaatgaagaaaaagcaccacatctaacaagagtatgcaaatctattatcactaaatattaacaattttttacataattttaattatgagtgactaatgtacctaattttcattgacaaggaactagaaaactccccaggccaaatatacacttagacaagcacacttttttcatttttttaccactaacagtgaagataaaataaagtttaatggttgttgtgtgtgactttttttaaaaactattttataaaagtaattaacattttctatttcataacnnnttcttacataattttggttatgagtgaataacactaacactaacactaaactcctcaggatgaataaacacttaaacaagcaattttttttctttttctatcactaacagtgtagttaaaataaggtttaatggctgttgtgtatgaatttttttaaaaaatattttaaaagtacttaacattttctatttcataaca

SEQ ID NO: 150114 - DNA, 887 bp, Cannabis sativa
tcttgtcgcagtgtgggccagtaatacccttgccgcatgatttttaaggcaagagaattgccaccagtatgattcccgcagataccatcatggacctcgcggagtatatagtcgcattcctccccgtcaatgcatttgagtagcggctgactgaagcttctgcgatataatcttccatcgtagatgacatatcgggcagctcgatgtcgcagttttctcgcttctattttgtcatcgggcaagatatccttttccaagtaagtcactatcggagtcatccaagtaacttctctggcaacatctatctctatcacttcatctcgactcaccgtcaggtcggttagcaaatcgacaggaatcacatcgagcagttcagcttctctagttgaggccaagcgggccaaagcgtctgcatgtgagttatgagcacgcggtactcgggagacaaccactttcttgaatttctgcaacaactagcatactatggcgaggtacctagccaaacgcctgcctctggccagatattctccgtttacctggcatacgacgatttgggagtcgctaaaagcctgtaagtattttatcttcatttcaagggcgagctttaatcctgtgatcaaagcctcatactcagcttcattgttagatgcaaaaaattcaaatcgtaaagcagcgtgtaccttaaaattgtttggactgataagtatgattccaccaccggagtcttcgctattagaagcctcgtcgacgtacaaagtccatccttctccatttggtatatcagtatcatttttttcttctacgagtgccacttcagtacttggaaactcgagaatgaaatctgccaaggcctaccccttgatcgcagatcttggtttatacttgat

SEQ ID NO: 150115 - DNA, 564 bp, Cannabis sativa
atacaaccagcccaaaacaactcctggcaactcgatacgcaggccactgaggtcaatatgtacattggtagagaagactgtcaactcatggttgatctagcttatctttgcctttacctgcaccacatagcacccgtgagtcacaaggactcagcaagaaaagttataataacaatcatatagtttattgttcaaatattgtcatttatacataataagaatcaaaccatcacccattgttcataagatgaaatccatatcactactggcatctgccacgaataagcatcagtgtacagatttttagtaatacaaaaccattataccaataatagaattcatattcatttaatcatataaaaaatgtatatattacctcataaagtaaccattttcataacatcactttgcttaatcaggcaagtcaatactttaatctgataatcctgtattgcatggcctaataaggtaagcccgtgcctagcctggcacccatatatcgcataactgcatcacctaatcaggtgaacctatgccaaaaacttgcacccatatatcatataa

SEQ ID NO: 150116 - DNA, 645 bp, Cannabis sativa
aacccagtcgggctagggttcagtgagcggcactgaaccgttggtattactcacactgtcactggcagtgtttatgggtcccgtgacatatagtatgtactcagaatagctttggtgtaccagagtcactatcctcgtaatgaactcactaaacccagtctagctagggttctactgagtggcattcaaccgttggtagtactcacactttcactggcggtgtttatgggtcccgtgacacatagtaagtactcaggttccctttggtgtaccggagtcagtatcctcctaacgaactcactgaaccaagtcgggctagggttcagtgagcgccactcaaccattggtagtactcactctgtcactggcggtgtttatgggtcctgtgacacgtagtacgtactcaggttacctttggtgtaccggagtcactatcctcctaacgaactcactgaacccagtccagctagggttgtactgagcggaagtcaactgttggtagtactgacactctcaccggcagtgtttataggtcccgttacacatagtaactactcatgttacctttggtgtaccagagtcactatcctccaaacgaactcactgaacccagtcggtctagggttctactgagcggcactcaac

SEQ ID NO: 150117 - DNA, 666 bp, Cannabis sativa
  modified_base (166)..(168): a, c, t, g, unknown or other
ctcccggagatgctttgatgccaccttgatctccgggagcatagaaagccttgtgtgccttctccgggaggcatatccaggataatgccttttttcacaaagctattaatttgagttccaaagcccttgtgtccacgtgtccttgtctggttggtccacgtatatnnngcaaaattaggggcaacacttacccccaagccttgtttagttgtgaaatgaacaaggcttgctcagatgcctccggttggctcctcgggttcctggcacgtgcttcgggcgcgtgaaggtttatttaatgatcgccattactgcagcgattcactttttgcaagcgtcgattcgtttcttgtccattaattgatacggcacattaatgggtgtcagacagacactcaagcgtttccaccgcctcgatgacaaaccaattcagccgttggatcctgggaattcgaatcgtgtgccttcctaaccgcacgattggtaggtgattgcgcctgttccatatgcactttggcctataaaagccaccactttccctccatttggttactttcaaacctccaccaaatttcttcaaattttccagagaaagaaaccctcgaaccagaaaactctcaaacaccataggcttcttactgaccatccttcactattgtcagtcaacgt

SEQ ID NO: 150118 - DNA, 589 bp, Cannabis sativa
gccacaggctgcccaagctgctcaggatgcccaaaattgggaaaataggttcgcagcgatgcaagccagaattaataaacaagatgatgagattcgatgattgagacagcaaggtgctgctgtagtgcctgctccagaaatacagtggcacctgcccctgctgtgcaggccgaacctgtggttacagtgaaccggatggaacccttgtatgaaaggttccgcaagcaagcaccaccagtttttctgggaggtcctaatgtcatgaaagccgagcaatggctaacagtgattaccagaaccttaaattttatgggcgtcaccggtaatgatagggtggcctgtgctacttttcaatttcaagaagacgcactggtctggtgggacatggtgtccatgattcacgatgtgacaactatgacctgggaaaagttccaggaactgttcaacgctaagtattataacaaagcagtcagaagtgctaaaagaaaagaattcaccgaactggctcagagagagaatatgagtgttactgaatacacaactcaatttgatcgtttggcaaggttagcctcgggaattgtgccaaccg

SEQ ID NO: 150119 - DNA, 689 bp, Cannabis sativa
tttttctgggattttttggttggattatgttgtgtatacattgtttaggtactctggaaagtttggtggcatttggatgagttttgagcaagaaatgaattattggggaaaacttagtgcaaactggctaaccggtttgccagggcctgtaaaaccggttagctggttttggcagattccccgagcaactcgttttctcaattctcgatcatttcagtaccttagttgggtgtttctctatttcccgagttagtgtaatctctggtgaatgttacagagcctagagttataggttcgagtttcccggattagggtttcgagcatgtgatttacccgatttcgttatgtgattagggcatccatccaacacgagactttccgttcaggtcgaccagcacacttgaatctggaaagaaggtaagagctgtatataatgtgtgatatcaatatctgtgtgtatatatatgcatgcttatatggtacagagtgcattggtatagtgtgtattgttaatgagtacattaaagtgataccgacacaagtacgggaaagtacagggtgtctgtggtatatcactcagtggtactcggggtacgagacaaatcctaccaacacatgtacagtgaggtacgtagtgtatgtggtatagtggctgtaccctagtgtggaacgttcttactcatctgtta

SEQ ID NO: 150120 - DNA, 501 bp, Cannabis sativa
  modified_base (274)..(280): a, c, t, g, unknown or other
ttcacaatattaaggattttgtgattaacgatatgtaatggtggacgaaaggttgtattaaataaaacctgtcagatcctattacagaaataatactacgtactacatttgatctagatatcaaggtgttgagatgaattgaaatcaacttttagttttatattagtgcaagtgggagttttttgggttttgatgtcctaaataaaacccatttcaatataatcaaattcactaattaataagagatcataaattattttatgttgcatggttnnnnnnntttatttcatgattatatgtttaatgtataaatattattaagtctgaaacatatagttattcatgattatagtgttgtcaacaaggtggaatataatcatgattattgtaacggcccgatttcccgagacgtcacactcgctagtccgtttaaaaccatttataataaaaacaataaactaatttattgaaaataattaaagcatgagatctcattatttt

SEQ ID NO: 150121 - DNA, 585 bp, Cannabis sativa
ctagtacatctctgcaactcatcaaaagcaatgagtaatgtaacatcatttatgggttgttttggagtgcttgaggaaataaatatccgttgaagttttgagtttgaaaaatagtgaatattaagaaccaacttagttcttagaccaaatatgggtctcattcaagttgcatctgtaaaagaaaaaaaaaactcaaaaactgaaggaattattcatactcgaacgaatactgaagaaactagagtgaagtaaatacggttaaactgtaaattgaagaagaagagaagaattagagagactgtaggtccaatcaagaagcgaaaattttacactcgagagaaagactctagtctagtcccttagagtactacagatagttaaaatagcttcatctttatctttaaattatagaggaaaaattacaaaatgagcttcttccaacaagtagttaaactttagctattttacatacttaacttgctaaatgtagagataactattcattaaactaaacatattttaatattattttctttaacttttttatacatgtgtgtaatattatgtgaataattaatataaaat

SEQ ID NO: 150122 - DNA, 653 bp, Cannabis sativa
gaatatccccatcttccatctctagtgatcaggatggctactgtggaggaaatcacaagtctggactttggaaaggaaattgactcgttgatcgcctccgtttctcgtcttcaagagaggtgtggtcatcttcctgagccaaacccaacaacagtcaccttaaacctccccttgtcttcataagatatgtcctttttatttgtgtattgtactttatgaacttgttgctttaatttatacatgcatgctctgtctagggatgaaattagggttttcctgtctgtacgaacaccaccgtaggtaggtctaggagttatagattgctttacttctcgaattttgcatttaggaaattcatcatatgtgctagcctatttttcgcccaaaatccttgaggttttaggtcaaattctagtttgtgtcgtctccctttgtacattgttctgggtttcaagtctggaacgaataattcctcaaaactattgtttctaagtagcatgtctagttgggacctctccaagcagtttatgggggaggactcccagtgtcatatcccagaaaataaaatgatatttaattagacatattttattaaatatgtaattatttttgtaatgaagtaagattatgatcttacttggattaattagtga

SEQ ID NO: 150123 - DNA, 619 bp, Cannabis sativa
tgaaatgctcgagactgagcttcgtcagatcaaggagcataggggtggctaaggtggaatgactcggtggtcgaggtttcctgcacaaaggaggaggcaaaaaaagaagcatttggctgactaaaagaagatcaaagaacttgaggattctctcaagtccctccaggctgatcatgataaaaaaaacttaaggaaatggaggctgaaaccaaagacatggtcaacagcattggcagaaggaccgtatacaaaatctggtcgactaaccctgatttggattttagcttcttggtgataatgctgatgccatgcttgccttttgcgagaagacaaagaaagaagaactgggcgaggaagaagaggttgaagtggaaccaaaagattaatccaagtatcctacaatgtaggcttggtttttaagttgcatttttttaatatatttatttaggaaattggccatatggccaagacaatggttttccccttgtggcatttttgtaaagacaaatttctattgttggatggccatatttgctttttatcttatcttttatttattgcctcgtatttctgcattcaataagcagacctagaatttacaaagtaaattcactaactt

SEQ ID NO: 150124 - DNA, 527 bp, Cannabis sativa
  modified_base (84)..(84): a, c, t, g, unknown or other
  modified_base (372)..(374): a, c, t, g, unknown or other
atcactcctgaccagttcagacccagccgttggtggcctagactccttagacttagcatctttgggggtagaggggtttgcagnagtcagctcctcggaaagatcaataacctccccgcaaggcctcttttcctttgaagaggacccctcaccgcccttagatttcttggccggaggagaggcgctagagcttctgcccattctcttcctcagagcgtcgatcatttgccgagacatgtctgcacagaacaaaaacaatatggttagaagacagccatcagaaacacaaggcatgaaaatcaagaagctcgagaataagataaagtaaaatgcaagatgaccgtccgcacaagactcagaagtccatcatcnnntgacatcgatcttatctcagacataacagctttcccttttccgaacacgggaggagatggccagtaggtgaaatggcctcccttatgcgaattgcatgttcaacaggcctgggcgaggccgggagtttcttcttcctcttcagtggagtcacc

SEQ ID NO: 150125 - DNA, 552 bp, Cannabis sativa
  modified_base (82)..(83): a, c, t, g, unknown or other
  modified_base (286)..(291): a, c, t, g, unknown or other
cgtgttaccagtatgtcatgccacgtcatagtgcaaaaaaaaaaaaaatgagataacactaatatttaattaagtagaaaannatatttaagttgaaaattaattctcattaagttttgatcaacttaaattatgatatttttcttagaactgaaattagaattaataattaagttaattttattcaagatacttaattatttatttctatttcaagaaatttaattaaataaaaaatatatttaagttgaaaattaattccaattaattttagaccaacttaaannnnnntatttttcttagatattaaattagaatttataattaagttgattttattcaagatacttaattatttgtttatattttaataaatttaattaaattgaaaattatatttaacttggaatttttcaattttagaacaacttaaattagaataatttttaaagtatattttatttcattttaatctaagtttcgaaatacattaatttcaaatgtagatattttgaaatttttaatttcgaaaattagattaaagttgaaaat

SEQ ID NO: 150126 - DNA, 605 bp, Cannabis sativa
gtgccttacgttcgtcaacaccttgattctaccatcatactatttgatggtaaccttttggttccagtgaacttgcatgaatgatcatttcccattagaactttaatcaaaaaatgattctcgacttggacacatgtgataagtgcatccagagtcaagaatccactccctgttcattaaagattctgagatggagaacaattctccatccattaagtagttatcactatcttctgcaaccgtagctgaatccttcctgtggtgacctgcctattgtccttcctatctcccttatgagatttgttgaagccttgctgctctttgtagttcttgcaaaatctttgcaattgtccggaccttccacataagtaacactttcgactttccttctctatggactttgatcttgattgatagtgatgatgtttactctttgaacttcctttcttggctgatcttcctcttgccaaatacacttcctctttcttggattccttctctaattgtaattcgaaatctttcaacttgatggcagccttgacttcttgatatgcgattgggagcgatctcaacaaaatgataacctggctttcttcatcaacctt

SEQ ID NO: 150127 - DNA, 655 bp, Cannabis sativa
tgaaactcaagctttagaaaaaaacaatacttggatcatcactaaactccctcctggacacaaaccgattggttgcaaatgggtgtataaacacaaatataatgaagtttgtgaaatcataaggttcaaagcatgacttgtcgctaaaggttatagtcaaaaacctggcattgatttctccaaaacctatgcaccggttgtcaagttcaacactctcaaagtttttttggctcctgcagccatcaataaatgggacattcatcaagtcgatatcaataatgctttccttcatggtgacctccatgaagaggtgtacatgaaaatccctcctggttacaatgctcctcccaatatagtttgtaaactgaacaagagcatctatggcctaaaacaagcatctcgacaatggtacgctaaactaagttccacattgatcgaagatggcttcaaacaatccttatcggataattcgttgttcatcaagaaaacgaattctatattcatagctatcttaatctatgttgatgacatgattatagctagcaacaatacaattgccatatctcaatttactcaaaaacttgataccaagtttaaactcaaagatttaggcaaacttcgattcttccttggccttgaagttggtagaacttcc

SEQ ID NO: 150128 - DNA, 560 bp, Cannabis sativa
  modified_base (279)..(289): a, c, t, g, unknown or other
gatgcttcgattctagggacactgaatctcgatttttttagctagttttcaaatattctgacttttctcgaaggataaaactagtcaggtggcaatgattttttgggctttatggcgtgcttgtaatgggttaattttgcaaggtaagagttctgttgctaatagagttgttttatctgctattgcttatcttaatcaatggaaaagatgacactaatgtagtaggagtgtacgtcggtcggtttagtcgatttatgctatattttattcaacccaatnnnnnnnnnnnttacaaaaatctaagtgcaacccgcccaattaaaaaaaaattgtaacccgcgccaataaaattagtcagtttggttgggttaactcgtccaaactgatcagtaatatttttattttttattttttattatttttacattcaattactatatttgagttagttataattatgagacaaatatatagagattgaattcaaagtttaaatcaaccaccataaaaaaaaaaccatattaatttaaactttatatttttaaatagtcatataaatt

SEQ ID NO: 150129 - DNA, 520 bp, Cannabis sativa
taagaatatatttaatcacacaatcttgtttagagaactgataaaccctgtgtactgataaatctaggaatacatttaaccctggaaaattcccaagaaaggtttatgaaccttggtgaattacaagtgaccaagagaccataagtctacaggctcacttgggaggcacccacactgtacaatgcatctaactagcatagagaacttatgtagagaaattttaatgcttagtataaggtactaaacctgcctttaagtcaagtgcaaccatacttcagcttgacgtaaagaaaagtaaattcagatacttacatgtcaaggcaataagaagatagcaaggattaaagactgcctggtcgatcaaatatccataattttaaagctttagggctaaacattagtaatgttcaaaaatagagtggctataggccaaaagtatgaacatgaaatccctaaggctgaaaataagtagtgttcaaaagtaaaaggccaataagccatacagaacatgaaatcaaaa

SEQ ID NO: 150130 - DNA, 567 bp, Cannabis sativa
caaatccttcacactctctgcatttaataccttttttaatgttagatgaaaaaggtttagagggattgttacctgaaatgttaccttttgaggttttcgaaaagatctttttgtttccagtagatttcatgtatctttggaaaatttttgccaacaaggccatttcatcatcaaaaacaatattttcagaagcgttgaatgcaatacctttgcttttctcatttgagaaactttgcttactctttttcttgatctgttgatttaactcaaaagttcttaaggaacccatgagttcttcaaccatcattttgccgaagtcttttgcctcttccattgcaagcaattttgtgtcaaacctgtcatgaagcacacgaacaattttccgaaccaagaaagattcatctaatttttctcccaaggcaaagaactcattagaaatatcagataatctttcataaaaattagacaaagttttagtttctgtcattctcaattcatcaaatctagtttgtaacatggtaaaacttgatcttttcacatcaacggtacctttaaattgagtttgaa

SEQ ID NO: 150131 - DNA, 556 bp, Cannabis sativa
ctagcctaagttaggtttaatgtgtgaacttgggttttatgttgctgtatgaataaaggtagtttgttttggtattctgaagtttgcttggtattgtttaagttaacttcggctggaattgttagttgagtttaggtttgagcaaagtttgagtttgacaactcaaacctagctctttaatggtgacttgggattttgtgctaatagttaggttctgttgcttgatattggtttgttattgttagggtatatacaagcattcaggagagtattggagagtttggggttgaattgaattgtagggttcgttttttgggttcccaacacagaatcaatcgaccgattctgggggacccggagaaccggtcgaccgcttggtacccaggaacggggcttccagttgggaaccggtctgctggttggcctattttccaaaaccctagttttccccttttttttgttgtttaaggtgttagcatcctatttatcgatggggtaatccttaatttcaatttcaaatccccgataagtgttttagcgtgtctctcatcgagtt

SEQ ID NO: 150132 - DNA, 545 bp, Cannabis sativa
gaatttataattttgtgcattttttatagtttgtttttatggaattttttctccatgtttaggagttgatagtgttactttactaccatattaattttttaaataactagttactagtgtcgaagtagttattttaaaattgataaagtagtaacctgttactatactaaaaataaaaataagaaaatgatattgataattggttactacatcattaattttcaaaataactaattcgtttatagtaaccggttatcataaaaaatatatacataaaactgaaaaataaaagatcatattttggtagccatttatttaatatttttaaaaattgattttatatttttgtaaattttctcttaattatctatctatatatgggcctacaaatgaggcccaattatatagtttgcttatatgatatgtttctgatgaagaagcttatgttgatgagagaattacacctatacttttttatattgttctcttttatttttaccatcttttttaaagtctatcatttttacttttttttaaacattgta

SEQ ID NO: 150133 - DNA, 505 bp, Cannabis sativa
  modified_base (270)..(270): a, c, t, g, unknown or other
ctgatatttagtagtttcctattttgttattgatagtttcccatttagtctcctagcttagtatataaatatgtactattttatgaaataaaaacacaatttgatttactattttctacatggtatcagagctttgtgattcgaaattcgaaattcaaaattagggttcactaaaaaaaaaaaagagattagggtttgagtttagggttctttttcaaaaatcttttttggagtgcgaatttattctcaccgcccactcaggagtgttgnccagccgccgatctacaaaaccccgaagtccagtcactggattcctcgcgcgtggggctcacgcgccgcctaaagcttctaaacgttttcccacgcgccggtgcgtggaggcgcatgtgacggcgtcttcaacggcgttctttactttgttcttctaagcctactcgcatctgtttaaagttgtaattcggtatttttttgccttcttcgtgtttgggtgttcattctttggtgt

SEQ ID NO: 150134 - DNA, 769 bp, Cannabis sativa
  modified_base (743)..(743): a, c, t, g, unknown or other
ttgatgggtctatattattgaatgtttttttttgtcgctctctttttattaacaagtgttgatatacgtacatcaacgtataaaactagttattgtgtatatatgaatatgaatcatataattcatgcgagaaaagttataatatatcaattgtttgtactaagataaaaaaatttgatgaaatattaatttttagtctgtggtatatacgttttgcattatggtatatacattttgtgtactacagtataacatttagaaaataaaataataaaatttggattgtatgaaaatatactgtaatcctaacctaatataccattgtgaaaaatataatatatatatatatatgtaatcttaaacatggaaacaacataccccaatcaaatatatttatgcctcaaacttagactaatatttcatgtttttttatttcacccaatagatactatatcacataaaaatgatatatcttacaataatatgaatataccataaaactaatattaatgatgcacttaattttttaattttcttcatgatatactaaatcacgtaaaataaatataccaatcatttaaattaatatactagttaataagtttatattttactatttctctcaatattcataaaatacatatactaatttttatttttattttttatttatataaaaatatatatcacagcttatataacacaattcaaagtagatatatctgttaggttttatgccctanataaaactctttacaatctgattagt

SEQ ID NO: 150135 - DNA, 600 bp, Cannabis sativa
aactaatttcttgaagaagaaaccgtttcttggtgattttttcagtgattttttcggcaacaaatgccaattccgacgaattttttggtgccgccaacaactctaacgacttttccggcaccgaccactactctggcgacttttccggcaccgacagcaaactccggtgacttttccggcattaatgacaaataaaactttctaaacaaataaaaacattaaatatggaatttgaaaacctaattacatatatatgacatattaaataccataaaaagacctatcatataaattggtcaaacttaaatgtgccatatttatcataacaacttttaaaatcccataataaatgtaatttcctcgtaatttttccatctcttattgaaatattaaaaattttttgtttcgcacaagaattgccgaaattgttgagaagatcatttactttgtttagttgaatacgaatgatttgttgacaattataattgaggaaattacacttagtatgagattttaaaagttcttatgataaatatggcacatttaagtttggccaatttatatggtatttttttgtttttaggtttttgtatggtattt

SEQ ID NO: 150136 - DNA, 616 bp, Cannabis sativa
gcttgagacttgtataattatggtaagctcataatccttctttattttgaatttaatttttggtgtttaaagttttaaaaacttgtccttgatgttcttaagatgcatgatgttgtgattttggaggttgagtaataattttggtatatttgagcttaaggatgagtgatatttgcatcttgattgttttatatgttttggttgagtttaggattgagtttgaggtttgaatttctgagattatgctctgattttttgggtatttttagttggtttgaagctttatgttcaagcatgtgtaattgagaatttgtattgatttttggaacatgcttttatgtatgagcttatattttgtggttctaatgcctgaaaataccttgatttagcatggtttttgcttatgtatgacttaggtgaagttaggtttgtgtttgggcatttttagacttcaaaaatgggatttttgggcgttttgaacctagttgtcgcgactggattattggtccctgcgactaaggttggcagtgggcatgcctgtttttttccattttattttggccataacttttgactcgggactccttttggacattctttatatcgttggaaagct

SEQ ID NO: 150137 - DNA, 705 bp, Cannabis sativa
ttatcgttttagaaagttcatgtttagggtgttaaacagcatacttgtgagtagatctaagatcctagtaaaataaattccaacactattggcgttcaatcatggagattttatctcagtcatgttgatgttaagagggctgaaactcttctcttcaacttcgtgtttaatgccaaatgagcagaagacggcgatctattgttcaggcatgttagatgctgaagttggaagaatcctggaagcctcacaattcaaaagaagctccgtaccattcaggtaactcggaatacctatctgcaaaaagaaaatttctcattctgaatgtcagattttgttagagaagatggttagtaaaatcagagggtggagttctcaaaacttgtcctatatgggaagagtaactttgattaatgctgtacttatagctatacatacttactgggctcagattatgatattaccaaagaagttgctccaggatattgaggcaatatgtagatcatacttatggaagggaactcaaatgatgatgggtcctggtttggtggcttgggagcatgtttgtatccccaaaagtgttggtggacttggccttagagatattcagaaatggaacacaacaactatgactaggtatgtatgggacatagctagtaagaaagattgtttgtttgtcaaatggatacataatgtatacttgaaaga

SEQ ID NO: 150138 - DNA, 501 bp, Cannabis sativa
  modified_base (45)..(72): a, c, t, g, unknown or other
gtgtttatttcatcgttttagatagttcatatttagggtgttaannnnnnnnnnnnnnnnnnnnnnnnnnnncctggtaaaataatttccaatattgggagtctcaccgacacagtaaagacttttaaattgctattgtttggggggggaaaaatcgaacttggaaataaacggcccaacaaaataatgaactacaaaaaggcccatattaaaaggcccatcaaaataaatacatccaggcccaagaatataaaggtaggcccaactcgatatgaccaaactatcgatccgagttgccagaccataagggagcactacagacaaaaagaaggaaaacggtaaatgacaagaaacaagtaaagggagcgccgacggaaacagaaggaagaataggaaggaatgggtaatcgacgaatcgaagattaactataagtgaaataatagaccgggacccgaggaggcacccagatactgtaaagcccgcttagttaatttagaaat

SEQ ID NO: 150139 - DNA, 747 bp, Cannabis sativa
  modified_base (440)..(449): a, c, t, g, unknown or other
attttgacagcatcttcgtcattgaatgttatggtgggctctactgcccgtgggattttaggcttcctctcttctacggccaagattacttctttttgctcgtgcgatactgttcgggcatacctctcctgagctttgcctgaatctccagctatgtgcggtcctccaacaatggcttgtagatacccatctactcgtggaggtagcaagtcttaattgttatcacccttcgattctgatcggccttgacatacttctgtaagtgctgttttccttatcaggaattcaatatcccacttcagattattgcattcattggtatcgtggctgtattctccatgaaatcgagaaaacttggtcatgtctctcttgttgacatttttttcatgggtgcgagcttcttgtacatggctagtgactgagtggccatgtaaacactnnnnnnnnnntccgtcaggatggtaaatgcagtatacttaacaggatacccccggggagcctgttcggtcttgccagtgaaatttccctttttcctattcccttgcctattattgttgctggaacatttaccatttgagcttgaattgcttgtgtaatggggaagctggacgaatgtcccagtggaaggagcttttgactcgcaaggtttttgctcaccttcttctcgctgaaaagcctcttaaagcttgataaagccttcagcacggtcactaaaatcactcatcgagtcttctggaccgttcttcc

SEQ ID NO: 150140 - DNA, 1044 bp, Cannabis sativa
  modified_base (982)..(1005): a, c, t, g, unknown or other
tccctcataacactaatggctctggttaaacaaggcaccctgcccttgttaataaactattagttgcctatttcagatggatactcgggcctgggatgaagatatggtaagagatctctttatggctcgtgaccaagatctgatttttagcattcagcttagtgactcggctgttagagatggatggagttggaagttgagacttgtggccagtattcagtcaaaagtgcctataagttcttgcatgaaataaaaggagcttggagtgtggatggcaatacaggtttttggaagactttcaaaggtcagtaacttcttatggagagctacatcgggtgtccttccaacgtattttcagcttcaaaaacgtcatgtccctgttaatgttgtttgtcctctgtgcaatgttgctgcagaaactgtgtatcacgctttggtggagtgtgagtttgccacagctgcctggaatcgcagcttggtggatgttagggcgagtctgcaacgtttagcagctggttgttgctgttattcagcagggggcgtgtttgtgagatggaagaagcagctgtggtgagttgggctatttggcgtgcacggaatgattttgtttggcaacaaaagagttgggctacatcaaatattgttacatcagcgaaaaacatacttgattagtataaatgtgctcaaggtaaaaagggtctttctttgtctcctttgaatgaagggggcgacattctgagcattggaatgcacctatgttacataagatcaaagttaatgttgacggggctttgtttgatcaagagggtcagtttggtgtaggttgcgtagctcgagatcatcatggtaatatgttagaagctttcactaaggggaagattggtcatgctcaacctaaaattgtggaattaataggcatcaaagaagctttaagttggatagcatatcaaccatgggaccatgtgttggaaatattttaccnnnnnnnnnnnnnnnnnnnnnnnntgtttcattaacatcctaatatgtgttggaaattatttt

SEQ ID NO: 150141 - DNA, 609 bp, Cannabis sativa
ataatctggattacattgaaacagagttttatttagggcataaaacccaacaggctaatcactagaattaatatatgaatagacactttagtaaaacttagtaaatacaattttctaattactaagtaaaattccgttttatggaattaataaacatgattatttgattgatgagattccataaataatctcgtttattgaaacgtaaaattataggtccatggttctcggattgccaccttgaaacactgtcaaggctaaggataaaagttttatataaatgtttgggaaaatctattttgattttttaaaaatagtaattatttattttttaataaataattaattttttcaaatttattaattaaataaacgggaaaaagaaaaaaaaaatcttgataaaagacaccactaatttcatgttaagacataggtagcaccataatcattgtgtcctaacacattagtaggcgcctaaaagatagggttttccccattgaatttgtttttgggttaattaattaattatttcaagagataaatatttctttaaatttgaatttaaaaagtagttatagatatttctattggttgagatattctctcaag

SEQ ID NO: 150142 - DNA, 638 bp, Cannabis sativa
tagctcaagtggccataggtggatgtgtgattgttggaggtcctggttcgagtcctagtaaaacatggttgtaatatataaacacttaaaaaagaaaaaaataataagtattttattgttatcctatggctgctaataaatagacttaaataatgcttatttttttttaattaaaatctgtaggtatttctcataaaacaggttatcggtcaaaattttttgttttttgtgctcgctaaatagtctgacaaaataagttctctcagtaaaaaaaacaaataaagaaataaagaaaatcccatagctactagatagattgttatgatacttattgggttgggttgttattttggattgcaaaaatgtcattttttagaataaatagcgccaatgttatattaatttttaattttactttgtgttttttttaccttgataatattttatttgcttaaatacttttagcaacctttggtaggaggtaaatatcaataaaataattttttcatttgttacaaaaattaaatttatacacaaaagaattcaacttttataagtaaatggtaacaaatctgtaactaatcaaagcggacaaatcactaaggagtaagtccaattttcaaccgagtccctaattt

SEQ ID NO: 150143 - DNA, 794 bp, Cannabis sativa
tgccccaaccagtagaccgcttccccgaccgaaattccagttctatagggtttcctgaggaccaaccgatcgaccagttcctagaggtccccatgaaccggtcgactagttaagtgcaggaaacacttaaaacttcactacaaccttaaatcaattccaaatcataccaaactttccaaacctgcttaatatacctcaataaacatatttcatgcaacaaaacatcacaacatacttagaatcaaaaaacaccattaaagaacaaagattgagtactaaaactcaaactttgtctaacaaccacaacaagttataaattagctcaatctcaactcaactaacatccataacacctcacaaaacaacatcaaactaaattcaaacccacagaaccctaatcttaaaatcatgcaagagcaaccactccttttacttaaaattcaaagaaaaagaaataaatgccttaccttaccaaaattctagagtcaagattgctgaatccccctagaaatgatccaaactgaagagaaaatctaatttcctccttcggtttcttggcgaccgactcaaagaagagagagggagtgatattctaaattttttatttttatttcttttggataaaaatgaaataaaacacttattattctattttaattactcattcaaatcagcttattaactataattcactaaaagacaaaactctatgtagggtaaaagacctttttgcccccacttaagccaaaaagtcactaaaccacctaggggtaatttggtcaattttaaaatct

SEQ ID NO: 150144 - DNA, 506 bp, Cannabis sativa
taggagcttccgctgctcccactctaatggaaccaaacattcgagtctcaattgatgttggaaaaccattagaaaatccaaaaatctaccccagcctcattggtaaactcatttgcttaaccattacatggcctgatatctcttttgccgtaaataaattaagtcaatttttatccaatccgagagctccccacctcgttgcatctcatagaatactaaaatatcttaagggcaaattttttactcagcatcttcatctaacttgtctgcttatgctgaaactggtatgtcaaacatagactttcatctcaaaaatttttcagatgctgattgggcttcctgcagtgacactaaaaggtctgtttcaggctactatgggcttcctcttttttgccctatatatacctcatttgtaaaccctaaactcactttggaatttctaccatgtgaataatagcagtaaaataaagagatttcatttctattacatactcatatgacataag

SEQ ID NO: 150145 - DNA, 582 bp, Cannabis sativa
  modified_base (510)..(517): a, c, t, g, unknown or other
ggggcagaggcggctgagatggctgaggcttttcgagctatgtcacccacgcagacccaaggaggtgggggaaatattttccctgaggacgttgaagctacaaatgccaaagaagtcgctaaccaggctgctagcaaagtcgtagatgaatccactgttcctattgctccaaaatgcttagtttatttactttatgaatactttattttgccaaacttttttaagcggtacgcgggttctcacaatttgtacttagacgaatatatctttattgtatttaatatttcgaacaacatatatccctttggggatatttatttatgttatcatattcgtaatacactggtactcacgtctttcgctatttcaattgcggttttatttacaacttggtgtaaaaaatgctaaggtaaagtgaattttttttaaagctcgagaaaaatttaacttttataaagaacaagttaattgttatccaaaattttccactctgacgtggcatcacgagannnnnnnnacgtggagtccacttggagcatctactcgggaagatagacggagcaggatgcctcgctggcatat

SEQ ID NO: 150146 - DNA, 717 bp, Cannabis sativa
  modified_base (42)..(49): a, c, t, g, unknown or other
aaatgttatttctgatctatataagtaaatctgattatattnnnnnnnnttttatttagggcataaaaccccataaaaacatgttccttgcttgaaatgtaacgtctttgcgcttcggatcagcataacttttctacctactctgcgaagcaagcatctgatccttgatcttgtctatagcttcattggtcttttaaactaacttgggacccaagcactttctttctccattttcctcccaatggataggggagcgacatttcctaccatacaacatctcataatgagccatccccatcgtactttggtagctgttgttgtagaagaattcgattaaaggcaagtacttattccatgaaccctcaaagtccatggcacaagctcgtaataaatcctctagtatctgaatagttctctctgattacccatcagtttgagggtgaaaagttgtactgaaatttagcttggtacccatagctctttgaagacttacccaaaattttgatgttaactttggatcctgtctaaaacaatggatttaggagttccatggagaggaagaatctccttcacatacagttcagcatactgatcaactatataagtaatctttactagtagaaaatgagcaaactttgtgaatcggtcaactatgacccatactaaatcatacattctcgtggttctaggcaaaccaaccacgaaatccattgcaat

SEQ ID NO: 150147 - DNA, 578 bp, Cannabis sativa
cttaatatatattattcacatatatttatcacattttaatctatactttattatattattaaataatataacagtaaataaaaacctaaatttaatttttggcggtaataatacagaaattatatttttagagctctgtaggtacttggtcattaaatgtcaagttattatccacgtgtcattttcttattagtatatttaaactacttttttttaaaaaaaaaataaaaattcatgacctggaccaatcaagaattgtcatgtagcaattaatttacttaagacttaacagcagatacttacaaaagttctagaattataacttaagtattattaccgccaaaaattacctaaatatttatttacaactgtgaattaaatttaaatatttatgccgcaaattattctactttaaaaaataatatattttaaaaatatttaaacagttgcgccaagcgcgacattgttgcctagttattaatatttataacacaagtcattttttttgctaaatatagtacatattaagaaaaaaggaaactaagaaaaatggaatattgattataattaatgataat

SEQ ID NO: 150148 - DNA, 1046 bp, Cannabis sativa
aagtaacactagtagttaattcattattggtacaacactaaaaactatataaaactttccataggctgaataagtatccttcttgcaaatttaacatttagtctaactgttagagttagatacttcagataggtttttacacttctccaaaaatcactgctccacccccagagtaatcaccatctcaaaagtagactctctagcattaatgcaagtttggaaacctgatttggtgtagtctaagagtattaaataccactcttatcaactaacatatagttcctcttttgatcttaatatttacttgattgtttttcaatgttcctttcctagatgaaactgatacctactcataactcccactcaatggcacgtgtctagtctaatgcatatcgaaacatacatgagacctctcactgttgattcttaaggaattcattccataacttttatcttttctgaaagagttgaaactgttccttagataaaaaaaatctatatctagaagccaaaaatcttcttatagaattagccattagaaaaatgctccagcaccgtactaatgtaagttgcttgtactagagtaagtaaattaccaggtataccacaagccataagtttagataatttcaaacctatgatactaggattgagaagacttgttatgtaacgccctaacaattaggcacgttacccaaggtgattaagaaaccctaatcccctaaatgggattactagaaagataaacatgggtaatttaaactttaatcgaaaacagattgaaaataaaacttgtaataaatttaaatttacaatcaaaattacatgttttgggatctcaaaatattttacaaaatattacaagcctttctcactagctgacctaggcggcaaaatcagagtttcaaaagtacatcactggtagaccccaaccccttggtctagtgtggcccgaacatgtacatacatcgcccaactcttgcactcatggcttattagagacagatataccctatcctgcacagtagagcacccgtgagccaagc

SEQ ID NO: 150149 - DNA, 622 bp, Cannabis sativa
gttataaactctggttattattctgttattgaagatattaaaaaacttcttactgaaacccaattaaatatgttttcaaaaactgtattggaagttgtttttgattacgtagtagctgtaaacaatcttcattgtttccttgtctttgtatgcctgacctttttcaacttctggttggtgtttgtctgttattagcttcgtgttgttgatgtcgatttctggatctagttttttactgttgtttttaagtttttctaccatttttttagcaaccagcttcgcatagtcaactatgtcgaatttgtcgttttcaaattctcttctttttgactcacctccttcttctaattggtgttccaatgtgtatgattttgttgttgctgtgttattttcaagtattgttgtgttgttttcgagcatagtcacattctcttgaaataattatcttctttttcccattgtccattgcgatttatgagaactggtatagattccatgtccagtcatttttcacaatatttcatttacgtgtccattttttcatattaaaacaatagtaaaataacactacaaaacaataatttgttgttgatttagtaattttttctagatcggaagagcg

SEQ ID NO: 150150 - DNA, 575 bp, Cannabis sativa
tcaatcagaacagtcaataaagtattagcaacagaaagctgacctgtcacagtggaaggaccagcatcagcctcagcctgagttaggacaaacacctgggcaggagtaggtgtgtcatccttcttttgctctagtcgcagtagatgttggaaattccttttcatgtgacctactaccccacagtggaaacagaccctggcctgacactcgccctggtggcgccttttacatctcgggcattcaagaaaagtccgccaatttttgttcccactacgacggaagccttggttaccctggaaccttttgtttgggcctacaactgatgattcaataggccttttcttgcggtcaccggggctggtaccctaccaaaaccaacacctgatgtctgcttccagaaatctcttctcgtaatatttttctttcgtatctgatcttctgcaccctcagaaactagggccagtcgaacgagttctcgcagccgatgtacatatcaaaccagtcttcaggatctaaaaaccttggcgctctgataccatgttataacaccttgtccaacagggacgccacgtgtg

SEQ ID NO: 150151 - DNA, 935 bp, Cannabis sativa
  modified_base (879)..(902): a, c, t, g, unknown or other
acaagatcaaaataccaaaaggataacaatctgaaataagaatcaaagcatgttcaaagcaaggaataatgttcatggatccatggcaaaatcaaccaaatcaagtgaaatagcatgaatagaaagcttacccactacaagatgtcgttgaagaagaagacgtgaagctcggatcgtcaaaacatcagaaaaatctcgggaagatgatgcttgtgggttcagccctctagagagaatgaggagattttttgaatgcaagttactagtgagagaaagtgaaaagtaaaaagtgagaaatgaaaaaaggttttccctctaaaaagcagttatgtaatgcatgtggagccctttcttcacttaattcacctacgcatcaaaaaggaaagcagttatttttctacagcaatgagatgagacagtcaagacaaagtgtttcaaaaggctaaaaatgcatcaaattttattcagcgatggctgcaacagtcctgactgcaccaacatagctggtaaagtccctatccgtacaaacgtccacacaaggacttgggggcaaatattatctccatttttgtcctcctgacgtggcatggttacatggacaaaatcagcaccacatggcagtacatctcaccaataagaaggccaagttaacacctaagcaaacagaaaccctgacactcaaacgggcatcaagtgatagaccaggtccctcacaggagctccagtcctatggccagccagccttgggactacaccatggtcggccagtctatccttcacagggccctggccagccaagaagtgttctgtagggtttcctatgcacttctacatgtggacaactgttggggataatttaccatgatctagatttactannnnnnnnnnnnnnnnnnnnnnnnaatatgaatttctaaaataatataatttaaaca

SEQ ID NO: 150152 - DNA, 562 bp, Cannabis sativa
ttttgttgtttttgtgtatttgtgaaataatcactaaattaattttggtcaattatgtaacattttgaataggggtgtttattggatcattttcaatatttttaggcctatctagatctgatctaattaatttcagtcatccaatcaatacaacatccaatgccaaattataatcaatcttaaagtgtaaatatagaccaaacaagaagcagctactctagactcgcatccataaaatctacttgaatgattgtaagagcccctacaaaaatattaaggcagaaataagagtcaaataaactaaaatatacactataaattaaaaaaattaaattgatttgataaatagaaatagaaaaacttatttcatcaacaggatctctgaatcttcaatagaatttttaagatatgcaacaaatctttaacatgactatattgatcctgcaatatcccagtaagtctaatagtaaataattagggtttatatttatattatgagttaattagataataagtgggattatgatcctactaatttatttccgcataaaatttaaatttt

SEQ ID NO: 150153 - DNA, 1133 bp, Cannabis sativa
agtagattccttgttgctggaatttgaatggcccccttctctgctagaaactccattcccaataccacatcaaagtcatccatgcgaacaactacaaggtcaagttgacccctcttcgaattgaatgctttcatgcggcccgcatctttctccagttttaggcccaccctcttggcttcgatttcagaaatgaagttgtgtgttgcgccagtgtcaatcaacacgctcttggcctgcttaccatttaaagtggcctccacaaacattaatcccttcccaagggctttctttcctcccgtgccatgcttcttaagagcagccatcaatcgaacggcgctcatgtgcgcgtagtcttcatcttcatcatcttccccacatccttactcttcttgagcaatggatgcctttatggcactcaacttggactggtgggggcaagcagccgccctatgtgggccttgacaaagccaacacttaaggggcttcttccctgttgcagcatcccttttagaggaggagctagattcaggagtcctcttgtcccctcccccacttttgctcggccattgctttcccgacttcttactcgcagcattgttggtgctcgtctggggattcatcttcttcgactgcgaattctcagaggtgtaatcagtcagccactcggctgcagcttgagcagtggcgaggtctgacacccgctacctttgcagctcttgtttagcccacagcttgagtccttcgaggaagtagaaaagtctgtcaacttcgttcatgtccttaatgtagagcatcaatccagagaacttctttacatagtctcagactgtcccaacttgctttaactctctcaactgacatcgagccaagtaggcgacattttctggcaggaattgggattccattctttcttgaggtcttctcatgtcttatttaatggtgcattttaaactttgaatgtcttcatactttgtcctccaccataacttggcatccccagacaaatacatggtagttgttgctacatttgcttctttagagttggtccgcgcaaccctaaagtattgctccatgtcaaacaaaaagttttggagctccttcgcatccctcgcccctccatagcattttggctc

SEQ ID NO: 150154 - DNA, 538 bp, Cannabis sativa
gaagtcgacagacttttctacttccttgaaggactcaagtcgtgggctaaacaagagctgcaaaggcagcatgtgtcagattttgccactgctcaagctgcagccaagcgactgactgactacacctttaagaattcgcagctgaagaagacgaatcctcagaccagcactaacaatgctgcgagtaagaagtctggaaagcagtggccgagtaaaagtgggggaggagacaagaggactcatgaatctagctcctcctctaaaagtgatgttgtaacggggaagaagccccttaagtgttggctttgcaaaggcccatacagggcggctgcttgcccccaccagtccaattttagtgccataaaggcatccatgactcaagaggagcaaggatgtggggaagatgatgaggatgaagactgcgcgcacatgagcgtcgttcgattaatggatgctcttaagaagcatggcgtcagtgggaagaaagcccttgggagggattaatgtttgtggaggccactttaaacggtaagcaggc

SEQ ID NO: 150155 - DNA, 565 bp, Cannabis sativa
aaaaaactaattaaaaaagtgttactaatcgccacttaaattatataaaaaattgttaatcactagtgttgggtgcattgtggtgtcccatagcaatgctatactacattagttttgaggaaattttaaacaatttagagtgtcaaaaataaaattttaaaaagttaattgcatgtgcaattaattgtttgaacattattggttgtggaaattatttgaattttaaaaaaaattataattttctaagtatcataaataaataaaaacagtcttgtatgtgattttttttttagtgtccttaagaatttgagcattgttatttagacactagtagtgtttagatgatactttatgaatggttggtaatatttcacacttgttactaaattatattgaacatatttcatagaactattaaacaatcttaataaaatgaaagagaatctttgagcaagtaaacataaattggatgaccttcattaatatttattgtaagtgtttgtttgctatgttgtattatattgtattgtattgtatatgttgtattacattgtattgtatagta

SEQ ID NO: 150156 - DNA, 530 bp, Cannabis sativa
ataaaagatatagtataacttatattagtgtattgtgtttaaaattgtaaaagagaacatatatatataggcttttttatataactgaaaaaaaaaaagattaatagtgcaccaacggttgaatcttttcatatgccaacaatttatttatcttttactaggaaccaactaattaactggttttatcaaacaaataatcttttcatataccacataattaggccttagtgtgcactaaaataggctttttgtgtggtgcattaatgtagataggtgggcagttggcacacttggaattttctaacaaaatgggttatttatcacaaataattaaaagtataaaaagtgggtgaggggaggattgaaccttaaacctcaaatgcaataaaaactccacttaccatttgtgctacacatttttcatataacttgttgagataagtatttatatattatacatttttatatgtatatatattaattttaattttttcggggcctccaaaattgtggggcctggggccgaggcc

SEQ ID NO: 150157 - DNA, 510 bp, Cannabis sativa
ttggtctaatttcttagtgggattaatgttttgtcatatatatacatatttcttaattttggaatttagtgattaatatctgcatgtattaatatctgattaatataaatgcaaatatataatcagagaattgttgatcattattagttttttttaattgggtcatattataatgtaataaatacattgtttttgatgagtttcatcatatagaattgagagtcaaggatttggatcgcatgacgtcatcattttgactatctcacgtggcactcttcttagaatatttcatgagttgtgtaaagctaatgtaattagttttggccgagtttatatataaaatgttgtaattgtcggaaacaacacttcttttctaccaactgtttaatgaaattttattaaagaggtatagatttgagtttaattatgtggcctactatttatttcacacaaataagaatttgcagttctttttagtgtacttaagagtgtaaatatttttattttggg

SEQ ID NO: 150158 - DNA, 625 bp, Cannabis sativa
  modified_base (165)..(174): a, c, t, g, unknown or other
agataatagatgtgttgttaatgtggatgtattatatatagatttttagcttaaaaaataattaaaaaaattaaacaaatgacaaaatttgacaaaattaagaataggagagaaaattcatatagaatgccacttaaacttgttgatgctttcctttatatatannnnnnnnnntatatatatatattgatttttcttgcaagtttcccttgaacgttcgtataattaatatagatatttatggtgtgtttttaacttacactactataaaaatggttatttttttccgatatttttaaaccgtcgtttaaattattcttatcagtttctataatcgtcgcaaacgagtaaaatagacgatggttaaaaactattgctaatgtggacttcctgacggtttaaaaccgtcgcctatatcctattataggcgacgattttaaacaatcgggaatgtaaaaaaaaaagagaaaaaaatacagatttttctaccattaacaacaaactttaaaacagttaagtttatacaataacaaaataaatatatataataaataaataaatgcatttataccgagctcggagagagaaaaagagagagaatgagacggacgagaggtggtagtgg

SEQ ID NO: 150159 - DNA, 505 bp, Cannabis sativa
aattccctgttgttcgacctcacttgcgtgagctactacttgactgcgtatacttgcgtagtgatcataattttcgtaacaactttcctaacggattgaaagttggttctctttaagtgttaattctagaactgaaaaattgtgcacaaatttagattggatctaaattatactttccctagtgaattaatggtactaagggataaggaagtaatgcgaagggtaaaaatataatttgatcaaaactaattatgaattgaaataaggagggctaatcactaaaattgattatatcaataaacactgtagtaaactcagtaaatataattttataattactaagagctgaattccatatatatcgtggactaatcatggaactaataaataagattattcggttgatgagattcaataaataatctaatttattggagcttagtattgtaggtccatggtcctcgaatcaccaccttgaaatactattaagggaatggataaagtt

SEQ ID NO: 150160 - DNA, 768 bp, Cannabis sativa
tagttaaagtttgctgaaatttatcattattgatgtatattttggtgttgttggagagtgaattaggtgtaattcttctctaattatttgatttatgctaagtgacagtttgtgatgattgtgggctggtttagcatgaaaattggtatttttggatgcattttcgtagttggaaacaaggtttcctgggtttttaaacccagtagtcgcggtcattgtatggcaacttattgtattttttcgaatttttgttttttccgtaactttttactcgggactccgtttgggacgttctttgtatcgttggaaagctcgttctaagctttatgtaaatatttgtaattcaaatgccaatttaatatattttggaaatggatttagggattaaccctatacttgtgtatcttgggattgtgactaggattaccgacacttggtcagaagcactcgcatttttggaatctccatatttgcaggacatcatgtaagacagtatctagcatgtggagttatgcacaatggggcttatatggaatatgatatatatgagtaactggaaatcgagattagagttattactctaaagtgagcggtttattggcctagggttattaccctagggaattgttaataagtattgatatgacatgatatatgtatgtattttgagattatgaattgtgcgtttaaggcataaataagctagacttggtaaactagtaccttgagtttaattaaatgtggtctaggtgttatagtgagatttct

SEQ ID NO: 150161 - DNA, 1305 bp, Cannabis sativa
cccaactcttttgttgccaaacaaaatcattccgtgcacgccaaatagtccaactcatcatagccgcttcctccatctcgctagcacgtcccctgccaaataactgcagcagctagctgctaaatgttgcagacccgcccccaacatccaccaagctgcgattccaggcagctgtagcaaactcacattccaccaaggcgtgatgcccagcttctgcaacaacattgcataaaggataggcagtattaacagggacatgacgtttttgaagctaaaaacacgtcagaagaacaccagatgcaactctccataagaaattactgacctttggaggaacatttaaccaccataaagtcttccaaaaacctgtattgccgtccatactccaagctccttttgtttcctgcaagaatttataggcacttttaattgaatactggccacaagtctcaaacatctttttttttttttttttttaaatttttttgaaagaaaataagtgatgcttttattagttgtttttttatttgtttaaaatttacttatctgtttttataagaaaaaaagggtttaattatctgttttataaatgtatttttgattgttaatagaacaaaatttcaccgaggatgacataatcatctacggacttcaacttggtattgatgttgttaataagaagtgttggtttcatgctcttcaatatagttcaaaatcactaagcatgtaaatgttagttgatataatattaatttagtcatgtaatatgttgatatgttcttttactgtttaagaaaaagataagtattgtgacaaagattgaagctatttatgatatttttttttgtaacgaattataatcatggtgtacagagttgcaaccattttgttgctgagattatgatgggctttgcaatattcattggcacgtgttcataaaatagccgattcaatccaatccaatccctaaagtgtggatatctgcacttgtgtggattggaaaattcaaaatccacacttctgcggattggatgttaattgatatgtagaagtaactgatctaatccaatccacatatatttataaaaaattttgaaaaattatatatacaattaaaattttaatgtaaagaaaatagtaatttaaaaatctaatacatataaaatacatatatttcaaaactttatagatctaatggatatttcattcttatatataatttttttttacataaaatttaaataaaattaaacatttctttatacatataattttttcttcattttgaatttgttatttgttatt

SEQ ID NO: 150162 - DNA, 522 bp, Cannabis sativa
tatataggagaatccatggaaggttagcattgactattttttgccatagtctttttttagcttagccttacacaatgcatactcgttgcaagggaatccacttaggctaaactaaatatgattacgattatgcctaattaatagtatgtgttagatcgatttactttaattttatttttttagtaaaaaaaattattttcatgaataggcaaaaaactaattgatttaacatcaggaccggccctaagaatatatgggcctaaggcgaattaaattttagggctttacaaatatatataaaaaaaaaattataaaagagtgttatgggattcgaacccataattttgtataatatgtcatacacctcagctaactaagctatgtctatttattgtttataatacacttaattttacttaataaataaaagcttaatgattatttttttttaattttttaattttgggccccccaaaaaataggccctaggcacgggcctagcccgcctatggctagggccga

SEQ ID NO: 150163 - DNA, 570 bp, Cannabis sativa
attttgtgcgggagtctgaaccgacatattatattcttcaccacaatgtccaatagttttttagatgtaattgttgccaaaggctcgtcttctgtccactttgtaaaataatcaattgtgaccactacaaattgtatgctgcccttacctttggacaattgtctgatcaggtttatcccccaaatacctcgctgggcggtgcacatggtatttttaaaaatctctggcatttgtcacatttctttacataagcctttgaatcttcaatcatggttggccagaaatatccttgccttagtattttctttgataggctttgccctgctgcgtggttaccacagaatccatcatgtacttcagacgtgagcccttcaacttattcttttgttacacatctaagtaatggcatgcagaaccctcttctatacattacaccttctgatatgatgtaatgtacaactttcctcatcatcttctgagctttgtttctctcatttggaagttctccaatattgaggtaggttgctatgggtgtcatccagttcggtgctgtgtctatcatttcgattt

SEQ ID NO: 150164 - DNA, 645 bp, Cannabis sativa
  modified_base (26)..(35): a, c, t, g, unknown or other
  modified_base (560)..(562): a, c, t, g, unknown or other
  modified_base (592)..(597): a, c, t, g, unknown or other
ccagacacctactgttgagtgggagnnnnnnnnnngtatcagattaatccagaaaaggaacattgaaagacaatcatttaaatcttaagatcaaaaagaggaactatatgttagtcaataagagtggtattttaatactcttagactacaccaaatcatgtttctagacttgccttgatgctagaaagtctactgatgagatggtgcttactcttggggtggagaagtgtaaaaaataattctaccagtcagactgaatgttaaagttgcaacaaagatacttattcagcctttggaaagttctatacagtttttggcattgtaccaataattttttaactactagtgttattttctgactaacacagaattagttgcaaaaaagtaaagaatctagtatcccttgaggaatagtcatatagagaggaatttcacaacatcaaggattttgtgactaaggagatgtaatggtggagaaaggatgtattgaatacaacctgtcagatcctattacatagagaaaactacatactacaattgatctggatatcaaggtgttnnnattatttgaaatgcacttttagttttatannnnnncaagtgggagtttgttgggttgtgcgccctaaataaaacccatatcaa

SEQ ID NO: 150165 - DNA, 667 bp, Cannabis sativa
aaaacaaacaaaacaacaacacctaaaaccagaaaacaaacaaaaaaatccagttaaaaacctaacttacacaataaaacataaaaattaaatgaaatcaattacattacatttaacaatgctacaagaaaacaaaattaaaacagatacaacaatatatataacataaaaaaaaccagttaaaacttaaaaaccagttaaaaactcacctataacattgattctttaaatacaatctaaaaataaccggttccaaatacagaaatataacaatataatattacttttgcataaaagtgttaaaaaataaaagagttaaagaaagtcacaaataacaaaacataacagaaaaaaaaaacggttaaaaaaataatcaaaaacgtgaaaactagttaaaagcatatgacaacacatacaatcaaaaaaaaaaaaatcattaaaaaaaataatttttatcaaaacaacaacacctaaaatcagaaaacaaacaaaaacaaccagttaaaaacttaacttacacaataaaacatcaaaattaaatgaaaccagttacattacattacattgcatttagcaatgctacaaaaaaacaaaattaaaatagatacaacaataaatataacataaaaaaaacagttaaaacttaaaaaccagttaaaaaactcac

SEQ ID NO: 150166 - DNA, 549 bp, Cannabis sativa
tggagccatcctatatggagctttagaaacaggttcaactccaggtatcagatcaatcacaaaatcaatttgtcgttgcggcaataatcccggccactccttggggaacacgttgagaaagtctttgaccactctgactacctcaagcccaaatgtttcgggtttgctagagtccatcaccactgctaaaaatcccacacatccactgtgtagtagatccctaaccctcagcacataaataaccgggattcgagacccctgaaatgatccaacataaacaaatggatcctcaccttctggctggaaagtcaccattttccgtttacagtctatactggccggatacttggacagaaaatccatcccaggtatgatgtcaaactccgttaactccagttctataagttcagcactcaactccctatcctcaatcctaactggcatagacctaatgtgcttattggaaataaccgactccctgcaaggcattagggtcccaaaccctctttcaagaatatcacaaggcctacccaaaatatcaattactct

SEQ ID NO: 150167 - DNA, 1184 bp, Cannabis sativa
  modified_base (246)..(262): a, c, t, g, unknown or other
  modified_base (1154)..(1156): a, c, t, g, unknown or other
gttgaagaaggtgaagtggcggatccggccgcccttgagtgcaagcgaaagggaaagatggtggaggtggagccttctaagcggacccgcagggtggacactccggtcctgagcaacgactctgggattccttctgaggcggaggaatacattgtgcctcacggtatagtgttgaccccggtctctgcagatgaggagaggcagaatctctgggtggccaaacacaattacgcccttgacgagtannnnnnnnnnnnnnnnnaggtggaggccttgaagaagattcttcgggaggagtagcagaatactctccatgaggaagccttctggaatccatgggacttgaacatggatccgttgacggactggttcaaccgcttcgttgcacccaccttggctccttttgcctcagagatgactagccagttcgtctcccacttgacgcaatttctggccaagaggtatgtggcctgcgcctctctaaactccatctaccaggtccaggacatcagctctgccatggctgcggtgagtacttgtaatctatttttctcctttgatattttgtctaaggcatctggtctcactcttacttcttttttcaaattactgctaagaccggttgcctttccaagactctaattgaccatggctacgtcatgtctgaatttgggggcatatacgaggccatgagaatccttcgggacttgtctgccgaaaggcgggcattccaggaggaagctcaacggagggaggccctcgtggaggcgaagctccgggaggaggccaagcagagggaggcccttgcggaggcgaagcttcgcgaggaggccaagtagagggaggtcgaggtggaggcgaggcaccatgaggcgctaaaggtggagggtgaggccgctgcccgggccagacgcgagcctcgggaggcaagggaagccatggacgaaatggctgccaaggtgaagtccctagaggatttgcaccaggcacacttgcagtctaacaccaacctcaccgtggagttgaaggagttgagggacttcagagaccaggccttgaagaaggctaagagggatgagctcttgacccctgtctcctgcaagcattgcgccaagcgctttgacgacggcgtttacatggcctggcagtcaaannnccaaagtattaagcttgacttctatccc

SEQ ID NO: 150168 - DNA, 525 bp, Cannabis sativa
gattttcacactcttaagctaagttgtttgtggtgaatgaatgtgaatatatagtactaatacaataacattcacgctagcgtcttagctagcttcttaaacagaggagtgttttcatgcccaactctaccaaaattatgcctaatcatccctatagtcccactattaagaaattaaaatatctcctccttatcataaaaatttattaaagtatctcctttacatcatagtagatatttttatctttcaaaattacagatatgctttccactggaaattagtgtggaatgatatgctacaagtataactgattctaaataaatgaatggaatcaattgaacagatgaaatcttttattgattttgaatctgacacaaaatttactacaacatacaaaagtgtacagacaggtaactacaaacacattttctatatggattcattcttctttgttgcagatttattatgattcattcttctttgttgcagacttagtttttctatattgattccttctatattcat

SEQ ID NO: 150169 - DNA, 1261 bp, Cannabis sativa
  modified_base (26)..(30): a, c, t, g, unknown or other
  modified_base (217)..(217): a, c, t, g, unknown or other
  modified_base (539)..(541): a, c, t, g, unknown or other
acaaattcttaataattgttttagannnnncaattattcataaacatagaaaagaatttctaagtgtttatgtaggattaactcgatgaagagtgaagatactatagaatttgtatcaataataaaaacacatacacaagcattaaaacatataaatataattggtattgatatatttaagataagataaacaaagctcaattcataaatgcaattnatttcaaaaatagaaaactttattataaaattctccaaaattaaaggaattgtctgcaacaatatgaaaaatagggaataaaatctcaaactaaaaattgaaatccaaattgttcttaaactaaaacaattaattcaaaaaaaattgaagaagattctgagcttcatcttcatcttatactatctccacccttctgtccaactatccgattcaactcactaagatagcatccgagttcaagcagttgaggctgaaataagaagaaaataaataaacatggttagtaggtccaaaattaataatccaagtggataataattcnnnaaaacacatcagtttataggaaaagaaataccttgtttctttgctagcaatttagggcactggggtttccagtggcctttttcattgcaatagaagcattttcgcattaccaggattagcagcctttttctttttaactgttctcacagcttgaacaagattttttctattcttccatttcttcttgttcttgggtttggaagtagaggcaaagtttgcctcagctttagtcgctccattaccatttccagaattaggagctttcggtccctttttctacggtcctccaatcaaattttcatatgtctgaaggtcgttaaccaaggtgtgaaagtcttgttccttcttgttcatgacataattcgaagtgtagggcagaaaagctggagtcagactattcaagattaaactaacttgagtcgtgtgatccatttcggctccatgattctgagcttcctggaaataacttgccatctggagaaggtgatcacgcacattctgatgaggactcatccgtgcatttataaacttccttgtcgcttcaaagcgagattggattgatgccataccgaatagattagttaactcagtcatgattcctgcagttatgtcagtctttacaaaccttgttttcaaggtgtctaccatgctagaaagtatgaagtatcgagctttgtcgttggcattttgccaacactcgtacttctcctttacagcttt

SEQ ID NO: 150170 - DNA, 1039 bp, Cannabis sativa
  modified_base (670)..(672): a, c, t, g, unknown or other
  modified_base (800)..(802): a, c, t, g, unknown or other
aattgctcttgtcacacttggggggcaacatctacacggagcagtcaaattcgggtttaaagcatccaacaatgaagctaaatatgaagcctttattaccggcctaaaactttcatgggaattgcatgctgaacacattgagatctacagtgactcataattagtggtaaatcatgtatctggggagcacgaagctcggggagaaaagatgatagcttatctaagcaaaatacatgatctactcgcacaattcaaaagctatgccctcaagcaaattcaaagagaagaaaacacaactgctgatgcactagcctaactcgcgagcagcaacataaatgataaagctactctaatccccatccaactccatgaaaaacctagtatcactagcacagaggagattgaattgattgacacatctccaaactggatgatgccaatagcagcctacctcaacaatgaggaactcctagataacaagaacgaagctcaaaaaattagaagaaaggttgtacggtacatcatcatagatggggtcatgtatagaaggggattctccatgccactactcatatgtgttacacaagaagaagtcgcccgacttttgtccgaggtacatgatggattctacggcaaccacgcggatgggcagagtttatccaagaaaatnnnaaggcaaggttatttctggcaaaccatgatataagactccaaggcctatgttaagaaatgtgataaatgccagagattttcaaagatacctcgtgcgccgcccaacgaactaactcagatgcaaagtnnntggccttttgccatttggggaatcgacttggtcggacaattgcccaagagcaaaggtggagtacagtacgcagtggttgcagttgattacttcaccaaatggacagaagctgagccgttggcaaccatcacatccaaaaaagtgtaagatttcattgtgaaaatataatttgtcagttcggactatcgtacaagatagtctcagacaatggcaaacaatttgatagtcaatccttca

SEQ ID NO: 150171 - DNA, 602 bp, Cannabis sativa
tccaagaagaagaagcctctgctcctacagaggttttttttttgggcccctgtgaagaactagaaccagaatggaaggagatggaacctggccttgtgaagtcaacccctactataacgagttgggcagatgaggcaaaagcaattgatttccaagagtcggccaaggtggcatggagcaaattcaaggttaatcaggtgagaactctttcttcccaactgaattttactgagcctttggaaatcagagatcaggtggttgctaagctcgatttagaagaagttgaagttgaggcttcttattggagatcctcgattttttgtattgtttagggggccaatccaccattcaaagtgtttgaaggctttattaagagaatttgggggaacttgggagtggaaaggattgttagaatgcactatggttttattttggcgagtttcaaagatgaagttacaagggacataatcttagaaaatgaggttattcaatttgataaaaaacctgtggttcttagacattggtcagaagacatggatacttctcagatgattaaatcagttcccgtatgggtaaggttgaatggtttaggccttcaatac

SEQ ID NO: 150172 - DNA, 655 bp, Cannabis sativa
  modified_base (618)..(628): a, c, t, g, unknown or other
agcagagcattatcaagatctgattagagcattatcaagatctgattctggatctatcaagatctgattctggatctcttaagatctgattctggatctctttctatctgattctggatctctttctctccttctttgatgctgattttccacagtgacgcaatgcattcgcacaacagtgacgcaaatttctgagattgatggatgaccaagagtacatcctccaatctcaccaggcgtagttagatcaccttaacaaagaagctagcgacctaataaggtggttcaatgtgaaagaactatcgaaagaggtcagatctcatcagagatcctctccacgagagataagtcaacagatcggggagggtatacacacaaatagtccaaccaagttcctttggaaccatgacagacctttcccaatccgaaggagaataagtcttcccacaaatacctagtggcgagaatagccagaccttggcaactggcgacttggggggctgaccagggatccttgggacaataactcccctacttggccaacctttggctggccaaccccttagtgttgtacctctggacggccaaaaaggtgaacttgttggaaatattttaccnnnnnnnnnnnttactaccaagtatgtttcattaatat

SEQ ID NO: 150173 - DNA, 617 bp, Cannabis sativa
  modified_base (570)..(590): a, c, t, g, unknown or other
aattttatttgataattatttaattattaaataaatagttttggcatttataggattgaaattgaaaaaagtagtatttgtgacagatatataaatagttgagaaaagtggcaaaaatctaactagtgatgggccctcttcatggccagccattaggtgtccttttttccattttaatcatttttttattccaaataattcaatcctaaccctaagtgaattagtataaaaagaaaataaaggtctcattatccaactaatgcaaatatcttgacctagctttcattatatctgacaactagtgagtttgacacttcttcttcttctttttccttttaattttcgaaatcctatagccttcttaacaaatcaaaattcagcatttagtgattgagtgcaagcccacacatagcaagtttgtcctcaatcatagtgtgtaagactgtgaagaatctaaacaactgaaggagtttcgggctcaaatcttggtgatactctgcgacaaaaaggttacaaatgttagagatctgagcggaaggagtcagttaattccgctgcaaccaatgtaannnnnnnnnnnnnnnnnnnnngtttattttcatcgttttagaaattca

SEQ ID NO: 150174 - DNA, 961 bp, Cannabis sativa
ttctggtttttcaccctaaaaaccgatccaacctccaccgaacttgctcaaaccttccacaacagtttaatatagcaaatataacataaccaaacaactagttcatcacaatttatgaatttgctcaaaatcacactttaaagtgaagaaaacttaactttggcttcaacaaaccaaatccaatccaagcagccatagagaacacttaaaaccattcctaacatgcttaaaaacctaccctaaatacaccccaaacctgcttttactcacacatccacaaaattattaaaccctacatgaaaaccaactcaaaaactaatgttttcaatccaaaaaggtgaagaacctaccttcaacctcttctaggttgacttgggacaagaactagctctgaaatgagggtagaagctgaagaaaaaatcctcaaggtgggctagttttggcttgcacgaaggagaagaagagaagaggaagtttggtttctttccttggaagctatccccttaaatagggttttctttttcttatttttattattgctttatttttattttattttttaaaaagtcagcccttaataatataaaatacctatactgaataatggcagacttgccctgcaagaaacttaaattctaaaaataacctaggcgcattttggtaattttactaatccattaaaccgacattctaaaaattctaatctagttagaaataccctcaaaataatacttccatcaatgtcatgacatttctaaccataatactaaatttccacagtcgtcgggcccgataaaatatttttatttcaaaaatggtatcttcgatacacacatatcccaatataatctccgtaattaataaattattctttatgatcatttaatgaatccttattaattaccctaagtaagatcataatcttacttcattaccaaattaattacatatttaataaaat

SEQ ID NO: 150175 - DNA, 839 bp, Cannabis sativa
aaaaaaatatttttcctatattctgcaaagtaaaaaaaaaaaacttcacacatatatataattatgaatatataaaataaataaataattacgtaatttaatattattaatttagtttatatttattattatgtgttttttaaaaaataattaatttaaaataaatatttttatagaaaatttattaaaataatagtaaaattttaatttataaatttatgctctaataaaatattaaaaaattgagagaattaaggagaaaaaataaaaatagctttggagagattttagaccgccacgtcaccgtcttatacttctcctttatatatagatatatagatagatagtaaaatattaatttgtagatttatgttttaattaaatattaaaattgagagaataaggagagaagtgaaaaatagttttagagggattgtagagtgtcatgtcaccgcctcatacttttcctttgtatatctattctatataaaatgtgatgttgccaattaattgaagaagttaacaacaaccacacaaattttgaaaatatatctatatatttaaatatactagatagatgttacgtgccgagccacgtaaatgttagttttatttaggatttttttttattaaattatgataactaaagtggtatgattatttgaatcgtttgttttataaaagtaaattgtgtgtcggctggcagactgaatacttgttgagaagaaattgataaaacttagtaattaatacaactattattgcacaagttccagcaagtaaaaagttatgtgccttatgctaggtatttgctactttatttaaaagtgatacaatta

SEQ ID NO: 150176 - DNA, 567 bp, Cannabis sativa
ctatgagccccaacgagagtcccggaagtgatggaatgtctgctatggtcaatcaaaattattggagcatagttggctcctctgtcactcaagttgtgcttggaattctcaatgatggcaatgatatgtcacaacttaataattctataatcaccttgataccgaaagtttcaaacccttctggtatgtgtgactatcatcctataagtttgtgtaacgttatctacaaactcatctcaaagactattgtgcttagatttcagaaagtgctaccgtttgtcatctctgaaacacaatctgctttcctttccaatagacttatcacggataatatcttagttgcttttgagcttattcaccatcttcgacataagactcaagggagaattggatattcagtactcaaattggattgagtaaggcttttgatagagtcgaatggaaatatcttgaagcggtaatgcttaaaatgggatttgctccgaggtgggtgacattgattatgagttgcataaccacaagctcgttctctttttcactcaatggtgaagttgttggtcatgtcca

SEQ ID NO: 150177 - DNA, 603 bp, Cannabis sativa
atagtgtgttaacttgtgatgtaatgttaaataacaaaaagtgatttaaatttagatcacaatgtagtatgatgcaaaatttgtatcacaataaatattatacttttatatttaccattatatcatttttaatattttactgttaaattttagttaacatgcttacattattattattataattattatttccttatcaaaatttatatttacattattattattttatagtaaaaattgcgaaaatcgtaccacactatcctattttttgtagtgcgatttttgcagttttttaatttcgcggtgcatgtgcggattggtttaaaaaaatagtcaaagcttgtaccactcataccgtgaacagtagtttataggtgttgaagatggaggcttcgtttgtattttcaagtgtatacagtataaaagaaaaaaaaaaaaaaactaaggtgtaagtatttttataaaagttcccgtacgatagtaaaaatataaagggcaatttttaataatatacctatattatagcaaatttacggatatcttgtgcatcatttaattgtgtgatataccgtttctggccataccgaaaattgaaagtaatac

SEQ ID NO: 150178 - DNA, 541 bp, Cannabis sativa
  modified_base (377)..(387): a, c, t, g, unknown or other
  modified_base (498)..(503): a, c, t, g, unknown or other
ttttcttattagctgtgttaacaactttaagaggcttcttgctattcttccatttcatcttcttgggtttcgaaatagaggcaatgtttgcctcagccttagccatacatttagcagtgccagaactaggagttttgtttcctcctttttgtgattctccaatcaaattttcaaatgtctgaaggttgttgattaactcgtggaagtcaaaagtcaacttattcattacataatttgaggtgaagggcaaaaaagctggagtcaaactattcaagatcaaactcacttgagttgtctgatcaataatagctccatgattctcagcctcttggaagtaactagtcatctagagcaggtgatcacgcacgttctgatgnnnnnnnnnnngtgcattgataaaattcttggtcacctcaaaccgagcttgatctgacgccatcccaaacatttaagtgagctttgttgttagcattctgccaatgctcgaacttttccttnnnnnncttggtcgcattctcacctggctgctcaggagcctctt

SEQ ID NO: 150179 - DNA, 853 bp, Cannabis sativa
tataaaagaaataaaaataggcttggacagtaaaaatgtaaagtttgccgtgtcccagtatttttgaaaacatttggtaaaaaaacagtatttttgtaagtttccctttatattgtgaacaatgtagataaattaataaaaaaaacccataaactctaattctaggtaggtgctccctttaatattttgcacaaagcaaaccatgtgcccactttttttttttttgataagtaccctctgcccacttcaaataacctaactaccccctaataacttaacatcaaaatttgaaagactttaatattattatttattacttgatggctttctggaggctaggcgattgtgggtaagggtgtacagaaagtcattcaatccaattacaactgacctatccgatcacaaccgattcaatagaatcgaatatctaattataattagatcggatcggatgtaaattttgaaaagccaataggattggatcgactgttggatgggacatccgatccaatggacaaccgaccaaaccagtccaattagcatccaatggtcatccaattatatttatatatttttaaaatacatttataattatatatttaatatattttatttaaaaaatatattactttatttaatatacatttaacatgagattaaagaaaaaaaaattagatatgaaatattaattctcatcttccttatcgctaataaaattatcaatgcatataaaataagttttatttttttgtagatttattatgagatcataagaattatgttggattaaactaatgtttattatgtatgttgaattattaggttttaagttatattttaaatatatatatat

SEQ ID NO: 150180 - DNA, 558 bp, Cannabis sativa
agtcttaaatgtgaaaaaataccatagaagagtggcaaatctataaatgccatatttttgtaactttttacaaaatcccatatttcatgtaattttttaaaatatagcatgtctctcttgcaaatcacgaaaatcatctatagttgaatttatgctaaatttttgaggaattttccttaatatacaccagcaaacaatcacttaaaaattcatcttccatcatgttgcgaagtgtagtcttcactttaatcattgctgaaaaagatcgctctgtagtagctgtataaactagaagtgtaagaataagtgttacaactttatacacaagtagaaatgcaagccacctaattccctcaattgaagttttcagacgaaatctatttttagcaatttcttgtgatgtgaagttcgcaaaaccttcttgcaatatgtgttgattggtccttcacgtgaaagcatactgataggttctcctttgtttgaaaaatttatgcgtcatcatctccagtgataatgagatcatcgacatatactagaactatcgcgatctttgcttcc

SEQ ID NO: 150181 - DNA, 1346 bp, Cannabis sativa
aaaattattctaatttaagttgatttgaaattaaaaaatttccaacttaaacataattttatatttaatgatgtattaaaactagaaataaataattaagtatcttgaatacaatcaacttaattattaattctaatttaaaatctaagaaaatattctaatttaagttggtctaaaattgattataatttactttcaacttaaatatatttttctatttaattaaatactagaaaaatataaattagttactggaaattactatctaaaatttatttccttaaactaagtgtgtttttctaaattaattttaaaataatttaatgaaaaattcattttatttattttaaaattaattatgttactaatcaattttaattaggttaaattaagataattagcctaaaacaataatttaaataagataaataggtcttcagagttgaggtagtttatgtgagagagggctgagttcagtatatcgtacccactactatggcctcctaactctcacacaaggcccaagagagagaaatttaacctttaattaaataattagtattcattgaataagcccaatactaattgggcataaataaaactatgaaggtgatattttatttttagcaacaaagtacatttaaatatcaaaattaaatgggtttcctatatgcatctaagtccatgctcatacaagacaaatgatttgaatggaccctatcatgttactaggtttattacagatgaaaaaaattacaaaattacctattacaaatcacttatttgatctttgccaattgaactatgattaaatcatggaattaatcaaaaagttaatcatagcaatttaaatcaaataaataataggtttgttaaaagattttgaaataagcaactaaacaaacaaacaatgtaacaatatctggaaagttagttaagatatttttattttaaaattaaaatattttaaaaaaaatatcttaacttgaaattaaattaggttgttagaatatatttgaaaaatattaaatttaacaaatttcaaaaatatcttaaattcaaatattcaacaaattttcaaatatctagtttatttaaataattaattaaataactaataatataatataacataatatcttaatttaaaaacttagatatttctaatattatattttaaatcttataatttaacaaattaaattcaacaaaataaataaatttgaaaatagaatatttttatggttaagaaattatcaattttatttaaaattaaacaaaataaagtatcctaaaatttgaaaattttatggttagaaaaccttaaaatatctattcaaacaaaa

SEQ ID NO: 150182 - DNA, 759 bp, Cannabis sativa
ttgttaaaagtattattagttaagtattttgggttcgaatgctctctgtttttttttctcaaaaataacataaatatttttttttgatgaatcagtgaattgtattgctctaaaccaatttgtacaatctaaaggcacctcaatagaggccaaaaaatgatggctaattacatctttttacaaactttggaaccatattctatcttctctctttgttttcttaggcatgaacatagtaactgttagtttgatgcattgctttatttcctcgaaatttctcttgaatgtacactcctcctttctccaaatcaccaagttccttgatgtccacaccttgtaaaccagagcagcacaccctacagcctgcacaagttttttgaacttgctggtttttaccctgcctatccaccgaatgagctgtgggagactgttgcttacagcagaccagccgagccacattttaatctcatgcagacaatctcgagacaaatgacactggaaaaacaagtgctcacttgactcaatacctgtgttacatagacagtagccctcttcaagttgtaacccgatttcgaggagcctatcctttgttttcaatctattgtgcatagccaaccacaagataaaacaatgtttaggagtgttcaaacgagcccgtacctcattactccaattggttttgatgccatccgaggtgaataacttgtatccattagctatagagtactgctggctggtgaattgttggatgttagtgag

SEQ ID NO: 150183 - DNA, 710 bp, Cannabis sativa
  modified_base (678)..(679): a, c, t, g, unknown or other
gcctattagagataaccaacgtcccactaggcattagggttccaaaccctctttctaaaatatcacaaggcctacccaaaaagattaattattctcatagctacgtatgaacgtctggctctcgaatcaaacaacacgatataaaagaagtcgtttacagggagctgacctgccactacagaaggactcgctgcatcagcagcttaaacattagcatacaccagagtaggaacaaatatcgcttccagctcttgctcttctttctccacctgtgggcaatctttcttaaaatgcccaaccataccacattaaaaacatacttttcgcttacattctccgggatggtgtttcatgcaacgtgggaactcagggtaagaataaccctggcgtcctcctttgtcttgaaaccttcggaaccgcttgttctgtcttaaacccactactgatgacgtaggtttcctcttccgctcaatcatggagctcctaccacttccaccataattttgaatcacgcaggtaatatattgaacctctgccataatctcctgaggtctcggaataatttcctcagggctttcagcctaagaagcgttcttcatatttgaatcaccctgaacgattgaaggttcatagatccaaatctttccatgcaatggttccacttgattaccagccatnncatgcttcgctggtaataccgaataaaaaat

SEQ ID NO: 150184 - DNA, 554 bp, Cannabis sativa
  modified_base (115)..(134): a, c, t, g, unknown or other
tttagaaatactgaggtattttggtgtactcgaagttggccaaataccctagaagtagaggtttcttagtggctgagaaataagataactattaataataaattttttattaatnnnnnnnnnnnnnnnnnnnnattattataatattatttttatatgtataaaacttatcgtaaagtttagtatatatattataagttatatcagtaaacagtaaacgaacaaacgaaaccttcattctctctctttgataaaaccatcttctctcatatctatttttttttattttcaactcgaaacctagcgatctaagctttgatagtagcagaatagcaaatgcttgaagaagaaaagcttaggttatggtttatatagaggctttgtgattttgagtggttatggagataaaataaataattaatattaaatttgaaagggaaatttgaaaaactatactttaaaaaccctaatattttatacctaaatcaatacatttcaaaataaaaaatatatgacacttttatgaaaaccccaaaaataaccctcacataact

SEQ ID NO: 150185 - DNA, 905 bp, Cannabis sativa
  modified_base (832)..(837): a, c, t, g, unknown or other
tagttttcgagagacacagacaccttacaccttctccttctatagagtgattcaaaccctccttcattgttcttcaacctattcggcccatagtgacagagtgcaatgcccacacatagtaagtcaagtactctattatagtgcggaagacggtagtaacaaaacccggaggagagaaggagatctaggctcggatcttgataatactttacgatagaaaggaacaagggttagagatctgagcggaatgagacatattattctgttgcaatcaatgtaaggtttttttaaaatcttatgtgtttaattttattattttagagatattcatatttaggatgttaattcaaaatacttgttagtaaatctagatcctggtaacatgttcccaatagttaatccattactagaataacgctaaaaactatatattatgaaaattacttaatttaagttggtttaattcattttcaacttaaatttaattttctataaatatatatctaattaaatttgaaatccattatatataaaaaaaaaatacacttttgatttacacaataaaataaaataaaataaatctggaaaaattattctgatttatgttgatctaaaattaataaataaattcctttttaacataaatataatattcctatttaattaaatttcttgaaaaatgtctaatatttaagtatattgaaaaaatcactcaaatattaattttttatttaattaaatttacctagaaaaataccaaaattctacttagaaaataattatctaaatatttcataacctaattattaattttctaattaaaatataatannnnnnagtctatttattttaataaatcataaataaaaattacttgattaaaggtgatctaaaattaattaata

SEQ ID NO: 150186 - DNA, 767 bp, Cannabis sativa
  modified_base (637)..(641): a, c, t, g, unknown or other
aatgttatttaagtctttgtaataagataggatatatatgttatatccttgatccatccaactctatgtttggtgtatgtaatttgtctaagtatcaatatcatcatggtgtctttgtatgtatttccaccacgtggtgtctagatagaattggttatatggcttcaattaacaacaattctagctagtattataagaactctagcaaattgtattaatctttattctaatgaataaaaactgtgtctttcttataatacatatatattagtttttcaatggaactatgtctagtattaattaatggaacattttttggtttttacgaaaatactaaattttggacaaaagtttacaattttactgttatacagaattttttacaaaaatactgtatttttataaaacaaccgtaaaataacaaaacaaaataattaattaaaacaacaatggaacaactaaaaataactgtgcaacaacagtgaaaatttaacgcagtactacacagtataaaaaatacacaatatttttgaaaaaaattccaccccacattaaaaaagaaaaaaagtggaaaattttaaaaatcctcacatttttcaataggtattatccatactaaacaaatttaactataaannnnnattttaaaaatattaaattattaaattctgatttattggcaaataagaaaagagaataatttgaatttctaggcttatatctcattttatattatattaaaaatatatttatatacaaaatattaa

SEQ ID NO: 150187 - DNA, 518 bp, Cannabis sativa
acaattactataaataggtgaaattaattttacttcaacaagtgctaccaaattacacataaatctagaaatagattatgtagcatctttaattgaacgattttcaaccgtcatcaatggggtgcaatttattgaaagctctaatgtgagtaaggtttctcttgaggaagagatgttcgtcaaccgaatgaacattaaagaactgttagaggatgattgggatgatggaatgcaggtgacttttcttccctttctttttctctttactattattgttgtattatttttcattagtgcttcattatacaaattaaattaaaaatattgaaaaatttgattgtaggaatacaaagttactataaaggaaaaaatttttggaattgataccacttttggttggtactatatgtcttgcaaaacatgtctgagaaagcttgtactcaaagatggtgtttatacctgtgatcgttgtgacaaaatatgtgactatcctcttttgatgtaaggcaaatagtttt

SEQ ID NO: 150188 - DNA, 521 bp, Cannabis sativa
tataaaccctaattatttactattagacttatcgggatattacaaccatcccctccttatagaaattttgttctcgaaatttatttaaactaatcgagaaattaccctcgtattttttattctaactctcaaattgttgtttctattctgctatatttttttttgtacaacactttcttaactagtggaattgtctcatttcatagtacctcctctttctagtctaaaaacctggacaagatgttttccccatataataaatttgtctgaacattaacatcatcacagctcagaatataggtcgagtttgatacatattttctcagcatggagacatgaaacacattatatactccagaaaacgcaagagttaaggctatttaattcagtgaacatgtatataatctttctctcataccgcacctattaagatacctaaccagtggtacatttaattatgacttttaaataaacacctcatcagggaagatattattctaagataatctaacctttatcaa

SEQ ID NO: 150189 - DNA, 513 bp, Cannabis sativa
tttttttttttttttttttttttttgtacatgataatataattttaagtttgaatttaccaaatttgtgtacatttccattaagaaacataacatgaaattaactgaaaagaatccattttcatttttttttttgttttcaacaaaaaattggctaactctattattactcttataataagttgagtaatacttctagtttgtatctattaattaaaaatactttcatattatattttattaaaatgtactcacttttgtgagtgtgttacttaatatatcctcacttttcatttgagtctagcgcataatttacattaacttaaggagtataatatagacaatatctataaaaatgggtatatcttaaagaatgtggagataaaggtaaaaattaaagcaagtaacataaaataggtatacaatgtgattttttttagggtaaatatcattttggacctcgtgttttgcaaaagttaccaattagaccatctgttttgttaaatggcaaaat

SEQ ID NO: 150190 - DNA, 596 bp, Cannabis sativa
aggtcagatattttatattctatactatttaattaattttataaaataaccttatttgaaatttaaaataagattattttaatctagaaaattttaaaaatctaagcaaatattttggataaatgatattaatttatcattttattttattggatattgaatttgattctttttttaaaataacataaaatttgaaagttcattaccatttttttttggaatagatatttaggtttgtggaaaacctaattttcaaatttataggtttaattttgaaattaatttatttaatttaattctattatttttgaaaaaaattatttattatttagatttctcgaaaataatttaattatttaattaatttaaattaaataaatcatatatccaactatccattttgttgcatgtgtgtgtttaatatattgtttattattaaaattttatttataaaacctattattgtttgatctaaattgccattgttaacttgtcgacacatccaataatctgattttaaccaatagttcaattgtcaataggtcgaataaataatttgtaataagtaaatgttgcaatcttctttcatctgtgta

SEQ ID NO: 150191 - DNA, 510 bp, Cannabis sativa
tgaataatttaatattaaaaaatagataaataaaaaatgatgtatttttaaaaaattattaaattaaaaaaattacgtaaaattaaatttaaaacatttaaaattagataagttatacttcattaacaaaaatccaaaataatcattttttttttaattataatacgaaataaatgaaattaaaagataatttttttttaagaaaaataaatataaaatgaaaaattaataccataaaatatcttaatttgaatctctaagtactaatttaaacataaatatattttgtacaatcctattccaaataggagtcagttaatttttcttactttttttttaataataattaaatgttttatttgaaaaaataaatgaaattaaaagtcccttaaaagataaaactcttttacgaaaaataaatataaaatgaaaaatcaatactataaattaaaatatctttcaaccgtacaccaatacaagtatatatgtactaattcaaatataaatata

SEQ ID NO: 150192 - DNA, 582 bp, Cannabis sativa
  modified_base (535)..(545): a, c, t, g, unknown or other
taaataataattattcatattagtaagtcacacatattgtttaacatattatcattaggtttcactccacttatatattgatcaaaaagaaaaataaaaataatacaagtacactaaatataactacaagactaatatagaatattcacaactaaaattttcttatatttaatatttacaatattttaagtattttaaatttaaattaaaattttattatataaaatatcgacataatttttattttaaaatatatatataataatattataaaattaataaagaatattctattaagtaataggatattctgttaagtctctctcgcgctcaattcaacaaaaacactctctctaaaccctttgctctttctctctctacaaacctctcatcttcttcgttttccatggttcagaacgatgagagaagaagagatggagaagcttcttggagtggtgaaggactgtgtgagcaagcatctctactcttctgccattttctttgcggatgttaggttataattaacctatatttnnnnnnnnnnnagttagcattatctcgtctattggtgtcttttggagc

SEQ ID NO: 150193 - DNA, 576 bp, Cannabis sativa
  modified_base (43)..(43): a, c, t, g, unknown or other
aaactcaaacatcaaacccagaaaaagcagatgaacagtaaancatgcgatgtacacaaacaataaactaaagtacaagatgcaaagaacttacatatagcttgagaaatgggcgttggtgttgattgacggtaaagagttgattggcagcgacgaaggaaaagaagtaagaaatctatggtggttaaaggttatcgtttctctctggaaaacttgagaaaatttggtgaaattctgaaagtaaccaaatgaggtgagaagggtggcttttataggccaaaacacatgtgaaacagctgtgatcagctaccatcgaacggctgggaaggcacacgattcgaattcccaagatccaacggttggattggatcgtcatcaagacggtggaaatgcttgagtgtccgtctgacacccattaatgccccgtatcaattaatggacaagaaacgaatcgacgcctatgaaaagtgaatcactgtagtaatggtgatcattaaatacaccatcacgcgcccaaagcacgtgccaagaaaccgaggagccaaccggagtcatctaagaaagccttgttcactt

SEQ ID NO: 150194 - DNA, 545 bp, Cannabis sativa
gctagtgcagatataacagactaaaaacccagacacgactagacattgaacaaaacaaaaactgtcacaaaataatgacactaacataacagttggatgaatctgaataacgaatagtgaggcatccacctcgctataggaaggcatactcatgataccttcattaatcatctctagagatctttcaataagatccactgctccatcgagttagctctctcagatagaagctgacattcaaatgatgttgactgttgaagttcaccttgtcaccaagaactgtgattgttagatggagcgttatgtcttcaatagtagaaacgacgggattcaaattatcaacctcgaaaagatatggaaaaagcttcagctcgttgtcagggttattgttgctatcccggcgagatacactttgcagtgtatctaaatccatgtcaggactgacccagtaaaagcggataaatcacagctgtgtaattttcaaataataaccgtatttattttacgtgggacgtaatcaaatcccatatttcagggaaacattg

SEQ ID NO: 150195 - DNA, 732 bp, Cannabis sativa
gtaaatgtagcggctcattcctttccaagggcctctatatctcacactgatcgccttttcaacttggacactattccggttgagctgttaccgagtttggtaacatagttattcgtttaataaatgatgactttcattttcaaaaaaaaatatatattttatattaattaatatttatgaatctaataaaaaattaaagaaaagagagaattaaggagagaacaaataaaacttattaaagaaattttagagtgtcacatcaccgccttatacctctcctttatatatatatatatacatataatttcactaagcaaaggcttaattgtgaagaaaagatgttttatgatttatttgttaattgagaaactttgtaaggtctaattaataaataagttaaataacaattttatttgataattaattgtaattattaaataaatagttttgacatttatatgattgaaattgaaaaatatgacatatgaataaaataacaaaattgtagctagtggggtccataatgtatggccgaccacttaagttatttttagctattattttatcttttttattccatgtaatttaaatcctaaaccctagttgaaatactataaaagaaataagatggctctcattctcatccatatctcataacctagtttttattctttgtcagacaactagaaattgagagtctccttcaatagctattttgaaatccttctccct

SEQ ID NO: 150196 - DNA, 649 bp, Cannabis sativa
atacaaacttaaaatgaatcctcttaaatgtacctttggtgtgagcgcaggaaaattcttagggtttgttgttcacaaaaaaggtataagcatagatgaaaataaaactaaggctatataagccatgcgagcaccagagtcagcaaaggaactaaaaagcttccttggaaaagtatcatacttacgatgtttataccagctttggcggaactcacaaatccactacaggccataatgcggaagggtgtatcattttgttgcggagaaagacagcaaagttcatttgacaggattaaaagtgtgttgtcttctccttaggttattatgtcaccagtacaaggagtaccattactattatatttagctgttaccgagacatctatcgggacactgttagcacaacaagtcgaaaggaaagaaaagcctgtgtattatcttagccgaaaattgaaaggcgccgagataaattacccctatgttgaaaaataatgtttggctttggtatacacagcccagcaattgcgacattacttagtagcacatcaaataatagtgatgaccaaggcagatcccagaaagtttatgttatcaaacccataccttctagtagaatagcccggtggatactaatgcttagcgagtttgatat

SEQ ID NO: 150197 - DNA, 870 bp, Cannabis sativa
aagaaaaaactaaatggaagattagaggaaggagaaacaagatctaaagagaaagaataatacaaattcagaaaagggaaagagaaagttactaacctccaaatattgaaggatggtgtagcgttgatgccaacggtggaggaggcataaggacactagtgatggcgaaggaggtagagcttgtgtgcgttgggttgggttgggtcgctatggtagaatggggagtctttagactttttggattggggacccaattaatctgataagggtatatttggtaatagacttataaatgtaggtagattttaatggattttcatatggaggtatttttggttaattgataaaaaaagaggtagttttatatttatccctttatttattttaaaaatatgttgctttcgtattgtttttacgttgacttttagttgttaatattcaaaaatttcttaattttaactattacataactattgtattttttcaatatatatatattgaaggcaaaaaatataaacaaacattaactattacaattaaactaatacttgatacataaactttagtaattctttgttataattgattacatctatttaacatctatataaaaacatgaaaacaagagtatataaaatttaaagatactacaaattttaactacttgagttcaacatataaacaacatgaaaacaacttgtttaaaaaagtaatgaaatcaaacaacatgattactgttgggctttgtgccttaaataaaactctacttcaatgtagtctctatcatttaaatatccataaagagacagaaataattttatcacttatttaatgtgtcatttggttcatgttatcatttatatgtttatt

SEQ ID NO: 150198 - DNA, 812 bp, Cannabis sativa
catggactgggctgaggagacatttgggcatttggatgatgatggaggcctaccaacatatccaatgccattgcagcaaatccccccacaaagcccccctcggctagatgtggcaccagcagctcaagttagtgtatacaattggcattttgttggctctatattgttgatgggttggctctgttttgttagcatgtgtctaattttttattttctttttgtgtacagggtaatgatggttcaacaaggtctccagaggtggagatcactggttataaagaggttgaagaatctccccgagctagaagacttaggcagaggaggaggttgagattcagtgcccaatcacaaccacaaccccacactcaaccagaacccaacatagaacctcaaaccatactcccaacaccccaaccagaaccacaaactgatccccatccagaaactgaaccctatccagaaattgaaacccaaccaaattttgaaccccaccctgaagtagaagaatctgtaagaggtagaagacttaggcagaggaggaactaccaattcccccatactgaaacccaaccagaaacacaacaacaacctgaaccagaaattttaacccaacctgaatatgagtttccctcacagtctacccaacctgaccctctaacccaaccagaaactcactttgaaccacaaacccaaccataaactcactctgaaccacaaacccaagcagaagctgattttgtcttgcatgaggaggaataccgtggtgagccagaagttgagaggcatggctacactcaacctgacagttgtga

SEQ ID NO: 150199 - DNA, 550 bp, Cannabis sativa
taagtttataaagataaataataattcatgtatacatataatattcctccttttcatatgctctcatattattcgggcacgtatttttaaatcattgggtctagacagaaacatttttaaattttattttaataaattcaaaatggagtttaacgaaaattgaaaaaaattacaattttatacatttgatgtatacatataatatttctctttctcacatattatagtagagaacatatgttattaagggtaaatagcagcgtactaaaagttttaagtttataaagataaataataattcatgtatacatataatattcctcattttcatatactctcatattattagggtacgtatttttaaatcattgggtcttggcagaaacattttcaaattttattttaataaattcaaaatggagtctaacaaaaattaagaaaaattactattttatacgttaaatacttatgccgttaaaaataaatattagatttgtactgcttacaaacttaaaactttaaatacttataacgttattcatcttattat

SEQ ID NO: 150200 - DNA, 561 bp, Cannabis sativa
atgaatacttcccagactactaatggtcagccgtccaatccccggtcacgaatttcacttgtgggcccagcagtaggcgagcagaccttgtccggtaatttatcaggaggagtcatactagacggctccaaccagactaatggtgccattccacccgtcaaccaagcgaatcaatcgctaagacaaccaggatcttctgtgttcgaaaggttgggagcaacccatgacctaaggaatgatctaaacagaaggaggggaacagacgaacagaatattacgacgatcgtgcaacctggagcccgtattcaaatccgtgctcagaaagatgctgacgtaatccaagtagaccagaatgtcgagcaggtcagcccagccgtacaggcccagcttgacgaactgaaaaatatgtttcacggcatggctggacaatgtaataataatcttgagttagaccgagcacgcggtactcctttctcaccagagatcaatctcctgccactaacccacaagttcaaaatgccgacgtggaagatgtatactgggagagaagattctctttcc

SEQ ID NO: 150201 - DNA, 856 bp, Cannabis sativa
catgaaataaatcatgtgaataatacagcataaaatgatttttgatattttattaattaataaatctgattatattgaaatatgttttatttagggataaattaatatatatatattttccatccttggtattaattttccaataaatattatgaaatagttggtaaattaattaagattaatttttaactcaaatttaatttctataaataaatctatttgaattcgaaatctaatgtatttaaaaactaaaatacatttttgaatttattaaaataaaataaatctagaaaatatattctaatttatgttgatctaaaattaattaaataaattaaattaatttatgttgaccaaaaataaatatagttttcctatttaattaaatctcttaagaaaaatatcaaatatttaagtgtcttgtataaatcaacttaaatatttattttctatttaattaaatatatctagaaaaatactaaaaagtctatttagaaaataactatctcgataattcataaactaattattaattttctaattataatataatatattttagtctatttattttaattaaatcattgatgaaaaaattatttgattagagttgatctaaaattacttaataaattaattttcaactttaatctaatttttcaaaaaaatataaaaatatgtacattaaaaaaaaatatttcgaaaattacttaaaaaaagaattataaaataaaataaaatatactctaaaaattattctaattcaagttgatctgaaattaaaaattttccaacctaagcataattttctatttaattaaattaattaaaatagaaacaaataattatacatctt

SEQ ID NO: 150202 - DNA, 532 bp, Cannabis sativa
  modified_base (253)..(253): a, c, t, g, unknown or other
attgaaattattgttattatagctaccccttccttctcttcgttgtcctcgaccacatccacgttcacttcctcggtcacgtcctcttccttgttgattttttttagttgttagaattttcttcttctaaggtgagctttagtaattgctccatcttctcctttcgcttatttttccttttttgtttctcctcataggcttgtaaagaactcaggagtttctcaatagtcatggattctaaatctttattctncttcaatgattgtagcaatgtactcaaaggttggactcacaatacgaagagttttttctataacttttacttcactaattttttctccatttcttcttaactaattaacaattgataatgctctattgaaataatcagaaattgattcagtacattccataaataaattttcaaaatcacctctaagagcttgaagacaaatctttttcacttgctccgctcctttgttgcaagcttgaagcttctcccacgcttctttggccgttgttgcatttgaga

SEQ ID NO: 150203 - DNA, 1131 bp, Cannabis sativa
  modified_base (937)..(938): a, c, t, g, unknown or other
ttacatcatttatttattggtagggtcgcaaatgttccatgttccaatagttctttatttgcgattcgttgagtcgagccaatttataaactccaattccaactactgcttcgatgacatatggaccctcccagttcgagttgaacactcctacagatgcatctctcgtatttgcaaatacttaccttagcacaaagtttccaacattgaatagtcttttcttgactcttttgttgaaatatcttgtaactcggtgttgatacgctgcgttggtgatttacgactcagctcgtttttcatcaagtagatccaaggacaattttagaagttcctggttttcttcttgattataaaactctcttctattagtcgattgttcacttagacaggcagcattgcttctgagccaaatgctagcgagaaaggagtgtgtcccgttgctgtcttctcggtggttctgtgaggccagagtacttgaggtagctcatcgacccacctgcctttggcagcgtctaatttcttcttgatagtatcctttagggttttatctacaactttcacttgtccattcgcctgaggcctggatactgacgagaagctattgataattttgttcctctcgcagaactcagtgatcaagtcgccatccaattgggttccattatcggatactatcttcattggaattccaaacctacagacaatgttcttgacaacaaagttgaggactttcttgtaggttatggaaatgagaggttcagcctttgtccattttgtgaagaaatcgaccgctactatcgcatacttagctcctcctcgcccagtgggtaatgccctaattaagtcaatttcccatatagcaaatgggtagggcgaggtcatcattcttagctttgttggcgtcacgcgaggtatatgtgaaaacctctgacacttnnacatttcctgacaaactcatgggtatccttgttgatcgttgaccagtaacatccttgtctaatgacctttttggatagactttgccaacctgcatgattcccccaaaagccttcatgaaattctatgatgattttgttcgcttctgtagggagaacacaccgaagtagaggcatcgaataccctcttctatat

SEQ ID NO: 150204 - DNA, 509 bp, Cannabis sativa
tcacccaaaaattagggctacgtcttcgtcaagctcgtctcagagattagcttgatatccactatcgacaatgatgcaatacaatgattttggagcatcctgtcacaaaatcgttcaggtaagactcgattttgttgcttttacaagtttattgttttctatctttttgttctttgtaatctgaatctaactttgtgttcttcttgtgcatgtacttctccttgctcaaataatcctcaccacgagagttttactctcagatctggaccagttctctctggatcttggatttgggagctcgaggctagggtatatcacttctctctttctctctgttctatgttctgaagtagatctaggtttatttgctttgatctatgtatttatacagttgtagagtcagttgatcaaggtcttagaagttagttacaatttcagttgtaactaactactaagtcttgatccactagaggcgaagccaccctaggatcgagtcaacttgtttgttt

SEQ ID NO: 150205 - DNA, 721 bp, Cannabis sativa
tgtagccagagttctccttgtgtttgtcatggtgtttgatcagctaaattgacaaagctctcaactaaagtaccaaattgttgacctcatatttggccaaccaataacagaatcctatttattactgatgcttaccacttgtacacaataagaacaagaaagtaaagagacaatatttttaaagaggttcatcccccttagtgaataataacctactccctttttgattatatttattccgaagataatactactcagatcacaagggtttgtaaattttgaaagctccttttaagattacaatatgagaatcaagtaaacaaattcaagtgagagagaagccttgggcgtgtgaaagagaggaagatataaagttaaggttttaaacttagagcttgagaactttaaggagcttagagacttaaaagaattaggattaggttcatgctctttatatggtaaaccttacaagagattaataacctaatatccttaaaaaataagaactataaagtatttgttacataattaaataataaataataaaaaggttaattatccctcaataatagaggaataacttttatttctcccctatttcgtgggttgttgaaggccaaatcgcaacttcgcttgtctcggatgaaggctgtgcaccaagtgcctgccaggtgcaggctggctggccaagtgcctgccagatacaggctggctggccagc

SEQ ID NO: 150206 - DNA, 507 bp, Cannabis sativa
ctatcaactcctttatatcatatatgtataataatgatgcactcaaaccaatgcaacttgctctacatatagagaatcaatagttcattctctaaacttatttcaataatatataaataatattttatttatgtatattgtatatatgtttaaaaattattattttaatagtgtaggaaataaaaataatattaatttaatgatgtagaaaaaaaatataaagaaattaatgtatggtatgatgtaaaagtgtattgtgaaataaaaaaaagtagagttttgatgatgtattttaaatggtaaaataatgaaactgttaggagtgctcttagtaaagagaagggcctctagttgagacatcccaattggcatagacagagtggttaagcaactggtgaatttctttggatggctttcgagaatttcttctttaagcttttttgcttacgttcaatttcgatagaacgtgtcttcaaaaatcaagaaatatcaatgcaataggctaaa

SEQ ID NO: 150207 - DNA, 503 bp, Cannabis sativa
acagatttgaagaaatttattttccgatatgatttgaattgaatattttattttattttcttattattttgttttgagttcatttaaatgtttttcgtattataaaataggtattgcatgattgaagaataggagaaaaatttggtagagatggtagataaatatgacttggctaataacaagtggattaaagagcagtacaagtcgagaggtaagtgggaaaatacttatttttgaggtcattattttggtggtgctagggcaaccagtagatgtgagtctatgaattaggggtgttcacaaactagccaatttaatccaatccgcacaatctaatccaatccgcaaagtacaaatgtctgcacttatgcggattagattggattggtaaatattcaacatccgcacttgtacgaattttgatgttgattgacatgtaaaagtaaccaatccaatccaatccacacatatttataaaaaaattaaaaaaattatatatacaa

SEQ ID NO: 150208 - DNA, 689 bp, Cannabis sativa
cacttttcataagaccaaaatagtgttatgaaaatttaccataacaaatagttggaggtacatatccaattacaatgcaaccacaatctatgaaacaatacacataatttaaagcaacaaaatataaatattagattagttatgctataataaaaaaattaaaaaaaaagtgcagcagttatttctttgattaatgcaaatgatgtgtaatttatcatcaaaatgtaaaaaaattgcatataatttaaatacaatatccataagaatataaattagattagttaatctgctatccccttatttgcccattattttattgctttgtcttagtttaattttaaatcttcaaaaaaaaaaaatattttcacaactaggaattcaattgtctaggcaagacaccttagtagtaaattttcacaactagttgtgtcaaatgctgaaaaaatcgttttggccggtttgcatctttggggccaactgttgattctttcatttgggcagtcaggtgtggttttaggaccatggggcattaaagctgtaaatgatacacttctaaatttgctacatcccttaacttggtccaatgcttaaattcagattttctatgtatacccagaaacatatgttttgctttgcgaaacaacagaataagtgtcagaaataattgttattccattgatgcagctgac

SEQ ID NO: 150209 - DNA, 1584 bp, Cannabis sativa
cacacgtaagaaaaattagtattttttttaagtctgaactatgtatgacacttatgacaaaattacaattgaagtatggaattaaattatttaaaacttaattatcaggaaactaccttatatattcactttattttatatgttttaatttttatattaattttttaaaaaaatttacttttataaatgatgtttctattatatacttagattaatacaaattatgtgtcatttcaaaaaaaaaaaatgtaaattattagagttaattaagtagagggtgaggaggaattggtcaacccactcataaaaatgggtatattttaataaaatatattttgagggtatttttaattaatagatagtatttctcaacttatcccaataaataattagtaatgataagattaacaattcacacacaataattggagattaaaacaggaatgaacatgagataagttgaaaaatacccttttttttacatccatattaatcaaaaacacactcatatatatatattatatttcattaaagtatactcacttttgtgtgtgggttgcttaatatacactcactctccacttaagtctagtacataatttatattaacctaagaggtataataagaatatcatttataaaagtaagtatatcttaaaaaatatgaaaataaaggtaaaaattataaataaagtaaaatagatacacaatgtaattttctcgatgaacttagtattaaagaacaaaaatgataaagccataaaacaacaccaaaattgattcaagtcttatagagatcgatatgatctactctattctaattctggaatcccaccaaaaatctttttattaattgaacaacaacagggtacactacattcaagattgattctctgttggattctctcaaagtgtttatctctcactcttacccaataatcttcttcatctataaaagattctttatacaaaacccaaacacaacctctctcttttctttgtacctctctctctacctttcagtctttctttctcatgaacacctctcgtaactcgtctgaacttattctctcacacaaacaaataagtgttggtggtatttatagatccaggaaatagatcctaaagtcgatggctaccaaagataagttgttaagttagttagactaaacaaacttaacaaattctttgtaacaatatctccacgtcagcataagtaaagtgcttctggatgagacgtatgcttcctggaagatagaccaaagcgtacgttgaatggactttctggataggaaagacaacaactggagtcgactatctaggagggaatagctggccatccgaaattcctttccagaggaggataagcttacctagagacttcatcctggtggacacgataggtgtccagtaatgccctttcggattacatctatcattctagaagagtacttccagatgagagagttagacttcaaggaatgtcctttcagaagatatttaattttataatgtccccacttcaagcctccattgggcccttacacctatggaatgatgacttttatacacgagtacgtcact

SEQ ID NO: 150210 - DNA, 778 bp, Cannabis sativa
aagaatgggccggccctacattagaacttccctatatatatatatataaatcttactattaatatagaagtgtcaataatagaatattccctcatggttccttagaactttgtctcttcttctcatatttttttgtcttttctcaaattttcattcatatattgatgacttttaactacacgtgtacatcactataattgttttggtaagttattgttttatcttttttattataattgtatttattaattttttttttttttttggaatatattacacttagtagtcataaaaattgctagctacccacttcatgttagaactagctctttgtcttttctacatctctatatttggttttctcttaatcaacacatatctatcatctctccctataaaacgtatctcaactttaattttattaaaaatttattaagaaaaatcttaactttaactggatggtcaatgagtcaccacatcaagtttctcgagttttgaattttatcacatctatatcaaattatatctgcataaatacttattcatcagtttatattatatgtaatacacatatatttaattataatttttatttttatttttattttaattatgtatattttttgttatataataatttttttctaatattatttaataaaaaatatcatcctttattaaaaatatttaatttaagtactatttatataaaaaaaaataatattatttataattagtttttaattataattttagtttaatcgtaatagttttaatt

SEQ ID NO: 150211 - DNA, 502 bp, Cannabis sativa
ttacccatgtcctgaacgttaacccagacatgccgccagtacagcagaagcggcgtccccttgatccggtaaaagcagacgctctggaaaaggaggcagacaagctgctaaccaacgacctcatccgggacgtgtactacctggaatggctggctaatccagtactggtgccaaagcaaaatgggacatggtaagtatgtatagaatttactgatctcaacaaggcctgcccaaaagattacttccctttacctcggattgaccagatggtagacgccacctctttgttgaagctactatccttcatggacgcctactccggatacaaccaaattaagatgcacattgtagatcaagagtgcactagcttcaagacagataagggggtatactgatacctagttatgcctttcggatttaaaaactttggtgcaacatatcagagaatggtgaaccggatgttcaaaggcctcgtaggaagaaatatggaggtttacgtgga

SEQ ID NO: 150212 - DNA, 704 bp, Cannabis sativa
gctacttgcccgggaccctttctgctcagggcatctgccattacattggctttcctaggatgataaagaatctcacaattgtaatacttgactaactccaactgccatctttgcctcatgttcaagtatttatgcttaaagaaatatttgaggctcttgtggtcagtatagatctcacatttctcttcgtaaagataataccgccatatcttcagtgaaaaccccactgcagcaagttccaggtcatgtgttgggtaacactattcatactccttcaactagcaagaagcataagaattgatcctctccacttgcatcaaaacacactaaaatgtctagaggcatcacagtacactacaaacttttcctgatttgatggtaaatccaacattagagttgtaatcaatcactgcttcaactcttggaaactagcttcacatttacctgtccacacaaaccattgatttttcttagttaattttgttaaaggtgtggagatcttggaaaacccttatacaaagcaaccttaatacccaaccaagctaagaaaacttttgactttattagcagtctttggtctttgctaatctctaaccgattcaatctttcgcggatgcacctgtaacgccccgatttcccgagacgtcacactagctagtccgtttaaaaccatttaagataaagacaataaaagacttctttaa

SEQ ID NO: 150213 - DNA, 634 bp, Cannabis sativa
gtttgtactgggtatggaatacttctctagattaatggggaagataggggagaaagaagatttccaattccatgatagatgctcggaacttaaactgaatcacttggcttttgctgatgatgtgttactattcagccatggagatttcacaagtgtgttatacatgctacaggcactcaagctcttctctcttacctcgggactacaggccaatgctagtaaaacgactatatatattgcaataacatgcatcaggggagtgtgaataagcttctacaactttctgggtttatgagacaagagcttccatgtacatatcttgggataccaatttgtgcaaggaaaatttcaggaaaagaatgtgtgatcttggttgaaagaatgacagctagaataagaacatggagttcaaggaacttatcttttgctggaagaattaccgtaattaactcagtgcttattgcaatacaagcatattggagtcagattgtgattatgccaaaagaaattctgaagtccattgaagatatttgcagagcttttttatggaaatggtaggctgttttcaatggggcaagggctgtctcttgggataatgtttgtcaacctaaatcttcagggggattagggatca

SEQ ID NO: 150214 - DNA, 1065 bp, Cannabis sativa
  modified_base (164)..(165): a, c, t, g, unknown or other
aagttcatgtttaggattttaaaaacatatttgttagtaaatctagatactggtaaaatacattccaacagttgaagacatacattaattataatttgttttattttgttactagttatgtgaaattgtttttttcttcattaatattaaataatttaatattnnaaagtaaccaatctaaaataaccgatccaatccgcacttttgcagattagattggattggatttgagctattgtgcggattggattgcatccaaaaaatgaaatccgcacttagtgcgaatcggatgcactatgagcaaattagtgcgaattggattggatgaatacccctagcgacttatataagactaagttatcttggaaatttagacaaaacaactcgagaccaccttcaagcggcatctaaaaaaatgaccaattggacgaaaactacctacaaaataaataaatatagaaagtggattagcacactatataacgataatattgtgaatttttaaattaaggaaattactcaatcattattttaataagaaaaaacttatcttttaagcttttttcactcagcatgtcacaattgtagagttaagtcttccaaggcagaaatatactagtcaattaacctgcaccatacataagatttgagagattaatctgacttagcaaatcaaaacccacctaaaattaactattttgccaaaaaagtaacaaaactcaattaactaacaacaaaagataaaaaaaaatgatacaaaataatagaaaaattcctccaaaattgttaaaatataaaagcaagatttaaaatttatctgtaagaattgataatagcactctttgaggttgtatccatgagcaaaataagccaatgacatactgcaaactagccaaaaatatgctatcaaaagcctaacgaaatagcacaaactaaccaaaaaatatggcaccaactagctaaaactgaaacactatatttaaaaataactacaaaaaatcttacttttagtcacaataaaatttgtaactaaagataaaatagttgtggctaattataaattat

SEQ ID NO: 150215 - DNA, 792 bp, Cannabis sativa
  modified_base (729)..(739): a, c, t, g, unknown or other
cttataaaaaaacacagtaaaaagtaaaaaatatcgcttggcagtatttttgtaaaaaaatagtaaaagttagtataccatataaattttccttttaaaatgctaaatatcaaatgagtattattgaaaacaaaagatctcaaatatttattttagtaaaccttgtggtaccaaagattattataagccatattagagttgttaagtacattttcaattgtacatatttgttaattttattcatgtgttacattattgtaataatgctccttggagttggcgaacacacatgtacgtctattattgacatgagtctacctttttgtttggtaacattgatatgattttacttagtttcaagaaagttaatcctttatggggaaaatatttttcttgtgctgagaaatgggcttaatttcttaaaaaggaaatggggttattacatcaatacacaaaataaaaaaaaattacacaaatataattatacagaattttaaatattttacggtttaaaaatttatttacagtcttttaatattttcatgttatttatatgttgtactcttgcatattttattgttgtttatttatttattaattttttgttatttgtatattatttttatgttattttcatgttatttgtacatgattttttcgttatttttataaaaatctgcgtaaaaatctaagagaaaacataaatttataaaggtggcgtttggtaannnnnnnnnnntcagttttctgtttttaaaagtagaaaactgaaaatatttttcaaaaacatgt

SEQ ID NO: 150216 - DNA, 655 bp, Cannabis sativa
tcttacttatatcccaatataattttctagtgcgcattggatgctagaggtcgttgcgccaggaaaaattatccatttagaccctatgcgtaaccaagttcccgaaaaaattattcaaatgttcggaaggtattaatttaatgactatttatgtaacaaattatttaattaactgatgaattgaaatgttaatataatttttttcaaacagagcatatgaaggtataggggcatcaaatgcgtatcttggccggtggccaggaatttcactagtaaattgtctaagacaacctaaaaaccaagaatgtggtttttatattttgaaatacataaatgacatcgtcccacgtgcaaatcccaatcgttatatacaagatcaaaaagctataagtattaattataacaaataataatatatatataaactaatataaataattttactttttttttacagtttggagataagcaggaatataatgaaaaactgaattattactaatacaacgacagtggatagaatggttgatggcggtgatttatgaaggcttggacgattgatgctgaaaggcctaacaactattctttcctagcttattttttaggttaacttgtagtaagatttattaaattgttaatacttggactaatttta

SEQ ID NO: 150217 - DNA, 861 bp, Cannabis sativa
ttgtttatgaatttattgaaatacgtgaatatttatttgttctgatttattcatacttgaatatttatattgatgattgttaattaataatatcaatgtaaatatctattatttaaaaaaataatatcttttttcttttgcctattattattattattattatacgttattatgtgggttacagaagaaaaagaagttttaattttatcaaataaaagtaaaagaaagaaggaaactttaacaccataataaacaataaacatgattcatgataaaatattaactgaaaaagaggtattctttctttgtttttttctagttgatatttaatggttcctctacagggtgagtagtgtatataactatatatattttaataattttattaggaaaaattataactttttttaaaaaaataaaaattatttattgaagtaaaattatactatctaagaaacatcgatattctaatcaattgaaataaaaagaaaatccaatggacgaaagtatgtagcaataaaaaatatagaagaattaataattaagaaaggaaatacctttataagtgtggaatatgaacttgtatcaattaaccaaataatccagataattaagcactacccgagatcatgaataataacaaatatataattttttgttttaaggctaagaattaaaaattgagaaagaatacaataaatcgcattagttaccttggagggtacattctttcattgagaattaaatttataatctggatcaatataaggctcataaattacattggctctcttctctgaattactcattcttagaattctcctcttttattaatcgccagcgatattgaggagaaaacat

SEQ ID NO: 150218 - DNA, 787 bp, Cannabis sativa
ttgtagtctaagagtattaaaataccatccttatcgactaacatataattcctattttgatcttaagatgtatttgattgtcttccagtgttcctttcttagattaaactaatacttacgtataactcccactcaataatagatgtttgttctaatgaataccagagcatacatgagacctctcaccgttgatgcttaaggaattctttttatgacttttatcttttctagaatagttgaaattgttccttagataaataaaatttatgtctaggatttttcactgtgtagacaatactataatcatgattaattatatgttcaggatttaatagaatttatacattaaacatataaccatgaaagtaattatgtgaaccatgcaacatgaaataatttttgattttttattaattagtaaatctaattatatcgatataagttttatttagggtataaaatcccaacaattaggtctttatagtaaatgacatgtttaataaagacaactttattcatatcgatctttgtcatatatattctctattctatacaacaccttcacttagatgtcgtctttcatcagtaatctgaaccgagattacttgcaccaaggaatggacatcaacaaattgtacttgccaccattaattaaaaattctgtaactttaatatgttgctgactattttattcatagctacatgatcttagttctctatacagctacaaataacaacctcatatatgaatgaagaattttttgatatttacatataaattattcaa

SEQ ID NO: 150219 - DNA, 715 bp, Cannabis sativa
attcttgcttcctctcttacttaaatcaaccaaagtaaaaccaagctcatcagtttttactctaacattgttgtcaacccaagaacattaaaaagtagaatttggaacgtaaaataattgagctctcatatttcttcaataacctcatagtacatcatggtacctaaaacaggatttttatcttttgcacttgcaaaatgcattatttctacgatgatatgtatgccactgttttgaacctcttgagcatcatctcttgactttgtatgaaaatatttaccccttacaatgtatgcttcatgctttgcaactgtaaaatttggtccaagggcaatacgactcaactcatcggatactccatgattcggttcgttcaactttgctaaaatggtattccttaaccacccaatgaaagtttgacgatgctcatctgcaacccatttttgtttatttttatgatttcttggaaccattaattgtaataactccatatggacactgcaaaacatgtaatgttaatcaagttattgttcatcgtgactaattaaaagttaatcaaaggaaaagctacctataacttacgtgactaatgaaagtttgacgatgctcgtctgcaacctatttttatgatttcctaaagtgaatacattcatttgtttggtttggtatttatactggaaagcttattcttttggaatcgtaattcatgtggaga

SEQ ID NO: 150220 - DNA, 1289 bp, Cannabis sativa
tgactaattataaatcattattcttatgttgtgactaaaatattcgtgactaaaggtattagtcacaaaaattacaatttgttttgactaaatgtgtttcttgtcggaatatttattatgactaaaattaaattagtgacaacttgtatctaaataccatattttatccacaagtaactttttattgtgagtaaaagtcacatttagtcataaatattatattgtgactaaataattgtcactaaatataaatttattatagtgataattaaatttatttagtaaccatcaataagtaatacccattaaaaagtgttttatgtatatatataaatttctgggagggtgtgattggcacattcaaaaatataatttaaattttttatatgataatattttaatgatttaaggacctttcactaattttttttataattttttttaataatttaaagtgctaaaaataagtttcaaaattaatttgttttgcgaactattgaaacggttttttggcaaccaagaaaataaataatgatttagagctaaaaaaaagagatatggagaccatgatgtttacataattgggacgttgatgagtcttagtccacgaatcatttgtattgacaaaaaagatgaagttttctctctagaatttagtaggatttaggcttaatatcaatgagtaagaaactaaagagtccttttacatgtgataccatggtcctattaatttatagccaaacataaagtttattttttactattcatttaaatgcatagacaaaaataaagcattgattgttggcacatccactcgtcttgtcttctctcttcagttttattagaaagggtttttcacatgtcatatcaactttattgggagacgtgtcagctagtcggagtaccacatgtccttgttttaacaaaactagggacaacatttattttcataagtatttattcgacctttaggtcaatgaagacttgggaccaatcttctctgtttcgcgaatgtgcaatttttataatgactcccaaaaggacagacaactggatagagcctagaagacaccagtatcatccacatgtgttcaagcccatcaagcattagggcgttagagagatttgcacaaagcccaaaggcattggtcttattaccacagtggaagactctctattgaaaaatagtcttgaatgggaatggcttccctaaggtggcgtttggttggagataatgaaatagaatagaatggaaaggaaataattttcattccatttctttgtttggt

SEQ ID NO: 150221 - DNA, 721 bp, Cannabis sativa
gtttgagttcgggtcagagttcgagtcctggtctgaattttgggttcaggtctggatttcagtctaggtccagataaggctccaagtgtgggttctcgtctcgggtcttggtctgggttgggtccgagtcccaagttccaatcttcatctgagccaggattcagttctaggtctaagaccttggtccttatcctagtctaggttcgagtttgggtccttgtccgggtctagcttttggtttgattctaggtgtggcttggagttctagtctgagtctgtgttcgggtccgtgtccaggtttagaccccgatctgggtgtaggttcgggtccaggtcaaagttcgggtcccaagtgcgggtccaagtttgggtcttggtcaagagctcggtccacaactggtccagaattttgatcccagtctgggtcttggtcctagtcaaggttcgtattcggatccctatctaggtccaagtcggtgtttgggatcgggtcccagatttagttccaggtccgagtctcagtttcatcctgggtacatgaccgtgtctaggcccgagttctagtctcagtttgggtttgaggctaggtctatgttcggttctaggtcagcgtgcgggtcctagtcatggtcctagtcttgttctagcgtcctggttcggggattctagttcaggtactaattttgggtcccaggtctaggtctgggttcgggtttggttc

SEQ ID NO: 150222 - DNA, 567 bp, Cannabis sativa
  modified_base (96)..(97): a, c, t, g, unknown or other
caacacttttatcagaaaaaccagctagacactttttcttaatctatttttgtttcaaacttttatgtttcttttgagatttttccaagttatcannataatttgttttaaacatattttgcaaagtgaaacatttaggtctgttatgtccctttctaccacaaaaatgacaagtaggaatgagtctttttacctcagatcttaatctttttacaaatccttgagactttgtgttagtagaaacagcttctgcacagacaagttttgaatctattgcaacagacttcaaatttagagcatcaggaaaattcgttggaacactagattttacaaatttcgtgattccaaaactttccataccatttgatttaatgccagcaaaacctctttgacctgcattttgagctttttcaaaaataaaatattcgggattaagcatttgagcattttccttaaaaattttaagttccttctttaaaagagtaattttttcttctttaacacaaaaatttgtctcataatcttttattttcaactcaaaagtttcaatttgatgagacagttttt

SEQ ID NO: 150223 - DNA, 649 bp, Cannabis sativa
ggccctgtttccaagggctcgggtttgtggttttctccccaagtttgaatcttcattatttctaatgacagaaaaaatactgaaacacttttaggtgaacttgattagaaatggcccaagttgacaatatgtcaacttggacgctaggcccagcacaaggtgtcaacctaggcgctgggtccttgttatggcccctcaaaaattttgtttggtccccaaaaatagtggaatctcaatattttctaaaaatggagaagattctcggaagagttctcagaaacaccatcgaaatcggcccaagttgacaaatgtcaacctgagtgctaggccttgcttctgacacccaagaaatgttgtttcttccctaaaatgacctatttccctatttttgataaagacaaagaagatgcaaaagttaaatcgtcgatatggtagataaaaggcaccaaaattgtagtgttattccaaattttgtccatctaatgtggcatgtccacgtaagccaagacagagtacatgtggaatacagccttgccaatccttacaaggcatggcgaaaccgccaagcagcaagcaaaagaagttaagcgagtcattaaggagctgtaccaccatgtctggccggccaaggggagtctataggctggcc

SEQ ID NO: 150224 - DNA, 647 bp, Cannabis sativa
tagtatacactattattaaatctaggaatgccatgattatgtccttaagaaagcttgaactgctaactaatgttgtatatttgttggctattttaaagtgactaggggtggactacactatgatcattaaaacaagaaagcgtatatttctataacatgactatataaatgtaatctcaaagccaaagtaggaaagaaatggagatactatttgatttcactctaaaagtgttccatcatcttctacacctgtaaaaggatgatcccagtacctctgttgaaccgatgcaagttgtgacaactaaagaggataataccacttttgtttctaaatagaaagtcatggtaattttgaatattcatttatcaatgaagaaaacatcattttttattacttgtttaatatattgcttggttcacatgtttgtttcatgatcatttgtttaatttataaatttatctaaatctttatcacattgtttttcatgattactgtgttgtctacatagtggaaagtaatcaacattatatgattaaatatagtcccactggaatttccactgatatgataatcaacattgtggtttacttacacttggatagtgttatgtcttttctggaatagttgagactttccttagataaat

SEQ ID NO: 150225 - DNA, 684 bp, Cannabis sativa
  modified_base (65)..(88): a, c, t, g, unknown or other
  modified_base (185)..(197): a, c, t, g, unknown or other
aaatttttaattaatcacgttttccataaatctcgttgactagcaacgagctgcacagcatgttnnnnnnnnnnnnnnnnnnnnnnnnttagttagggtgttacaaaaagttaattttattctgattataagatttttaattgaaaattcagattctacacaaattctaccaaaatttgaatttnnnnnnnnnnnnnaatgatttttgaatcaaaagatatgacaaaataaaatgcatacccctgcgtgcccagatgaaggggaatgggcgagggaaagggctgcgtgcagcctctgttggccaagggagctcgtcgtgagcagcccttcagacagggccttgtccgagtatcctcggttatgtacttgtctgaagacgcgtgctgtccgagcgtacactcatccccccgcacgcacatgtggttcccaaaatgagatattttcatccaaattcaaaaaaaaatcataacgaattcataaaaaatccaaattagattatgtaaaagcctaaattaattaattttttgtctactttcgagtaaaaatattttcaaaaaaatatatatttatcaacttaaattgcgatttccatacaatcaccaaacatgcacataaaccaacataaaaccatccaaatcaacacaaacatcgttttaaatccatatctcatgaaagtaaatcatt

SEQ ID NO: 150226 - DNA, 510 bp, Cannabis sativa
tatataaatccctactataattatattaacagttatgccatttaattataatatttataattttttttacaaaaattaaacttatttttatataaaattttgccaaatgttcatgactgaaattatttttcatcatcatcatcgttcccaatatatagttttaaaaaatggactttagcaacatccatactcacaagtcatcatcacagctcaaaatttgtcgactcgctatttggaaaacttaaaatttgaaaggacaaacctaacccagcttggagatagatgataatgtccaaatcgtataaaagaacctttgtgaatttgtgtgcgttgaagacataatcaaattcaaacatattaagcaaagtcatctaatgtctaaataacttgataacaaactacaaaataacctgagtagcagagagagacgtcgttgcttgagatcaaagtggtgcacacctccagccttgcttgggaatcgtccaacagcaaaggaaaaaaaagtgagac

SEQ ID NO: 150227 - DNA, 683 bp, Cannabis sativa
tttttttcttcattatttttttatgatatttgattaaggcatttagttttctatgtgtatttttttttcatatcatttttctttttctatatttcattgtttaaatttttgaaagaaataaaacaatcataattttaaagtttttataaaatttttctctatctataataaattctctcacattttaagtttttctttttaaaaaaatgtcataatcggtgtattaagtttgcatgccatttaatgtttgcagtgcggatgttgtgatttttagttaattttttaaacgaaattggatattagggttgtccatctgatccaatttacatttttttggtcaaataaaatctaatccgcactaagtacgaatttcatatgttggatccaatccaatctacaataatgcgaattggatcaattattttattgttgattgcattttaatatttcatggaaataaaaaaaaaaaataccagtaacacaactaaaattgaagatggagtttccatctattttaatacttgaacaatcatctcaattgtattgtaggagagaaacacaatttaatttagaaattaaaatttaaaagtttgttttctttaatattactaaaaatcgataatatattatatatatttttaaatatatatataagtaggggtgttcatccgatttaattcgca

SEQ ID NO: 150228 - DNA, 508 bp, Cannabis sativa
  modified_base (172)..(178): a, c, t, g, unknown or other
aattccagttcagtgcaggaatttttcaaaattccataactcgaccaaatccaccccaaactaattcaaactttccaaacctgctctaaatacccctaatagcagttccaaagcaataaaacaacccagtaagcacagatacaaaaattgccattaaagctccaagctttgnnnnnnnaactcaagcttggttaaaccccactaacatgcatcaaaacctgcttgaatctactcaaaaatgcataaataagcctctgaaaacaacagcaatcaactacaacaagcatagcaacaattttatcatttctccataaaaataatcctaagtttcgagttgaacttccaaacttgaataaaaacaactagcatgcatcaaaacctattctatttaactcaattaacagcagctattactatcaaaatcatcaagcatgcaaatattttctttcttaaaattgaagaacacaacaagaaaagtttcaaaaaccataccttagcttgagatcac

SEQ ID NO: 150229 - DNA, 823 bp, Cannabis sativa
ttttttttaagaaagtgtttaagatttattgggtttgtgattttgtttggaattgtttgtgtttaagatttattgtttgtgatttaagaaatttttttgtgggattgggattgggtgtttcagatctatgattggggtgtttcggatgtggggaagaagagggtctgatggtcatgggtaggggtccgatggtacggatccgatggggtttgagtgtcttaggtcagatggtccgatggttggactgccatggggtccgatggtctgattgtctggggatacgtgggtccgatgggtgccaaaaagggggtgttgtttgggtccgatggctaccaatcggaccaattgtgaaggtccgattggtagccatcaaaccgtgtttttttgttttttttttagttttattaattatttagttattgttttaggtattattttatttttaatgatttattaagtatttttaattaattattgttttattactaattaataattattgaattattattaattattaattattgctttagtattaattattaattattgttttaatttttattgttttattaattattagttatgttttttaagtaattattaattattgttttagtattaattattaattattattttaatttttattattttattaattattagttatgtttttttagtaattattaattattgttttagtattaattattaattattgttttaatttttattgttttattaattattagttatgttttttcagtaattattaattactgttttagtattaattattaattattgttttaatttttat

SEQ ID NO: 150230 - DNA, 761 bp, Cannabis sativa
  modified_base (478)..(483): a, c, t, g, unknown or other
aaatttccagatcaaaacaaacaacaagtagtgtggattaaaatattacatcaaacaaaattggaaaaagagtaacacaaataaatacagattaagataagaataaaaagtagacagttttgtttgtctaggtgtccagttccactacactacatagtttcaatcaacaaccacattacttttttgtgaaaatttagaacaactaggtagcatttatattagaattttattttaaaatataaaattttactaaaatgataaaaaaatcattttattagaattcaaaatgacattccattttcatactttaaaatataaataataaaaattattaggtgattctataatgcatcttcttaaaaggtatatattgatgcaccatctacttattttgacttccaaaataattttttagtcattgtttttcatattcatgtgcgttataattatttaagatatcctataaaattttaagaannnnnnaataatttacaattaaaaaataatgttcaaatagtctattttacatgcgtataaaataacgggatattggcggctaaaccacatgaactttacggtttgtaacagttaaccacaaaacccgaaatttcggcgactaaactacctaaactctagttccgttttgctttgtacatccccgtccaaaaatcatagttaagtaccacggtagactgtccacgtgtacacacttgtacatgtggcaaatttttagtggtccatgtaatattagttttaaaaaa

SEQ ID NO: 150231 - DNA, 603 bp, Cannabis sativa
aatttcaatctacagtaatgataactataagtaaaatacggtgatgccacgagctttaaatgtaatggtaattacaagtgaattacggtaacaataatggtttcgaaaacatataaaagtattctatagatttattttattatttttttatagatctctattttgtgtgagaattcagttctaatatcttttttcactataactttttaagaaatttcttcttgtgctttttttgttacataagaaaatagtatgatgattttatatatatatttctataaagtcctctataaatttatctttttttaatactttatttcttactataatctctaagaatactcataaattaatatattgtaaaagaaataatctattgactagactaattataattaagattaagatttttgtctttgtcttttaaactttgatatgtaccaaatcatatgctccatatatgaagttgagattgttaaatttaaggatttctatataatttcattcaattttgataatgtgtcgattgcccttatactaacttgtgcccccaaattttgataactactaaatcatgctctgaaactttaacatgtaataaat

SEQ ID NO: 150232 - DNA, 1459 bp, Cannabis sativa
  modified_base (831)..(835): a, c, t, g, unknown or other
  modified_base (1238)..(1239): a, c, t, g, unknown or other
attggtgataaccattcagctcgccaataaaaggattaagagagtgttaatagacaatggaagctcagtaaatatcctttataaggagaccctaaagtaaatggggctcgaaaataccaaattaaggccttgtatggtgaacctttgcggattcagcgaagacaatatcaccagccttggcagaatcgagctcgcattaactttaggcgaggcacttttatctgctactattatgcaagatttcttaatcgttgacttgccctcgacttacaacatattgttgggtcatccagcactgatcagactaggggcagtcagttcaatgaagcacctatcctttaaattccaaacgcaaaatggtgtgggagtggtgcgtggcgaccagatgctggctcgcgattgttatcacatagagttacaacatagaaaagccgatgatattggcagaagaaaacgagaagaaagacaaagatcttgatcctcgagttcaagatgaaagaaaccttcttaaaccaatcgaagaattggaagaggttattcccaacccaggaaatcccacaaaatgtgtatacattaggaggaaccttgacgagcagctcaaatagcagctaataagctttttgaaagggaaccaggatcagtttgcctggagtcctagagatatgatagggatcgaccctaatattatctgccatcagttaaatatttatccaaactacccagcaaagcgacagaaacggagacccttggatttcgagaggcaaggggccctaaaataggaagttgaaaagttgttagtcaaagattttatacgcgaggtgttttatcccnnnnngatagccaatcctgttctcgtctcgaagcctaacagaacttggagaacttgtattgacttctctgatttgaataaggtgtgtccaaaggattgtttcccagttaccaagattgaccagttaatgcatgcaactgctgggcacgagcttatgtcatttatggctgcatactctggatataacaagataaaaatgtacaccccagatcaagaacattcaagcttcgtaacaaacatgggactttattgttataaagtcatgccgttcgaactgaagaacgctagggtaacgtatcagcgactggtaaatgaaatgttcgcaaataaaatagggcggaacatggaggtttatgttgatgatatgttggtaaaatcgataaaaagtaaggatcatacctcagacctnncggaatgctttaaaatatttaaaaagtataacatgaagctaaaccctaaaaaatattccttcggtgtctcctcaggaaagttttggagatttatagttaacgtgaagggtattgaggcaaatcgtgaaaaaatcaaggcattaatagacatgccatcaccgacaaggcctaaggaagtacaggccctgacaggaagaatggctgcacttaacatattcat

SEQ ID NO: 150233 - DNA, 891 bp, Cannabis sativa
ttttggtaaattcagaggcattttaatggcttcattgagtttaaaatctgattataagttctgatttttgttgtgtaaagcaagcttgatttcatggaactcaagcttggagctttaatgacactttttgattcttggtgaaattattgggttcgagctgtaaaatatgtttaatatgtcatatgttgatgctctggaaagtttggtggtgattgggggagatttgagtaggttttggaggtttaaaagttatgatttttcgtgttgtttctaaccagacaaccggaattctagttggttgagggctgttccaaccgacattccggttggactgtctcggggaaaatgctgaattttgttttggtcataacttttgacgcgggactccgttttgggagttcattatatcgttggaaagctcgttccgaggtctatgtgattttataaattttaaatgccatgtaaataatttatgaatgtgaaatcaggggttaaccctatttgtgtaaatcctgaattgtgtggctaggattaccggcaccaagtcaggagcccctggggatttagaatctctacttttgcggaacaacatgcaagacagtagttgaacacaatatgtttatattgaatattatattggtgataaattagaaaccgagattaggattattaccttaaagtgagctgtttaatggcctagggttattaccctagtaattattaatttgtaaatgctacgtcatgataaatatattgtaattaagaattatgcacacaaggtatattaagttagactcggtaaattagtaccttgagtttgataataatgcggtctagggttattaccctagaatttatatgaaggtaagaaagcgatgatgtacaataata

SEQ ID NO: 150234 - DNA, 504 bp, Cannabis sativa
aatatatctatatgttagactataagtctaactgcaaccttagtttataaagagttttaacttatactttacttgatacacaattcaggatttatgttgcagtcttaagtgtttctctccaaaacgagtttcatgaagaagaatgaataatcacacttctagccatgtccttatataaatgttaattacatctctcaaatacccttcatgttaggttttcctaacattttgtattagaagaaaaaattacattcttttagtagttgtgcaaaataatcttagacgttacttacttgatttgtcatacctactatggtagtattaaccaccatagttagtttcatggactataattttcttgcctagttaattagtcaactatggttttgaaaaatcaaaagaaataacgtctgaagattaatgcccttatgaacaaaataagtttcattagtctaaagacaagatactattattgatcattccatgaaaccatgaggaaagatc

SEQ ID NO: 150235 - DNA, 631 bp, Cannabis sativa
gactgtacatctttaatgataatgaaggttttcattttacttgcttttatggttctcctgtttcttctcaaaggcattttacttgggctttaatagataaattgttttataatgctctaactcttccttggcttataatgggtgactttaatagttttttatcctatgatgacaaagagggtagtacttattatgataatagggatatggatgctttttcaaattttcttgttaagttttacctttctcctttgccttttgtgggaaataaatttacttggagaaatagttctgttaaggagcatcttgattgggctattatctcggattcttggagtgaacttttccctgatgttgttttgcatcatcttcctttttttggttctgatcatcgggctttgaagcttatccttaaggatgatagttgtaattctccttctaggcgtaatagacgatttctttttgagaatgtttggctggagaatctagaatttttctcattagtcaaggatacttgggattgtggccttcctagccagagttctcgaagtccttttcaaaaatttttgtctaaacaggatctgtgtatttctgctcttcagagctggaataaaaatacgaatctttctct

SEQ ID NO: 150236 - DNA, 549 bp, Cannabis sativa
ataacacaaagttaaaataaatactactattctgagcagcgatttaagcattataagtattccaaagtatactaattcttgagccaagtaaacatcaactcaagttcttccaatgaagcaaacatctctctcttctctttcatgataaacaagcgagttacaaataaatacaagttgctctctttttcgatttcaggcaaagaatttagcattttcataacttcggcattactattctcctctttagctattttaatatttttacttcttgtctccacgacatcagcaaggcgaccaatttgttcaaatatcattacaggccctgtctttttcattttccctttttcatttttcacctttttattttgtttctcaagtggctcggttgatctcttgctaattttctcgttagaaaatctatcaataataagcgtctctagatcatcataactactctcaagttgttcatgtaaggtttcagtatcattaaaaggctttttagactcatatgaaattattccagatgaaggtgtccaagcatgctctcct

SEQ ID NO: 150237 - DNA, 826 bp, Cannabis sativa
  modified_base (56)..(58): a, c, t, g, unknown or other
gggtggaccatcctatggtcattagataagaaagtttttgtttcaacaaatactannnttctaagaaaatgactaagtctgacaataaagtagcaaaataaaggtgataattttttttcttgcgttgtcccggtaggggagagtcaaggttattcttattttatgagcttacaccattgtttaataatttgtaaatttatctttaagtagtcatcgtaggggagagtctaatagagacaaaaacttacaaaatacttatctttcgagatctttacggtgttaaatgcttcaatgaataatcatctgtaagggggacgaagtctagcatctcgaggttatattgaaaccaactaaccatgtaagaccaacaatagagatcaaatatccttataactaaagctcattattttaaggagttgtatttttatttgatacttgttttaatctatttattttagtatatatttaactaaataaaattactaatttagataactctaaatataaattttaatttgatatttataaaattatatcctaagaagatctcaaaaaataatttactttccatccgtagtattaatttttcagtaaatattatgaaaattacataatttaagttggtccaaaattaattcattaattttcaattctaatttaattttcaataaatatatatgaccttggaaatccaatttatcgaaaaatatatttttgaaattcatcaaaaaaataaaataaaattcaactagaaaaattattctaatttatgttggtctaaaattaaattaattaattttcaacataaatataatttttctattta

SEQ ID NO: 150238 - DNA, 567 bp, Cannabis sativa
gaattgcgcatggaattccgaagataaggttttccatgaactaaactttttaggagccaactttaaataccattgctgagcggcttccgatagagtggaaggaaagattctgcatcatacatctcctcgtaccccttgcaaatccatttgcatttcaaagtacttgagaagggaaaggggatcttctctccccgtatacatcttccacgtcggcattttgaacttgtggggtagttgcaggagattgttctctggtgagaaaggagttccgcgtgctctgtctaactcaagatcattatcacgttgtccagccatgccgggaaacatatttttcaattcgtcaagttgtgtctgtacgactgggctgacctgctcggcattctggtcgacttggattacgtcatcatctttctgagcagggatttgagtacgggctccaggctggacaatcgtcgtaatattttgttcgtccgttcccctccttctgtttagattgttccttaggtcatgggttgctcccaacctttcgaacacagaagatcccggttgccttagcgattgattcgc

SEQ ID NO: 150239 - DNA, 500 bp, Cannabis sativa
gtctcatcgtatgatggaaccaccaatccggtctcgcatttgaacaaattcaacacaataatgtgagctagtaatgtgacaaacaatttacgttgtattttgttttccaccttgctagttggaacagcaagcagctggttcaacaaatttactcatcattccataacttcttgggaatagctatccaaggacttcaaaaaacagttccaggccgcaagagatagatgatctgaggcgtcctcgctaaccaacatcaagcaacagccaggcgagacacttaaggcatacttaagtcattttagcacgactgctagaagggttagaaatctggatgatagtatacaacttaatgcccttcatgcgaggatcactactacctatcaactgttggagatgaattgtgggaagacttatagggtcgtccaatgaagaacatcactgagttcaatgagagggctcaggtgttcgtccgaaaagaggaagcttgaaaagagatgaac

SEQ ID NO: 150240 - DNA, 707 bp, Cannabis sativa
cccgtcgggccgggggcccggcccggcccgcgaaaatggcccagattgacattcctagttggcatcctcaactagggtttagttctggagtcgtcttagtgcaaattggtcaaaacttgtattcggacatcaactagacgtaccgcatacatatttgctttttattagcttcataaatattaattatataaaatatatactttttatttttttattctctctttaattctctcacattttagttttttattagagtaaaatcatttaaaatacatctattgattttatttttaattttctcattttttttaataaatttataaatatttatatacaattcaaaaaaattattattctaattttttcatttaaaaaaatacatatcaataaaaaaatatacattttaaattttttttattaacttcataaatattaattatataaaatataatcttttatttatttttttcggtgacatggcgctctaaaatctatttaattaatattatttattctctccttaattctcttattttttttttaattttttattagctttataaatatatttttttttgaacaatcaacattagcttcataaatattgattatataaaatagggctgtacatcggtcggtttagtcagtttatactacatattttctaacccaacgtaaagattagtttgtaaaattctacatacaac

SEQ ID NO: 150241 - DNA, 652 bp, Cannabis sativa
atcgagctatagagaaaatcaaaccagataaaaatggagaagctttacaatctgtgagaagaatatttcaatctgtgaagctttacaatcaacgccaccatccatcgttcgtctttatcagcgccaccatccctgtcgttcttctccaccaccgtcgagatctgggttttttttagagtgagaaatcggatatatggagagaaaatatattttttggatagaatttggtcgtcgatccgatcacctagccgaatttggtcgtccgcatggccgtcgatctgcttggtcgtccgcctggccgtcgatctgcttggtcgtccgcctggccgtcgatcttcttggtcgtccgccttttttctgcccagactgagagaggaaaaaagagagatggggaggcagccttctttctgcccaaaccgagagaggaaaaaaaagagagggggaggcagctgggaataagatgggctagggtttcttgtgtttttgaattgtaaagggtattaattagaaaaatgaaaaaaaaaagttataaagagtattaataaatgtgatgctcggtaaatggaatgaaaattttctacttttttttttatttttttaatttattttgatatcgccaataaatggtacaactagcatttatatatatata

SEQ ID NO: 150242 - DNA, 640 bp, Cannabis sativa
  modified_base (587)..(587): a, c, t, g, unknown or other
actaaaaaattatacaacttttattaaagaataataacttttttccctcgttaataactttgtaatttcacaaatattagtagatcttgtaactttgtagcccgataaattagacttttactcattagagatttggttttattctactatcaaccattcctataaacttattttgtagtgatcatgaggtctaattttaccaatctattataagtacacttttcttcaaaaaaaaaaaatctcatattaacaaagtatacctctactatataagaattaataggggttttttaatttttttcgcttaataattaatagaggttttttaatttttatatttcaaaccagtatttttgtatttttacagaaatctacatagcaactaatgaaataacttaaatcgcaatcaaatccacatagcattccatatagcaaccatcagagcaacacaaactataaaaattaaaaatagcatatgaaatgattcccctaattaatatgataaatcttaactttttcaattatttctaactagggaactaatccgcgcttcgcgcggtttttacaatagttttaaattttcgtangctaaatcattgtataaaattaataatataatataatgacaacacaaattttt

SEQ ID NO: 150243 - DNA, 580 bp, Cannabis sativa
agggcataaaacccaacaaggtccctactgctgtagctttgaacttgactccactatcgtaccaaataccacccaggacaccaacatggaaaagaatgccctgtagagaaaatcgccaaacacctggtactagtggtagtcgtccaggcaaaaccagtaatgttagaggaatcactaacagtacaggaactaataatgctagagagatcaatgatgcttgtggtcctagtgatgctagagggaccaatgagactggatttagcgatccattttcttcttcgacaagttacggtaaattcaaggagaaaatatttacaagagaagacatcgaggatcatagtcgatatatatttatgggtggcacaccaggcggggagttacatatgggaaagttttttagagacaaagagcatttaaagatggttgttggcttgactacttcgttaggaagtctggtactgctatttggtatgttacatgtaaagatatagattgtgggtggagattaagagcgaagaagaacgtactttctaacatgtttgaggtgagtacatttcataatgtacatacatgttccctt

SEQ ID NO: 150244 - DNA, 851 bp, Cannabis sativa
  modified_base (806)..(807): a, c, t, g, unknown or other
cgagtctttgttattaatgagagtatttattacagagaatgttcttggtgaatttctctcctattttctctctttgattcctttgaatctagaaatcttgacgcctgcctcagtgcgtttgtggggtatttatagtgtttttctgggatccctaggaatgaatcacttgtctttctgtgcaggcttaataggggcacatattcccagcagatacaaaataggaaatacatgatctatgccgtaggtatcttaagggttatgtggatataatcttttatccctcctggattgatgtgatttctcataaagtagccgttactagcctcattaatcatagcacaatagctgagaaaaggggggttacgccatctgtcatatcgtttatggtagtttcaatacgtcttcccccatgcggtattaaatgcgaggtgattgttcaatagagtccagtacctccgggaactaccttaatatgtccttggcctccgggagcgtagagatccttctcatgtctccttcaagagataccttcttagagacactcctctattgtctaagacttagttaatttttttttaatagctggtcctctcagctccacgtgtcatccttatccaggtccacgtattttgggcaaaatgaagggcaacatttaccccccaagccttggttgttggggaataaacaaggcttgtttggtgcctccgggtggctcatcgatttcgtggcacgtgcttcgggtgcgtgagctgcattcatgatagtcatcattatcatttatttctttttgcaggcaacgattcgcnncccgtccattaatgatccgacgcatttaatcggtgtgtcagaaa

SEQ ID NO: 150245 - DNA, 526 bp, Cannabis sativa
atcgctagccaatcgcaacgcgacatgtcgagaaggtgctagacactactgatgcctaatagcaatgcttgtttaaaatatatcccttgtttggtgctttttttaggtacaaatattgtgggtcccacaattatttagtaggtagagcgaataactttgtatacttgagtttcacatgtaggaatgccccacatgtaattcccttgtccacattcctatgtaacccaaaattaacaccaaacaaccctaagagaaatactaaaagtcaccgatgtctagtatcatttgaggtgttatattgctatgagtaggagggcggagggaaaggggtcatgttgaggcacatgaccccactcaacttttaataaattaatttttttgcataatttatttatataaattttcacaattactcccacaattttttttttaaaatttttgccattgtacattttaatttttatccttgtaaatttgtatttttttttttatttcaaatattttcatgttgttctatatgttgact

SEQ ID NO: 150246 - DNA, 762 bp, Cannabis sativa
ttgttttgaaaaattggtagttttgttgaaatagactaatacatatactaatatactttagtaactctcttctaaacttcggcgcctacacattttttttttctttttatctttatgtgtcttatgatatatacaacaaagttattttttttttaaataatgatgataaacttgtcaaacattctctttcttcttcttctttttttaattaaatatttcaggttttttttatatattttgttaataaataaataatatttaaaattaaataaagtttaatttatcaaacaagttaataatttttttttttatttttatatttagacattataagattaaataaaaataaaactattttaataggtttataatttatacataaattgaataatatctaaacatcatatgagttacattacaaaaaaaggtaacctcaaggtatcttaaacaataaaataacataatatagcataaaaatgtgtaaaaaaatagaagttacttttaatattagtcgtccttttttggagacagaaaaatatatgttcctcacatattataatagttattttattatttttttatgtgtaaaattctgaaataaattttttaatggaaaagtaattaattgatattttccaactttttccattttcggtaagttttggaatttcgatatgtgtgctgaagtggcacattgaaatgtgtgcatataatttttttaaaagtatttttataaataaaattaactttaagtataacatt

SEQ ID NO: 150247 - DNA, 554 bp, Cannabis sativa
aattactttcagcagcaaaatcaacaagtaaaattaggttcaaacatggaaaacaccctagaattacattcaaagctcatccaaacacaaattcctactcaaacaaacatgaactatcaagattaagcatccaattcactaagcatgcaaaagccaagatcaacaacctaaagcatgcttttaccataatatttcagcaatgaattcaacaaacaattccatgtaatttcagctagaaactacctcaatctcttgcacaatcaagctccaagcttctaacacccttttccaacaatcaaggtccaaatcaagcttaaattttcacaaatcaagttgaaatatatcaagagggtaagagagagagagagggttcgggtgagagggaggaataaccagaaaattttatcctttatccctcaaaatcaatttaattcaagtaaatcaaatatggtctattgaccattttgcccccatggcttaaatccacacatactcacccacacaagggtaattttgccatttcatgcattaataattcacaaataatttcagat

SEQ ID NO: 150248 - DNA, 537 bp, Cannabis sativa
gtgaaccatgcaacatagaatgagttttgatctttattaattagtaaatctgattatattgaaaagagtttgatttagggcacaaaacccaacacctcatacactacgtacttaagcgtactaatgtttgtaacaccgtacagttaacaaacagtactggagctcccatgggtgacgcactaggccgtgaaaaccctatgtcaagcaacccttgaagttgaatttttatttctttaagttttgttgtagccattttttaaggggccttagataccggttctactccaggttccaaatcaatgataaaatcaatttctctttgcagtggtaaacccagaagttcatcaggaaaaacatctaagaattcatgaaccacctttatgtcttctagccgaatagactcaggctgagtggtatccaataccatgaccagaaaccctagacatccgtcttgtaacaattccctggctgttagtactgaaattactgggatccgagatccctgaaccgatccaacaaaaataaacggttcctcac

SEQ ID NO: 150249 - DNA, 533 bp, Cannabis sativa
aatcttggaatttgtgactaggattaacggcacttggtcaggagcacccggggatttggaatctcctactattgcaggacatcaggtaagacagtagttagcacatagagcatgcgcagtggctcttataatggaaatgatatatgtgagcagctagtaactgggattagggttattaccctaacatgaacggtttaacaacctagggttattaccctagtgatatatgatgtgtatatgctatgccatgttaattatatgagtatattaagatttagggttatgtgttcaaggcataactgggttggactcggtaactagaacctagatgaaccattctaaggccttattgtaattagatgtgtgagtgtaacacgtaggtctatgccacatagacataaataggcgtccaaatgtaacacgcaggtctatgtcatacagacaaagatgaaatggcattattattacgtgattaattatttataattattgatatattgtactgtcttgctgggcttggctcacgggtgctc

SEQ ID NO: 150250 - DNA, 718 bp, Cannabis sativa
  modified_base (670)..(670): a, c, t, g, unknown or other
aattaaacctacaacatcttaaccgtagaaattaaatcatgcaaagccctagctttaaactaaataaatcacccttgctagggctaaaagcacccttaccacctaggggtaatttggttaaaaataatactttgaatagtgttgacatttttaatgtctatctatgttgccccgctagaactaaaatactaaactataagaaaatctgattttatcggccaaacgttgcgttctaatgttgctaggcataaaatatgaaaaatataaaattttatatatagcataaataacactcctagaattcaaagatatcaccataaatttataaataataattaaaattctaattctaaattaaatcctaattatctgttaattcttatattaaaattaagcggtctttacaattatccccctattaaaggattttgtcctcaaaatctaacatgaacaactctagatattgagccctcatatcggactccaactcttaggtggcttctttcaccttattgtttctcaagagcaccttacacaaaagctattatcttttttcgaaggactttatcttttttgtctaaaatctgaactagtggttcttcgtatgaggaatccgattgaagttctaggttttcatatgtaatatcccgataagcctaatggtaaatanttagggtttatatttatattatgggttaatcaggtaataagtgggatt

SEQ ID NO: 150251 - DNA, 520 bp, Cannabis sativa
cacctcagctttcggctcctctttctttacctgagggcaatctttcttgaaatgccccaccatgccacacaggaagcatgtctttcggttacactaccctggatgatgtttcttccaccgaggacactcagggtaagagtaaccctggcgtccacctctgccttggttcccacggaaccgcttactttgtcctgagccaccagaagctggggtaaccttccttttctgatcaatggtggagtcaccaccatccctaccataaacaagagtaggaaaagtgggggttccaccaacactcggagtcactcggggctcctgaagaaatttcaccgcaccttcggctctcaaagcctttgcaaccatttcagcatatgtagttgactcggtagtagtaatcaccaaatcgtgcctaatcgtcgcactcaaaccgaccaaatatttctctttcttgctaaagtcagttggcacgattcccacagcgagcttggccagatggtcaaacttagtagtatactcagta

SEQ ID NO: 150252 - DNA, 834 bp, Cannabis sativa
  modified_base (371)..(371): a, c, t, g, unknown or other
  modified_base (731)..(765): a, c, t, g, unknown or other
ggtcaataatgtacctttagctagaaatcaataatcaccgatattttgattcattttctaataacaatccacaaccaacaatattaaatgcaattcaaaaaaaagttcaaattgaaatcattgtttcaattgctttgatattgcactgaacaaaaaataataattatgaatttagacaggaaaatgaaatgaaaccaatttaatactttttctgaatcctaagtacaataatccaaagaaaaatcagttaaaacaaagaaaatatatataattatgtatatgataatgaaatagacaagccaccatcccaaagacaagttttgtacaacaagatttttttttttttttttgttgtctctatctatgtctcncttttatcctaaacaacattacttgcaaaataacttaaacattacatctcacaacacaatatctgttcaaaactaacttaaaattcattcttacaagattatctttctcaaaataatttcagtagcaaagtgaaaaatggtctttgaagagtaaaattcaagcatataatacctcaaatttacaaccacatgttgtaattagaaaaaggttccaattcattaaattaaaagagaccataacaacgttatatggagaagacgaagagcaaaagaccaccatttaacaacaattttttttttttatgcagcaaataatagttgttgtactactagtaaggtaactcaactataatttatttnnnnnnnnnnnnnnnnnnnnnnnnnnnnnnnnnnncaatgagactaaagtaaacactcgcaaaagaactagaaaatacctcttttactcaattttgtaaaagtg

SEQ ID NO: 150253 - DNA, 540 bp, Cannabis sativa
  modified_base (312)..(322): a, c, t, g, unknown or other
  modified_base (370)..(371): a, c, t, g, unknown or other
cttggtacatatagagcgttctatatgcaattctaaatctatagtggtgcaaggaagaattaataagtgagagaatttacaaatagagaatttactttgtaaattctagttctgcttattggaagtttgattatataggcccatggtccccacactaattgagataatactgtttgcagactcagttaattgatttttaattaatcaattataattctaaaattagactgtcttatctatggattttcaccaagtaagatcttaattgtgaagaaaagatgttttaagattaatttattaattaagagactnnnnnnnnnnnaattaataaataatataaataaaatttttatttaataattaattatanntattaaataaataattttgacatatatgagattgaaattgaaagaagtatacataatttaaataaagtaacaaaattatatgggaggcctatgatatcacttaaaatttatttattattttatttttttttaattcatataattaaatgggaaattctacaatgcacct

SEQ ID NO: 150254 - DNA, 699 bp, Cannabis sativa
  modified_base (341)..(341): a, c, t, g, unknown or other
tgctttattatatatttgttactataaatcatttattgcttataaaatagactcgttggcgttggctaaaagtgaggtcaacaatatctttacactatttattatttataagaatattaggcaaaaccatctatactttatattttttataattaacaacctaaatcgattttttggtaacaaaactacccaaattctcttcttattagctatttacccgttccacccaaaagtctcagttaactaccacgataaactacctacgtgtacacttgtgtacacatgacacatatttagtggtccacataatattaatataaataaaaattaatttttttttntttttttttcttttctttccctttcttctagaatctgaaaaaaaaattacttttctttttctttttcttcttcttcttcttcgaacccttatctctctctttctctctatctcgtagctctccctctctttctctgttagccatcaatgaacccatctcgcagctctgttgagaatattttatctctctctttcttcttctagatttactaccatgtatgtttcattaatatcctaaatttgaatatatctaaaacagtaaaattaaacacataagagcttagaaaaccttacattgattgcagcggaatataatgactcatttcactcagatatctaatccttgttcctttctatcg

SEQ ID NO: 150255 - DNA, 562 bp, Cannabis sativa
accaaaaatactacacctatactaagattacattccaaaaactcaaaaatattctccccaacaattactttattcacattttacaatatatcccaatgataattttttcctttacaagcaaaattaaattacaagaaaaataaattatttacaaaaaaaaaataatctaaatatttacaaagacaaaaataaattacttgtagcattataataatccttggaagctttgaggtctctatcttcatagtgggtaggttctctacacttcctcttgcaattttcttgcttgaaatttgatgaagtttttagcacttctttttggtagtttttttcatggccaaaaatggctttgaatcattgggatttttgagtttttgataaaatgtgagtgtttgacaattgggttatgtagcatagactatgtataatgtatttttggctctggtttgatgtaatttggttagaaaatgactaactttgaaacttttggtttattgtgttcttgaatattgaaaaacaccaagaacatgaaaaacattatttttccaattttgattctcat

SEQ ID NO: 150256 - DNA, 507 bp, Cannabis sativa
  modified_base (40)..(48): a, c, t, g, unknown or other
gtcccttccgatgcatactccaaatgcaagtaaactctgnnnnnnnnnatcatatcagtaaaatcctgtgtatgacaaaatctaggatccgagcgtcacgcggactcggtttcagcaaattctgacatatcaacgtcctcccctcacccttgctcttagggatagagctcaaaaacttgcctggttgctggaggaagacaggaatatcatccagttgacatctgatgataatctggtgaagtacgggctttacccagtggacttttctcctaagtccgtggtggggaagaagcggaggtctgatgctggccagcctgaacgaactcatttggagaatgagttgattcaactgaagcgagaggctaagttgaagggaggtgccagggccaagcagtatgctcagaagcctttgcatggtgaagatgaagccgaggctgaggctgaggctgagtaggtgaccccattgaagaggaagaagaaactcccggccacgcccaggcctgttga

SEQ ID NO: 150257 - DNA, 643 bp, Cannabis sativa
gatcaatataaaaatatgggtggcagtgaaggaattagggttgaagatagtaagaatatcgatggtgaaggtggcctagggttagaatatgctaaaataaactaatagatttattagcatatacgatgataggctatacgaaaaggctactgtgtaaacaaagaatgaaaatatatttacacaaagaatgaaaatatatttcaatatgtcaaaataaagtaataagtttatttggcacatataagtataggcatacataccaaataaacttaggagcaaggaatttcatcatattcaaatctttgacaagtgcatatattgttatccaggtttactatataagacctttacaataatgtactttgtatacaaccagatttgatgtctcaacttgaaaaaaaaaatagactaattagtttgttattttataggcacacattgtgtttgaaacaaaaaataaattgttgttcctttatacacaaaaaatagactaatgggtttcttggcgtatatcattatatttgatcatggtttactactctttattgaaaaaaataaaatgttattcccccaacaaacgataactattaggtttattaacatatataattgtaggctatatatgaaatgaaataaattgttg

SEQ ID NO: 150258 - DNA, 672 bp, Cannabis sativa
catattaggatgttaaaaacatacatggtagtaaatctagatcctggtaaaacaattccaacagttagcacctccaagattttgtgtcctcgaaggaccccatagatctgaatgcacatagttgagtggttccttggtgacatgtatgccaataggaaatttcacgttacaactcttgcctagtacacattcttcacaaaactctaactttccattcaacttatttcttaaaaggccctatttatctagttcaattaggcctctttcactcacatggcctaatctcaaattccatcttggtttgatcaccacctttgtcattcacagcaacatttggtgttcccaacactgccttcccattaagaacatagataccattcctaatatctcctttcataactatcaatgagcctttgattgctctaagagactcatcaatcttaatggtacatccactagtacctagttcaccaatagccaataggtttcttttgagttcagggacatacctgacattcttgactgttcttttgatgccatcatgcatgttgaacaacacaaatccaattcctttgatctaacaggctttgttgtttcctaagagaacatttcctccttgtatgtccttgaattcacaaaacaggttcttgtgaggtgtcatatgaaatgagc

SEQ ID NO: 150259 - DNA, 688 bp, Cannabis sativa
gaggaagaaatctgagggaagagaggaaagactcattgtaaaaaagaaaccctagttctgtatcagaaatatctgaataagatagactcgtggactatgcagagctaattacaaaaccacataaaaaccttgtgttattttattactgttagttttctaaaggttcttataatttctgtgccaaacctattacgaaaataggctcataattgttaacaaaaatttgtgttaacactgacaaatcatgggacataaaactttgaaacatataatcatgattatatttcattgtgttgacaacactataattatgaataacaatatgttctggatttaataggatttatacattaaacatatgaccatgaaagaaatcaagtgaaccatgcaacataaaataatttttgatcttttatcagtaaatctgattatattgaaattgattttatttagggcacaaaatcctacagtttagtcttttgtatttaatcaatttaatatgtaaatatctaataattttattataaaatagagttttaggcttcctgtataaatgccttaactctaacctagaaaacgtaagtcactaagcctaatccttagcctccaaataactctaacttagaaaccttagtctctctttctctctctctgctacacgcccccaagggctctctctctctctctc

SEQ ID NO: 150260 - DNA, 609 bp, Cannabis sativa
ttgggctacaaaatagaaaatatcaataagtatgaggaagagcaaaagaagactgttgttgaaattatgtatagaaaaccaaattttcaattcttctataaatgatcaacaaagagtggtttaattcctttgaataaaatatatttataagagccaccttcttcaaattcaaactaacaaaatattaaaagagagagatagaaagctatgtttcatatacgcaccttctcaacataaggaggaaccatattttcaatatcttcaacaatggtttttggttgtccctctgcaactgcaaatatttggtacttgatattatgtatccatcatatttaccgaataaagaaatgaaatactacttcctttgactgaaataaatagaagagaattattacctacaacaaccttggtcaacccaggaagagctataactgtcaagtttacaactgccagtggaaacatgattctagtcattataccattaaaagagcgtagaggagaagtggtttaacaacagtgtaatggaacatggataattatccatagaatccagctaaacaaataaagatcaacccgaacacttatatgaaaaagttaatgaatgaataa

SEQ ID NO: 150261 - DNA, 557 bp, Cannabis sativa
gagaaaaagaaactgaatgagaatctcttagttgtttattctaatggggtgaatccatatttatacaaaaatatgactaaaagaatgagaaactaaactaatgtaataaatgaaaatacaaccaaagcattaatggtgataattaatttagtaatttggacatccataaataatattttataacaactaagatattccataattaaattttgaaatcattcatgggttagaaagaaagtaagaaatcaattattgaaatcaaatatacgttttaataaaaattattatctatacaacaagtcaccaacaaattacctatttattttataattttaattaaaaaaataaataacttgttgtattaaatatttttgttcatagtattaactattaaattaagatttaaaggttataaacaaatatatatatataaatataatatgacatatcaccttagtaataataagtgtgtacaatgtatatgtattgtattactcttatcactttatattaaaatatatattatataatttagagtcggtcctaaagtatattgg

SEQ ID NO: 150262 - DNA, 551 bp, Cannabis sativa
  modified_base (377)..(383): a, c, t, g, unknown or other
ttcgtctaggttctggtcctagtctgagtcccagatatagacaccgactactggtctgttccaagccctgttacccgaatccggagtcaagatcactttcacgggtccttgtctggttctagttcacgtcccatttcccatttctgagtttgggttcgagatcgagactggggtgcaattctaggtcccaaccctggttttgtgtccctagtcttgttccatgtttgggtctgagttcaggttcaagttcgggtccagagtccaggtttgggttggtatctgggtcctgctcccaattcgggtctaggtctgattttgagtttgggtcctggtccggttacggttctagatctaaatccaatttcagttatgattcnnnnnnnaagtcctagttccagtcccgaccaacttccggttttggttcccattttgggtcacagggtacgggttcaggtccaattttgggtttgggatttggtttaggtctagttgagggttcgggtccttgtcagggttcgggtcgtaggctgggtcccaaatccagacaccga

SEQ ID NO: 150263 - DNA, 1182 bp, Cannabis sativa
ggctcgtcggcgaatgacctttcgccggcgacataaagacttgcgccgacaaaagtatttacaccagcgcatttgtttgccggtataacgtactcgcttctgctgactgatgtgtctctgacgacgttttgccagcgatgtaatgcgccggcaaaaattttggcgcgaatcagggcatttggcacccatttggcgcctgatttttaaactcgtcggcaaaacgttaataaaaaaaataaattaaatttaaaaatttatctatgccggcgacaaatgcgcatattaaaatgtaattagttagataattacatattaaatttttttcaaaattataagtaattttatattgtaaaatttatatgggagcctgtatgataatacttgagtataataatatttttttagtaaatattttatgtttattttttatatttttttattaaaaagtaaaataagataaaagaaatttttatgtataaaattatattttagtgaagaggaggagagtcatcatcatctcttttttaggtgtattgcttccaaggcagttgtgaaggaggtgttcgattgggtgagttacattgcttggccgattgagtttaatagctggttatgttgggtggcagggaagatatctggtattattattttgatctttgttgctactgattacatgctttggaaaagtaggaacaatagtgtgcataatagtagttgttttgctatattgaaaattgtaaatgatataaaagatataattaaacatataaaattgtatagcttaaaagataggtagtttatacaagctgaaagaggcatgtttttacgcctagtagctgctgtttggtgtgtggttgggccggttggttgtggccttagtgtttgcttgttttgtcttttattaatgaatattctctttagtcaaaaaaaaataaattatattttagttttttttttatatttttcagtatatatatatatgtatattacttgtaaatatcttaaatatataagaagaaatataattttatcttcaaaacaaaataagtattgatacataaaaatattttgttaattaaattatgataactttaaattttctatttattttcccgccgtcctttctcttttttatattttttcaaacttaataagattatcttagtaatttgattttttttt

SEQ ID NO: 150264 - DNA, 545 bp, Cannabis sativa
ctcacttgtatacgggatggaagcagttatcccgacggaaacgcaagtacctactttgcaatcagaattaagtgatgaagacaatacttccctaagactacaagccgtcgacgatatctaagaaagaagggagcgcgccctaacccgaatgcagaattactgctccgccgtggcaaaacaatataataaaaaagtaaggctgaggaatttcctccagggagaattggtcctgcggaaagtttttcaaaacaccgaagaaacccgagcgggaaaattgtccaccaactgggaaggaccgtactgagtggttaacccgacgggaaagggtgcgtacaggctatccaccatggacggggccgacatcacgagaagctagaatgcaaggtacctcaaaaaattctatgtataaattaaaggttgggcacttcatagtacatggaaactatcatcaaaatttctcttcaaaataaataaaaatgaggggaattcggaaagtattgtccaagttaaaaacaaaaggaataaagaccttttacggaaggcaa

SEQ ID NO: 150265 - DNA, 1294 bp, Cannabis sativa
  modified_base (1246)..(1248): a, c, t, g, unknown or other
aaatgtctcattactataatcaattaaaagcttaaaacatgaagttatttttattatagaagttatgattttaaaacttaaatatatacatatatcatatcgagatgggtttggggtagatatatattctcctgcccccaaaagtcgacacctgccctcgccccattaagggcgggtacccgcaggtatgattgccatccttacaaccagactaagaaaattataaaataaattagattgaactaagataatggttataaaaaataaaccagaagtcaaaatgcactaatatttataggcggcttaggcttgtgcctatgggttacctagcccagggtcctaaaaatttatttttcttttaaaattacacattttttttttattgattttaaaaattaacacattttttttttcaaaataaagggcccaaagtattatttttgctatggctcacaaaatttcaaggcctaccctgcatgtggcgatggtaatggagcgacatcttctttgttatattaataagaacttaagcacaccagatcatgccaccaatttctttgtcttttactttaggtgagcacttacctatacaaacaaataaataatttgcatttttagctctaaacttatgatacttcatgatcatgcaccttaaaagttacgacttgttaatatttttcgttcaacttttatattttctgatgtttagtctttttgtataagtggataatattttttaaaaaatataaatgaatacaaattttagttaattttaccataacttatttttctttcttgtaaagtttaaaaattatttatttatttagttggccacttatatataaaataaatagaaaatacaaaataatacacttattttgaaaatttatatattaaaaaaaaaaacactaacaacaatcaaatattaagaaaacttactagttacactattataatttgtttaattcataattataagattttagtttacttttttttttaattatagaatttaaattaaatggattgattaattagtataaattaaaaaaatccttattttttttttaaaaaaaaactttggagttgatatcgtgattccaattttttttaatataatttggaattatactggaatttataaaaaatataatctttttttagtttgaataaaagaaaatatttctgttatatttaaaacaataatcaatcttataatataatataattgttgggttttgtgccnnnaataaaatccattttaatataattagatttattagttaataaagat

SEQ ID NO: 150266 - DNA, 1817 bp, Cannabis sativa
  modified_base (1241)..(1246): a, c, t, g, unknown or other
taggcagaatccaatatccccctctagaaaaacttgctttgtgcctagtccacgcgtctcataaaccacgaccatacttccaggcgcaccccataaaagtgttaactgatcaatccttgagacaagttttatcgaaaccaaatgcttctggaagattgataaaatcattaattaaactgggcagttcaacataacataccattctcaaacatccatcaagggccgagccttggccgatttcttgatagaaggaataacttcagaagaaattccacctgttcagcgagatgtagaaacctggaagttttatgttgatggtgcatccaacgagcagggttctggtgcaggataatattaatatcgccagaaggctttaagtttcactatgctcttgggtttcaatttgatgcatcaaataacgaggctgactatgaagccttgattgcaagtttaaagatagccgaagcattgaaagtcataaacctcattttccatagtaattcacaattgattgtaaatcaggtcctcagggaataccaggccaaaggcttaaaaatggcaaagtatttagagaatgttcgaaagaacttggaaagatttgattactttaagaccaaacaaattctgagagaacaaaactctaacgtcgatgacttggaaaaactggcctcgcagaacgacttggatgagttgaacttggttccggtggaggtactaggcgagtcaagcatatgtgaaacagaagacgtcgagatgatagacaactctcctacatggatgactcctattatcaattacttactctacggacaacttcctaatgataaaaacaaggcgcaaaactattgtattaagtgcctctctacacaataattgaaggcaaactatatagaagggggtactcaatgcccctacttcggtttgttctccctgtagaagcgaatgaaatcatcagagagattcatgaaggcttttgtgggaatcatgcgggttggcaaagtctgtctaaaaagatcattagacaaggatattattgaccaacgatcaacaaggacacccacgagtttattaagaaatgttataagtgttagaggttttcacatatacctcgcgtgccgccaacagaactaagaatgatgacctcgccctacccattttctatatggggaattgacttaattgaggcattacctgttggctgaggaggatctaagtatgcggtagtagcagtcgacttcttnnnnnnatggatggaggttgagccccttgtttccataacctggaagaaagtcctcgactttgtcatcaaaaacattgtctgtaggtttggaattcccatgaagataatggaacccagtttgatggcgacttgttcactgaattctgcgatagaaacaaaattatcaagagcttctcgtcagtatccaggcctcaggcgaatggacaagtggaagttgttaataaaaccttaaaggatgctatcaagaggaagttagacactgcaaaaggcagatggttgacgagctacctcaggtactttgggcccacagaactatcgagaagacgacaatgggacacattcctttcttgctagcatttggctcggaggcaatgctgcctgttgaagtgaacatatcgactcacaaaaaaaagttttataatcaagaagaaaaccaggaacttctaaagttgtccttcgatctacttgagggaaaatgaactaagtcacaaatcaccaacgcagcataccaacaccgagttacaagatacttcaacaaaaaagtcaggaaaagactattcaatgttggagacttggt

SEQ ID NO: 150267 - DNA, 843 bp, Cannabis sativa
aaatttttgaatttaaaatattatagttataatatctataaaaatatctaggttaatttcaaatttattaattatttaatttattatataaggttattttaatatgatagttcaaattaaaaagataatgctatcttcaatttaaaatatattcaatattaaaatatctaaccttaaaaaataaatcatatataaatattaaaaaaattaataaatttttaaatctgagcatcatttaaaaaaataaaataatcaattttaaatttaaacctcaaaatatcaaagattaataatatcccattaaaaaataatatattattaattttaaaattgatatttaagtttaaatatttttaaaaataatattttattttaatattaaggtttgaaattgggaaaaaatgggtttgggagtgtgctacccaggaggctgcacgtgcagccaaatgaggctgcaaatgggccagacgcgcgcgtggatgaagatgcttggccgagaaaactcggcatttgtagggtgaggcgcgcgcgggtggtgtctgaacgaggcaccacgtgcgagcttcaaatagggattttgtccccttgacgcgcgcagaagtctccttgtccgaagcacctggtgcgtgggagcaccatgctcgacaccatatgcaccccgaaacttcaaaccaccataactctctcattttttatcggaattgagttccgtaaacacgaaagttgcttaatttttcacaagtaacccaaataaattattttcatggaaaatttcgtaaaacacatacagtcatcaaataatcacataaaccatcacgaaacaatccaaatcaacacaaacat

SEQ ID NO: 150268 - DNA, 863 bp, Cannabis sativa
  modified_base (707)..(708): a, c, t, g, unknown or other
taaaatttgaagaacaaccatctgtaaaaagtgaatatcacgttaaatcgcaatcatgtcgcacaaacatcgcaggagctcgcaaaatttcatgcatagtaatcgcacatatattgcacataaatcgcactatatcgaccaaaatctaataaactttataagctactatcattaaaaatcgcacaaagattgcatagtaatcgcactatatcgccaaaaatctattatacataagtagaaaagtttataagctactgtcattaagaatcgcacaaagattgcacagtaatcgcataaagtcgccaaaaatatacaacaatacaagtgaagatttataagagactgccaaccaaatcgcataaagtcgccagaaaaaatacactaaacaactgaacatttataatgcactgttaagtaaatcgcacaaatatcgcaaaatgtcgcatcaatatcgcacataaacacagattacacttatagcaaagataaacagcaaaaatagagaaagattcacatacccttttctcaaacagtgcagccacatcaggttgcttcacatcgtgtttcgtgactgagttgggggtgctcttgttcaacattcgagggaatcaagtccctttgcactcgccatacttcttccccaaaacttgcatggcctcaaatgcccaatattgcagggtaggtgcatatccgtacacattgtactnngcttctggttgagtaacctttttctcctaattgtgtttcttcttagtattatcgttcttactcgacaccttatccatgtagttttgcctgagttgttgcatattcttagttgtggaagacaacaacttctgataagaaagaagaccccaaggata

SEQ ID NO: 150269 - DNA, 507 bp, Cannabis sativa
tatccttaatggttggtatccttctttgacttgatatttcagttgcaaaactttgttttcttggttgcactccaggacctctttcagcttccgttgtgattcgtcatacttacaattgaatgaaatgtaatgtccactagcttcataatttttataattcattcgatcatcaaattgtccattgcagaagactaggaatggaatgtcttttttttcctgtgattttgaaattgttattagtgcaaggcaacgataacgaaactagtttgattctgttatgaaatagagtagaaaattacttctaattccttccctttgttcaagtcttgtatttcttgttctgattcctgcttttgtcatttttatttattttattgctcttaagaaactataataaaactaaaatgaaactattaagaaacgtttaaatttatttcagaaactaaccatttctcaaagtgttttctccttttattatttcctaaataaattcctgcaaaaaattga

SEQ ID NO: 150270 - DNA, 600 bp, Cannabis sativa
ctagcctaagcggaaacttgaaaaaaaataaatgcaacaacccaaaccaaaatacagttatattagaatgataatcttcaaaataaaataaatttacaaacttagaaattaacacgcaacgcatatcactagctcaacattactaaaaataaaaaacaacaaaaatactaagaataactagccaaaggtattatcctttggctagtaacaacatactagcaccctaatataaactgttgaacatcaaaatcaaaaaaattatagataaaattaaagttatgagtaaattccctgttattgtaggccctccacaaaataacctacaaaataacaaaaaataaactctattaccacataatataataaaaacgataatgtgaaagaacaatgataaatcaatccatattaaatataaggacttaaaattgaaatacttatccgtttaaagtgaaaaggtagttgaagtagaaatcatgagcacacaaagaatcacttctcttgccaattgaacataccacaaaattaccctaaacaaatagggacaagccataaaaaatggtacaaaagccataaaaggcacataagaaaaaagtaatgtaa

SEQ ID NO: 150271 - DNA, 801 bp, Cannabis sativa
  modified_base (619)..(620): a, c, t, g, unknown or other
tatattgaaccttcattatgttttctgttattaattattgtagtaccaattttgagtcttcattgttggtctaacttggtttgttgtttttaacgggacatcctaaagatttccatccgttaaataacataatagtgttagaactcgatagataagtatttataaatacaacatctagttaactcatccctaaagatgataactgagactagtgtttacaatataaaacaatgaagaagtttataaaaataagaataactttgactctcgcctaaacaagacatcgttagattcttattttaatcgaaattatcctttgtttttcctcttagtttttttatttaaaaattgcttagaaagtatatcattggatagaagatttataaatcatatacttatggtgtcactctattttcttttataaaatgagtggcgcagatgactatattccagatattctatcctgaaatgatataaatcctcgatcttaaagaatctcctacttgtatatgcttactaaaggcaacttaaacttagagttaaaagagtagtggtggtccaagctagaataattactcatggaatatttggtataaattaaagtctttgactttaaatnntagattccaaatagaaattttaaatttcagtttccagaatacattaaacattacggtaaaactttcacaagttattaatatctattttctaacaatggttccgaactgtatgttaatgtacggattatgagttttctattctgtgaccagaatccacttgaaatattctaagaactctttg

SEQ ID NO: 150272 - DNA, 1174 bp, Cannabis sativa
  modified_base (41)..(62): a, c, t, g, unknown or other
ttctctcttatgagcttctaccattgtttcataatttgcannnnnnnnnnnnnnnnnnnnnntagggtgatccataccatataaattactatcccaaattactatcccaatccaaggttgtgagtaagcatcgggacgacgcccaacaggaaaatacccaccttaagcaagaagctgagaaagcaaaggacgaagccaagaaggcaaaagaagaaaccgagaaggcaaaagaggaagctgagaaagcaaaggccgaagccggcaaaagaggagccgagaaggcaaaagagaaggccaagaagatcgtcaaagcccaagccgatgagtttgagaagaagtttgctgaaaaagaagtagagaccgttgaacgatgcaacaaggatggtttttgcaccatgtatcaggcccggatggcgaaccccaatatggacaccagcttcttggaggagcaggaagagaaaactttagctctttgcgagaagaccaagatggaggaagaggatgacgaggtcgaggaagaagaagaagaagatttgtcgaagtcccccaacatgttgacttggttatttatttacctcccttttctcttttagaaaatggtcccttggtcaagacaatggtttgccccttgtggcactttttttgtaaagacagacttgtaaggttggatggccaactttgctttttaatgcctcatacttttaagtttaaattttgttgtgtggatgtttgcttacgtttcattcacaatttaaacaatcacatgcataaagtttattaggggtttccattgctcgtattttcctctggtgctaagtagttaatttcctactttatgcgcgagcagtttatttgcccgaccctcaacctgtgagccatcattgattccacctcgcgatcattagaaatgatcttattttaagcaaactcaaatatatttttaatgaatttatcatcttgtatatatttctattacttacatgagtagttagatcttctacccacgtgttaggtttaagtatttttttttcaagacactatgatgatgtcttctcctcctttaatactttcccttagcgcgagccgttagtattcagctttatgtgttaatcataacttttgattttcctctctcgtcagataggttttaaaccaaaaattacagttgtttgat

SEQ ID NO: 150273 - DNA, 801 bp, Cannabis sativa
tattgtgactaaaaacacattcagtcacaacaaattgtgattttttgtgactattatctttagccacgaatattttagtcacaacataggaatgataatttttaattagattaaattttttgtattgaaatatcactaaccaattacgaaacgctacatatagaaagtattggaaccattaactcctaatagcaatgctcatatttttattatttagcaacaagaacaagatgacagcaacaaaataattgcattctacaaaagtaattaataaaatcatctagttctaattgacactacaaatttttttacttttaaaagtaaaaatttatgactaattataaattattatttctatgttgtgactaaaaagttcgtgactaaaaagttcgtgactaaaagtattagtcataaaaatcacaatttattgtgactagctgaaactaaattagtgacaatttgtatataattaaatactatgtgatcacaaataattttttgttgtgactaaaaatcacatttaatcatcacaaaaaaaatttgttgtgactaaaaaaattatactaaaagtagctattttttgtattgtgatatgcaatgtattgaagactttgactcaatataccaaaaaaatatatcttttcaacgtttcacattatatagccctaattataccaaaaaagattgagagagaaagagagaactaaattaaactcctctaattgtgaagatattcttctatatattattatagagcattgctattaggcaccagtggtgcctaatactttctcgacatgt

SEQ ID NO: 150274 - DNA, 511 bp, Cannabis sativa
  modified_base (155)..(156): a, c, t, g, unknown or other
caagataccacactaatacccacgatgaaactgaactaactaacaatatcgatttaatagataaatttgtttacagaatgaaaccaactatttatacccaacataacattccacctggcactaactaacacctaacgataagtcataacagactnncaccaacttaacagtacgcaagtgaagatataacagactaaaactccagacatgactagacattctgttaaaataatctatcacaaaataacgacacttactttctcccccttgacagattatgtttaatgactcaaaaaatgaagactaaagacttcaaaagacacccagtaatcacagattaatgcgccaaaaaaaatgtctttagaattataaacatagcaacccataaaaccatatatataaaaaaaataagtacaaatatctccccattcattgaatatgagcgctgctttatcttgttctttgccagactccccctggaaaggtggcccagtcgacaccaagggtgttg

SEQ ID NO: 150275 - DNA, 715 bp, Cannabis sativa
gttccataacaaaataaatgaacacaaataaggaaatcagttatatttatcaactaattaaaaatttgagacaaaaaaattggttacgtatggcaactaagataaaaactcacacacaaaaactagttaaataaaataactcaaacaaaaatatccatataacatgctctaacctaccaaataattacatccatattatatctacccctacttatcaaaaaaaaaatatatattatatctaccccaaaaatactcattcattatgttatataatcagttctattttagttataactggtttgagttatttcgtattatttatgtatattcattgtaacactgttatgcaacatattctattttaattataactgatttgagttattttgtattatttatttttattcattatgttacagaaccagttataattattataaccggttttagttattttatgttatttgtttttattcattatgttatagaatctaaactatttttatttatatctgagacatctacttctggtaatttttccagtgacttttccagcgacggtgacttttcggcgactttatcggcaaatttctggcgacaataacttttcaagcaccaacgaattttctggcgattttttcggcgccggtaactttttcggccaaacttattagtgttttataaatataagattttcatcttttttttttttttt

SEQ ID NO: 150276 - DNA, 1221 bp, Cannabis sativa
aacaatcatgcatatcactttcaatataagcgccactgcgcatactctatgtactaaccactgtctcacctgttgtctcgcaataacaaagattctgaatccccaagtgctcctaatcaggtgccgataatcctagtcacacaaatctggtattttcacaactagggttaacccctgatttcaaactcataaaaatattttcatggccagataatcacaaagagctcggaacgagctttccaacattataaagaactcccaaatcggagttcagaatcaaaagatatggagtttcaaagttcgaactcaaaactacccaaaaacacaagggcgggccgcggcatgcccaagccaagccgcggcacctgggaaaaatcctaggttccaccaacaaggggcgggccgcagcatgctcagagcatgccgtggcacctgagttgcaaacctagaaaccagccaccaagaacacgaattttcagcctcaaaaccataccaattccatccaaagctcaatcaaacacttaattcaattccataacgtaacaagcttaatatagggcataaaaaaatacatacaacatgcattaaaactcacactttaccctaaaaattcagattgcaaaaacatctcaaaatcatacttaaactcacaaatctcaagctatttaaacttgagcttactttcaacttatccaaatatttttccagaaacaatcatcatcaaacagttgaattcaaacagttgaattcaagttaaggaagaaaccctagaattccatctagagcttaaacaacccacacaccaaaaattcaagcaaaattcacttaaattagcaaaagaaccacacctcatgcaacttatacttatcatcttcatcaacaccaaaatcatgcattactaactatcaaaaactttagtagatacaactagattcacaattgaaaagattacctcaaatctcaagctaggattgagcacaaatacactaagaatccaagctcaatcaagtcaaaatcaagtaatctcttcccaaaatcaacttttaaaaattagagagggttagagagagagagaggggtcgggtgagaggagtagcaaactagaattctcttttccttatcctcaaaaatcaattttgtcaaacatagtaagtaaaggtcaaaagaccaaaatgcccctagggccaatttccacattttcaaacatacaagggcaaactt

SEQ ID NO: 150277 - DNA, 536 bp, Cannabis sativa
attattctttgagagtgatggattagtgatattggttttgaaacttagagagagtgatgaagtgagccacgagatacaatgtatgcttggatgtgtttgtgagattaaaagggaaaatacctcttatttgtagactttgattgaacttaactcttgttggtttaatcctactccacccttgagttaagctataataaaactatttaactaatcaccataatacttgactaattcaatttgaaagccctatatacacgtttcatgtgaaatattgttttggatttagtcaaaagtagagagaaaagctaaaggcagttcaaatggtaatattcttggacttcacttcggctaccataaattcaatgctattatttctctaactattcctcaaatgtatctctacaaaccatgtgtcacacctatgtattcatcttattccactttttttttttgacaaagtgattaaaatcactcatgaatttacgacgcccacgtccgccaccggcgctggaacctcctcgaaccaagatagctca

SEQ ID NO: 150278 - DNA, 705 bp, Cannabis sativa
ataaatattatgtagttatatgtatatacctataatatatatggttttttaaaaataaatgcttgatttatgcagctgagttatgagaatattttttttagaaaaataaaaaatatatagatatataaattttaattaattaataattcattatattaatttaaaatagttgaataaaaatattagaaaaaataaaattatacgactgaagttaaacataaaaaggtaaatatttatgattttttattaattaataattattaatttaaaatattagataaaataatatattagaaaatataaaaatatacgtatatgaatattttttattagaaaaatataaaaaatgagaaaaatagggagataatacatagacctatttgaactaatattagaatgctacatcactatttttcctttatatatattgatattcacttccatatgaatatgaatgaccactataaagccatttgatattaacaatcataaattgaatatttatggtatgaattgggtaatttagaggagttttgagctgttagaaagacttccgactttcaaaaacatatgcacttgtatgttgaaaaaaatagtagctagttaccagttaccatttttttttcagtttggctaatttttctccaaaatgttctcaatcactcctacttaattttgaattatttatacaccttataaatgaat

SEQ ID NO: 150279 - DNA, 679 bp, Cannabis sativa
ccatataacaattcatagggagccctcgaaatccataacataggctcataacatatcttccagtatctaaattgtcctttcagactgtccatcagtctgaggatgtaaagttgcattgaatttcaatttggtacccatagcccgttgtaaactctgccaaaatttagaagtaaacttcagatctctatctgaaactgtagactttggtataccatgtaatcttactatctccttaacgtacaaatctgcatactgatccactataaaggttgttttaactggtagaaaatgtgcagacttcgtgaatcgatctactacaacccaaattgaatcaaataaacctgtagttctaggtaatccaaccacaaagtccatggtgataccttcccaagtgctaaatcaatgataaaaacaatttctctctacggtggtaaacctggaagttcattaggaaaaacatctagtttttcccgaaccaccttgatgtcttctggccgaattgactcaggcagagtggtatccaataccatggccaaaaaccctagacatccatctcgtaacaattccctagatgttagtactgaaaatactgggattcgtatccctgaaccgatccaacaaaaacaaacggttccccgccttctggttggaagattaccatctttctcttacaatcaat

SEQ ID NO: 150280 - DNA, 1847 bp, Cannabis sativa
  modified_base (1007)..(1007): a, c, t, g, unknown or other
  modified_base (1101)..(1102): a, c, t, g, unknown or other
  modified_base (1301)..(1305): a, c, t, g, unknown or other
aaagttcagggggcatgattttatacatgtcaaaattcagggggcaaaaatcctaattagtcttttttttattattatatcttattggtttttataaaaaataaaaaacgtacgtattagagttattattttatattaatattataatatttttttaaaaaaataaaagcaaaaaacgttaaggttgtatatattgtattattattactataatttgagtttttatagaattatttttgtatttttttatagaaaacagaaaaatataaagagaaaagagaaaaatagttttaaagtaattttacatgaattaaaaattaaaataataaaaaaattaaatagacaaaagaaaaatagctttaaagaaatttttgagtactatgtcatcgttttatgtctctactttatatatacatagatagatataaatttatatgtattgattgaaattttatgtatgtatataaatgaagtttacgattaattatgtttaatttaagttttaatatttttttgaaatttattttttattttctaactttttttaaaatattttatatttttataaaaaaataaaataatagtaaaacatcaatttgtaaatttatttttttttatatagaaaaattattaaaataattgtaaaatatcaatttgtagatttatgctttaataaaatattaaaattgagagaattacggagagaagtaagaaatagttttggaatgattttagaatgtccttttaccgcctcatacttctcctttatatatatatatgattattattataatattttttagaaaataaaagccaaaaacgttaaggttgtatattgtattattattactattataatttgagtttttaaggagttatttttgtattttttataagattaaaatttaaaaagtgagagaattaaggagaaaagagaaaaataattgtaaagcaattttatatgaattaaaaattaaaacaataaaaaattaaagagagagagaganagagagagagagaaaaaaaaatagctttaaaaaaatttagagtaccatatcatcgttttatgtctctgctttatatatattgatatatatatannttgattgatattttatgtatgtatctaaatgaaatttacgattaattatatttgatttaagttttaatatattttttttaaatttatcttttattttctaattttttttttattttatatttttgtagaaaattaaaattatggtaaaatatcaatttgtaaatttatgcttttttatagaaaaattattaaaataatnnnnnaatatcaatttgtagatttatgttttaataaaatattaaaattgagagaattacagagagaagagaaaaatagttttagaataattttagaatgtcatgtcaccgcctcatactcctcttatatataaatatatatttaaatatatattaattgatattttatgtatgtatataaacaaaatttacgattaattatgtttgatttaagttttaatattttttgtggaatttatttttattttctaaattttttaaaatatttatattttaataaaaaattaaaataatagtaaaatatcaattaataaatttatgtttttttttatagaaaaattattaaaataatagtaaaatattaatttgtaaatttatgctttaataaaatattaaaattgaaagaattaaagagaagaaaaaaatagttttgaaataattttagaataccatctgagcgcttcatatatatatttatactaggtgattgttacgtgtcaagtcacgtagtgttagttttatttaatattttagttttttattttaat

SEQ ID NO: 150281 - DNA, 552 bp, Cannabis sativa
gggtttgccgcaattaaccctaaaaaaaaaacgcctctaaaaagatcatatggtggtagttatttgctaactgcctctgaaggaacaccatggtggttgttatttgctaattaataatcctttagaggcagctagtagcaaataatcgtcaccaaatgtgtttatttattattttttaatgacaatttgaaaacagagaatgatgaacagagtgagagagtctgatttaaccaagaaatcataaattcaaacgtaaaatgatactttttttcttaaaaaaaaatacaccacaaatatgagttaaccgcaagaacctctaaataacaaaaataaaatgataaaagaaaacgcaaaaagtaaaacaaaaaggaaaaaaaggagatgggaccgtcgtgactgaggcgccagcggtgattaggctatgagacacattaaaatagagaggaacactacaagaaatgtcacttttgtcaacacatttttgtgctggcaaaagttggtattgtgctggcaaaatagatttcacttgtgatgtgttggcaaaagggggtt

SEQ ID NO: 150282 - DNA, 812 bp, Cannabis sativa
ccatattacaccataactactgacaacggacaaggggtcttggggggtcaccccgagaagacgatggtcacccccctcaagttgggtctcgagggtcagccaacgatgaaaattgttacccccctcaagttgggtctcgaaggtgttgcccccaagtatgggcttcatccccaaaggtggttgacgaccatgtcacacccataaaagacccttgtcgtcagtaactctttcaaatgttcaaatcccatgaaaggctcaaagacagttgtcaacccacgaaaatagtgggatattatcataaaaatcagactttaactacctccaaaattcaaggggacagttgaggtggccgcgttggtcgcatctcctgaagcgagaagcaccgatcccctctcctatattagaggtcatccatgacctgggagggggatctgtaatcttgaacacttaaaaaaataaacactttatcattctttacaatcaatagtctgttcatgagttatgcaactcaaatcaataaaacacaaggggagtaggctaaaaccgacattcggggctgaacctctttaaatttaggtgtcttttatttacagttattgtaaattccagtgttattaactgcatttattactatttttttgtttaaatttcatttattacgaccccgcgtcgattgactaaaaatccaatctacaagtaataaattataaaaaattaatcaataattataattaatttaattttaaaatataattaatcttaattaaagttttataaggaaataaatgatcaggttactttcaggttacaag

SEQ ID NO: 150283 - DNA, 1091 bp, Cannabis sativa
  modified_base (843)..(854): a, c, t, g, unknown or other
ttaaatatctagaaataaatgggcctcctatatgaatctaagcccaaaagcaaacatataggcttacacatgtcaaattgatttggatgggccctttcaagtttctaggtttacaaagatgaaagaaatacaaaatttacctgttacaaattattgataagatctattgacaattggattatgataaaaatcagatcattggatctgtcaataagttaatcatagcaatttagatcaaatgaataataggtttgttaaaaaacgtttttgaataaataattaaataaacaagcagtgtacatgtaacaaatatttggaaagtaggttaagatatttttattttaaaattaaaatattttaaaaaaatatcttaactaaaatttaaatttgggttgttagaaaaatattttaaaatatttaaaatctaataaatctccctaatatctaaaattcaaagataaaaatcaaatatccaactaattatcatattttttcagtttatttaaataatttaaattagttaaatatctaataagatactataatatattatcttgatttgaaaattgagatatttctgatattatatttctaatcttatgatttaataaaataaatttaagaaaataaacaaaattaaaaataagatattttgaagattaggatattgtaaattttatttaataaaaataaaataaaatattctaagtttgaaaattttatgattggaaaaccctaaaatatctattcaaactaaaattaacaacttttcaaaatttcatgttattttcacaaaaaatataaatttttaattaaaataatatctaataagataaaatgtcnnnnnnnnnnnntttctaatcttataatttaatataataaaaaatattttaaaaaataacaaattttgaaaatctgatatgattagtaaatttaaaattctaactagattatttccaagttttattagtattttaatgtcaaaataagatcatttcaaattttaataataaaataagtaatatttgatcttataattaaaataaataaaacaaacaaaaataataaaaaattttagaattaaccataag

SEQ ID NO: 150284 - DNA, 769 bp, Cannabis sativa
aatgaggataatgtcatcagtcacccaagtggtgagcgcattagctagagaactcaacatactgggtgcaacaatgacattccaccctgaaatgctcaaacacgttctgacttgagacccagggactccgcatttaacagaatgggtccccatgtaagagtagatctttggcctagcttggaacgaaggagaaatgtttgggatgggtacatccagccccataacacttaaccaataggacaagacagaccaaatcctgccaactttaatagggtactacctgtcaacccaagggaggagctggctagacaaaggccggacagggttgatcccgcaatgcaagcgcaattggatcaactcaaaaacatgatacaaggcctacccaacctaaagctttccgacttagagcttcataaaactagaggatcacctttctctgcatgcatcaatgtgttgcccctgcaaaccaagtttaagatgcccaattgcaagatgtatacaggaaaagaggatcccttagctcacatcaaatattttgagatccgaatggatttacaaattatagaaaccaatactcgttgcataattttcccagcaaccatgttcgaaaccgcacaattgtggttcttcaaactagctgttggaaggttcgatttggggaactctttcatagtagagttctacacccaattctcgtcttctagacaaacaccttacaggctagaagacttggttgaagtcaagtagagacttggggaacctttgaagg

SEQ ID NO: 150285 - DNA, 655 bp, Cannabis sativa
tcaaccaaaattttaaagattttttttaagattctaagtgaatacacaaggagtactccatcctgtacatctaatgttgataagtgtgctcttaaaaatgatgttcctcttactaaggtaaccggtttcttttaattctacatctaatgaatttatattgctaacttgtttgtttattttaatttcagttttctctttcttcttttatttgttttctttaaattttcactacataattttatgaattattctcatttctataataaatgcatttttgtttttcgattgtagaaataagttcgtggctgacgctaatgacattgattttgattttgggatcatgcacataaaaaaaaatattagttttaccaacttcaaacttgtggtcaatttttgtctgattctgtaagtatattgttttatcagttcaagaccaagttacattattatttattttatagtttgattgaaagtaacatgttacttttcatttctttaatttatgcctttcatttttcaatttgctataaattacgtggctaattgattatcctctcttttttattgtagcatatcgatgttattatgtattatcttaggaaaaagatcatgcacagtggtactatcaacttattggttacgactactgattcaa

SEQ ID NO: 150286 - DNA, 503 bp, Cannabis sativa
agtattttaaatgattattaaagtatgctaggaagcatattagattataattatttattttaagtgtgttacctttaagtccgtaagagcagtattaagtttcatgattgttgtctaacctgtctggcttatgggttcgcaggctaagtcgtataaaatggacgcccagcgaaatacaagaagtaagggtaacatggttgagaccggaggcggtcagagaaatcaaaatccccagaatcccgtggtcgcggctgtggccgtggcagatctcagggtggtcgccctgtaaatccacctcaagctcctccagattgggagcaaaggtttgcataaatgcaagatcaaatccaccagcaggatgaagaaattcagaggttaaggcagcagggtcttcctgtcgtgcctcctcaacaagctgctcaggccgttgtagttccagcggtgccagcagaacaacctgttgttggcaaccgtatggaaccgttgtatgaaagatttcggaa

SEQ ID NO: 150287 - DNA, 639 bp, Cannabis sativa
acaatagaaggcttatatgatgcaaaccagcaatggaaaacaaagaccaaagatctggaacttattgctacctcatactttcagcaactattcaccacctcaaacaaaggaatcgagcttgaggatactctccgaagatgtgtccctaaccgtgtaagcttggccgaaaatgaagctcttttagaacctttctcttgtgatgaagtgaaggctgccatgttccaaattcacccactaaaagcacctggaaaagatggcttgccgggggccttttaccataaatattgggacattgttgggaaagatgtgatcaaagcttgtctggcagttttaaatgaaaatgccgactatcaacctctaaataaaacattgatttgtcttattcccaaagtgaaacagccttcaaaaatgtctgaattctggcctataagtctctgtaatgtgatttataaagtggtgtcaaaatgtctagcgaatcgaatgaaacaaagcttaatttcagtaatctcggagaatcaaagtgctttcattggtggtagactcattcaagacaatgctattatcgggtttgaaagtcttcattgtatgaagaaagggcggtttggtaatggaaaaaaatggcggtcaagttagatatgt

SEQ ID NO: 150288 - DNA, 973 bp, Cannabis sativa
tgtgtagcttgtgccacaagtactgtttcaaagcttgtcacaggtaattttgctgaaacagtgcgttcaataggtgaggctcgacgggggatctcagaagagtatttgaggtctactgttgactatgtcgaggtaaaacgaccaagaaggttagaatttggtggaaagttaactgtaactcaatggacacgattttcactttatgagtctgcagattttggatggggtaggccaatatatgctggtcctattgatttaactcccacaccccaagtttgtgttcttttgcctgaaggtgaggcaaatcttattggcagtagtggttgtggtggtgcaatgattgtatgtatttgcttaccagaatatgctatcgataaatttactaaacttttaagtacggaaaatatttgaaagttaaaatgttgtaagagtttgttcgattgaaaataagcaatatgacaaaattgaggcaatcttatataaaaaaaactagtagaaattgtccataaattttgtattaatctttgatttagtaatactgttttttgagtacttcactacatcattgctatggtatggtgcattttctttcgactcagaggattatagattaaatactgtttgttattaataacaggtcaaagtatctttcattaaaatttattaatttaagagcatatataatcacttttatcgggcaaaaaaaatcttaagatgagctctttgtcttcactcatactaatttctgaactaatttctcatttgattttttttaattaaatttataggaagctcaatgagtgagtaacaactaaaaaacgcataatataaatataaaattatagggacacgattttgtcccgtgatgtactttcatggatgtatttcatactacattagatgagtctcagggtacattagatgggtctcaagtacgtcaccattttttaactccaattacccctagatcaac

SEQ ID NO: 150289 - DNA, 594 bp, Cannabis sativa
  modified_base (120)..(128): a, c, t, g, unknown or other
atgcttgtgaaattttatgaaaataattgaattttcgtttcttgaattatttttgttggatagtttggaaaaaattaagtaagtcattttcttagagaacttaatttcgattttatttgnnnnnnnnntgattttttgaagttttgaaaaaggatagggttatcaccctcatcccacgagcgcggatgacccattccctcggtcaggtgcttgttcagacaaggtgttgtccgagtgacacgcccaggcatgtctgaatccctctctgcgcgcgggaaaatcattttctcttctgatcaccttgtgggtgctcgcggatgagtacgcaatgcataccatccgtacagctcacaaattttttcaattttcttagatttttcatgctatttcatggaattaacttccaattttttgtgtagttttgtattttgatttttaatttttatatttcaaatctaattatcagaattaaatcaattggattttcttaaaaaaatcaatttaagatattagtgtaatttgaacttgaaaataggaaaatatctatctttttttgcttaattatctatcttattttaaattttgattatttta

SEQ ID NO: 150290 - DNA, 789 bp, Cannabis sativa
taactataatattttcaatattatatgtacatatttcaataatttggttgtgatgataacctaattttctttcttacttaaaaatttatgaaatattaatactcacataaaagagaaaagattttgcaactagtttttattttaacgacacacacataggtagacatatatacattgttaaagttgatggaattaatgataatagactgaacaatctatttataattgttggaagaaattattaatttataagtttttatattgcttctgcatggattttttttttttttaaaaaaaaaagattaattattttttgaaaaaataaaaaaaaaattaaaaaaatatgagaaaatcaaaagagtaactaaccagaagggtaactagttaccataaaggggttatgagatacattatgctttttttttcatattttttaaattgttttctaaattttttccattaaataatttttttcaaaaaaaaaatcatatttttattaatttatactttaaaaactagaaaaataaaaaattctcccaaaaaacaatataccactggacaacaaaaagtaattattaataatttctacaagtttagtgagtacatattctgaaatatagtagaattagaaagtttggcccactacaaaaaatcttacttttagtcataacaatttttttgactaaagataaaaaaaaatgtggctaattataaattatcattattatgttgtgactaaaaggttcgtggctaaaagtactagtcataaaaattacgatttgttgtgac

SEQ ID NO: 150291 - DNA, 549 bp, Cannabis sativa
gacctagatagggatctagatatgaacgtaaacttgaaccgaggcctggacccagaccaggatcgaaactcgtaacctagattctgaacgagaccctgaaccagacccaggcctggacccgcacccgagacccgaactcgaaccttgacctaaacccaaacccagaccgggatccgatcccggtcccagactcagaccaggaatcagacctagacccaaactcgaacccagacactgaatcgaaatcgaaacttggactaggacccaaaccgaaacctaggactcggagctggctggggtatcttgaactgggccacgaaacccagacccaaatctaaacacgatactcggacctggatggggcacctggaccttggtctcgggtcttggactcggaccgggacctaggactagaacttggatatgggaccgtgacccaggacacgaccattagaactgggattgagaactaggacccgaccccggacccggaccctgacctagaatttggatcgggacctgggacccgaagtggaactagactgggac

SEQ ID NO: 150292 - DNA, 898 bp, Cannabis sativa
  modified_base (131)..(154): a, c, t, g, unknown or other
tagatcaaaagatcttaattctgatatggttcggttcgatctcaagagtgttatttatgttctttgatttgttcgttgaagctcataagggtgaacacatacatcttgagaacatgatagtacaattgagnnnnnnnnnnnnnnnnnnnnnnnnaatctatagcttctatctgaacatagaagttataataccctagagttatgaaatggattagcaaaaccctaattagataattaggaataattgaggaattatatattatagtttaatatgtgtgaattaatatgatttatgccacgtaagaccccgttggtgagccatgggaattttagtaattatgacccgagcagggtaaaataatgaaattaattaattatgtgcttatggaactatattattatatagtatgcatgtgttgtctttttcaggtgtgttctgacagggttggtgcgctatagtcacaactgggtattttgggccgaactgggatcgggcccgaaatgcaatttgaatagaaatatttggcatttttatttattggtgataatctgaaattcaattggatttaattaagcatgaaatgacatttttacccttgtaggtgtgtgagtgtgcattttggccctaggggcatttttggtcttttgaccttaattaatggaatttcaaaaaaatgggatttttgacaagaaaagaaagaatttctgatttccctctcccttaccagaaccctctctctctgggggccagtttggcacagctgtgctgtggcaaaaagcagttgtagctgtgctgtgagaaaaagcagctgtagctgtgagaaaaagttgctgagtgtttggtaaatataattttaaaacaactgtgagttagaaaagttttatataagtgtttggt

SEQ ID NO: 150293 - DNA, 673 bp, Cannabis sativa
aataacttaattgctactatttttttttttgaaaggacttgctactattttaaaactcaaggatatagtaaaaaaaaaggataactacataaaatattttttttttgtaaaatttttatatttttaattttttaaaaatatttttacagtattctataaaaacaataaaaatattacataaaaatagaaaaataataccaacataatatcaaaacagtaataaaaataacataaaaataacaaaaaattaacaataaattaataaaaatacaatataaaaataaattaaaaaggctgtattttttataaaaaaaaaatcataaaaatatttaatattcccaaacatgataaaactcatgggagcatttacgttagagttagttagagggttagaggaaattagattatataccctttttatattaccctcttttatttttactctttttttttaaaaattttatcatttttacctttttttttaaatactttgccaattttgtccctgtcacttcaagatactctctatgtgactcttttatgttagggtattttgggtgtaatacatgtaaaaaaaggtatgtttcaattaaatataaattagaggtagatttggttaattgataaataaaagaggtatttttcaagggaaatttacatggtatactaactt

SEQ ID NO: 150294 - DNA, 694 bp, Cannabis sativa
gctggtgaagttatagaggtccaaccccccgacatcctgataatcgcgactaaaggttatttcacattcaaagtatggtgtgatataacgaaacctctgtttacaaggctcctatttccttcagaaggcagaaagatatggcttcctttcaggtatgatcgtctcccctttatgtgctttaattgtggttttttggggcatgatactcgggtttgtgcagagacgcccaagatgtttaacgatggtcttgttaactggaagtcgagttatggaccatggttaaaggttgatgacaaacgtgatactaagattcaaacgaatgctgctattgatccctctgtaaagaagacatgtgttactggttctcttgtttaagattccccctacctacagtcttgtttcaaggtcaaggtcagggagtttatcccattcactcttcgacttcaaagaatatgttagaactcagttcgggtttggcttgtactcagttcgacttcaaagaatatgttagatctcggattgtaagctgaaggaaatctcctcgggtggaaattcttttacttggtgcaatggtcaagcttctaatctaatttttgaaaagctggacagggtgttttgcaattcggcttggttggacagatttcaatctaacaaagttactcttctaaagtggtggaattctgaccatagaccg

SEQ ID NO: 150295 - DNA, 521 bp, Cannabis sativa
ttacagagaaaactacgaagtttcgagcctagattttctatgaatcttctacaacaagtcaagaacaaatgcattttcttcaatggaaacccagaaattaaacatgcaaagtgaaaagaggagaagactgaaaacttactcactgcctgaagcctaaacgaagtccagacgaagctgctcggatggctttggtggaaatctcacgacagacatggagtagaaatccttttttgctctgagtttgtttagtagggaaatttgtaaaagtaaattatgaagaaattccaaccttatttataggcaatttggtgaaaaggggtaatcatttcaaaataccttagacgcttcattttcccaccaaaagcaaatattgggaaattaaaaacaatcaggtgtaaccgtcaaagaatgaaaaagaaaccgggtttcaaggcactaattaagttagagcattaattagccgaaaaccaaatagacgcctagtcagactcacatcgaatcacgaatagacgcacctaaca

SEQ ID NO: 150296 - DNA, 1136 bp, Cannabis sativa
caattcaatccaacggctatacaatcacggattgtattccctgttttggcataacgggaccaaatcctgtcccaaaaataataatgtcaagtcaatgaagaatcttttttgaaaaaaaataaatgccgaatcttagtcttaaattttataaaaatcatatattttttttttttaaaaaaattcatatatagaaaaataaaatcaaacatttcttaaagtttagtttttaaattatttcataatattgcatttaatatttttaaattatattattattaaatttttttatttgtaaaaattatgtataccaaataccaatggataattatctctacaataaaaatagaagaattgataaaaaaaatgaagacaaaaactacaaaatagtcaattttaattatttggacctctaaatgtcttttaaagaaaaaattggtaatttaatatactaataatattttccttctatgcaaagtcctaattaaatctaaaatattttaacattcaaaaagcagatatattagtggtcgcaatacaagtcaagtcaccaaaagatgtaacaacaacataagtgaaataaaaagaattcaagaaatatatctgattaataagaggtaagaaaaaacttagttaaaccgaatttcgatttctattaaaataaattaaattatattattatagtttaagaattagaataacaaccttatgtaatatttttaataattaaacattgtatctaaagaaatagaacttaaacttacgtaatatgtaatataatattttatgtaaatatatacaataaaacttataaataatatttatattattatatcaaatgttaaataaaaaaaatacattcacaattgagatgcatctatatttagtacaagaatatatactcaaataaatgacaaaaatactaacttttgtaatttatttctcaagaaaagactaaatatattgaaaatatttctaatgaattagtaacaaagtgttagataatacaaacttctactgatcaagagaggataaagactcaaagatacaagaattttaatgtatactctattgaagaagcaaaacaagaaaaaattattatatcttcatcttagattataaattacatataagtaata

SEQ ID NO: 150297 - DNA, 675 bp, Cannabis sativa
agagagaaagagagagagttaaaggctgtagctcttaaaggttatgaaccatggtattcatggtattctaaccaatcggtcatagaggtttgagagtagatatctctttgtttgctactctgattgaagatcaggaattggtgtttgtaaacaacattttaatagtggaaatactccttgggggagagctggaataggactcacattgagatccgaaccaatataaaattccttgtctcactctttatttttccctgttttctgcattgatttttggtcttgtttatgtttgattcttttctggttttagtatctggtttatggagcactgttgtgcatgtgtgtgttgagtttgtgttgtaggaatctacaacaaatgtctataaatgtaaaaatttaaaagaattcttaataaactaaatattttaagaggcaaaataagtgttgttgaaaatttaaaagaaaaaaattgctaattattaaaaaaaaaataataacaacaaaattgcaaataattgcttcctttattattgacgaaatttgagctaattgacttttattgcacaccaaatgttccaaacaagttttctattttttttttatggtaaatactattttagactccgtgttttacaaaaattactaattggaccctttgttttgttaaatgacaaa

SEQ ID NO: 150298 - DNA, 702 bp, Cannabis sativa
taataaagtaattagtttttatttgtataattttaaaatgtaattttagtaatgtgtttttataaataaattaaaacataactaaaatattataaatttaaaagtttaataagaagaatttattttttttaatttaaatataaattgtaattaaatgaataaaatttttgtttaagtttttaataaataaatgtgtatgtaattttatgttggtataaaaaatttagaataattaataaataagataagagaatgataatttttatgaatttgtttgatgaagataaatttgtatatttataaattaaatataaaattattttaatttttaataattaatgattaatataaatttattaatttttttatacaaattaatgaataatttaaaaattaaaaattaattataatttaacgaataattttttttatttaaatatgtgtttaaataataaaatattaataaaattttataataatagttaataataaatatttataaagaatatattacagttttgatatacttataaatgtataccataggtttgctatatttgaaagtatatcatagcttttatgtagttgcaaataaagtctagaataaaattattttacactttttttgcaatatacaggagcgatgaatacacatggcaaaatttgcaataaaatttcataacactttacaaatcattcaaa

SEQ ID NO: 150299 - DNA, 553 bp, Cannabis sativa
tctccgtagagataatgccgccaaatcttcaaagcaaacactaccgcggcaagttctagatcatgagtcgggtactactgttcatattctttaaactgacgagcgacataggcaataacccgatcggcctgcaccagtacacaccccagaccctatctggatgcatcacaattaacaacgaacttttccttatcagaaggtagggctaacactggagttgtgattaatctctgttttagttcctgaaagcttgcttcacacttatccgtccacacaaacctttgattctttttagtaagctcggttaagggtgttaaaattttagagaacccttctacgaaccgacagtaatagccagccagacccaagaaacttctaacttctgtaactgttttcggtcttggccaatccctgacggattctatttttcccggaccactttaattccatctttgctgataaagtgtcttgttggaaatcttttaccaggatctagatttactactaagtatgtttcattaacatcctaatatgaattctaaaaacaatgaaa

SEQ ID NO: 150300 - DNA, 976 bp, Cannabis sativa
  modified_base (669)..(674): a, c, t, g, unknown or other
atagtgagtctcccgttgatgatgttgattcatcaacatctgagactctcgtgttctttttccatcattaccactaaggttttactccataattcattcgttaccattggtttcttacaatcatcactatcttcatacttggttaaccactctaaaacttattttgcactcaattatatagcttgttgtttaataaacaacctactttgtgatcaaacattcaccaagtcaaatacatgtccattaaattgaatccaattcataagctttttcccattgtgggtgagtatgtctttccataatttcttaataaagtaatcctttcctagaatttcaatggtctccttataaaccatattggctatccagtcaattataaagtactctccatcattaccgtgtcacctcaggtaatcttctttttaccttagtgataccactattctacctgacgttcttttatacattaccccggtaacgtcctctcttcaagcctccattgggcccttactcccacattttgatgactcttatacacgagtgcattactctagctatttccgagactgacgactggtcccacggaccaatccaaatgtttctaacgtgcttcgctctgactcacacacttcatggggaaatttcctaaatgaaaccaccccaagtcannnnnnctcaaccatggagttccttcatggtgatttaccaaaacaagatgcttattactaacataggtagtcccacgcctacataatctcaaaattactacacaatcgtcgccttcaattcatctaggattccagacaatactcaaaaattgtctaactttttgtaacgctagatcacttctaaacaaaagattttgtttttcgaatcaattagacctatgcctccattaaccacttacgacctatattccacttgggaatactagcaaatttaactcatattgtcatttttctaatctatcaaccct

SEQ ID NO: 150301 - DNA, 568 bp, Cannabis sativa
gatgccactgatattctccattgggttactctctatagtgaaggcatagagtctgaacattgaatttcatactcactcagtagagacacaaattcttaagatagatggatgaccaagagcacatccttcgatctcactaggcagagttagatcgccacaacagaaagactaggatctaataaggcggttcaactagagaattgataaaagaggccaggatctcatcagagattttcttcaagggagaattgttgatagatcagggagggtctatcgatatgcttatcaacccagttcttcaggaactaggatagatcttcccttgccaaaaactgtcgaatctcgacaaccagcgacatgaggggccagtcaaggatctcaggctcaacaacagccccctctatccatcctatgaccggccaaccaccagcaggagcccccatggctggccattgaagagcactccctctctaaggggagtgagtcaacctgtaatatccagtttatatacatatattggtatttggtatattaagtgtgatacaattaaattattattattattttt

SEQ ID NO: 150302 - DNA, 629 bp, Cannabis sativa
  modified_base (59)..(64): a, c, t, g, unknown or other
ggaatctcgtcccattcagccgacacccgcgggggatgactgggtagaggcggggagcnnnnnncggaagaaaaggatgtagggagagttagagcaggagaaagggcaagctgggcagtcgacagcacgtcgaggagagaggcagaggtccgagcaggagaagaggatggaagccccgaattaagacccgctgtagccgtcgggagggtctcaggctgagagaaaccttcccggtcaggaggccctagattggaggctcccgtcggggccagcccccgaaattgccttcaccttcgcccacactcgacgagacctcgggaagagcgctaagtagggccccaatggcatcctcagtggctgagtcatgctgagatgacatgccgagatctgatggggcattttcctcaacccttactcccttaattttctttgccctgctttttcgtttgggggacttcgacatcatcctcttccgacgggccgcgttctgagcctcaatctcctcatggtcaactcggacagcctcattgtaggaaggtgacgggggtaagtctctgcaaggcgggagtgatcctcagaaaactctatcaaaagtggctcaggtgtttgatttaagtgtcttaaagcac

SEQ ID NO: 150303 - DNA, 1117 bp, Cannabis sativa
  modified_base (599)..(606): a, c, t, g, unknown or other
atagttaggtcgtctattcatatattaggtttaagtattttttcaaggcatcttggtgtcttgtttaatactttcctatccaatgtgagccgttagcattcagttttgcatgtggcttatgagttgattttcctttctcgtcagaaaggtttaatcaaacgtcattcacaatttttgattttcctttcttgtcagaaaggttcaatcaaaaagaactttaaaaaattttgaaatttttttaaagtggtgggtttgcaatataccatgtatttccagataaattctagttaatcatacacatatgcccaattttaaagggtaatactttgtaattacttgaaaaaatgattaactttattcataactgaagttcaaaatattacatcaggattgtgagttacaacatcaatttattggtagtagggtcagaaatgttccacgttcgagtagttatttatcagcgagccattcagctgagccatactgtaaaccccggttcatactatttcttcgatcacataaggaccctcccagtttgggttgaatactcctgcagatgcatctctcgtatatgcaaatactcaccttagcaccaagtnnnnnnnnttgaagagcctctttttcacccttttgttgaagtatcttgttactcgttgttggtatgatgcattagtaatctacgagtcagtacgtatttcatcaagtaaatccaaggacagttttaaaagttcttggttttcttcttgattataaaaatctcgtctgtgagtcaagttatttgcttctacaggcaacattgcctccgagccaaatgctagcgagaaaggagtatgtcccattgctgttttctcagtcgtcctatgagcccaaagtacttgaggtagttcatcgacccatctacccttgaccacatctaatttcttcttcatactatcctttaaggtcttgttaacaacttccacttgtccattcgcctgagccctagatactgatgagaggattttaattatcttgttcctttcacagaacacagtgaataattcaccattgaactgagtcccgttgtctgacctattccctagtcttgggttgccttctgttctcgtttctacgagaa

SEQ ID NO: 150304 - DNA, 687 bp, Cannabis sativa
aattttggaatcataatgcccaacttagttctatgcagtagaggcaataatggtcccacacgcatctcgggccaccatgcccagcccacaaactctagtagctagctgatcagagcagcgtctgagttcaccttgcaccatctcgacgaaggcgggttctaggacgaggacctattgactgaactaaaccacaatttccttcacattaagtgtaatgtctttgctttgagcctttattgggtttccccgcagacttatgactcttatacacaggtacgtcactctgtatgcttcttggaatgacgactagccctacaaaccaacacgagtttctccagcgtgctttgtcctcactcgtacactttttaggaaaactttcctagagatcacccatcctaagattattcaaggtcaaacaccttaactttggatctcttaaaagtgatggactcccaaaaacaagatgcaccttgatatagagatagtacggtagtacctatcaatctatttaaacccgcttcaactatgtagtctaatacagtctaagaatcatcttacttgaccttcctcaagcaatgttggattgcacatattacctattatttttctttatggatcatgaaattactgactgtcacaatcacactcttatagggtgcgacattctcgtcgaccacacttccgact

SEQ ID NO: 150305 - DNA, 941 bp, Cannabis sativa
aatgtgctaagtacattgcatggcgagcaaagaagggtacatatcttactttggtctgttctgaggtaaatttagcttcagtaccaaaaaatacttagtggttagattccggtgctactactaacatcagtgtttcaatgaaaggttgcttgagttaccgaaagccaagtgatgctgaaagaagcatttatgtgggagacgacaagtcgatgaatgtggaagcaataagacattttaggttgttgttaagtactggttactatttggactttttagatacttttgttgtaccgtcatttagatggaatttggtttctgtttcttgtttggacaaattgggttatctaatttttgtaatctttatatatatattgtaattatactaagtgatataatctaaaatataatattttgatgtgtattattataaacaaagtaatagtattgaaattataaatataatttactatttttaaaatgtatagaaagatagtgattttatgacaaatattaaagattgtataattaacaaagatattatattacatgtacttttataataaaataaatgaaaaagttcaccatttctaaatttaataaacggatcttgtatctgatgatgtagttatttttaaaagactatctagactttttttgcttaataaaaataaatagtttaactattttttattaaagtttttatattttgttttgtggtgtcgttagaatattttccatacaaaggtgaatgtaatatgacaactacaaaaggagctgtcataacattactgtttttacctattagtgatagaattttttcatacgaaatgtttaaattagaggattgattttaataaattttgtgaatgtgaaatttatacgataaattgtagtgataaagagggagatcatgatatatatgactaattatttccacaata

SEQ ID NO: 150306 - DNA, 1126 bp, Cannabis sativa
  modified_base (1065)..(1067): a, c, t, g, unknown or other
tcgataaaaagcatggaaataccttaaacaacacaaaaatgggaagaaatagggttcccaatttttccccaaccggcagaccggttctacaagcgaaattctggttttgggaggaacccaggacaccaatcagaattccggttcatacaggccatactgaaccggaattctggttcagtgcaaaaaaccataaaaaattcacatctcaaccaaaacaaccccaaacccaaaccatatcaaacaaactttccagacctgctctatacatcccaaagaacatatccaaagcaagaaaacaaagcttcatgcacaaatacaaaaaatgccattaaagctcgaagcattgagtttaaaactcaagcttggttaaaccccattcacatgcatcaaaacctgcttgaatctactcaaatatacataaacaagcctctgaaaacaacaacaatcaaataccacaagcacaacaagctatttcaacatttcaccattgaaattcaagattttgagtctaaagctttacacaaggttaaatcccaccaactaacaaccaaaccagtttagatcaccttaaataaacacatatttaaactacagaaaataataaaacaaaaaacatgcacagagcagctaccaacattaaaatcaccaagcatgcacttatttttcttcaaaattcaagaacacatcaagaaggttactagaacttgtaccttagcttgaacaacacttagaattgctaaaaaatacttgaattgcaaagaaaaacccagccctagcagccccaagccaaaccgaaagagagagagcgagagagagcttgagagaaaacttccttattttccaaattttccaatttttgaataaatgataaaaattccataatctattctttattttagccaaaataacattacataaattacattatcaccaaaataataagtccacaaaaggacaaaggcttatggggcaaaatgacttttttgcccctcccacactaaaagggttaaaaaagcacttaagggtgttttgggaaaactctaaattcccgactaatcccgacannnccaatgtctaaataaactgccccgctatacaaaaatactaaattgtgattctactgagc

SEQ ID NO: 150307 - DNA, 757 bp, Cannabis sativa
  modified_base (38)..(43): a, c, t, g, unknown or other
ttaatcttgatgttgttgtgagcctctagttttactannnnnnaactttgtaatcccattattgaactttggtgatagtagatgatttgagcagactacggtcctgtaatttttcccgcattggttttccacgtaaaaatcttggtgtctcacttttatgcttgatttgtgtattttatattatttgtggtgctttggttgatatttgatattgcttattgtgctaattgataagtatcctatttttatcatacaaagtgggaaaatattgtggttaattacaataggttttcccgacaagtagtatcagagccaagattgattggtgttgaattcttgtgtgttgaaaaatggatgagtcggatggaatgatgaaattaaacttatcaaactatttcgcttggatgcaattgatggaagatttgctttattgtaaagatttgtacaaacttattaaaggtagtgagaagcagtctaagttagatgatgaggaatgggaagctcaacatagaaaagtcatttcctacattggacaatggattaatataaatcttcatgagcatatctctaataaaaccagagctgatgttggaaaaagctaaaaaatctttttgccaaaagaatggctagtaataaaatttctctacttagaaaaatgctaaatttaaagtacaaggatggtggtagtatggttgagcatacaagtcaatttcagagtcttgcaaactagttagttgccatgaagatgaatatggat

SEQ ID NO: 150308 - DNA, 503 bp, Cannabis sativa
gtgagattaaccttcatccttccttgattgatgtgattcttcatgatagagtcgtcactagcccctttgattatcgtgtaattgccctaaattaggtttacgatggttgacacgtcctcttatgggcgttcccagacgttttctccatgctacattgaatgcgaaacgactgttcaagtccagcctttctagcccggaggtgccttcctatgtcttgactcctagaggggaaggtgaatcttttgctcatgtccgagagctaacgacctgaaccatactcgttgcttctttagttctacttccaactcacctccgggtgacgtgtctatctcatccacatgtcacacacagcagccgccacatatattggaaaataactggggcagcatttacccccaagtcttatttagttgcatgtaaataagacttgtgagcgatctccggtatcaaagtgggacgtgcgctaggcacgtgggcagcattttgttggaaattattttacc

SEQ ID NO: 150309 - DNA, 945 bp, Cannabis sativa
  modified_base (45)..(47): a, c, t, g, unknown or other
  modified_base (254)..(256): a, c, t, g, unknown or other
catgtggatgggtcggctacaaatcaactatctggtgcaggaatnnnccttgtcacacctggggggcaacacctgcacgctccagtcaagttcgaattaaaatcatctaataacaaagccgagtacgaagctctaatcgctaggctaagactagcccaggagatgaaggccgaacacatcgaaatctgtagtgattcacagctagtggtaaatcatgtatctagagaatatgaagctcggggagaaaagatgannncatatctgagcaaaatacatgatttgctcgcacaattcaaaagctacggtcttagacaaattccaagagaagaaaatacaaatgcagacgtgtgagctcgattggcaagcagcaatgtaagtgacaaggcaaacttggttcctatccaattcctcgaagagcctagcatcacttgcacggaagaaatcgaaatgattgatacatccccaaactggatgacaccaatagcggcctaccttgagtctgggaactaccagataaccgaaatgaagctcggaaaatgagaaggaaagttgcacggtacatcatagtagaacgagtcatgtacagaagaggattatcgatgccattgctcagatgtttcactcaataagaagctgcacaactcctatccgaagtacacgacagattctatggaaatcatggcaccggacaaagcttacccaagaaaattctaaggcaaggttacttctggccgacaagatttaagattcaaaagcctatgttaagaagtgtgacaaatgcctgagattttcaaagataccaagacctcaacccaacgagttaacactgatgcaaagttcgtggccctttgccatttgggggattgacctgatcggacaattacctaaaggtaaaggtggagtgcagtatgtagtggtagtggttgattactttactaagtggac

SEQ ID NO: 150310 - DNA, 639 bp, Cannabis sativa
atataataatattataaaattaataaagaatattctattaattaataggatattctgttaaagttaacgtaaaagtttaaaaaagtattattaaaccaagaattttgttacattgccacattttatatatatagataaatatatatatatattggtatacaagactatatttaaaaaaaaaatcataaatatatgtttttaatatgagtatggaataaaaattcataattaactttatttgaaaaaaaaatattttcttgtggatttattacatatgttatgaaaatggaacattattattagatacaattaactatcttttcaaaaatgggtagcaaagtatatataaatattaatatctttaagaatgtgatgtgtaaaactttatctattaatttaaattttttttataacatgacataattatttctattggataatgcttaggtagagtcacaaaaaacgtctgcacatacaaacatttttttttcattatttgtcactcccatattcgatagcaatattaaattaattacttttatatttatatttttaataattttgtgatatcaatataaggaaagttacttgtttttttttaataaaaaaaataaaacttagtgttgaccgaggttttcg

SEQ ID NO: 150311 - DNA, 581 bp, Cannabis sativa
tgcctagggccggccctgcgtgtggttatattttattttttgataattaagttataaaattatattaaagttaatattttttaatagtatgagtaactattctattatatttttttataatttttatacaaaaaaataaattaatattataaaaaaattcatcatataatttcttatctaaaaaaaaaaagcaacaaaaagatattttcaaacgttatcgtaaaataaaaaaatggaggtttaaaattcatcacacaaaatagttagatctaaaaaaaataattgataaatctatagaaaattcatcatatgattttaaaactgttgtcattcaaagccgatgtcatgactgtatctaacttgtagtcgtcactacattcaaagtcactatcattatcgtatcttatttgtagttattactattgatcaaaataaatttgctctgtacataaaataaattatatatacttgagttaattcactactaacttttttatacataagtgaatgattttgttaaaatttattgggaaatttgcggcaaaagtccccaaaaagttcacgttgatacagattagtcc

SEQ ID NO: 150312 - DNA, 527 bp, Cannabis sativa
gaatacgacgtatttctcacacagttcatgatccacttaacaaacttttcaggaaagcaataggccaccaaaagcttctcaagaaaatcccaattgaccgtgccataagctttacttatgttaattttaatagtgcatcttggggagcaattcttccttctataattcttcaagatgtcttggagaataaggatattgcaagcaatggagtgacctttaacaaacgctccctggttctggctcactaagttaggcagaacagtggcaagccgagtacagatcagcttagaaacacatttgtagaaagttgtgcaacaagcaataggccagtagtcaattgctttagaaggactctcaatcttaggaaaaagagagagagttgtgctatggagctctgccgggaattggttggtttcaaaaaaatgagcaatagcagcgtgaatatctttccccatctcaggccaaaccgaccgaaagaaccctgaaccataaccatcaggtccaggagacttagtgataggaatgct

SEQ ID NO: 150313 - DNA, 583 bp, Cannabis sativa
ttctataaaaaaaaaaagcactttgctagaaaactctaaggcttaataattcctaaagctatttccatgagagttcccttagtacttagagatatgggagaataagcttttagacaaaggtgtaataccttgttcaagtcgtagtgatcaccactattctacactcaaagttgtgggtgagtgatcttttttttcttcatattatatatatgttatataatattgtgtaatctatatatatatatatcttcttctacctttcttatatataatatacatagtgtatatatattgtatattatatattgtaacatttatttaatctctttgttgatccttgtattatattgtaatagagttgtaatgtcttgattttcttctattgtaataatatctctaacatataaattatgtgctacacttaagtggagtgcaagggtatattaggcaaccactcataaaagtgggtaggttttaatgatttataatattaggatattttttattaatcgatacaaaaaagaggtatttctcagcttatccctaatttttattggttttattaaaacttgggttgattgga

SEQ ID NO: 150314 - DNA, 597 bp, Cannabis sativa
tttatacaatattttaaatattatgaatcaagtaattaaactcaaaataaaatatgagttttagggtacgttaggaaaatcaagagaaaattgaaattggtaattgaatgtaattataaaattttgtgtgtttgtctaaccacgcaattatactatatataattgtgtaatggaagggtaatagagagttttccattacactatctaattctcgtacccttataaaaattgagtgtaattatacagtgtaatttctaaaaatttttattttaaatattaagtactaaaaattatttttttttttcagtaattactagttcttttactaaaaaagacattattaatttataaataattattacctcatatctagacacatcttgtaaattgtaatgtattttaggaacttaatttatgcttataatttttttttagaaaaaaatcatattaaattaaaaatagtgtaatactttaatttcactaatattaattaaagaatttattaatataaataagtatagtaagtttatataaaattataatattaatattttattataattgtagaaattatatttaatatatagtaaaatgata

SEQ ID NO: 150315 - DNA, 1284 bp, Cannabis sativa
gcttcttgcaagaaatatctgaagccagacgccggttcttgcgagcagcagcctggccagaaccacccagtgtatcctttattgctgtggcaaagcctttgtttttacccaacgtcacaattgcttttgacctaggtgacttggatttcgagattatgcctcccaaaccacgtacgtctaaaactcctcaagacgccagcgtcacctttgaggctgagttaatagaattgaaggtgtgatctatctcaggctatacaggcgacgtgctgaagacatgtggaattacacttcggtaatcatgccaagttaggtcagtacgagagggtgaattcagttgctaccctctgcatgctttgcccgtagtaacccaggaaccagtggtgagactagtatgggcgcttgaaaccttgtgcatatttgtgcaggggccatcctccctcttcgggactacttcaaggattacataaatcacattggggttgccccattccagcttaatcccatctcttacagaattctcgctagtttgaaagtcttatacacaattatgaattggggttgtcccatgcccgtagagattgagtatctttactcagttaaagtcgttccgtcgaggaagaatgctccagtgggctatttatatcttggtactcatgctagcgagccaaaaattattgtagacttgccaaataaggtgtccttcaaggacgaattcttctggacatctggtctctcccccattggcacaaccacgtttcgcaaactccgtaagtgattattctcttctttcttatttacatcagtcttccattttcaagtacttgactaatgtgttgtttgttctgacagctcttttgacgagacctactcttacccccgagatggttagtaggcacaggtgcttgatgactctcccttacggtcttcaatcatgcaaatttcttttgaacgaagtaaacttgcgatcggcgggccttctcgctgacaaagaatacacttgcaattacaagattcccaagtattcttcttggcagcaaataattgttccactcgaggaccaggcctgggatcgcttggcccaagcacaataccttcaaagcactgctccttgggaatccgatgaaggagcatcccaagataatcaatgtggatggtcacctactgtacttagggctgagcgtaatacattagttaccttccaagactcccatcttaattttatacttggaattccatcctcgtggaccgcattgctcataagtttgacagttggtatcctagatt

SEQ ID NO: 150316 - DNA, 780 bp, Cannabis sativa
tatagaaaaataaagtatgaacacatgattttttacatggttttgcagttaaaattctgcatagtccacgaatcaatcttattcagattttggattatttttttaggatctctttcatatgaattttttcgtccctcctcatgatcttgtctgccactatttataattacatagtggatagtgatttacaaaagtttccaataatcgttacaacaattattatctcaaatcaggcgatttgattacaaatcaagctaaataaatgaggtttttacacagctgtgaatatctcgcttttatttggctgagatgaatgcgtaatcaaatatatacggtaagccttatctcatagggatgccatgccgagaatggagccaagttaactttgatagcgagcagttggcttctcgagactaatattgttttaactttgataactatattttctggtgtcgagatgatcttcctcgcatgcataccatcttctagcgagataaactctcgttgtctgttatcttgactcgtcacactatctatactcagtttgtatctcatataatatatgctaagtgtttttagtattgtcgtttctctttcacgcagcttggttgaggcctcgccatgcacgcatgcacccaaatggtttctcgttaatacataagttagcagtttctacatttatgtctcggagaaggctattcagccaactgagttataaacataccttgcgaattatatttctaatgagttgttccgtgctaagtgtacttttgtttgcgt

SEQ ID NO: 150317 - DNA, 741 bp, Cannabis sativa
atgacagaggcgactaaggtttcacgagtaatcgaagacgaaaagttatccgcgatactggggggcattgaagtccttggtgagctttgaaaagacataaggagaatggtccagtagactcgatgagtgattttcttgaccgtgctgaaggctttatcaaacttgaagaggctattcagcggacagaaggtgaacaaaaacctggcaagtcaaaagctccttctactggaaaattcgtccagctcccccattacccaagcgattcaggctcgaatggtaaacggtccagcaataataataaacacgggaatggaaaaaggagaaagttcactggcaaaaccgaacaagctccccgggagaatcctaccaagtatactgcatttaccatcctgacggaggacatagaaagtgtttacatggccactcagtcattagccctatacaagaagcccgcacccatgaaaaaagatgtcagtaagagagacatgaccaagttttgtcgatttcatggagactatggccacgacaccaatgaatgcaacaatttgaagtgggaaatcaaattcttaataagaaaaaataatcggcacgtacagaagtatgttaaggccgatcaaaatcagagaggcgataacaaccaagacttcctacctccaccagtatatggacatctacaagtcattattggaggcccgcacatagctagagattcaggcaaagctcaggagaggtatgcccaaa

SEQ ID NO: 150318 - DNA, 918 bp, Cannabis sativa
aaatatttttccccactagtcacaatgaattcgtactactaacacgtgaatatgaagattggtttgaagttaaattttgttaaaatgactcctatttcaaaaatttaaaggttcttctatttaggataaattttaacaagtttttttcttacacttacagtcgttagtgttttttcaaaatctgaccttacacatcttaaaaaattttgaaatttcatagggacgaagccaagaccgttgtctatcacttttctatttgggtatggggtttggggttcaaggttttacggtttggcgtttggggttcgagctttgagggttttgggtttaggatttcaggttttgggtttggggttttgggtttttggatttggaggtttggggttaagttattttacattagtagtttggggtttgggatttgggttttgagtttggggttttggtttgggttttgggtttttaggtttcgaatttacggttttggagtttaaggtttggggtttgggattagttttggggtttggtgtttagggtctttggcttttggggttttttgatttgaggtttagggtttggggttttgtgacaagggtctagagtttaggatcttagaccttgtatttggggtttgaggttttaagtcttgggtttgatgtttgggttttagggtttggggttttggggtttggggtttgggattgggatttgggctttggtgtttttgtgtttagggttttgaggtttggtgttttagggattaggtttgggatttagtgtaattccctaagattaagagaacggattaacaaaccctaactagctaagtgtgtactattatggaattatactattatataatttattttatgcgagttaatctgataaatgtagtgttaagaccccgttggtgagcta

SEQ ID NO: 150319 - DNA, 600 bp, Cannabis sativa
ttatgtatagatataaaaatttccaataaattttgtattgaacaaatgaatccttgggtcacctctaggtataggtgggctagatccgcgcttaaggcccactcattttaggagtgtaaataaataaattatcttttaaaaaatatatatatttttaataatttttaaaaataccatttatttttatagtaacgatccaaaaaaaaatttttgggggccagacttgaagaaccctattgtttttattttataattatagaatattaagaaagggtaatatagacccttgactatttttattatatttttttattaaaatatatatatatttttataatagagtgtatgggaattatattgattttggtatataatcatcattacattacattgtaatggattacaaaagtttaaaaggaaaagcaaataacataatggacctattcattaccattacggtaaactaaatgtcacctaagtattgggtcacatataatttaatatagaaataattacataagttactattttttgtaaaataattacatttttactttcaaagaatatttttttacattttttacggttttctaaaaaata

SEQ ID NO: 150320 - DNA, 609 bp, Cannabis sativa
ttatgaccaaaatacgattcccgagttctggaggctgcccaaaatggtaaaccggttgaccagaaccggttgaccgatttatcaggggcaaaaatatgatttttcaagtttacgcactcatggaaatgctactgaagcttgtccaaatcaccccaaacttcatagggcacatatataccatatatactaccatacttacgtaatagaatctaaaatcaagcctgtaattagcaaacgcccctagtgttcggacctaagttataaaaagttccaaactcaatttctaacccaaaatcacctcaattttagctagaagacatcagaactagtctcatgagtacacgagaacaatcctaaaaggccagaaccttcataactattctaattcgcaaaacccatatgcgaaaccaattgttttacacttaaaacgaaattaaatcttaccttaagctttcccgctaggaggattttctatcctgctactaccggagcttagatcgctaggttttggattgaaaatcgaaaaaaaaaatgaatataagagaagagagagtttattgacgaaggaggagggttttgttttcgttcttttgtttataaatgtataac

SEQ ID NO: 150321 - DNA, 822 bp, Cannabis sativa
  modified_base (26)..(29): a, c, t, g, unknown or other
  modified_base (636)..(638): a, c, t, g, unknown or other
aaaacatgcaaatcaagctaggaggnnnntctacatcaagactactcaaaatccaatggtataaatttactttagtctcgttaaagtgatttgcataacacactaggttttatgaattcaaattttggcccatcactaacttgtgcaacaagttttcttacacgatagttcaatttttttttattggatttctaaatcacatttcatttaactaagagaacaaagttagaatttctgaaatcggataatcgagtaagaagttatgcgcattttagtcccaaaaaatggcatttttttgcctctgttcatcaatccagaattccggtgcacggctgactttgtctcgggaagcgtgctaacggctataaacggctacttttctcttaaacactatataaactcgatttttcactcaaaaattaagttggctgagcatttatgtcaaataactgacctatctaagtgagattatgagcttccaagtttaaaatccaacaaacttttcacacactttgagcccaaatttgtgtttattcatcttgagtgtgtttgcttttcactctaggtttctattgtattatcatatttctagagtgattttgcttgtattttcaaacacattttcatattgtgatnnnggtgaggttggcaccggtattgtaaacaacccggttatagtaagattggcacttcaacaatccgagaaagaggtcaatagtcctcaggggtgcgaaactattgtaaaaggtttggaaacaccttagtgaaaaattctcggttataagggttagtcaagcccgttaacttggctcgatattggaa

SEQ ID NO: 150322 - DNA, 537 bp, Cannabis sativa
  modified_base (90)..(90): a, c, t, g, unknown or other
ggcataaaatcccaacaacctcccccttgcactaacatcaaacaagtagtgcatttcaataaaacaattgtcttgatatccagatcaagngtagtgtatttgactaaacccaaattacgaaactgtaagtctatagtaaactactgctttctccacaactacttcctttttgttcagaaaacattatgcaacattattttctatatgcattactcatttagggatactgaattcttttattgcttataaagtgcatttgattatacagaagacatatctctaattctatccaaaatggaatagagataacatagtaagaactttcttcaggttaataactttccagtgttttcaaaaaaacaacaaagttatttatctttactgatggagcttaaattatcatagatgggtttttacatccttcgagaataattccttaacccccactgtaaccaccgtctctaataggttatgagttggtgtaaatataaggattctaatatatacccctatgatctaactgttgggttttgtgcc

SEQ ID NO: 150323 - DNA, 557 bp, Cannabis sativa
ccaaacccaaaccctaaaaccccataccctaaaacccaaacaccaaaccccagacttaaagcctcataccccaaatactaggttcgagatcctaaactctagaccctagtcataaaaacccaaaccctaaacctcaaacccaaaaaacccaaaagctagagactctaaacacaaaaccccaaacctgagaaccgtaaatcccaaacataaaaacccaaaacctcaaactcaaaacctcgaactcaaacccaaaccccaaacacctaatgtaaaacaacttaaccgctaacccctaaacctaaaaccccaaacgacaaaacccaaatcctaaacccaaaaccctcaaaccttaaatttaaaaccccaaattgcaaacccccaaaccccaaaccctgaccccaatagaaaagttattgacaacggtcttggcttcgtccctatgaaatttgacaatttttcagatgtctggggtgagattttgaaagaacactaacgactgttagaggaaggaaaaaacttgttgaaatttatcctaaacaaaagaatatttcaatttt

SEQ ID NO: 150324 - DNA, 548 bp, Cannabis sativa
aagttcaggcatgatttagtacatatcaaagttcgagtggcatgatttggtagatttcaaagtttggggagcatggtttagtacataaacaattattgaaacagcaaaattgattgaaattaggcaaaagtccttaaatctaacaatctcaatagttcaggagaaatttttaacgaccaaaaaagttcaaagggcatgattttgtacatgtcaaaattcggggagggaaggggggaatcctaattagccaaaaataaatattaaagagtgtccaacattattatgcatgtgttacataggactattattaatataattaagtattagattatatatattttaatttaataattattataaaaaatttgcgtatagtgtcgaacactattaatacttaataaaatgataaaacaatatcataataatgctaacaaatattatgcaataaactttaaagggataattgcggcaaaagtccccaaaaacttagagttgatgcagattaatccccaacctcgaaaattggcggtaatagtccctaaggtcac

SEQ ID NO: 150325 - DNA, 1113 bp, Cannabis sativa
ccttggcttgatgtagtttctaattgttaacgcagattttcgttaacgataataaagcctatttagtgattgatttgcacagaaataatagaaaataaaaataaccagaataatgcaaagatcacaccaagtttttacgtggttttgtagttaaaattctacatagtccacgagtttaacttattagatttctctgatacaaaactagggtttttctctgaaggattttttgtccatttttcagtacactctgcccctatttaaggtaacatagggaggcagttaattacaattaaattcatatcccacaacaatatctccctgaaattatgggatttaattacatctcacgtaaactaaatgcggttattatttgaaaatcacacatctgtgatttatccacttttaacggatcaatgctgacgtggatttaatcacgctgcaaggtgtatctcgtaggggcatctcgttgggatagaaacaataaccctgataatgagttggagctttccccatgtctttctgaggttgataatgtaaatcttgtcatttctgcgattgaagacataacgctccatctgacaattgcagttcttggtgacaagctaaacttcaacagtcaacatcatttgaatgtcagcttctttctgagagagataactcgtcagggcagtggatctcattgaaagatgtctggagttgattagcgaaggtaccataagtatgccttcctatagcgagatggatgtctcgctattcgttgtccatattcatccaactgttatatttagctggtataatgtataatatacgctaattgttctaacaaccaacatgtctcatcgacacctctttatatgcagtgaggttgatgcctcgctatgcattattgatgtcatctccttatgattgtgtctttagataagaaatggtttctcgtcaatatgtgaattaatagtttgtacatccttatctcgcttaataccttacagtcagcgagttatagatatactatatcaattctgcatttaatgagttattccattttaatatttttatataattgtcattatatttgttaattcatattctccaagattgacacgtgtcctc

SEQ ID NO: 150326 - DNA, 782 bp, Cannabis sativa
aatgagaataaagaaccaaacacacaaagacaaaaaatagtacacgaaaatattacggtagcagaataagagccaactgaagtatttatgattaacgaaacgaatatcgcagtagagcaagaaacaccaaataatgcatcaacagaattaatgagcaatgagctcgagagcataactgccaatcttgataacttgttagaagatccaaatttactggcagatttagattaaatatttcagaagtaataaaaacgctcatacgcataataaatttcatatttccattaacaaccacacaacctgtcatttatcgaaaatattaaatcaaaatcgcaaaccatatataagttagtatggagattcagacgctccaaacaattgatgaagcactgccacataatctgaggtttttatcacaacctgaattttcaatttgaacatttttctttaagtggtgaaatgtttgatgaacttgaagaactaataatataaaattgcatttattaattttcttaagacattgtaattatctttaattaagacaatgtaatgtaatgatggtgttcaaatttataatacataatatatatatatatatattaattgtttctttttgtttgagaattattaaagtcttaatatatatagcatatcacagccacaatctaattggagaaaatgcagaagaattatattgtaatatgaattggatgtaacacatacataattttgtacttaaatattgtatatgtattatgtatgtatacacacaacacatgatc

SEQ ID NO: 150327 - DNA, 757 bp, Cannabis sativa
ataatacaatatcatatataatatcattgcgccacctagtcaggtgagcccgtgccacaacttggcactaatatatcgcatcgtctaatcagacaagctcgtacatatgcgtgatacttatcatatggcactgatgcctgttatcatgcctgatacgtcgccaggaagaaacccagcaatggtttcaatctatgccataaccaggaaatttcatatcaccgacgcccgtacctacgtccgatacgtagccagtactattacatcaccaaattaggtgagcctgtacctacgctcagtactcatcatgtgtcactgatgcccgtacctacgcccggttcatcgccaggtatatcgcatcacctaatcaggtaagcccatatattatgtccatagtatcattacattaccattgtctaatcagacaatcgataattttagaacctattatgccatgtggtacattatccttttcttacctcaagttccggttcaggtatgttggccgacctgctcagagaacgatctatgatcccgggtcctatgtcataacaataataaaccaataagtgtttatcccaaaatactacttaacactcgcgtaagacaatttaggattttctatcaaatctcgcgatataaatacacgaaaataaaacttatattttggctctaaaacgtacatcataccatagagctcgttgcaagctttgaaacggtatatagaacgttctaaatagacacccgagtgaaaaattat

SEQ ID NO: 150328 - DNA, 937 bp, Cannabis sativa
tgggtaattgtccgatcaggttaattccctaaatggcaaaggtccatggactttgcacctgagtcaactcattaggtggagctccaggtatatttgaaaatctctggcatttgtcacatttcttaacataggcttttgaatcttcaattattgttggcaagaagtaaccttgccttagaattttcttagataagctttgccctgtagcatgatttccacaaaatccatcgtgcacttaagataggagtcgtgcagcttcttcttgagtaacacatctaagaaatggcattgagaatcctcttctgtgcataattcactctactatgatgtaccgtgtagctttccttctcatttttcgagcttcattccgattatctgggagtttcccagagttgaggtaggctactattagtgtcatcaagtttggggaagtatcaatcattttgatttcttctgtgccagtgatgctaggctcttcaaggaactcgataggaaccaagttcgccttgtcacttacattgttgcttgccaatcgagctaacgcatctgcagttgtgttttcttccctaattaacatggcacttacggcatgttttgtgacaactaagtttattccaagttcttctccgtccagaggttttgagagtatgggaggtgttgcaagttgtgcctttagctcttggaaagctttttcacattcctccgtccactcgaactgcttgtttcctcgcaggatattgaagaatgggacacacttatctattgattttgaaacaaacctgctgagtgcggcgatctgaccagtcaaactttgcactttcttggttttagttagcgactttatatccaggagggcttgaatcttctctagattggcttcaattcctcgggcatggacgatgaagcccagaaactttcctgagctgactccgaagga

SEQ ID NO: 150329 - DNA, 505 bp, Cannabis sativa
caaccaccatctctagtttttcttttattcaacaccttagcgctaggaaactaatcattgcaaagtttccagatgaaatgtttaatttattgaaaatttgcaagaccttttaaaaaattaggatgtacattgtcatataaaataattaagattaaaattatctgaatatcgaaaatacgaaaagagtgtttggtacacttaattttagaaaatagaatataaaatttccctaaattaattatagtgttgttttattattatcttttattatctgcatttaatttctcataattttttgagttgtatatttatttattttttttataagtttattttttagctttaattataaatttaatagaatgagaatatatttttttatctaagtaataattatttaccaatagtattattatagtagaaaagcaatcacataataaatttattttatgttgttaaataaaattaaatatgttttatgtatttattataaatagattatttt

SEQ ID NO: 150330 - DNA, 902 bp, Cannabis sativa
attagtaaagtaaactaggatcagatgtatcaactatacatcagactggaccgatattaacagtagaaaacatatcataaacttaccattgtatcttttctaagttattacacttagttgatcatagatcatttgatctcaatcctaagatggttaagctctagcttaaatgtattgcacgagttctttgacttgttccttaccagtttacatgcggaactagtcccatacttacatcttggaaactcagtagtgcaattgagtggggattaatcatagatatagaatctatagcttctataactatttagaaatgaaacgatgatttctttggagcttgacttaacgtgataaatgatagagcactcattttggtaattatattagtttcctaaaatatcattttcaagtagctaagtgttttgtggataaaatacattgaagggtaaaacgataatttttcccttactcaatgtaaaccatctatagaggatcaatgattgttgtgattgaaacaatggataattcatagtatatctatatttggtatatagagcattctatgtaatcaagagtacaattctgaatctatagtggagtcaggatgaattaataagataggaaatttactcgataaattttggatctacttattatgagtggtctccatattgtctgggataatatcatcttttagactcaactagttggtttaataactcaattagaattcaaaaatagattatatcttatttgagaattttcaccaagtttggacaattttgagaaaaaaacgagaaatataggtttatttgttaattagtacactttgtgggtctaattaatagtgttgtttatttcagtccttaataaaaccaattaagtaaaaggaatgatgacat

SEQ ID NO: 150331 - DNA, 541 bp, Cannabis sativa
gtttgaaaaaatagtcaaaaactgcaccacccgcatcgcgaacacccctagctgccgacattggaaaagtcatcgaaattggtattatcctcagaaaaatcactgaaaaaattaccaagaaaccggattcttgatgaaggaaccaatttcttggtgatttttccggcgacaataccaattccgatgactttttcggagtttgctgtcggtgtcggaaaagtcgacagagtagctgtcggtgtcggaaaaattgtcggagttgctgacggcatcgaaaaagtcatttgaattggcattgtcgctggaaaaattaccgaaaaaatcatcaagaaactgaattggcatttgaattcgtaatttttctaagaaaccagtttcttagtaattttttcggtgtgctaattccgatgacttttctagcgccagcagcaactccggtgacttttctgacacctgcagctactctgacgattttcccagcgccagtaacaaacttcggtaattttttcgataccaataacaaataaaattgcctaaataa

SEQ ID NO: 150332 - DNA, 533 bp, Cannabis sativa
atggggatatgatagggatcgaccctaatattatctgccatcatttaaatgttgatccaaactacccagcgaagagacagaaaaggaggcccttagatttcaagaggcaagtggcactaaaataggaagttgacaagttgtagtcaatgactttatatgcgaggtgttttatcccttgtggataaccaatcctgttctcgtcccgaagcctaacgaaacttggagaacttgtattgatttctttgttctgaataaggcgtgcccaaaagactgttttccacttcccaggattgaccagttagttgatgcaactgctcgacacgagcttatgtcatttattgatattgatgcaatgcatacatatttatattttggatataaccagataaaaatgtatgtcccatatcaagaacatacaaccttcgtaaccaacatgggacgctagtgttttaaagtcatgccatccacaatgaagaatgttggggaaacatatcagcgattggtaaacgaactgtttgcaaaccaaataaggc

SEQ ID NO: 150333 - DNA, 568 bp, Cannabis sativa
gtgctacttgatcttatgtgtcattgagagattttaatcaacttgataaacctagtgatattttcaagacggggtttggaaccctgttgcctaatggggaattaattattttaaggatgtggttagatcagcgttaattagaattaaagatagagaattgagcgctgatcttgtggagttacctttggccgagtttgatattatactcagaatggactttttgtccaaatattctgctagcatggattgtaacagaaaatggtaacttttcaaccggagaatgaggaaccatttgtctttgttggttcggttcaaggttctcgtgttccaagaatttcagcattgaaagctaggggtttgttatgcagtggatgtgtagggttcctggtagttatggtggattctagtaaacctgaattacttggatttgaagaagttaagtggttaaggaatttctggacgtgtttccagaggaattacctgggttaccacctcagcgggagatagattttaatattgatcaaattcctagagcagagcttgtttcaaaagcaccttatcgaatggc

SEQ ID NO: 150334 - DNA, 707 bp, Cannabis sativa
tcttatctatcaatatttcccaaagattacgaatttcgtgatgttgatagaaaacaactaattttgatatggatggcggaaggtcttttacagcctcaagaaggaagaacaattcaaaatgttggagaagactacttgaatgctttaatatcgagatcattttttcaaagaaacacaagaaatgattctttttctatgcacgatcttattcatgatcttgttgtgtatgtatctggtcagagttttttattgtatgatcgctacacaaaagacttgcacgagctaagtagcaagactcatcatctatgttactattatttattcaatacaaaagaaattgactttactaaagtgaagaatttgcgcagcctgatttcattaccatttagttcaatttcaccttcatgtcttgaaacatttgtgcaagaagttgtgttaaggaatggaggactaagagttctttcttttgttggagagcatattgattcgattagaaatttaaagcatttgaggtacttggatgcatcgagtagagaagtgaaagagttacctgcttctatttgtgggttgcacaatttggaaacactgttgttgagtgagtgcagaatgctcacccagttgcctgattcgattggaaatttaaaatatctcaggtacttagatgtatcttacacaaaagtcaaagagttacctgattctgtgtgtct

SEQ ID NO: 150335 - DNA, 709 bp, Cannabis sativa
  modified_base (521)..(526): a, c, t, g, unknown or other
gatttatgatttagggttttctatgttaaagcacttttagaaatatgtttagatctgtgatttatatatttcttaagtattttataaatcctaacaccaacctcaatccatgttattcgtcactgcccgctatcgattaatagatttgcaaagaaaaaagaaagagagaaaaagtttgtgaaatagagaaatctgagacccccatgtcgttgttgtcatcatcgtcgccaaacctgtgttttgcccatcaccacagttgccgaagatgcaaaagaaatagatagtgcggttaaatattattatatatatattgtgaaatttagtttggcagatgtgacaatggttgtgattgactgtgttggcgataatggtggtatgagtggtggtgcggtggttaattgtgtggtggagagttttgatatttgttatcagtagagagagaggaagaatagggtgactaattttagggtattttactaggagaggaaaagaaaaaaggaaaaaaagaaaaaagaaaaaannnnnnagaaaaaagaaaaaagaaagaaagaggaagaaaaaaaaatatatttttaattttttttataattttttaataattgataatacggggactattaaaaatttattacgggtgcgtttggaagtaactgtgtaattactaagtagggtaattactagggtggtaattacacggtgtagtaattac

SEQ ID NO: 150336 - DNA, 1089 bp, Cannabis sativa
  modified_base (1033)..(1037): a, c, t, g, unknown or other
gggtttcctacgaatgttctacagcaaagccaaaagtgcattcgaaatgtaaacatgcaaaaataagcataagggaaatcgagaacttactcaaggatcagatatctaggttcaagcaacgtcaatccaatgagtagctccaatgaaggcacttcagcagacttgaagccaaaaacctctcttttcactctgagctcacttaccaaagaaaggtggtgaaaataagtttatgtgccatgctctttggtatttataggcaagtaacaaaaaaggggtaatcattttaaagaaacctcagacgcctcggttccaccgtaaaagcgaatatgggaaatcaaaaataatcaagtgcagccgtcaaccgtggtgagagaaaattgaatatcgaaatattaattgtcagagtattaattagccaaaaatcgaagggacacccagtcagcctcacatcgagtctcggacagacgcgcccaacacgtgtccccatccaaaggcagaagcagctcggataaagtctacatgcaacttcggaagtcccataaagacttggggggcaaatgttatcccaattttttcattctgacgtggcatcacaagatggttacacgtggaatcaacttcaagtatctactcagagaacatagcccgagcaggatgcctcgctggatacttgaaacaaaccgatcagcgatccgcgtagaagaatcaacacttagcaaattcagctttcgcattatgagtcatcaacgaaattccaataacttggggatcagactacagggatatggcatacacacgatcccacgatcagtgtattctgcgtcaatcccacgatctttgtactcagcattaatcccacgatcttttctgtttatatccattgtaacaagaagggaaacacttcctctccaagtttacaaccctataaatagtgatacatgttcactgggcaaagggtcgcaaaaagttcagtcaagaccttaccctaaatatattatataagaattcttattcagagatactgttgtaagannnnnaagaaaaggaacctttctccttgttcttgagtcaatacaaataatgaggatt

SEQ ID NO: 150337 - DNA, 766 bp, Cannabis sativa
tttgtctattcgctcttgttgtttttcaggtggttccttgtacactggctctctctgaagactcgcgttctctggaatcaacttgtgttcccacagctttgaagttgtgcacaataatcgccagtcgcgatcttgtacgggaaggctcccgagaacttcagcagtctctatgcgagtcgcgtcaagtgtaggtcgagctggtctatctgcgataataaaaagagcgagtcagcctaaaatcacaaaataaatcaaaaattgactaagtaaagaaatacgcgacatactaggtcgacgattaaagttagtcctaatccctggaaccttaaatacataaaaccatttcgatttccaatctcccatgttgaaaaccatgccttccactccattaatctcagaagtggcccacttgctgaaacagtagaagccattgtggagacctacactctttatgtcgtagaagtagctgaactcctccgtcgaaggtgccctgtgcacatattccatatacatcgcataaaagcctaaggctatgcgacaactattgggagtcaactgaaaagcggacacgtcatactgcttgagaatagcagcaatgaaggggtgaaaagggatcgataccccacatcgaagaatgggtattgagactacatcctctgtaggtatgaccgcagggttggtaaaagagaggtgcgctctctgagtaggccgaggacgtaaggaggcaagtcgcagaaggtttaacctcgtgaaagtggtaagatct

SEQ ID NO: 150338 - DNA, 898 bp, Cannabis sativa
  modified_base (95)..(99): a, c, t, g, unknown or other
ccaatgtaaggttttcttaaactcctatgtgtttatttcattgttttagaattcatattagaatgttaataaaatatacttggtagtaaatctannnnntggtaaaatatttccaacagtctccaccaataattgcaacaatgaccaacacgtcagaatgtgggtaatggacccatctcgcatcactttccatgaaggtgatgtcgtcgcactccctcttgaacagcttctacggtcgttcgctcaggttgttcacattggtgagtggcttttctttggcttctcttgcatatcgctcctacaacttcctggaatcacctgcaatatggggtccgcctatgatggtcaggatgttgtgagaagttctcgaaccactcgcattctgattttcttctttatcatccgcttggggatgactttcctcattcttcttgtatttgctgaactttcctctcttgatcagctcttcaatcttgtcctgcaaaaacaaacactccaaagtagtgtgaccaatatctttgtggtacatacaaaattttttagggtctctcttgtcgcggtttcccctgaattggggaggcttcttcaagaccccattcttttcttcaatagtgtagatatggtctcgaggtactgccaactcggtatagttcacaaagcgcggaccacctttcctttttggggaagactccttctttggaggggacttggctaattttggacttcgctgtctctgtggactgcgttttctttggcttcgtcctctgaaattctttcctctaggactgcgggatcgtgatcacggcactggtgatttacgcttacctttgcccttctctaactcagccagagaattctcaatcctcttatgcggctctgccatggcaaagaactcgac

SEQ ID NO: 150339 - DNA, 1292 bp, Cannabis sativa
taaacctggcttcgcccttgatggtgatgatatttgtacacaagctttatgtgctttttgaatattggtgaagtgtagtatagtgtaggtggttgtggtgatagtacttggctaataaagacaaaaacaattatttgagttggagggcagggcagggcagggagggaaggggtccaaaattgcaatcttatttgatatcaaacagtaatatatatgttcaagtttcctttacctttctctttttatattccttttttgaacaaatttcagtgtagctgtctttctggttcaaattattagcaaaaatgcttctcagatagatgaaatttctatccgaaactgatgtgttcgttttgattttatacgtaattatacatcattataattaataataattaaacatgaacatgtgtagtggacagaatagcacttctcatggcttctacctcttcagctgtagttgaggactgctccttataggatacgaacgtcatgtgtggaagacaaatgacctctcttagatttagtagttgaaaagagctctaatattaatgtaagttgtctgcgagagagcaaaaaagttgttattttgattcgtaatgatctgaatactaagaacatactcacttcacccaagtcgttgatctaaaattaggtgctgaacgattttttttcaaaaatttcttaacattattttcaatgtatcagaatctacgtaagtatcaagaatatcactacttgatttgctcttagtagcttagtagatatacacatggttcatcaatgttctattggaatccataagtcttgaaaatttcatgaaaacttatgattccaagaattaaaaatttccttaagtctataaatagaggtattgaatgtgcaaactttctccttttgtccattcactttgaaatcttttggttaatccatataaatagtttcatctagcattctgtaaaaaaaaagttgtttttatattcatttatcaaatctcataattaagggcagttgttatggataggagtacgcggatgaatttaaacatggtaacatgactaaaagctttctcatatttcacactttctttctaggtataaccatttgctacaagtagagctttgtaaatgtcaacttgtacatcaacacctcgtttaattcttgtagatccacttgcacccaatggcaagtattatgaaaccctggactcccgtcattttttcaccttaaggtaaagaaactaaaatatatatatacaaactacgttctctaacttaatcattagttatatg

SEQ ID NO: 150340 - DNA, 948 bp, Cannabis sativa
tgtggtttttatgttttgaaatacatgactgacatcgtcgcacgtgcaaaccccaaccgttacatacaagatcaaaaagctgtaagttttaattattgattctagtattcattataatacaaatatataatatacatgtatataaactaacctaaatttttacttttttaaacagtttggggataagcggcaatacgatccaaaaactaaattgttaccaatacaacgacagtggatagaacggttgatggcgctgattcacgatgacgattgaggatgaaaggccctaaaatttttcttccctacgttatttttttagattaacttgtagttagatttattaacgtgttaatacttcgcctaattttacaatggttgtgtaatatttaattatttttatgaaatcaaattatgtattttagcaaattttaaaattaatttaaataacatttaatttacctttcaaaaaattaatgtgtaatttaaatttaaattaaataaataatatataatttaaataaattaaatgaaattaaaaaaattgaaaaacgctcatatatggtgtcggttcctacgccatatatggcgtcagtttttaactaataaccgacgccatatatacccctatggcgtcagttattagctaataatcgatgccatagggttatatatggcgttggttgtttataaccctttagcggcgcactgatcagcgtcagtagcgaattttgccaaaaccgacgctgaaagggctgagaaaccacctctaaagggggtttttgtagtagtgagtgtcactaaatagttttagagttactcaatgtgtgtcactaaaactagtttttctagtagtggatgaaagtttagggggcatgatttaatacatatcaaagtttgaggggcatgatttggtagatatcaaagtctggggaacatggtttagtacat

SEQ ID NO: 150341 - DNA, 543 bp, Cannabis sativa
aaaactcaaagtgaatattgatagtaggggtgtacgttggtcggtttttactacatattttctaacccaacgtaaagatcgggttgcaaaattttacatgcaacttgcccaattaaaaaaaaaattaacccgaccgacaagttggtcggtttgttcgggttaacccgtccaaactgacctgtcttttttttttaagattcaagtttaagctcaataatttatcttattacaaattaccacaatactaaattactaatccaacaataaagctaatatcaataacatataacaaataaacaacattagatttagaaaacccaatataccccaaaagcaaattaaagaaagttgcctctctctcccgctgcacgttgttacgccggactgctggaggtgtgagtcgacgttgatggtcggttgtaagaagaagaaaaagaagatgagcttgatgttgatggaaggagaggtggagatgggtctttaaaatttttaggttttatgtttttactttgagtgtgtgactctgagagagagagagagaga

SEQ ID NO: 150342 - DNA, 562 bp, Cannabis sativa
agctactaataagaaaaaaaatgaaaaatgtatctgaggatgaaaaaggtagtgattctagtcgttctgctggatttggtggatcctttaatagtagtcgtggatttactttgcaaactaaaaggaaataagtggttgagaaagttaagaaggaagatgttcgaaatttgaaaaagatgaagtaagttgtataaaatttgcctgaggattatgatagtgaaaatatggaggttgaagttcagaatgatttgaagatatttttatgattttatatattgtttgttatttctttttatttatggtttattaaatatttaagtattttttttaaaatttttttgagtttattgttatatgtataaattattttcatcattcattgtatttttttggtttatatatatattgatcttagtttattatttatttatttatttgtttcttctttcttttgcatgtggtttgtgtgcaacttcccaatgtaatatttatataattaaaaaattatattttttttttcttgataggaattaaaaaattaagaaaaaataagataagagat

SEQ ID NO: 150343 - DNA, 784 bp, Cannabis sativa
ctctctctatcttttcggctttttccttcttcatcttcaacctatcgcctcctcctctctcttctcaaaggtttcatctctggcgcacttccacccgaccccgatgaggcattctaccacaaccgatggacgagattcccaccaccaggatcgcaaattactcttttatttttcatccattatctcaacaaaataataaaaaaaaatcagcagtttaaatccttttttgagcccaagaaatttctaagcaaaactctataaaatccatctttagtcctcttccctaactctttccaacatgaaagtaagaaaaaaaaaatgaagaacacaaactcatctcttcctcccttactagactccaacccaaaaacctaagaacaaacatccagagaaattttctaggttcaaaataacattcagatctgtagtgagagaaggtaatttaaagagagaaagagttaccatctgatcaaaagggttatggtttcataaccccaccatttacagatttgtacctaagaaaatgagaagatgaatacccaaagacaatgaaggtcatgatgtgtagatgaagagagacgtctaactatactggtgttggtttccgtccaccattgatgtcaacgaagagaagggagattggcaaaggaagatgcacaaagaaggaaagagggtcagttcctgcgattgaagagagaggaagaagaaattgaaggagagagaaagggtgaggctgtataattttagggtttcatttaaatttttttagaatttaatgattttt

SEQ ID NO: 150344 - DNA, 1083 bp, Cannabis sativa
ttttttttttttttctctctcttagtgacatttattttataccaagaaaaaaagaaactacaaactattttgaaagaaaaaattatcattattttaacatatgatttatactacatttttaataatgtgtttttatattatttttaactctgtattttacaaaaatagatccagtatttttcacaatagtaaaaataagaccctgagcttaatttttaataactttattttaatataaccaatttgaagacaattcctaacctaatagatacaaaaaaatataaacagtagttttatcataacacctttacatcaaattattatcaaattttattttgacagaaattagttcatgatcctatttgtaccattttaattagaaaatataggatctattttatcatttaacaaaagagagggttcaattaataacttttgcaaagcacaaggtccaaaattgtatttatctaatttttttgtcattgttattttgttgttttggctctcacacatctatttttttattgtttatatttgaatttagtgattaatatttagttaataaaagtaatatttttttagatgttttggtgatttatttagagttgatctatgaatgatttgaatattgcaacaaggttaatattttattaattttctattgctttaaaactgtttttttgttgttttcatattttttaggtattctatagttgtgttatagttgtttttgtgtattttttttattgtagaattattttttagttgtttttgttatgttatggtgtatatttttagtttattcttgataatttttttgttgtatatatgtgtatttattttgttatttttatgttgtgttttagttatttttaagtagttttcaaaatatttttcgttctacaattattttttagtttttatttatttatgtgcatttgttacagtgtatatttttattttattcctaataatttttttgttgtatgcgtgttattttgtagatgtagatacatatatttagtttattgttttgacacgtttttttttttaaaatacaatgataagttttttttttttttt

SEQ ID NO: 150345 - DNA, 795 bp, Cannabis sativa
attgtatgttgcttcttgcttttctaaaaaatcaatgatttcccaaggaaaatgcaaaactctgtggtcgatagtatatatatatatatataggattaggttatatgtttaaaaaaaaatatatataaattcacattttttttttcttacaaaattatatatttatatagatacacgtgtgtttttcaaatagatattagatagtttgtttaatttatttttaaaaaaattatatagatagacttattttttaaaatagatatttttaaattgatttatgaaatataatataataaaaaattaaaagataagtgaattaagatttataaaaaattaaaaattaaaaaaatgagtgaattaagaagagaagtgaaaaataactctagattgattttagagtgtcatgtcaccgtctcaaacttctcctttatatatatatatattgattattacgtaactttaaaaaacattgctcttggaaactaatgcatatgccgagcacttagaataatttgttagctgtaaactttgttggtttttttcgccattgatgcttggttttgtgaactttgataaaagtcacgcttctttcttattattattgttacttatatattttgttattaaattataaagaaaaaagagaagtgcgaattggaatattatgtgtgatcccatgagaatatccaaattgtaatataggaaaaggaatacaataaataattaatgaaaacccaatcgtagatgtacaacagcaaaaacctaatcgtattttttttgaatttaatgggattt

SEQ ID NO: 150346 - DNA, 550 bp, Cannabis sativa
  modified_base (496)..(507): a, c, t, g, unknown or other
aattgtgaaattagggtgattttccatggtggttggcggagagggtttggggtttctctggtttgggggtttctaggttggctgatcgaatgaggaagacgaaagactaggctagggttataaacccttttaacgtcggttatttggaaataaccgacgccatagaagggcacaccctatagcgtcggttatttccaaataactaacgccataagtggcgtaaaatttccttctaaaaaattcaacctatgcgtcggttatttattattatgctgaaaaaagtgcctctaaaggcttgttttgtagtagtgccccaagagtgaataccattccagatttagattttatgtcatcaagacaagcctgaaaatctgtataacctaaaggatttaaagcaccacccttgtagactaacccatagtttctagtcctcttcaagtacttcaaaatatgtttaattgtcgttcaatgttcctgtaaagaccgcttagtttannnnnnnnnnnngcagttaattatgtttaattatgtttaattatgaaaattattt

SEQ ID NO: 150347 - DNA, 1084 bp, Cannabis sativa
  modified_base (1043)..(1059): a, c, t, g, unknown or other
ctacctagccttatacaaagtttcaaagagaaaccacggataaggccacaattatatatgcctccaagggtgtcacaagacccttgtagtggtcaaaggaatgagaaaaatttgttggccgcttggagccttgatcttggccaactagggttttaggtcctagtggctggacagatcccaggaaccagtctagtgtccagctacgaaccctaattctaagcataggacagctagcctaaggatacagtatctacggccaatcagaccccatgaaatcaacctatggccgaccatgcttcaaacaaagcctccttggtcagccagcatctgcatggatcaaaacacgtgttttttcaagaactcaaatatgttcttttgttcttctggactcaaagagccaagaatcaccacaaaggtcatattaagttcttttttgtctagaaatcacacattgtctatcctaaggctatcatgtggataaaaataccaaaaagactacaatctaatgtaagaaccaaagcatgttcaaaaaaataaataatgttcatacatccatggaaaaatcaatcaactcaagtgaatgctgagaataaaaagcttacccactacaagattttgttggagaaaaaggtgggaagcttggatcattgaaacaacataaaaatctcgagaagaatggttattgggagttcaaccacctagagagaaggagaagctttttctagagcatgtttctagtgagagaaagtgaaaagtaaaaaatgagaagtgagaaaagggtttccccccaaaagtcacttatgtagtacatgtgggcccctttttttacttacctcacctacacatcataaaggcaactaaagcagttatttctctactgcaatgagatcagacagtcaagacaaagtgttttaaaagcacatcaaattttattcagtaaaggctataattgttgtgacaacatcaacatagatagtaaagttcctatccatacagacatccgcacagggactggacgacaaatgtgttggaaatattttacnnnnnnnnnnnnnnnnnaccaagtatgttttattaacatcct

SEQ ID NO: 150348 - DNA, 774 bp, Cannabis sativa
cctagtaaaataattccaacactctgagcttatatcagcagattcatgacagaggcgacgaaagttgcacagttaactgacgaagggaaattaaccgcaattatgggggggattgaagtttttagagagctttggaaagacatcaagagagacggactagtttattccatgaatgacttcctcgatcgtgcagatggtttcgtcaagcttgaaaaggccattcagcgagcagaagttgagcttaagcctggtctctcacaagctccctctgctggaacatctgtttagcactcccagtgcccgagcaattcaagctcgggcagtaaaaggtctaatagcaataaccagcaaggtaatgggaaaaagggaaagttccctggcaaagccgaagaggcccttagagaaaatacttccaagttcattgctttctctgtcttgactgaagatttggagaacatttacatggctactcagtcagtagctgcgtacaagaaacctgctcccatgaaaaaggacataagtaagagggacatgtccaaaatttgccactttcatggagattatggccatgacaccaacaaatgcaacaatttgaaggaaattgaattttcaataagaaagaataacccacacgtgcaaaaatatgttaagaccaatcaaatcagagggttgcccagacaaacaataatcaagatttactgccaccactagtagatgggcatttacaagtcattattggaggcccacacttagctggagattcaggcaaagccc

SEQ ID NO: 150349 - DNA, 918 bp, Cannabis sativa
gttcttagacaaattaataaaatagaactcatacacaggtaaaaataatctattaaatattataatcaaatacattaatttactatcgaaaggatagataaatcgtgattcataatatctaatagattttctttaccatattaagcatccttaacaagtaattattatcaataggataattaattacttataaagatcttaatgttattttggaggaagatacaatatttaaataaattaatatttaaatgttcctcattaccaaacaatttccatgcttaatcttatgataggtaagaaaaataaacactaattgttagaaaaataaaatttatgtcacaatactaaaattaataaccaaatatatataaaaaaaaaatcatgaattagtattgtgcatacaaataaatgatagaaaattgaaaatggaacaaaatggtgaaaaagggcccaaaaaataggttgtgcacgcgcccccatgcgcttcctccttttccttttttttggtagcagtgtcgtacgacatgtcattttttgaaaatgacatgttgttttgtgaagaaatgacatgctgaagggtccaaaccacccgtcgtttgcggcaaattaggggctctcttcatgtgctaaacgacgtgttgttttttccaaacgacgtgtagtttcagccaacaaaaaatgacaaaccaaggcgtgaactacttgttgtttggcacgggttatccctgaccttggaaccgggcgcgcgggtcgacgaaccgggtcgacaagacccgaaatcagacccgcctgaaactgacgcatccaaccaccgtttttgtcggattttgtgagggttttcttccatttctaaccctctatcaatttccaacatccatttcatccatttttcacaaaaaaaaaaataaaacattaccc

SEQ ID NO: 150350 - DNA, 697 bp, Cannabis sativa
  modified_base (237)..(255): a, c, t, g, unknown or other
tgattaaggagttgctgcaaatttcggtcaacaattttttttttctcatttgtgtcataaaatgttatttttcttacaaaattaactaatattataatattttgaaagaaaaatatattacattaattttataaagatattatataaaattaattctattttgtattcttacattatatatattttattttgttgctaattatgtgaaaaaaaatatatttttttttataaatattnnnnnnnnnnnnnnnnnnnagtaaccaatctaaaataatcgatcgaatccgcactagtagagttagtcccgcattgctaatgtgtggaaataaattgtggtatataatataaatgagctactcctctcatagtcaattggttttgagatggaacctcattcatcttaccctcaaattctaacatggtatcagagccacttgtgagccatttgtaatccgttgtgagccaaaaatgccttcggtccaaacatatacttctgctgtctcccctttaacctccatttgggacctttcggccaatgtgtgccaatttccagtattggggtctttgatctgtttcaaaatccacaattttcccaatgtgtacacccacgaatttcccgataattgtaggattctttcaaatgtcacgttcggccctgtggtttcttaaaggtccttcgttatacccacactttcca

SEQ ID NO: 150351 - DNA, 626 bp, Cannabis sativa
ttgatatcaccaaaataataataataaaaaaatgtgtgtttttaatttttcttttgctcgaggactagcaaaattttaagtttggggttgtgatatcaccatttcacatttttttaaactaagattggtttagttcttaagtttttaattgtttttgaatttattagctttatgtaattttatatgtttttgtgtgtttttataattactttgttataattttttatgtggtatttattttttaattttattttagttttctaattaattttatgtatttttaggtgtgtttggaagaaaaagattggaattaaattgaagaaatattggagaaattgagccaaaagtgtaatttttaaaagaaaatcagatgaggcccttttgcaaagctcactctcggtcagctctttgacccaatcagagcagtccgcctacagatctaacggctcagacgcgtgcctgaggcacaccccaaacagccgagagtggcactctgcttcctcctgctgcctttcttccacgcgtgtcccactggtccccaactcgccagccccacaacgaagcagctcgcgccacatcgccccatcgaaccagcagccgccacgtgtccgcctgctgaaaagaaa

SEQ ID NO: 150352 - DNA, 1234 bp, Cannabis sativa
  modified_base (181)..(188): a, c, t, g, unknown or other
tttgcatacaacttatgatccctgagtcactgtaataccatttgaagatgatgctcatgctcctcttctaactgagagtatacgaggatgtcattgataagcactatgatgcagttatcgaggaaatccttgaatactctattcataagatccataaaggccgctggagcatttgtcaatnnnnnnnncattaccagaaactcatagtgcccgtatcaagttcgaaatgcagtcttacgtacatcttcttctcaaattttgaggtgatgataaccggatcgcaggtcaatctttgaaaacacagtctttccctaaagttgatcgaacaaataatcaattttgggcaacggatacttgttcttaatcgtcaacttgttcagttgctgataatcaatacacattctaagggaaccatccttctttttcacaaacttaaacatagcttcccaggaggatacactgggtcgaataaaccctaaataaagcatcccttgaagctgtaattttagctccttgagttatactggagccattctatatggttcttttgaaacaggttcaactctaggtgccaagtcaatcacaaaatctttttgtcgttgtggcggtaatcccagtaactccttcagaaatacgtcgagaaattctttaacaattctgactacttcaagcccaaatgttttaggtctactggtgccaatcacaaccgctaaaaatcctacccattcactgtgtagtaaatatctagcccttaaaactgaaataatcgggatccgagacctctgaatcgatccaacataaataaatggatcctcatcctccggctgaaaagttacaattttctacttgcaatcaatgttggctgaatacttggacagaaaatccatcccatgtttaatgtcaaattttgttaattgtagctctactaggtcagcactcaactccctatgttcgatcgtaactgacaatagggttccaaaccctctttcaataaaatcacatggcctacccaaaagatcaattatccatgttgccacatatgagtgtgttgctctcgagtcaaataacacagtataaaaggagttattgacaagaagctaacttgtcaccacagaaagactggctgcagcattagcttgagtgatggcaaacacccgattaagtacgggttttgcctctggcttctactcttctttctttgtctaagggcaatctttcttgaaatgccccacca

SEQ ID NO: 150353 - DNA, 612 bp, Cannabis sativa
cactctttccctacacgacgctcttccgatcttgaattatttgtcttccccaaattattcctttccatatgctagaagctccttgagggcatttagccgtgaggaaagttgtctccgggtagtagcagttttttaacaccttggttaagagagtattcggtttgtgaattagccgccacccttgtttggctagtaaggcttggttgaactccattaggcttcgaaatcctaaacccccctcttctttcggtttacacattttatcccaagtactccaatgtatctttttattttcttttgtgtcaccccaccaaaaattggccgccaaggagtggagattcttgaccaatttttttgggagccggaagcaactcatgaagtagcttgggatagcttggattaccgctttaatgaggatttcttttccggcttgggagaacattgttgctttccaacttttaagtttattccaaactttgtctttgattacctcggacacctctttctttttcctagcaatgaaactaggcagccccaaatattttgtatgatgaggaacaaatgtgactcccaaccgagaggcaagttgttgacccatttgtgtagatatcc

SEQ ID NO: 150354 - DNA, 834 bp, Cannabis sativa
cttagcacttcaactaaaggacttgtggtcctaatagcataaatcacacttggccaaaagttcttgtccttcaaaattgttaaccttagcacttcaactaaagggcttgtgtacctaatagcataaattacacttggccaaaagttcttgtctttcaaaatgctttgtagtgcaagaaatgcagatgcaaatctagtgccagcagggtcttacaatgtctcttttggaaaattttctcatcatgtctaagaccaattgatgattgtaaatatacatgctcaatttttttgctttactcgaagcagttgcatgttgtggcaaccctccaattttttcaagcatcaaatcaatacagtgcaacacatggagtccaatagagatgctttcttttctccatcaataatatacccgctttgtaggcattagcattatcagtaaccgcttgaacaacaagatgctctccaatttcttcaataacgtcatccaacattttaagcaacttttttgcatttttactaaatgtggaggcatcaatacttttcacaaacacagtgcccttaggattgttgaacaagataagtatgtttcgagttctaccgtcggaccatccatcagacattattgaaagtcccattgatgggcatgtctttttaatatcctcaattatagtgtcagtatctcctccttcaatatccaagtcctaagctcatacatactaggaggtttcaattcctaccataatttccaatcgagtgacatatattgataaaggaaggactcttagccaaatgaaaaaggcaaagcattctcaaagaaacacctcccaatgtccat

SEQ ID NO: 150355 - DNA, 644 bp, Cannabis sativa
  modified_base (436)..(438): a, c, t, g, unknown or other
gctagctttaccttctgacaaagagaagtttgtggtttgttgcgatgcatccagacagggtctggggtgtgtattgatgcaagtcgatcgggttatcgccacaatcttgaagtattgatgcaaaggcatcaacgccccatgctgggaatgggcacccaaccaggcgcacatccccctttcagggtttatggcctgattgttgtgggcgggaatgtagcaatccaattcgcccaggtatccgccctggtcgagagtccgaaggcgtgcctcagtaaccctggacggagggtttacccacctggcgcccaaggcaccttgccttctatgaggaactacagcagtaagttcctcactgacgtagtccacgctctcaaccaggacgtctctgtcagcattgactggctccccagcctcattgtactccccgtagtttggnnnttcaacctctgcctcttcctctgcctcgaaggaactgctaggattaacatcgtcctgctcctcgatttgctggacttcagcgtccccttcatgatccacctccacctagacgactggatcctgttcgacgatgggcagagtggcgtgccgagccacttgaggatcagatgcgtcagccacatacgttgttttctttgtacgagcca

SEQ ID NO: 150356 - DNA, 637 bp, Cannabis sativa
  modified_base (30)..(67): a, c, t, g, unknown or other
tgtgtttcatttatcgttttagaaagttcnnnnnnnnnnnnnnnnnnnnnnnnnnnnnnnnnnnnnntaagatcctagtaaaataaattccaacacactcacagttctaaaactcgacattggagtctttgccgatgaaccatacgatgttatccttaataaaatcccgagtcatccaaatccctctggccaccaaggaggcgttttttggagttttgctgctcagaaagttggaatgagagcagtatttctccaggatcacattaacccaaagcgattgatgtttggtagcaagcatccaaccaagtttggcaaggagatagaagtttatatcagaaaagttgcgcaggcctaaactgccactggttttgggcatacatatcttgtcccaactcaaatgagccaaatacctcccaccatttgtagagcctgtccaccagaatttctccattacttgaagccacgatattcattagctgaaggttatatgcacactataaatagaggccaaataaaatgaaaaggatatcggattttagagtagagtaaatacattttgttattttatttttctctcttattagtattttatttatacttattttagtgacaaaaatgagtgtattaaaatagtaat

SEQ ID NO: 150357 - DNA, 751 bp, Cannabis sativa
  modified_base (619)..(620): a, c, t, g, unknown or other
aggtcattttataaaaattaattaaataatttaaaatataaaatatctgaccttaaattcaaaaataagataaaataatcattttttttttaaagaaaaaaaagaatactaactaagagaaaagatagatttttacctattttcaaggtttaaatatcactaaaatcttaaattaattaaaaaataataattaatttaattctgataattagatttgaaatttggaaaataaaaataaaaatacaaaactacacaaaaaattcgaaattaattacatgaaaaagcatgaaaaaattgaaaaaaattgcatttggctcggatggtatgcaatgcataccatccgcgcgcatgcatcaggcgcattggggctgtaatgccgcccaggcatgctgctagcaacatatgcgcgcggatggtatgcaaccccgtgcgtgtttcttcggacattcaatgtccgaacacgcatctgaccgagtgaaactcagtgtccacgtgcgtgtgtggtgcacccgatttctgatttttttttcaaattttcaaaaaattataactaattcaaataaaatcgaagttgagttctgtaaaatgtgaattgctcaattttttccatactatccannaaaaataattccagaacgaaaatccaattattgtatgtaaaattcttgcaaacatcaatcaatcactaataaagacatagatcaacatgaatcacatccaaatcacgcatacatcgttttaaatccatatt

SEQ ID NO: 150358 - DNA, 674 bp, Cannabis sativa
  modified_base (205)..(215): a, c, t, g, unknown or other
atactggtaaaatattcccaacaactggcctcagagccaggttaatgatttactttcatgtaatatagatttaaaatgatgaatgttgtttgtttgttgatttggctttgttcatgttggtttatgtgttatttgatgattgaatgagaattacaaaatttttccatgaaaataatttttgttctgaaaatattttatttggatnnnnnnnnnnnaattaagcaattttggtttttacggatgttgattccgataaaaattaagaaagttatgaaagtttgaaaatcggggttcaatggtgtcgagattgggtgcatacacccaccagcatctcggacaagaccagatgcgcgcgggcaaaggtgacagtccctgtttgaagcacggtttcacgtgtgtgttcagacacgattctgtgtcatgatcctacatccgcctgtgtgggatgctgcgcccgccgagatcgcccgcacatgcaccctccaactctcctcctacgtgcgcagacaggcctgctagcagcctctcgaggcctccacgtgcagccttgctggcagccacaccccgtatgtgatttttgtgagatttgttcacaatttttaatttattcctatttttaaaccccaaaattaaaataaaatattaattgaaatatatttaaatttaaatatcaa

SEQ ID NO: 150359 - DNA, 786 bp, Cannabis sativa
ttccagattcaagtgtgctggccgacctgaacggaaactctcgtgctagatggatgccctaatcacataatgaaactgggtaaatacataatgaaacggggtaaataacacaatcaaaaccctaattcgggaaactcgaacccacaaccctaggttctactatagtctccataagtcacactaattcaagaaacagggaaacacccaactatggcactggaatgcacgagaattgagaaaatgaaacattttgggaccttgcctaaaccggctagccgattttagaggtactggtaaaaccggctagccggtttgcaccagttcaccccaaattttccatttcttgctcaatccttcaccaaatgcaaccaaaccttccagaacacctatacaatgcatatacaacctaatccaaccagtatttcccaaaaaaaattcaatataaacaaatatgccattaaagagcaaagctttaagctcaaagctcaaactttcataaaaccaacacaacaccaccaaatcaactacaagaagcttaaaccaagtcaattgaacctaaaattcaaaccctaaacatttctaaacctaatagccaccaattaataaaatcacatactcaatcaaccataaaattcaaaaactaaaggagggtgttactagggcataccttggcttcaagaaccattgaatctctactgaatttccaggaaaacagctaaagatcagatggtttctccttggtttggtgctgctcgaagagaaagggagaaggagcaagggtttctt

SEQ ID NO: 150360 - DNA, 596 bp, Cannabis sativa
attttcagcttttacaaatactctcacatctcctaagctcatctcaaaccgaactctaaaacactaaatatagtgtaatttcacgctatatttattctaatgggacactaacgctatactcataaatagctttgtctacaccattccactaaatttagtgagacactgtagaccacactatttttttaaaaaaataataattaaataatactttaaaaaaagaaaaactaaataattacatatatttaatattaaaatattcttattatattaataaaacaataaataaataatataaaatttggtgtaatttttagtattgtttgtggttgataattgaaaaaaaaaatattattgaaataatagttttttggtattaatttaacactaaatttgagttttcccattaaaaataccctaagattatatttaatttttaagattaatttgatgtaaaatgttattcaatatagacaagaataatttatagtataaatatttgtttaactttcaattgcaaataaatatttaaatttaatttttaacggtaataatatttttttaaaaaataatttaagtagtttacaatgccaaaa

SEQ ID NO: 150361 - DNA, 697 bp, Cannabis sativa
  modified_base (343)..(349): a, c, t, g, unknown or other
aagtatacaatgcagtaatggaaactatttcatcaaagaaaagcaatgcgttcttcgtggacgggcccgatgggacaggtaaaacatatctatacaaggcgttgcttgcaaacatacgatctaatggtgtcgtgacactcgcaactgcttcattaggtgtggcagcatcttttcttcccggatgttgtataggtcactcacgttttaagcttcccctcgatgccaatggaaaaagcacatgaaagcagcaaaactactttgtgcagcaaaattaattatatgggacgaggctccaatgacccgaaagcagcacatagaagcattagataaaatgctacaagannnnnnngatacaaccttaccatttggcggaaaggtaattatttttggaggagattttcgacaggtgttacctgtggtacaaaaaggaacgagacaggagcagataaattctacctttgtttattcatacctgtggcctacattgactaaatttcgactgattcaaaatatgagagccagactggatccgttgtttttggactacgtgttgttggtgggcaatggcatgccaccaaacacaatcaatgaaaacatcaaaattccaaatgaaatgcttgtaccatatgattatgacattagttctttatatatcttgatagaaaacgttttccacaacattcaccaatatccagaa

SEQ ID NO: 150362 - DNA, 640 bp, Cannabis sativa
aaatatgagagccagactggatccattgttttcggactacgtgttattggtgggcaatggcatgccaccaaacacaatcaatgacaacatcaaaattccaaatgaaatgcttgcaccatatgatgatgacattagttctttatatatcttgatagaaaacgttttccacaacattcaccaatatccagaacatgtgtctaccataatgaaccgtgcaatactaacaccaaagaacaactttgtcgatgaaataaatttgttgttaattggatggttcccaggagaattccacctatactacagtagggatgagacggtagataatacggagcaatcggtaatggaagacttcttaaacactctaactccgaatggacttccccaacatgaattaaaaccccaaaaaaattatcccataatgctgcttaaaaacattaatccttctgaaggtttatgcaatggaacacgtttaatatgtcgggcattcgaccaaaatgtcatagatgctgaaattgtcatgggacacaatatcggaaaaatagtgtttattccaaggataccattcctgccaaatgtggatgaaaatagtggttttccattcaaacgaacacaattcccaatcagattgagttttgcaatg

SEQ ID NO: 150363 - DNA, 1175 bp, Cannabis sativa
  modified_base (149)..(149): a, c, t, g, unknown or other
aattaaatatctaataagataaattatttgaaaataaccaaatagatattttcaatatcattttctagtcttataattaaacaaaattaaaataataaaataaactaattttaaaatagatatagttaggcaattattattttaagaanaaaataataaacaaataataattaccctaattatctgtcaaaatatctcaaattaagcctttttaaaatttctacaaaaatatctacctaattatatgtcaaaatatctcaaactaagccttttgaaaatttctacaaaaatatctagtttatttaaatacttaaaatactatttataaatatctgataagtaaaatgatgtaaaatattattttctaacttataatttataaacaattaaatatttaacagaataacaaatttttgaatttgaaaatactatggttagaatgtctataaaaatatctaggttaatatcaaatttattaattatttaatttatcctataagataattttaatataatattttaaattaaaaggataatgctatcttttaatttaaaatatagccaatattaaaatatctgatcttataattgaataatatataaatattaaagaaattaacaaatttttaaaatctgaccataacttaaaaaataaaataatcaaatttttaaatttaaacctccaaatatcataaattaataataatctattaaaaaattaaatattactaatttacaacattgatatttatgtttaaatatcaaacattatattttattttgatttttacggtttgaaattgggaaaattcgaaatttgtagaaaaaatctacaaaaatcagattttggtgttggctgcccagaaggctgcacgtgcagcccagataggctgcacgcagccctatgcgcgcgcggaggtgggagcctgcagcctccctaactggggaacctcggtcagctatagggtttgggcgcggggtggagtgtttgaaggaggggtgagcgagtgcttctaatagggattttgtcccccatacgcgcgtgcggaagcctccttgttcgagatgctagtgcgagtgagcacccatctcgacaccacatggacctaaaacttcaaaccttcataactttctcgtttttcatcagaattgagttccgtaacaacaaaaattgc

SEQ ID NO: 150364 - DNA, 819 bp, Cannabis sativa
  modified_base (617)..(630): a, c, t, g, unknown or other
  modified_base (764)..(765): a, c, t, g, unknown or other
tatgtaagatgataggggtgtatattagaatccttaatctacaccaactcataacctatttgagatggtggttactctgggggtggtggaatcattctagaaggatgaaaaacacatctatgataatctaagctgtattactgaagctatataacttagtcgcttttcaaaagcactggaaagttattcaactgaagaaagttcttactgtgttatctgtattccatttttggatagaattagagatttgtcttctgtttattaagatgcacttaataaatagtaaagaattcagtatccctagatgagtaatgcatatagaaaaatgatgttacacaatattttatgaacacaaaggaagtaatggtggattaagcagcagcttaccatagacttacagttccactacacttgatctggatatcaggacaattgattgattgaactgcactacttgttttatgttagtgtaagtgggagtttgttgggattttatgccctaaataaaaccaattttcaattctatctaatttgttaatagaagattagaagtaatttatatttacatgtagttttcatgtttgtggtttaatgtgtacaaaatttgttaagtccannnnnnnnnnnnnntcacaattatagtgatgtcaacaccgtggaaggtaattatgattatatgcttcaaaaaataatgtctgttgattcatctgagcacttgatttacactgatgtgatagtcagtgataaagtatacttacaccttnnataagtgctatgttctttccaaaacattgacaaagtaagctagttttggatgta

SEQ ID NO: 150365 - DNA, 583 bp, Cannabis sativa
gatttctcgttattttttagtttttttttttttttttttttcatcttttgctaaataaagtttatttttgtaattttaaaattttaaaagcatatttttgtaattgaaaattttagatcgtaaaattataaacaaaatataaaagaataatatttttaaaaatttccctcaaatgtgtcgtaccgtgccttaaaaaatacaagttgtatcgtactgttctttattcggggcaatctgtttttttgtatgcgttcaaatttatgctctactatcttttcatattttatttttacaataataagataattattaaaacataaaacatgtcctttttataattttaattatttttgcattaaaaaaacttcaattatttctatacaacttttcaacaatattaaaaaattattagaattattaaatttttaatataaactaaatactcaaatcattattatcactataaccaaattataaggtttttaacatggaataattacataagacaccatcttttgtaaaatatttatatttttacgttcgaagaatgttttttttacatttttacggttttccaaaaaat

SEQ ID NO: 150366 - DNA, 563 bp, Cannabis sativa
atatattataaccatgttttacctaggactcgaacccaggacctccaagacacacacacccacctatggccacttgagctagcctcaagtattgttattgttaaatataagtattgggcctttcttttataaaatatcgctaactattcgctaagtactactagtagagatgttaggcacactagtacataatataaatgctcttagtttaataaatataagaaacatctctaaacatttaatacttaatatcaatgctcttaaataagaatagttgtatgtattgaaccgaatggtgctttttcttctttccttttatgtgctgatgtataaaataaaaatccaaggagaaatcatatttgtttttggtactatttgaaattatggaattatttggtaacacttttattttttaattttttaatcacaatatgaaagtaaaatttttatttttaaaattttgtttttaaaaaatgaaaatccgttctgtaactacttttgtttttcaatttaaaaacaaaaaataatagtgtattctgtaaagttcatttttatttttattt

SEQ ID NO: 150367 - DNA, 510 bp, Cannabis sativa
tccaaatactcctactgctgagtcttttgtgtttaggaacactcttcaaagcaccatgtctcctatgaagaattttctactcttgacatgttttgttgaagttccttgctactttttgctggtaggcctgcagctttaggctggcttgttctcttctttcttttacttcgttaagggactattccagtagggtgctatttgtttgtcgatcataggttgttcttctatgagacggtggcaccagctctacaggcaacattgcctcatagccataaactagagcgaatggagtttgtccagtggctgtcttctcggttgtcctatgtgaccatagaacctccgagagcagttcaggctagttgccttttgcttcctcaaggcgcttcttctgggtgtccttgagggttttgttgacagcttccacctacccattttcttgatatggtgttgttgtggttgtgatttttaggattgcaacagatgttctgttgttgttctgttggttgacgc

SEQ ID NO: 150368 - DNA, 501 bp, Cannabis sativa
agccagacagtcagcatgagcgtttttctctttggggattctttctactttatagtccgtgaactcgtggagcagctcccagacttttgctacataggcggccatcttttttccacgcgtttggtattctcccgacacctggtttactactagttgcgaatcgctgtagacttctactctcttggccccttcagtttttgccaatctcaaccctgctatcagggcttcgtattcagcttcgttgttagaagctgagaattcgaaccgtagggctgcctggagtcgaagtccattcggggatatcattgtaacccctgctccggatctgttcttgttggaggcgccatccacaaataccttccacgccgagacttgtggtgtgggtatgtttgccgtagcttcagcttcatggcactccgtgatgaagtctgctaatgcctgcccttttatggaaatgcatggaatgtagtgtaggtcaaattggcttagctccattgccca

SEQ ID NO: 150369 - DNA, 616 bp, Cannabis sativa
  modified_base (34)..(36): a, c, t, g, unknown or other
  modified_base (551)..(559): a, c, t, g, unknown or other
ctgaaatccagacctgaacccaaactcagaccannnctcgaactccgacccaaactcaaacccaaacttgaacacaaaattgcaaatggaaatagaagcgaagtaggagtaggacaaggactaggacctaaaccctaacccgaacccagatcaaaacccagacagggagctaaacccgaaccgagactaggactcaaacccgaacatagaccgggaccaaaaccgacacaataatcaagaccttgacctagattcaggatagggacctggcaaatagagtcaggaccgcgacctaatacccgacagagacccgaacttgaacctaggacctagctcgtgacccggcaccagaaatggaaccagacttggactcgagattgggatctggatctggaccctgggcttggacaaaacccgtagtaggtgtctggatttgggacccagccctggaccagaaccctaacaaggacccgaagccactcccgaacctgaacccattcccaaatcaaaaagtggacctcaacctctaccctgtgacccaaaattggaannnnnnnnngaagttgactgagactggaactaggacttggatttggaatcataactgaaattggac

SEQ ID NO: 150370 - DNA, 767 bp, Cannabis sativa
agggggccattagtagtgggtacgacatactgaactcagccctccctcacatgaataaccctaattgtgaaggcccatttaccttagttgaacaactgtataggttaattacactaatttaacctaataaaattgattagcaaacataattaattttcaaaatatataaaatttatttttcattagattattttaaaattaatttaagaaaaatacacttagtttaatgaaatatattcaagaaaagaaaaactatatctattttatttttttctgtatttaattaaataaagaaattacaactaattaaccttttctagatacttaattatttgaattttcatagaaaatatatttaagttaaaaattgatttttcaaattgcttttggatcaacttaaattagaatattttgaaattaataattaagtagattttttttctaggaaattagttattcagatattctttaaaaattattttaagttgaaattttgttaattttagatcaacttaaatagagatatttttaaattaaggtaattagttcaagatacttaatttgttatttaataaaattttaaaaaattatttaagttgaaaacttagttattttgaacaatttatattagatatttttcaggaatttattttgttatatttttatataatttcaaaattatacattttttatgtatttttttcaaaatttgattttgaaaattaaattaaatttaaaaattaattttaattaattttggacctact

SEQ ID NO: 150371 - DNA, 563 bp, Cannabis sativa
gtcccagactcgaccctgaacatagatggactaagtatgttcctgagatccacctagctcaggagtaaaaaaaaaccttaaaaataaacatattttttttattgatttcaaaaatatcataattttttttacataaaggcctattttttttttctatgacccactaaagtttacggccaggcctagttggccccctggtatttttttttgtctccgcccctgactatgagaacactctaaaaagaaagtgaccactttttatagagttcaaatactcctttgaatatttgaaaattatccaccaactccatgactatcacaaaatattttattggatgtttatgaacacaaataaaagattatatgaccaattagaataagcaataagttacaaaacaactccaaaatagagttgttatgtacctgatgacgacacatcatctgatgcacactataggcgcttttgtagattctgagaaaaggggagaagttgcaagctactttaaatatttaattcttcaacgagtgcaaccattttttttttctagaaaatccttcaactt

SEQ ID NO: 150372 - DNA, 849 bp, Cannabis sativa
ccggagtcttagaaggaaaacttgtgatcttttaacaacacttcttagtcgctcagcattgccatggtgccttatgggagactttaataatgtccttaatcaatccgaaaaagtgggaggacaaccttatccggtgtggcttattgaagggtttcaagaggcacttcggttatgtggtttgagagacatggagttgcatggtcatccttttacttgggaaagagtagggattctcctaattggattgaagctagattggatagggctttggtgaacaatgattggttgagcatatttccgatggccaagcttactaatctagaaatttctccttcggatcaatctctgttgcttatggagctttgcatgggttcggctctcacacatgaataccggttcaagtttgaaaattggtggacgactcaccatgggtgtgaagagattgtccgaagatgttgggatagaatgggaagtcacggcattgaggaaaaaattgaggagtgtggctgagagcttcatagttggggtaaagaagtctttgggagctttgcctctcgaatcaaaagttgcaatcaggagttgaaaaggtataaaagtaggcgggatgatgaagggaagcaacttttttatagtgctaaaaaggagctctttgcggtgcttaatcagagggaaaccttttggaaacaaagatctaaacaactctggttgaaaaaaggagaccaaaatagtaatttctttcattctaaaactagtaccaggaaacgcaacaatcagattttttgtttgaaagatgatgatggaattctgcgccaatgggatagtggattagataatgtcattgttgatttc

SEQ ID NO: 150373 - DNA, 704 bp, Cannabis sativa
aagattgggaggttcctgatcgtggatctgacgaagatggagatgccgaagggagggagtctgattcggttgacaacacgcaattaaatgagccgttctcctgcgaagacttagtcttgcaggtcaccaaatctgacttgaccactttttcgaggttaaatctattgcgtctcggcaccatacgtcctcgtcctacccaaagaccacaccttccttttaccaactctgtgatcataccctcagaagacgtcgtagtctctatccccattctccgatgcagagtgtcagtccccttccatccattcatctccgctatcctcaagcagtatgatgtgtcccctttccaattaacccctaatcgctatcacatagccttaggcttttacgcgatgtatatggagtatgtgcacagggcacccttgatggaagagtttagctatttctatgacataaataatgtaggtctccacaatggcttctattgcttcagcaagtgggccacttgtgagatcaacggggtggaaggcatggtttccaacatgggagattggaaatccaaatggttttatgtgtttaaggttccagggattaggactgactttaatcgtcggcctagtacgtcgcgtgtttctttacttagtcaattttttgagttatcttgtgactttaagctaactcgccctttttattgttgcagatagacc

SEQ ID NO: 150374 - DNA, 598 bp, Cannabis sativa
atcttggctttaatgattatgagttattttaacaattggtatcaagagccaaagttattgattttagggctcaaattttttcccataaacccattttcaaaatctaaaatgtatgatgttttttcggattaataagtttaatggtgaatggatatgtgttttatcctcctaaatgtattcatatattttttttattgagatatatatatgagctttaacaatggaaagccattttggatttatcattttatgatgtattattttgtattttttgagtaaatgggtattaaaaaatgatagaggattaaaaatgggacaaaacgcctcaaacgacgtcgaatttggtggccggatgtgggagatatggccggatcacgaaccgggtcacgccgatccggatttcagacccacggatccgactgagcaattttgggtgacagggacgactgaaaaacgacatgtcgtttgcctctgtcgggcaaaatgacatgtcgttcgcccttttgattcagcccccacggagaaaaacgacgggtcattttctgacccatttggctatcgttcaggaaaaacgacatgtcgtttccttaaaacgaca

SEQ ID NO: 150375 - DNA, 528 bp, Cannabis sativa
cccgaatcctgagtcaagatctggttcactgtcacgagtctcggtctggttatggttcaggtcccatgtcccatttctgagtttgggcttaggatcgagactgcggtgcatttctatgtcccgaccctggttctgtgtcgctagtctggttcaatttttgggtctgagttcatgttcgggttcgggtaccgagttcaggtttgggttgggttccgggtccggctcccaattcgggtctaggtcggatttcgagtccctgtcatgttccggttacggttccagatgtaggtccatcatttcgatctcagtctgggtcttggttcgtatgcggatccctatctaggtcaaagtctatgtttgggatccggtcccagatttaggtccacgtccgggtctcagtttcggtctgggtacatgaccgtgtcctagactgagttccagtctaattttgggtctgaggctaggtctgtgctcggttctaggtttgggtccgggttttggtcacggtcctagtcttgttctagggtc

SEQ ID NO: 150376 - DNA, 562 bp, Cannabis sativa
acgaagtaagattatgatcttactggggagaattattgagaatttatctaatgaaataaaatattttcgggcccagcaattgtggaaatttagcgatgtggttagtaatggcacgacattaatggaagaattaatttgggaatattccggactaggttagaaatattggaatgtcggtttaatggaattaggaaaaattaccaaaatgtccctaagttattttggagattatttaaaaaaagaaaagaagaaaagaaactttttctttcctatttaagttacttgtgagttaagtaacttcactttttcaagctcttcgttctcctcttccttcgagcagctgcaaccagccattagggggactttttttcttcagcaatcttctatttcagagctaaacttaatccccaaggcaacctatcttgaggtaagttcctccttatgttttgttggtgaaatcctaggttctaatgctaggtttgtataattcttataagttttcagggctgtagacttagttaaggtttgagtgtgatattctagttgaattaagtctaattgt

SEQ ID NO: 150377 - DNA, 543 bp, Cannabis sativa
tcagaattggcattgtcgctggaaaaattaccggaaaaatcaccaagaaactggtttctcgatgaagaaaccagtttattggtgatttttccagcggcaatgctaattccgatgatttattcggcgccggcagcaactccgacaaatttcccggtgtcgacaactactcaggtgactttttcggtgccgacaacaaactccggcgacttttccagcaccgttgatcgctgtagtttcatttgttttattttttaaaaaaaaatatgaagggaattttaatattttttatggtaattcaatcccgcacatattaagtttttattttaaatatcatattttttctattaagtttcctccattaaaaataatttctcgtgataagaaatttacacaaagatcaagtgcatgtttagcatcataattaaaaaactgttttttgcttttaaaaacagaaaattgtttttttttttaaaacaattaggcttgtttggccttgttttttataaacagttttcagaaaacaaagttacaaaaaacaagaat

SEQ ID NO: 150378 - DNA, 529 bp, Cannabis sativa
aagaagggctttgcttaagcttgaggaaaatgaaggaaggatagaagattagctctctctctctctctctctttcgattctcttgggcagcagctggggatgtagtttgtgagtttgaatcaagagatattagtagtaattgaaagttttgttcaaggtaactcttcatactttctctcttttgaggttcttgtagtttaggttaggtttttggtgtgaatttagattctaggttgctatgtgatttgaaatattttaatttggtgttctggtaatggtttgaggttgtttaagcttatttgaagggatctataggttgatttgaggtttgagcaaagttagagtttatgaactcaaacttagctctctaatggtgatttgagaatttgtgtggattgttgtgttctgttgcttgggtttgcttcattactgtgtttacaggtattctggaagttatggaaaagtttgggcttgatttgaattaaagggatcgaatttttgtcccctgctcagaaccggtcgaccggtt

SEQ ID NO: 150379 - DNA, 635 bp, Cannabis sativa
agggcataaaacccaacagccataccattcagacagaaaaagagggaaataccaaccttgcaatacgatttagagagagaaatagatggatgtaagtttttaagggttgggggtcttcatttcgtggttagactagaccatcggaggccgagttttttccatcttcttcttggcagctggaacaacgagagagatgaagaaagaggctctgcaattttttttgaagggagggaggcgctgcaatttttttttgaagggatggaggcactgtaatttttgtttgaaaggagagggaggcgctgagtttggttggaaaggagggaggcgctgagtttggttggaaaggagggaggcgctgagtttggttggaaagaagaaggaggcgctgttagaaaggagagaggagaagttttagggttttgttagtttggtagggttaaataataggagagagaaaaaatatatttggtttaattaattaattaattaactttttttaaaaaaataaaaaaccaatatatgcttttttttaggtgtttcagcgtcattttatgcgtgagtgggaaagtcttcccacacgcgcattgggtgacgctatagataattaattttatttttaataaaaaataaaaaaa

SEQ ID NO: 150380 - DNA, 747 bp, Cannabis sativa
  modified_base (69)..(70): a, c, t, g, unknown or other
  modified_base (136)..(136): a, c, t, g, unknown or other
ctcttcttgctgtatttttgaagtgttgtctggccattcaatagggtcttcaagaacccttagcaattnntgttgagccaatagggatctaatctttctcctcaaaatccagtaatcaccagatccatcaaaacantcaatgtcaactttgatattgctcatgttagaaaaatcaaaattaaattgagttgagtttattgaaattgaatgactatcaatttgtggaatttccacagcttttccactgcccacaactccttgttgtggttctccttcttcttccagcctttgtcactttcttgatccttttttgagttgaattaagctcgaaccaaagctctgataccactgtaggaattttcttggtgaaattccaattaaccaaatgtatcaaacaacaaagaaacctgtaatttctttcctgcacgacagatcgtttgtacaaaacgatttgtcattctgctttgaacaaaaccaagagaaattagagctaaccctagctcatttctcacttcgaaccttcgagagttctcggactctctctctttctctctgccttctctctggttctcaaaccctagaactagagattctcctcgatttattgatcgatcttacccagaaaacaatcccagaaacatcaaaaaacacatacacacaaagatcaaaccaaacacagtaggttagaaagaaaacaaacaccaaaaattatagaggttcgccctaaatcaggggtacatcctcttt

SEQ ID NO: 150381 - DNA, 901 bp, Cannabis sativa
aatttttggatagtttgagcctttcaagcctaccatacaatgaatatccgtagtgaacccttttgagctaaacctattttatttcttcacctgttgaaccaaaaatgttttcacactgttttctatcctcatttgattttgaatgataccataagtttgggagaatgaagaatggtgtggtgtaagtgttaaagaaaagaagaaaaaaactgcgtgattgagaaaggtttgaaacaaaaagtttaacctggcaccacttgtaaattttagaatagtaattcctctcgaaaaaaaaagaaaacaaataagggagagatcaaaagctaaaagtgaaaaataagttatgtccgaaaattgttaaaaagtatcaatcattgttagttgtgggaatactttgggagaatttaattggtaaaaagtttgcgggttctagtgtacatatggtatttttagccaaaatattcttcatctaccgagtatcagaaccattaatttctagcctgaaaagtccttttgatttcaaaaaaatgttgttaacattagtagaggaaggtaagcatgcaagcatattagccattggagtgtggattggttagaatgagtaaaatagttatgatattgtttcgatactgaagttaatttacatcaatacattgtttttcaaagttagcatcctaattaatagttagagtttttggaatcgaaattctagtttaattaattgaatgaaatttcacaggtgacagcagtagcttaattttcaaaggcttagttaattgtgtgttagtttgagtttttgagtcttactcagggccggccctgggcataggcgggctaggcctgtgcctagggcccacctagtccaggggcccaaaaaaaaatttttgcccttttaaaatta

SEQ ID NO: 150382 - DNA, 602 bp, Cannabis sativa
aacccttttgaaatcatcctatttcatcgtatccacatcctttgtttgctccaccaccgctcaccagatacgagcatctttcctcagcatgtatgatacacacttcactcggtcattcccatcgaccctcatcatctgcaaaatgctttctatgcgactcatctactcttcagccaccactgggtgtatgcgtccctcaaactcaggtgggtgttgttttcgaaatctctctgctaacatctcatgtctagcttctgtagcaggatataccaccacaactggtgggtctctattttctggctctggcggccttatttgaactgacaactccaattgatgtctcagttgacaaagttcttcattttgccttcgaatggttccttctagtgtggaaaggcgctcttcccatccttatggtgcttgaggtggttcattgatccctccataatcttggcctgtatatcggtcatggccttggccccgacctcgacctcaacctcgaccttgacccaatttgactgaccttctaggaggcatttctaaactcctgaaccacacagaccaaaacacatcaagaaagatcattttgatcatcaatttta

SEQ ID NO: 150383 - DNA, 610 bp, Cannabis sativa
aaaaaaaggcattaaagtactacaaactagcacaacacaactctgttttttactctccctgcttgagcagtctctccttttttatcttctttttcgaaatcgatcttggtttggtctttcttggagggagattcttcacagcatatttgtatagcatgaagtttttaacaaaaaagatcactaatagtccagcaatgatcagaaaaactactaattttgagttgtacttcacttcaaatttagcatcttttataaaagtatcctataaataattcattaacaaataattattatttcttattgatcaaacgtaaaccagtaacaaaatcttgaacattatttgtcaagaatttacaaatatttgttgcttgagagtagtttaacaaaattttgactaatccttactttaagcattctctcttcaaagatttaccattgataaatttatggtgtagagttattttttatgcttttaaactaaaagtattgtgagaagaataatgaaaatgtatttgtttgcttaattttagttagttttagtttcattttctatttagtaagctaacttttaagtcttgtaaaaatcgatattgttaggtgtgtttttcta

SEQ ID NO: 150384 - DNA, 542 bp, Cannabis sativa
aagtatgacaaaagtgtgagggttgctgccagaacctctgattgtttttttgcagcccatatatttgatttgtacaataagttttgtgtaaatggtgaggatattaattctgttcttcgagatactaaggcagctgcatgtattgccgagtttggtttgttgtgtggtaaaccatggttcgttttagatttcatgctatttcagtaaatgtaattgctttggcacattggattttatgcatctttgacatcaagatgagatgtcttaaggtgtgcaattctttgtggcatggaaagtttaaggacagtcgtagttttgtgaatgcatttgctgttatttttcccattttattgtctatgtggatttctatggtcggaggtcggatattgacaagagcactcagtattttcagggagtgaaggataccgatcctttgaatttttttttttttatgataaattgcctcaacaagatcagtggtaactatattgtatactttattattttttttattaactttttagtttacgatggttctgact

SEQ ID NO: 150385 - DNA, 632 bp, Cannabis sativa
  modified_base (123)..(127): a, c, t, g, unknown or other
gtcattgatttttttggttctaataaaacattgtcttatgactaaaaatatttgtgaataaaaattagtcgcaaaatctagctattagggactaagttgatttggtcacaaaaaatctagtcnnnnnaaacttattttcttgtagtgattgtattatgctttaatggatagtgaatattttggtagtaggttgatggtctagtattgaaatttctgagaagttggtaactgattttaatattaatattatgttggtattagttttggtaatgagttaatgatcaagtttttgagcttataagaaacatttaaaatttatataagttttagtaattgtatagttgaattttttattaagaaaattattttaattatatggaagaaattgtttgatcaatttattgtcttaacaaaattatattactatttattttagcttttgtagattttttttttttttgtttttttaaataaatttttatagttacagtgtttgtgtaaataactggttattttatatgatataaaaaaaaaaaaagatcacaattttatagttttttatggcattttttttttatctataataatttttcccatatttttatgtttttcttgaaaaaatgccatatgta

SEQ ID NO: 150386 - DNA, 683 bp, Cannabis sativa
  modified_base (444)..(450): a, c, t, g, unknown or other
ccacgtctgagtgcaaaatttgggataacactattattttttttttattatttttggtttcttttcattttttttcctttctcccttattttttcttcctttttgggttccatttttttttttcaatttttgtcttctaccattgaaatatgtatatatatatatacacaatttaatttgaagtacacacaatgagagggtagagattcataggggtgttcatccgatctaattcgtactattttgctcatagtgcattcgatccgcactaagtgcgaatttcatattttggatccaatccaatccacgcaatagcttaaatccaattcaatccaattcgcaaaagtacggattggatcggttattttaaactggttactttttaatattaaattatttaatatttatgaaaaaaaataattttttacataactagcaacaaannnnnnnaaattattgttattttatatcttcgacaataaattaaaataaataaaataacaaataaaaaattcaaaggaagaaaaaaaatggatattggcggctaaaccacctgaaccttacagtttgtaacaattaaccccaaaaatcgaaattttggcggcaaaactacctaaactcccattctgttttgctctatacaactccgtccaaaaatcacagttaagtgtcacggtggactg

SEQ ID NO: 150387 - DNA, 850 bp, Cannabis sativa
tggtcggtttgatggtcggtttcggtttttcggtttttatgaacacccctaattctcacttttatagtagttatagattatagtaattatctgctaaaagatattaatggtgtttattatttttttatatgttcatattattattggtctaattaagtatctgatctcacatattttaatataatagtttttaatgagtatcgctaattaattgtaaagcgacatgtctagaaggtattaagtaccactggtatctaataacaacactctaattagctaggattgtttagtgttccaactagttttgtaaatttcaaattttctaaattattagatatcatgttaaataattgcgacatctatgaaaaataattaaaataaaaactcttttaaatatttcaaaacacttatttaaaaatgtgtactatatacttttccaacattatttatttttattcataaaaataatacaatgaaattaactataaatgaattcgtcatgcctaccgagtcatgtaagcaacaaactaagattacaaaagttgctctcggtaatcttctaactgcacaagtgtattggagaaagtacatgagatctcgtgtatgataaaatgtatgaagtttactcgtgcgacacggaaacaattaataacctacgattcactatactaaaccaacaaacacgaaacacaatcaagaaacaataaatcaagagatcacagaattcaagtaatgaattgagcaataaaattgttgaccgaagttttcggcaaccaatataataataatatttacgaaagctataaggaattaatgagagagatttttacgtggttgggacattaatgag

SEQ ID NO: 150388 - DNA, 519 bp, Cannabis sativa
  modified_base (26)..(34): a, c, t, g, unknown or other
agttttaatatcttaaatattcatcnnnnnnnnngtaggttctgtgaatacatgtactgcagtcagatgggtggtaaacttttatattgctaaatgatgttgtgattattttatactgttttgaattgtgttttgttgttattaataggtttgaattttttttagaaatgtttaattatagccttgctgccgaaatttcggtagaattaagataatatttgattttttttcctcttaaacttggttgttaggattttatcggaagtgactttatcagaagtcaagtacataatttttagcataaggtatgctttctttaacatacttttataagaatatttttatatatatatttagataactcttaaatacttagagtaattttagaataatattgatgtaagacataggatggatatagtaggctaaaaaaaagaaatacaaaaaatggtctaatgagatttgaacttgtgaccaaaaagataaattgataagtctttaccaatataccaaaacaca

SEQ ID NO: 150389 - DNA, 1522 bp, Cannabis sativa
agggcacaaaacccaacacgatcaggctcacctgaaaaacgcggcttatcagcggcgaacctcaagatacttcaactccaaggtcaaggaaagagtcatgcgagtaggagacttggtccttggaagagtaatgccaaacacgaagaacctagcgcatggggtcttccgggacaattgggaaggaccatatcttatcgcaaaaaagtttggtgacgcaacgtactgactcgcagaactcgatggtactacaattcgaagggcctggaatggcgagagcttaaaagtttattatcaatagtactcgcattgtatagtttatactcgctatgtatttatacttagtcattttttataaaaaatcctaagtatggggagtatataccactatgtactattgattagtaaagttatgaaagttatgaaatttctcaagtttctgaacttttttaccttaatacttattacaccaagctgtagttaaagtcgcaatcaagatattataaatagcgaaaaacgcgagaacccgtgtactgcgaaaatgtcatagataaaaatccccgagaggatgtaaagtcattcaaaagaaacataaacaaaaatttgtttgagtacacatcgcgagtacccttgtaccgcatatatatataaaaaaattgtaacataagtaaatattaaagaaagaagttaagcattgggagcagcaggggcagatccatctgcgactttgctgatagcttcgttctcgacttccttgatgtccgcagcattagcctcctcgggaaacagatttcctccactgccttgagtctgcgtaggagacatggctcgaaaggcctcagccatctcagcagcttctgccccaagaattgagaagtcgaagtccggaatttcggaaagggtggtgtaaatgtaattagattctgcctggtcatactgcttcttcccattctccttctcgacctccaagtcacgagacatctcctcaaccttcgtctgagagttcttggcttcgagctcgacttgctccttagacttgcaaaggtcttcgagctccttgtccttgtcagtcgcatcctgttttagttgctttatgctctcctgaagctggacattttgcctcttcagcaattcaacttctttagaaccagcagcgatggctttcatgaacatggtcatcgattgcgaagccaactccacagagcgtggaacaagctctcggaaggaatcctctccaccttagacatgaactcctcgcccacgaacttctcctgcatagtcagaaagtcgagggttcggacagttggctcgatcacgtccttttgtcttgcgtgcccttagttggcctcttggaggtatccgcgacaagggtgaccaccatgtcgcttttcttcttttaaggaacgataggagaagtcgccgctattccaaattttggcttgcggttgaggaccggtgcggacttcagaaaagtcatctctgcgaggacaaataaagataagtataaataaatttcaaggcacta

SEQ ID NO: 150390 - DNA, 1080 bp, Cannabis sativa
  modified_base (570)..(576): a, c, t, g, unknown or other
cattttgtacaataagagttcaactacaatattaatttgagacacaaattaaagtatggaatgcacagaatttaaatggtggtacaatatgccatgaatgaataaatgaatatcctaaagagcaatgaaatctatatttagtaaagtttcttaatggggtagagaacattcattaagcataagtttttcaccaatgaatactcattaggcaacatggagaaacataaggatataaaaccaaattcattgctaagaagttcattttaaactaagaatcaataacaaaggaggtttacattctcacttgtctttataaaagattctattatagtaacattggcatttgttgctcgttttaattcattaatcaattcccaaatagtgaactagaggtaggggtggcaatttgtgttcacgggtcgagttcgtatcgtgtcgagacccatgtataacaggtacatgctcgacccgaacacgacccgtttaataatcgtgtcaaaaaataaaatttgaacacgacccgtttataaacgggttgacacgacacgacccatgtaacccgtttataannnnnnnttgtttaaacatgtcaatcaataacatgtttatgaagtatttaatacgtttataacccatttatgacatgttaaagtactaaaataactttaaataggtcattaacgagtcaattttgtattagtcgtgtcgccctaacacgacacgtttattaaacgggttagacaagtaaccctaacacgacccaaacccaattaaggcaaacccaaacccgctaactctcgtgcgagtttcgagtcgtgttattgtgtctaacccgttttgccagccctaactagaggagaaggtatacagaaaaccataaaaattttcctttgataatggtgaacatatgcaagctttaaaagcctacctatagattaaaacaaatttcttacaattggtatttcattatgtcatcttttctttatatttgaaaagagcattatggaattaattatataccagaaggtcagtgtgagtaatatttattttatatgtagacaatatgttacttgcaaatga

SEQ ID NO: 150391 - DNA, 658 bp, Cannabis sativa
aaaaaaattgtttttgttttttttttaggacaggaccaccatcgcgaattctgatatttgtagtagtgttatgactaactaaatttttttatgaaattaaaatgggaattaaaaataaaaaagcttttttaattaataaatatattactgagtaacaaagtaatacttaaaaaagttatatttattatgagctaaaatttggctcatactatcttttgtgctaaatttagcacaacttttaacatgcactaaatttagcacacattttacacaattattagagcttacttttatcaaaatattctaaaaataataatacactacaatctattaaaaataaactttattttaattgaatgtttaaaaatatgtcaactaaaacattaaatattactgaagtatataaaaactataaggtaaatctacatctataaaggggtgttttggtaaattttctatctctttcggcatatagtagagttttaagtcaacatatttttcatgatcgtgtatgttacagttatatataggactatttgtaaatttttaaattttttgtgtaatttacaatgccaaatttctttttaaatatgagattattgtacaatacataaaaacaacaaaaaaaaaaaaattacaaaaatacggttgtacggaa

SEQ ID NO: 150392 - DNA, 1210 bp, Cannabis sativa
aaagccctcaacctcatggttgatcaacaactgacttaccctttcctgcacattagagcacccgtgagccaaggcttagcaagacagaataataatacaatatgataattataataataattacacttcatacagtattccactgcatataaactgtgccactgcactttatattacattattccatatataataatgtcactataattaatttctatatagtataaacttacgtgctacgctcatacgtctatgaacgcctatatagtaagacccacgtattatgctcacacgtctattagcgtctatatagcataggcccacatgttacgctcacacgcctattttacatttaaggccttactagggtttgtctcagttaaaattaccgagtctaacctagttatgccttacccgcataactacataatccatacattatactcttacattagtttatccagatgatatttatcaggtctaacccagttgtatcttatacacataactcttaccatatataaatacatacaataccttcaatatacactccaatatatgaagttttagggtaataatcctaacttgcataactaatcatttactcctgtaatatatcatagcacgctcaagacaaaacatatttagggtaataacccgaattcaccatacatatttatttagattagtaaccctaattcacaacaacatatttacttagggtagtaaccctaatccacaaaataaatacttaggataatgacccttatccacaaaataaatacttagggtaatgatcctaattccacactttcatctaattaatcacattgtatattattgcacattattgcattcacattcacatatattctaggataataaccctagaccacattatactaaacttaggataataaccctaatctcgatttctcgcataatatataaacaacgtacatgagcgtcactgcactattctctacgtgctagtttactgtcttgcttggtaatccaagtacgtggagattctaaatctcaggtgttcctgaggaagcgtcggtaatcctagtcacacattctcgagattttacacaaatagggttaatcctaaattcactttcacatatacacataatttgaattccatttatatattaatagatagagtttgaaatgagctttccaacgatataaagaacgtccaaaa

SEQ ID NO: 150393 - DNA, 1126 bp, Cannabis sativa
attcggagttgatttatgaataattttcatattttaacaaagttgatgtcttgttatttttctattgattgtaattattttatagttatttttcttgttgtttttatgtattttttaccgttgttgtttagtttatgtgtatttttatggtgtatattgttagtttattccacataatttttttgttgaatatatgtgaatttattttgatatttttattttatttttaagtaattttcagaatattttttttgtcaacagttattttattattcatgtgtattttttatggtgtatgtttttgatttcttcctgataatttttcttggttgtatgtgtgttattttgtagtttagatacacatatttagtttattttttgacacattttattaaaatacaataatgagattttttatttttttaattgacacaatgtgcagtagttgatattgatatattaattatatattactcattatattatataccctattttgaaatcataagattttattatttctattattaatgtaattatttatatttaacttttaaaaaataaattattattttaaatatcactaactcaaaaaaaaaaaattgaaagtatgaagttgtaacaataaatttcaggaaaaaaaaatagtagtacaaatagataaatcaatctgtcaaaattaagtaaataaaattgtaatacaaaaatatattgaggagttaatattgttttgcatattgaaattatgtcaatttttgttatttttatgttgttttgtagttattttttgtcctttcatattatttgttaagttgttcatctagagttgtttttttagatgttttaattatttttttattttactgaaaaatagtaattttataattttaaaagtttaacacattatttttgaaaacttagtacaagaaaaaatgaaaaaaaaaatgtgactgtaaatatgacaaaaaaaaagattcccttaatttttacaatgtctcaaaatggagttttagccaccaattactaaatttcttgggagatgttgaaaaatactctttttttatacattaatcaaatttactcttaaataaaatttaattcaaatatacttctttttatgagtatt

SEQ ID NO: 150394 - DNA, 544 bp, Cannabis sativa
tttttacgttctgcgacaccattttgaggtgcagtatcaacacaagaagtttcatgaagcatgccattagaggtcatgtaagatcgaaattgagcacatgtgtactctttgggattatcacttcttaaagtatgaacaggtacattaaattgattttgaatctcagcacaaaaagcatagaatataaaaaacaactcagaacgatttttcattaaatataaccaagttacacgagaataatcatccacaaaagtaactaaatacctaaatccaagttgagaaaaataggagaaggaccccatacatcagaatgaactaactcaaaaggaacactatcacgtttattgactcgaggactcgaactaacaggatgatgtttggcaaactgacatgactcacaatctaatgaagatagcttactatattggggataaagtttcttgagcgaaggaagggatggatgacccaaatgacaatgagcctcaaaagttgaagcaacactcgaacaagcaatagagggtggtggaagtgggtcaagaacata

SEQ ID NO: 150395 - DNA, 553 bp, Cannabis sativa
ttagatggattagtatttatttttatatagatttgatgtattttctccaagtgtgtaggtttgtgctgaaaaagacatttcgcgatggaataagatctttgagcccatttttgacaatgattttatcattttctcgaagagcttatgaaatctaaaatgatagacctcgttcccagctttccaaaatatgttaaatcatctcatttggagtcctgacgcacaagttatgcatgatttagtgagcaaggttgaagtagaaaatttttgtactgggcgctatagtgtcggggggctgcgctatagtgctcggctggaaaaaatgattttttatgaaaattttagcacaagttcgggattttttctcttgggcgttataacgcgaggtataggcgctataacgccgtacgtatcatttttttaaaaaattcctaattctaagaggattgatctatctttgttggcctatataaagaaggatctaaatcaaattaaaggagagacgactagagagatagaaacaagcaactttgagattagaaaatacattgaagag

SEQ ID NO: 150396 - DNA, 730 bp, Cannabis sativa
  modified_base (489)..(491): a, c, t, g, unknown or other
agataagaaccataccatcaacaactccctggtcagcaccgccctgtacatcatcaacctcaagagcgtaggcttgaatggatgacattgcttttgcatttccctttccttaactaggatggattgtacttgcaccagaccctccaccttgattgtaccctttttgactcccactataggagcaggagtttggaaaccttgtaaaccctgaaccttgtggcctaaattgatgttgatattgagactactggcccgattagggtgtaaaaccgtaggatgaagactgagactggttattcctgggctgtccatgaaaaggagtagactctacatagctccctatgggtcctccgtgagatacttgaaatctttattattgttgtgggcaatctttcttcttatgaccttgttaaccacaactgaaacacccgtacggtccactacgagtctttccatatgagccactactagtgctacccccactaaatnnntgtccttgggaccactgtccttgattcttcttagtcaactttcagtcatttccttttcctctgcttgtgttcttcctctcattcccttctacatgagcctcaattggcaaggctactgtcacacactaagtcaggttgttaaaggtcaaaggggcttttggaccacgtatcacaggccttaaatgacgcatgaactgttcaatcaccaagggttggtcaacaacaccaggatatgcata

SEQ ID NO: 150397 - DNA, 1595 bp, Cannabis sativa
tctctctctctctctcttcacaaactcacgaaccaagcgacccatctcatctccgtcgacccatcacgaaccaggaaccaacaaaaccagtaaaacccaaacccatctctgtcgacccatctccaccacgaaaccaacaaacacaagaaccggcgaaccaaacccacgaaccaggcgaaccaggcaaacccaaaccgaggtttgttgctctcaaattcgacccaaacctaagcacgaaccaccgtcgccaccaccaccaagttcagtcaaaggtaaggtttttttttttaaaaaaaaatatatttttcatagatttggatgtcaattattacatgttgttgagattagtagaatttttgtaaattttgtgctctttcttgtgataggttgtagatgttggatatgtttcaatggtgtctgtgttttttacagtggtatcgatgaaatatcgataggatatcgatttatttggatgtctgtttgtttgtttaaacaatgtcatcgatgctatatagataggttatcgatataatgtcgaccaaacatgaaagtagtttgacaattagaattgtctgtattgttaatgtatatcgataggatgtcttatgtgtgtcgataggatgtcgacacactaaattagttgattaagtttattttttgacctaagatgtcgacaatttatcgacgatatgtcgatatgttgtcgacattgtgatgtagttgctttctgtgatagttaagtttgataatgtcgacctcatgtcgacatgatgtcgacattgtgtcgacaattttgatttgctagtagatctgatccattttgttggaatatcgacagcatgtcgacaatgttatttttattgcttcctgtaattgttgagtgtgataatatcgaccgaatgtcaacgcgatgtcgacaatgtgtcgacaattttgtcttgctgaataggtgtgatgatattattggaatatcgataggttgtcgacaggatgtcaatattttgtcgacaaaattatgtaattgtttactgtttgataatgtcgacagaatatcgacatgatgtcgaccattttataattttttgacagtaatattgctttgttatttatttttttagatgactcctagactcataattccaacatctgagcattttactggtcgcgtgacatatagaggcaccagaacttttgcaaaaattaagtctcggtttgaggagtacaatttgaataacacggggaaagaaagccgtttcggtaacttttggaatgtcgtacccctgacattctcctcggtgttatttcaccaactcatgttgcacaagatgaaggttgatgttcaggaggagttgaaaatgcggttttacattggtcggaaagagctcagattcagagtggttgagtttgccctcattacaggcctggacttatcctcggcgccaacaaaagaggagaaggctcagcaggtttctcgctcagggtcagaccgattgatcaacaaatatttcaaccggtctgatagtgtgaagatagaagcactccaagataggttcacaaattgtcagaacccaaaagatttgtacaagcttggcttg

SEQ ID NO: 150398 - DNA, 581 bp, Cannabis sativa
gcgttggtggtacgcccagtagttgtctgtcccgcggctgcagtttgaccagtggtggccgtgccgtcgttccccggacgtgggggttgttctccattgtttccggcgaggatgctcgctgatggaacttggtgggcactttccatctcttcgtgaggtcaatcttgagatcttcgggttaacaccattttttccagtgaaaaacttaaagatcttgagttcaactctcaatgaaagcaccaaaatgttgactggatttttagccaactaacgcggagtcgtaattaatgagatttaaaccaaaattacaataataaatgcagttaataacaccagaatttgcaataaatgtaaataaaagacaccaaaatttaaagaggtttggccccggatgtcggtaatagcctactccccttgagttttattaatctaagttgcaaaagtaaaaaacaagctcttgatttcaaagaatgagaagtgtttatattttcaatgtgtttcaaattgcagatccctctcccaggtcatgggtgaccccttatatagggaaggggggtcggtgcttctcgcttcaggagatg

SEQ ID NO: 150399 - DNA, 575 bp, Cannabis sativa
  modified_base (97)..(100): a, c, t, g, unknown or other
tgataacatgaaccaaatgacacattaaataagtaatgaaaatacttctgtttctttattgatatttaaattgtagagattacattgaaatagagtnnnntttagggcataaagcccaacacaagggtatcactagtttccatcacttagttccaaaacatgttgtttcgggtacccttaatttcataaactagcgctaccacagcagcagctaacactttattttagaacctttgcatctttgcttttttaatccatttgttgattctcaccaaggaaaccgaggtggttccccaatgcaccctaaatcattacacattttttttaatcaacacaaagttcttttgaaatattaaatctgagtttctctctataatttagtaagaaaaatttgagattttgtgagaaaatatatgtgtttgaataatttttggattttccactttgtaaacaccaggtgtgtaaagaccgcctatgattaatactttgtattattaaatatttaaggtttatgtattaataattatgaaatgcatattttagaaatatacttcatatatcatatatgtttttat

SEQ ID NO: 150400 - DNA, 867 bp, Cannabis sativa
ttctaattctttctaacagatcagtccctgtactaaccattttagaagctagttgaggggctatcaaaactatgtgcaaacctgcccaagacctcttctacttagtgcatctgccagaacattggctttctcgatgtgatatagaatctcacaattgtagtctttaacaagctctagccaccttctttgcctcatatttaagactttctgggtgaaaaagtatttgagactcgtatgatcagtataaatctcgcacttttcaccataaagatagtgtcgccatatctttagagtgaaaaccaaagcagcaagctctaaattatgagttgggtagcgctgctcataatccttcagttgacgagaggcataggctatgaatctgtcagcttgcatcataacacatcccacaccttgtctggataaatcggataaatcgcaataaacaatgtaaacaatgaacttctcttgatctgatggcaaagctaacacatgagctgttatcaaacgttgtttcaactccagaaagcttgcttcacatttgtctgaccacacgaatcgctgatttttgttagttaactccttcagtggcatagagattttagagaatccctcgacgaaacgtcgataataccctgctaaactgagaaaacatcaaatttctgtcactgatttcagcctcggccaattcttcactaactctatcttactaggatcaaccataatcccattgtccccgacaatatgtcctagaaaagacacctttaacaactagaatttacactttttgaactttgcatacagcttgtaatccctaagtcgctgcaataccattcgaagatgattctcgtgctcctcttctgactgaga

SEQ ID NO: 150401 - DNA, 541 bp, Cannabis sativa
  modified_base (61)..(61): a, c, t, g, unknown or other
  modified_base (236)..(247): a, c, t, g, unknown or other
  modified_base (309)..(318): a, c, t, g, unknown or other
  modified_base (486)..(495): a, c, t, g, unknown or other
tataaaattatacttaaggaagatctggaaaaataaaaataaattattttccatccttagnattaattttccaataaatattacgaaaataattcaatttgagtttttcaaaaattaattaaaaaatttcaactcaaatttaattttctagaaatatataatgcaaaattcaaaaaataatgtatttaaaataaatacaattttcgaaaatactataaaataaaataaaataaatnnnnnnnnnnnnttctaatttatgttgatccaaaataatttaaaaaaaaaataattttcaacacaaatataatnnnnnnnnnnaattaaatattaagaaaattatcaaatatttaagtactatgataaaaataaacttaaatattaattttttatttcattaaatatcacttggaaaatacttcaagcaaacatataataattatctagtttttcattgactaatgaatttattttctaattataatatannnnnnnnnntttattttaattaatcatttaaatgaaaaatataatgatttaagtt

SEQ ID NO: 150402 - DNA, 589 bp, Cannabis sativa
  modified_base (204)..(217): a, c, t, g, unknown or other
  modified_base (294)..(294): a, c, t, g, unknown or other
  modified_base (462)..(464): a, c, t, g, unknown or other
tatattgaacctatgttgttttctgtttttaatgttgtagcattaatttcaaatcttcattgttggtctaacttagcttgttatttttaatggaacaaatcttaaagaattgtcatatagacaaacataatagtgttagatctcgacaaataattatttgtaaatgcaacatctagttggacatccaaagatgacaacttagannnnnnnnnnnnnnatgaaacaatgaagagatttataaaataaaagtaactttgactctcgcctaccgggacatcattggattcttatttnaatcgaaattatcctttattaattttctcttagctttttcatttagaatttgcttaaatagtatatcattggacgaatggtttatatatcatctgcttatgatgttattatattttcttctatgaaattgaatggcgcagatcactatattcccgacattctatcccnnnatgatataaatcctcgatctttgaatctcttacttgtgtatgcttagttatagcaacttaaacttagagttagattagtagtggttgtccaagctagaatcattactcattgtatatttggtata

SEQ ID NO: 150403 - DNA, 621 bp, Cannabis sativa
aatataatacaatacaatacaatcgatctaatacagcgttccaaatgagccctaagtgttctccaaactaattatgtattaaaacatgcataataattcaaatttccatttataatcgcagagaaacatatatataatgaaaaacttaatcgcattaatgctacaattgaggcagaccaatctctttcagaagccttttcatcgggcatcaatttttcgacagctatgaagcttgttagatttaattttattttaagttttctttttgttccaatggtctattttaagttttctttttgttttatttaggcttaataaattttaatagtgtttttgttgaatcacttgttgaatcagtgagccatgtacatagcattaagattgagattttttttctaatatttgaatcattgtcccctactgtttattttttgatgagtgattcagttaaaaaaagtttatagtttattgttttgattaaattatttatatatatatttatgttacttaaataagatctaaatgtatatatataatttataatttaaattgataattatattcattcaaattcttaatataaagctgtattaaatcaaattaaatattatttttttagaa

SEQ ID NO: 150404 - DNA, 824 bp, Cannabis sativa
acaatatctacaaaagaataattaagttattttcatgttagtgtgaagtttcttttgtgtttttttcgcaacatcttatttcaacttgaaaataatatgtaatatcaagttattttcatgttgctgtaaaaagtttgttatgaattgttcatacactacactagttgttcaacaattaaaagaatataattttacatgtttgaacaaaaacttatctttatctcttacatcctgacatgaaaaataataggagaacacattatgttgattttgaatcaagtgggggtattgataggaagagattgtagatatgaagaaaaattacttatatctagtagtaacattgtttgttgttttgcagttattttaaagttgtaaacgcgttgtttaattttattactttttgaacatgttgctttcacgttgtttgtatgttgaattttagttgtaaagatttgtagattccttaaattatcagttgtttttattattttttacatcgttgttaaatatttgttaacagttttaaaaaactactaacaactattgtatttttttaaaaaaatataattatacaaatacttgatgtataaattgaaaatataataatagatgtgttttaatgtactaaaaaatataaacaacttaaaaaaaattataatgttaatatctcgtacaagatatatataaagttaactagagaaaagttttaaaaaaatataaaaccaaaggtgtcgtttggtaacacttttgtgttctaactttttaatcacaaaatgaaagtaaaatttttgtttttcaaatttttgtttttgaaaaataaa

SEQ ID NO: 150405 - DNA, 615 bp, Cannabis sativa
ggattttctagaaaaaaaaaatggctacactcgttgaagaattaaatatttaaagtagctcgcgacttcttcccttttctcagaatctacaaaagcgcatatattatgcatcagacgatgtgtcgtcatcaggtacataacaactctattttagagttgtttcgtaacttattgcttgttctaattggttgtatgatctatttatttgtgttcataaacatccaataaaatattttgtgatagtcatggagttggtggataattttcaaatattataaggagtatttgaactctataaaagtggacactttctttttagagtgttcccatagtgttgtagagggaatagtttgttgttgggcaaagtcctttgagacttgtttgggccttgagttgtccggcaaaatcctttgagaattgaagcctttacgcatatattatgcttgaaaaaagtcaaccacaacttcacaaaaattttactccaaaatatgtcactaagtagtatttaaagaaataattaacaaactttctgacaaggtgcaaatcttgaatcaaatcaaatacactatatttagaaattatctttataataagattatgtatttcaatatatat

SEQ ID NO: 150406 - DNA, 601 bp, Cannabis sativa
  modified_base (312)..(319): a, c, t, g, unknown or other
gcactgcaaaaaatagtgcgatgcagtagtttttgcgtttggactatcacatatacaacaaattttgagcaacacttgtcaaaaataccataaggattgaaaatataatacacatattggacctaaataaatataaaattgatatttttatgatgtgctgtgtggtgtggtttgaaccgcatatacaacagagtttgagcaacacttgtcaaaataccataaggattgaaaataaatataaaaaaaattacgtttcaataatacaataattagtggactttgggttagacattcacatattggacctaaatnnnnnnnnaaattagtatttttataatgtgcggtgtggtgtggtttttgaaccgcatattgataatgtaaaactgcaaaccgcaccgcgcggtgtaagaaaaattcaaacaacgactgcaccacaaagaatttcaaatcactttttttgttatgcggtgcggacggtttgaacgatttgataaacacccttaattaccagaccatttttgccctttacaacaatatataattacattgatactactaaagtgtaaagtgtaacataagatatatatacatttttgaaaag

SEQ ID NO: 150407 - DNA, 730 bp, Cannabis sativa
tttgtgaactgcttgtctagattggtatttcagagtctctgaggataaggaatcttcacacgatgatcaatactgactggtggagactgtagtggtggtgcagggctttcagtagccttcttttctgttgatgttggatttggtgttgattgatctttaatctcttttgaatcatctcaggcccatcatatttcttaccactcctcagagtaattgccttgcagttttctttaggattaacttcagttgtattaggcaaatttccctgaggacgggttgctacctgagttgctaattgccccatttgagtttctaaatctttaatggaagatccagtttcagtcataaattgtaacaataaatctgtctacaaaccagaatttccactagagctttgttgctgagtatactgttggttctgcgtctggttctgatttctttgttgatagaacccactgctccttcggttgcttccttggttgaacccaaagtttttattttgataataatttctaatggctttagcttcatccattggcaaatcactcacatcttcctggcactcagaaaagtgatgggaacctccacatagctcacagactacttgagcttgtttggcttgcacagctagctttatcagggcctctacctgggctgtcagctttgtgatggcatccacttctagcacaccagctaccttcttagcttgactcctttcagttggccactg

SEQ ID NO: 150408 - DNA, 525 bp, Cannabis sativa
  modified_base (53)..(70): a, c, t, g, unknown or other
acatttattttattatatatttgattgaaattatgtccatatgtagcaatacnnnnnnnnnnnnnnnnnnagcagctgagaagggattaactgagaaagagatttgatgtcgactgttactcaatctttttaagttaattgtccataattcatcgtaattgtttgacatactttaagatgctttccatgtactctggagttgatgtaagtttgcctcatatttcaggttaccgacaaattgaaagtgcaatataaaggtttcaccgacgaggagaagtctgagtggagaaactatgaccctaaccatactcccgctaagaaggcagtgcaaacaagggggaggaaaccaaaggcagctgatggcaaggggaagaaagtggaggttgatgaggaagaggttgctcctgaaagtgaagaagcgtctgtgtacagtcgatgctccttcaaccgtttaattaggatttgcaagaacctgaacctggagcagaaagatgtgatccaaaatgttggatttggatcattcat

SEQ ID NO: 150409 - DNA, 924 bp, Cannabis sativa
atgaatatatattatcgcaagtcacgattgaatattaaaatcttatataaaaaaaaaatcaaaaatatgtgtgttatgtgtatctttttgagaaaaaaattgcaaaaaaataattatatagagagcaataaaaatataataaagaataaagagtatcacatgagaattgagaaaaaaaaattataatagctttttcatcacttttcatgaatatcaatattaaaaaaaataattttttctacaccaaataattcatgccaatgagcaaatcataaataattcgaaatcatcgatgacagtgaagttgtcaacatccaaaaaaaaaattgtatgtctccaaataattattgagaaatattttactgagtgagtgaaagattaaatctagctatctatttatatttttatatatactagccgcaactccacgtgcaatgcacgtgaaacacatgtaaataaaaatgcaatcaaacttatagtatatataataaaaaatgctaaaaagtattattagtgcttagtattattttcggtgtcatatattaagtatcaaaaaacaacttttagtactactggtgcccataaaaaaatcttaattttgataatttagcgaataatgtcgtaggcaatatatttatataactattaggcgcctcacttccattgtgtctatagtcatagtcaaacaccatcaataaattatgtattcatatataacttatatatgattataaatatttctttgtattaatatataatgtatataataaatttattttgtgaatacatatacatacaaagaattaaggtaattaatcccttcattatagtagtgatgattgttggaagttgacaacaaaaataagccttatttaataataaaatttaactgagacaaagcttaatttcactcatcatggaaac

SEQ ID NO: 150410 - DNA, 711 bp, Cannabis sativa
agggttgttgcagcctttgacactacctgagtggaagtgggaagatattacgatggactttgtggttggattacctagaaccacgggtttatttgattcaatttgggtttgggtagatcgattcacggagtctgcacattttctaccagttaagacaaaccttttcggtggatcagtttgcggatttatacgtcaaggagatagtaagattacatggtgtaccaaaatctatagttttggatagagattcgaagtttacctctaaattctggcaaagtttgcaacgggctatgggtaccaaactgaagttcagtacaactttccatcctcagactgatggacagtctaaaaggacaattcagatactggaagatatgttacgagcctatgttatggatttcgagggcttttggagtaagtacctaccgttgatagagttctcgtacaataacagttatcaaagttcaatagggatggctccctatgaattattatacggcagaaagtgtagatctcccatccactgggataagacaggggagaagaaatacttaggttcggaatcagtacaacggactaatgaagcgatcaaaaagattaaggccagaatgcttgcctctcagagcaggcaaaagagttatgcagatccgaaacgcaggtatattgagtttcaagtagggatcaggtgtttttacgagtgtctccaatgaa

SEQ ID NO: 150411 - DNA, 534 bp, Cannabis sativa
tattattattattattatacagtgaggagtgctaccatcaaccttctgttataatcttttagtcaaccaccacggtcgaaaatacatgtcgaaatatttttttcaaattttttttcacggttgtgttcgttatgcttacaacattatccctgtaaatttttgaaattttttgaataatttatagtgccgaaaatacgtttgaagttttttgaacacgcgtggtaaacttgaatatcaggaactctgttttcgatactataaactattcggaatttttcaaaaatttacagggatgatactgtaactataacgaaatgctatgaaaaaaaattgaaaaaaaaattgaaaaaaaaatattttggcatgtaatatcagacgtagaggttgactaagagattgtaataggaaattgtaattagcactcctcttatacagtataggttggattgagttagattgggccaacaataaggtgatattaaatggaaaacttacaaaaatactggaatttgggttaaattttacaaaaatact

SEQ ID NO: 150412 - DNA, 522 bp, Cannabis sativa
gattaaaataagaatccaatgctgtcctggttggtgagagtcaaagttattcttatttcataaattcttcattgtttcatattgtaaaaacaatagtctaagttgtcatctttggatgtacaactatatgttgcatttacaaatatttatctgttgagatctaacactattatgtttgtctaacggattacaatccattgggatttgtcccattaaaatagcaagttacgttagaccaacaatgaagatttgaaattatactacaacattaataacaaaaaacaacatggatcaatataaatttatacacaattcagaaattattaagcattcaacaagtaagaaaggcatgtgacaaaacaaacacatcttgaataatttccaaggtttccaacaaactgatacagtgtcccagtaggcgagagtaaaaaaaatcattcattgaatagagttgtcagcttatctaaaatagacaccattctagcaaccttttattctataaaaataagaatccaacgttgt

SEQ ID NO: 150413 - DNA, 1055 bp, Cannabis sativa
  modified_base (1008)..(1017): a, c, t, g, unknown or other
acgctaacacacctatgctagttagggtgttacaggagccatccctatagtactctgatagcagttgttgtatgaaaactctatcaatggtaaatatttactccaggagcctacacaggcttgcaacatatcttttagtatctgaattgtcctctcagattgaccatctgtctcgctgaagactttcccaaaacgcaaaagtgaactttggatatgtatctgatataatggacttcggagccccatgtaatcttactatttccttcacatataattctgcatattgatccactgtaaaggttgttttcaccagtagaaaatgagtgaacttagtaaatcaatccactacaacccacatggaatcaaacattcctgtggttctaggtaatccaaccacaaaatccgtggtgacatcctctcatttccactcaggaagagtcaaaggttgtaacaaccatgcaggtctttaatgtttagccttaatctgttggcaagtcaagcaccgagatacatattccaccacgtccttcttcatcccgcaccactaatacaaagttgttaagtcctgatacattttggtagtgccaagatgtaacgaatagggagtggtacgtgcttctttgagatttttttttctcaattccaaactacttggaacacagactcaagtgttataaagtaacaatccactatctgatattgtaaagtccttagctttaccagctagaacctcttctcaggctttcactatctctgttaactgcgcaactctaactctatctagcaaatctgattgcaacgtcagattattaagtttatccatgacaaactcttacctgatcttaccatgtcatctgcccactgatgtgaaattgtaactaagttagatacttgtccatgacccttcctacttagggcatctaccactacgttggccttcccgggatgaaaaaagatttcacaatcataatccttaaccaactccatgttgggaatattttactaggnnnnnnnnnnactaacaagtatgttgaattaatatcctaagtatgaat

SEQ ID NO: 150414 - DNA, 932 bp, Cannabis sativa
ccagttctaggtcccgagtcatgttcaatgtttgggtctgagttcaggtcttggttcgggtcccaagtcccggtttgggtttggattcaagtttcggacccaatcctagcgtgggtctgtgtctgagttcgggtcctggtccggttacagttttgggtctgggtccaggtcttagtcctggtcctgttcttgggtccccatctgattctagctttggttccaatttcaagtcatggggtacgggttggggttgagttttggttcgagtctgggtttgggtcctgatttgggtttggggcgtggttgaggttcgggtttcggtcttggttaggatccgaaggtgggtccagtttcaggttcgagtctaggtccaggtcttggtcccgttccaagatcccggtccagttccaatttaagattttgtttttgttcccgagtgtgggtctgggtcttggtatgtgtccgggtcctggtttgatttcgagtttgggtttcggttctggtctaagtcctacatctagacaccgactactggtcgagttctgaatcccagttctcgaggttggtcctaggtccaagtttgggtctggggtcgggtctcagatccctatccaagttctgaggcccaagttctggtcctagtttgggggcccaattcggtttgggtcccccatctatgttcggttcctaggtcccagtccgggtccaatttcgttttcgggtttgggtacgggtccagtgcgagtctaaatcttggttagggtttgggtccgagtttgggtcccagtcccagtctggtccgggtttcgggtcctaggtcgtagtcaagttcttgggtcttgggttcggccctggtttttgggtcttggttttggtctgtatctaggtcccggtcttggtttaggtcccagtgtaatatccgctaactccga

SEQ ID NO: 150415 - DNA, 726 bp, Cannabis sativa
tttccataaccctcgttgattagcaacgagctgcacaatacgtttaaaaaaatcacgtaaacacgcctatgctagttagggtgttacatttagtattcccctaagtggatcagaaaggtatgcagttggtcataccgcacaaactggtagtggtcagcagtccaatccaaggccattattccaaactatgggccaaacgatagacagccagatcctacatgaccgcccctttggaggaactacacattccaacaaatacagtactaccaaagtctcaggccaacctctcgaccaaacaagtcaaattccaaggccacctagtgctttggtgttttattcgctaggcaccgtgcatgaccttataaccaatttgaatcacaaaagggaactggatggacaaaacattccatcaaccttccaggcagataatcgcaccaaagatccagttcaaagagatcccaacataacacaggtcagtcaacaggtcgaacaagagcatctgcttatgcaagcacaaatagacaaacttaaaaccttgtacaaggcttgacctacccaaaattcacaaatctcgaactcgaccaggtacgtggatcgcccttctcgcctgagattgaggctttagacctatcctcgaagtttaaaatgccaatatggaaaatgtacataggaaaagaagatcctgttggaaattattttacaatgatcttagatctactcacaagt

SEQ ID NO: 150416 - DNA, 1214 bp, Cannabis sativa
  modified_base (506)..(508): a, c, t, g, unknown or other
cgggtttgggtcctagtcacgattcgggtttgggtctcggtctacgtttttaattaggtttgggttcgggtctgggtgtttgtcgtggtcctagtcctagtccttgtccggttctagttctagttgcgattccgagtttgagtttgggttagagtttgggtcgtggttcgagttcgggtcagcgttcgagtgctggtccgagtttgggttcaggttcgaatcaggctacggctgtgggttagggtcctaggtctgggtccaagttcgggttcgagtcccaggttttgatctcgatctaagtcagggtttagttccgggtctaggtcctaggttccgatcccggtctgggttcgagtataggtcttggtgcagttctaggtttgggtctaattttcggtttgggtctgagttcgagtcccgggttcgggtttgattttgtgttcaggtctaggttcgggtttgatcctagtatggattcgtgtccaggttcttgtcatgatttgggnnnagggcaggtttttgttctgggtctgggtctgactttgaattcctgggtccaagtcaggtcctggttcgggttcgaatctcggatttagatctaggtttgggtttcgaggcctgtgtccctggtctatgtcccccatctatgtctggttcctaggtcttggtttgggtctgggttcgagtccaggtcttggtcccaatcatggtctgggttcaggttcaagtccttgtcagggtttggatcctggtctaggtcgtgggtctcaggttccagcgagggtttaggaccaggtcgagtacaggtcccggtgtaggttcgggtcccaagtctcaggtccctgtctattcaaggtctctgtccaagttcttatctgaattttggttatggtttgggttcggttctgctctcagctatgggttctagtcatagttccaattctgattccgggcctgggttttgttctgggtccgggtttaggtcgaggttgtggtcgcggtatgagtcttagtttgagtccgggtgacgggtttttcagattccaattttggtcgaggttcgtgtctctggtcagggtctgcgtttggtggtccaggccctgtgttttaatcatggtttgggtctgagtcggtattccggtccgggtctgggttcgtgtcaatgtcctggtctgaatcccaattgaggttaggggcttggtctaggtccagga

SEQ ID NO: 150417 - DNA, 1213 bp, Cannabis sativa
gagataaatgatcgctggggtctgtgtccccggtgtaagctgccattttcgggcatcttaaaatttttggggagtttcgcctccaaaatgtgtctagcgcacgactcctagtcctcacagtcagagtctgagtaatcgcctttttgtctctaggagactcgagaaatatctttgcacagtatggctagctcagctaggattccttcgttaagcgttcctgcggagaccgccggtgcgtgttcctttttgtccaagtgatcccgcaaatcaccatgcttcccgttgatctgatgtctcaaatcaacgggagggtatctccgtcccctccctcctttctctccgggttcctggtgcacagaaacgttctttcagtcctctcgatcctgagggccaagactccctttttggagtttacccctctgcggacctttccctttcaggaaatctgagcggacctttcgcggatcctgcacctttttctttttccccgggatggaagtaggattttgccgtcggtttccttcagagggatatcgtatgggactaggcttcctggacttatgcttctgagtgcttggtgaggactcttccggtgtttcctcaagtcctgcagggatggctttagggtgtatgtggatccctgctgtctacgtggctttttgcatggcaaccatacctcttgcatccttttgttttgttctttttgggcggtgatctcagcttcatgatcagcagccttttgtcttaagagcagaaattctgtgtaactgccttcgtcgtaggcgtcgtactcgtcaacgttctccttgtattcgtcatcggtggcctcctctcgctcttcagaatccacgttgactcttgaggccacttcctcatcttcagggttttgagcgtcttgaggaggacggggctgacgtgtgttgcaagtttccaccattgatgtttagcttacaaggttgttgtctacttgcagatgcttccttcagctctcaatgaaagcaccgaaatgttgaccgaggttttcggcaaccaatttaataatatatatgagaaagttgtaggaagtttaatgcatgagatttttacgtggttgtggcattaatcaggcttagtccacgagtctttcttatttatgagagtatttattacagagaatgttcttggtagtttttcctcttagttgctctctttaattcttatgaacccagaattc

SEQ ID NO: 150418 - DNA, 597 bp, Cannabis sativa
  modified_base (385)..(385): a, c, t, g, unknown or other
cacagtggcatgcttctgggaaaacaacctcaacagcatgttcaatgctttgatgcctatccgatatgaacataagattttcaacctccccagtggcgtccttttaacttctgcaagaaatacttccaagagtcatgattctcactgtcaacaattgcaaaggctaccgaaaacaattggttgtttacatcgtacgcaacagcaactaacagtgttcctccatacttcatctttaagaatgtttcgtcaatactaatcacaggacgacaaaacttaaatcccctcctacaagcatcgagtgaccaaaaacagtacttgaaccggtcatcctcgttgacaatgtcagtaaaagtacctggattcttctgttccagcatgtagaagnaaccatataacttcgtataagattctgctggagtacccctcttgtacataactgccttctcgatgcacctccaaactttctcataactcatcttgatgccatactcattaaacctatccctctgtatgtcttttgccttgtagttagatccatctgatgtgtacttgttcttaataatgtgaccaataacccacggtgctgcttgtcggtga

SEQ ID NO: 150419 - DNA, 542 bp, Cannabis sativa
atacaatacaatacgacttaataagacgttccaataatattgatgaaatcaaatggttaaaatgatattgaagatggcactattgaataatattgatcataatttgattggattatcccttacgtcaaactcaaactactctctactaaacgacacacaccattattattattattcattttgagcctcaaatatttgaattttgaataattttataaaagttactatcaattaaatattttattttgttaaataataaattaataaattttgtatttttaaaaataatataaataagattttttattttaatttttgataatttttttaatgtaaccaatttaaaaataatttttaacacgaatatatgtaaacataactagtaatcaaaagtattaaaatcaagcttaaaagaaaatttgagataaaagagcttgagccaattcaaaagttacttggtatcgaagtctcacgaaaccggaaggtagggccggccctaaaatgtagtgggttataggaaaaaaattattttgggcccttat

SEQ ID NO: 150420 - DNA, 629 bp, Cannabis sativa
gtaaacatcgcggatcatgccatttgctaagagcttatccacctccttttctaaggcttcggccttcactgagtcgaggagacgtcgcttttgttggaccagcgacatgtccgggttgacgttaggacatgggtgatgacgtggggacttatgccagtcatgtcctcctggcaccacgcaaaaacgtcaatggcgcccttcaatgtttttattattttttccttgtcctccgggtctaggctctttcctagctggagtactttggtggagtcgaggtcacacacggatatctcctcgacgtcctccattggttctacgattttttcggaccccacgcggggatccaactcgtcttctttagccatttctggctcaatagtttctcggaccatcagcacgggtaggtgggtggccacgttgtagtatttcctcgcctccccttgatttcctctcaccgtcccaatcccagcttcctgggttgggaacttcaggcacaagtgccgtattgatgtgactgcgccaaagtctaccaaggccggtcagccgaggattgcgttgtatgcttttgggaagtccaccaccacgaaagtacagtacttgaaagtgctctggggtgtgtccgggcacaa

SEQ ID NO: 150421 - DNA, 1128 bp, Cannabis sativa
gagagccttcgtgaaaaagctcaggaaaaaaccctccttttgtaaaaaagaaaaaccatatccttcatggctgaaaacccaaaaaatgttaatacaccacctaaagaaactcatcatcgttttgggaaagagcccatgggctccagaaggtcttccaacccatagtctaaacagaccacccgctccaggaggactcaacctgagggtggccccagcactcggaccacttgatccccgaggacccaacctgacgttggtccaagtacacgaaggacgcgttcgaggagaactcagcatgggagtggccgaaatcctggaatgaaggataaaggatccaatcgtgaaggcgctcagcctatgggagagagcacttacgaaacggaaaattgccaccttagacactacctggagcaggcacaacggtggaacgctgaattggagtgtgatgcagcagtaggtaggacggtacaggggactaacactcaaaatcaacctaaacttggagtgagaagaccacggggcaaacctcgtggttcacgaactaggagacaggaaaatgcccaagaagaacaacctggggaaaatgagattccccttgaaaatccaaatgattagccagaaccctcttataaaaatgagaatgggaggcaaccagaaactaatgaacaagaaattcctcatggaaatgaggaagaccttgggactcaacctggggaacgtaggtcacttgcaaggaatcaccagtattcttcccaaacccatagagagagggcgcgtacaaaccctagcgtgggaaatatgacaaaccacactcaggggtgaaaaacagagcgtgaagaagcaagtgtgacctcagggcgttaaaggacccacagccgatcaactcgaagaggagagggtgcacaacgagctaatgatagagaaagcatgggaactagtaaattcgcgagtcactcgagtacaagatccatgagcaagacgaggtccatgagtaggactcagtctgtgagtaaaacaaggtctaatagtaattactcccagctggatctgcgagagcacttgaattagagaaaaacctgatcttcgccaacaactcggtccaaagaaagaggatccaatccaattgcg

SEQ ID NO: 150422 - DNA, 613 bp, Cannabis sativa
  modified_base (143)..(149): a, c, t, g, unknown or other
  modified_base (547)..(568): a, c, t, g, unknown or other
aatttctaatttgatgaggggccaaatagaaatagtcaataactattaccaacagttttgtctattagtaatataaacggtaatggtcctcaatttgcagtattgtatcttttcattctcttgaaaccccatcatcaagagannnnnnnttacagagaaagaactcactgcaaaattggaagatcataccaattaaagatcattacaaaatcgattctatggactccggtacgcttccgctattccttaattctattgtttgattctcatgaattaaaaagggctatatacaaatttacagtattcataacatatggtatcagagctgtagttaaaaaaaataaataataaaataagaggctgtagttaaagattgttgcgttgattagaggcactgaattgtatatatatatatatatatatacaattgaaagttctcttcggttctgttagacaagatgatgcattcaattcattttttttttctgtttgtttctttcgagaatgcttcattgcattatattcattgttattattattattattnnnnnnnnnnnnnnnnnnnnnnttattattattattaaaatatataataattttaagtaataataat

SEQ ID NO: 150423 - DNA, 680 bp, Cannabis sativa
  modified_base (262)..(265): a, c, t, g, unknown or other
ttattctctttattcatggcatcattccacttttgagagttagaacttttcatggcctgatgcaagttgattggatcatcttccatcattccaaatccatcctcatgtctttaaatacaaaataatcatctaaaatggcatttcttctctctcttgtggacctccttaatggctcttgttcttgaaggtgttaaatttgttcttctggagcaataacctcatcttgatttgggagttgttcaacattgtcttgttgaggttnnnnattcatttcttgatcaatgacaggtgtggaagcctgaacattttctaaaatgatagtaggaactgagtttgaattcaattcctcctcaaaaccaatgtctctaacttatttgtcccccctaattcaacatcctcaaaaaatgttgtagttctcgtctcaaaaatatttttgacagtggaatcataaaacttatagcccctagatcgctcagaataactaataaagtagctactcattgttttggagtccaatttattttcacgtggcttataaggccttgactgagctggacatccccaaattggaaatgctttagactaagcttttgacctgtccaaagctcataaggtacctttgcaactgctttagttggtactctattcagaatgttagttgctgtctttaatgcttctcc

SEQ ID NO: 150424 - DNA, 780 bp, Cannabis sativa
  modified_base (29)..(31): a, c, t, g, unknown or other
atctcaaagtcttgcttcttcagtccacnnntcacagtccggttggtccacgtattttggacaaaatcaggggcaacaataaggtaataaacgattaaactaaaaccaaaataaagataaaaaagattaaaaaataaaaaatcctcatcaagaataaagatttcgaaaaaaatttgacaaatttgtgaaaaaaaaactcattatataatttgtgatctagaaaagaaagagaaataagtgatattatcaaacgatataggttaataaaagactaaaccaaagccaaaatagagatcaacaaatattaaaaagtgaaaaaattctcaccgcgaatagagatctccaaaattttttttttgacaaatctatatatataacaaaaaaaaattcttataatttgtgatccaaaacagaaagagaaagaagagttatagtcatataatatagagtaataaaagactaaattaaaatagagatctacaaaataattaataaaattaaataaaattcactatataattataaacgaaaaaaactgtgagaatatagtacttcaaaatagagatttacaaaaataattgataaaattgaataaaactcaccatataattataaacaaaaataatcgtgagaatatattactaaaatttttaaaatagtaggcaacaaatttataagaaattatacatattgatattttcttaattgatttttatatagatattttaggttttttattatttttttaaattcttaaatgaattatttcttatgaattat

SEQ ID NO: 150425 - DNA, 723 bp, Cannabis sativa
gagagagagagagagtttggagagcgagagagcttcttgtttagttttttctttaatttgaaataaatgaaataacacttagcttttctaaaatcgatttcagctaagataattaataaaaatcagatcattactaataaattaattcactaaggacaaaaagactaatggggcaaaatgaccatttttcccctcccacactaaaagtcataaaatggcactaaggggtattttgggaaattctaaaatcctgactaatccctacaacaccgcgttccaatgttgttaggcacaaaataagaaaaattatgaaatttctatatgtgacataaaaaaagcattctgaattcaaataaatcatcataaataattaattcaatattaataattaattttcataataaattcctaattatctgctaatttttaaattaaagctaagcggtctttaaatcccatgtcataaaactgatgatgcttctaatattgtagatttgtttttcatggagattgtgagattacatggtatgcttagaagtattgtatccgatagggatgctaagttcataagttactattggaaaacattgtggagaaaactaaggacaaaagtttagttttccactacttgtcatcctcaaactgatggtcaaacagaagtagttaatagaactttgtccactttattgagggctatcataagtaaaaatattaagacttggg

SEQ ID NO: 150426 - DNA, 588 bp, Cannabis sativa
  modified_base (120)..(120): a, c, t, g, unknown or other
  modified_base (372)..(375): a, c, t, g, unknown or other
atacgaccataaaaaaattagactaattttttttagataccaaaatagataagggtccatcggtacacccattttaaggtgtattgtgaaattttctaaaaatatatatatttatatatntattattttttaaaaaaataacaaccataaaacaagtaaaaatacttttttttatgaaagaaaaaatattctcattaaataaaatatataacaaaatatttttaattatatatctcttttaatataaaatgcagttatctaacgatttttgttgatttaacaaaatatttcgttaaatttaacagtattagcagggttaattttataaatatatataaatattaataatatttattttagattaatttaaannnntataaatattaatattatttgtatgaagttaattgaacttatactaatttttaattaatttaaatatatataaatattaaatattaattgtaatattattattttttattgttatttttaaaatctagagtatagttaattgtaatattcttaaactttatatttatttttctcatattttaaactttaaatatatctctttctaaaaaaaaa

SEQ ID NO: 150427 - DNA, 1766 bp, Cannabis sativa
tatgttgtggtttattgagtttttcttgatgttattttgtgggaattattttggattgtgttttcaggtgttctggagggtatcaatgcgttaagggaagatttggtcgagttgggagatttttggggtttcttggtgcaaatcggtccaacggttttacaatgtatgtaaaaccagttagccggtttccatgccaggccccgaaatctcgagtcctctgaatctgtgttattttccgatcatgctttggttatccttagtatttgggatgatagtgcattattgtgtcattaggattaccctagattttgagctagggctttggtttagttgttcaagtagtttacttaattgtattttgtgacttaggacctctgtttagctcaaggattttccattcaagcacgcttgaatctggaacgaggtaagatagcataataatctatatatgaatggatgcttgtattggatctttgcactactaacactaatatgtatatgattttaaaggtgttagtacagtgtgggatatcagtgtggtttcggtgttaccaacacgagtaccagggggtacgtcgtgcatgtggtacaacccgtagtaacttccgcgagtacaataatggctctaccaacacgagtacagggttagtactttagtgcatttggtacagtggttgtacttcccttaagaatgttcataaccatttggtgagctcggttgttgagctcagggtgacttaagcataaagccggtcttgcattgcttatatatatgtattgcatatcttactgagtttgttgactcatgagtttgttaccatgtgtaggtaaaggaaaagctaagctggaggaacagtgagatggagctcagcaatgattgtacatattgcggcagtgcaacctggagggtttcggtcttctaatattttgagttattttttgtgttgcctatcatttgtttaaaagaaaaatctcaaggggttttgtaataacaaatattgtttttttttaatatgttttataactcgggatcccggtctttatagttaagtaattataatatattaaagttagttttcaaatatagtaaatttcaaatatgggcgttacagtttggtattagagccacaaggttgttcactgaagaccgtcaagatatgtacaatcaaggccaatgtcgagcttaactcacggttctaagcttatttttttgcaaactgtttaagatacattgcatatatgaggaaattgatgttttaaaactctaaatgcggtcttaagaatattttgaccactgtctaacctacatgccttgtgtgttcgcagggtaagacctaataatgaacgcccagtgaaacgtcagaaggcagggtaaaatggttgagaccggaggtattcggggtggtagaaatccccaaaactccagtggacgcggtagaggccgcggtcgtgctccgagaggtggccaagaggatccaccataggctccggctgattgggagcaaaggtttactgagatgcaagccagaattgtgcaacaagaagatgagatttggagactcaggcaacgggatgctcctgttgagcttcccctgcaactgcctgctgcggttcctacggtgccagcagagcaacaagttgctggtaaccgtatggagcctttatatgagagattcagtttttttgggaggccctgatgtacttaaggctgaacaatggctgactgttattgaaagaatatcgaacttcatgggagttgttggaaa

SEQ ID NO: 150428 - DNA, 1032 bp, Cannabis sativa
taataacggtcatcttcctcaattcggtcttgtatcacacaggtttcagcttcataagagtttgtttattataaatagttctcgagtgacggaccgaggatttttactttgtaaggacttatttatcataaaaaaatatttatagctatattataatcactcttactaaatttattaaattttgtggggacttttctactattttggcctataattattaaattaaaaaaatttacatttaattttttaaaagacaatatttttgttcgtaagggctatagtccccacatcaatcttaatgggtccgtcccttgttctcctcccttctttgtaactgtattgtgtttctttgtttattatatatttttattaaaattaatttagggtataaatatttaaatttaatttttaattacagtaaatacttaagttttatttttgacggtaataacacataagttatattttgtaaattaaattctgtaagtagctgatagcaaatgtcatgtcgatagccacatggcagacctcgattagttcaggtcattaatttttttttattaaaaaattaacttaaatataccaatataaaaatgacaagtgaataataacttcacacttaacagctagatttttatagaagtttaataaatataacttaagtattattactgtcaaaaattaaacttcggtatttatctacaatcaagaattacttaagtatttacgctgtaaatatttttattttttatatatcatttttatttatgactaattaagattttcgcccctcgaactttgacatgcgcaccaaatcatgctccctgaacttatcttgtcgttaaaaattccccctgaactattgagattgttagatttaagggtttttatctaattttagtaagaaaattctaacatggatggatgtttagggggcatgatttggcacatgtcaaagttcaaggggcatgatttggtagatattaaagtctagagagcataatttagtacataaacaatcattacattagt

SEQ ID NO: 150429 - DNA, 539 bp, Cannabis sativa
tgcttcgaattaagttcagagatgctagaaagacaactaccacgtgcaattgtagagaggcgcaacaatagctttgaaactcgttggcgtggtacaaggtttgattgggtagtccatattgtatgcttggtacactaggtcgagtttgcctgagtgacatcgtaagacgcaagaggtgcttttgttgaaaaagaagcttgttggcatgggtgtgggagtattgcaagggtcgtcggattcttatcagtcacgacagtgatagagagttgatgaccaacatggttcaaattaggatagacatggaatgcttcagttgctacgtgtgtgtgtgttaagagggacgcacatggagaccaaggggtagatgcgacgatcgccagaggatgatcgtacttggaggcatttgcatgtgacttttatttaatccatatgggaagcatcgagacagttaagtgagatgtgttggcttgtaaaagcaccaatgggcgtaagtcacacaaaggcatcgatagagatgcagagttgtggaatgaatgcat

SEQ ID NO: 150430 - DNA, 557 bp, Cannabis sativa
gccagcaccgaagtcagctacagaggtcagaagttttctgggtttggctggttattatcgtcggttcgttgagggtttttcaaagattgctgtacccttagcggagctgacacaaaagaaccagaagtttgcttggactgatcggtgtgagaaacatttcctagagttaaagcaacgcttgattaccgctcctgtactaactcttccttctgataaggaaaagtttgtagtttattgtgatgcctcgagacaggctctcggttgtgtacttatgcaggctgggagggtaatagcttatgcttctcgggagttaaaggagtacaagcagaggtaccctaatcacgatttagaactcacagcagtggtatttgtgctaaagatttggtggcattacctttatggcgagaaatgtgagatatacactaatctaagagtctaaaatacttcattacccagaaggacttgaatatgaggcagaggcgttggttagaattggtgaaggattatgactgtgagatcctttatcaccctgttaaggccaacgtggttgctgacgc

SEQ ID NO: 150431 - DNA, 508 bp, Cannabis sativa
ttttttttaataataaggatgtggacctaaattaaagctaatctaaaacataaggttacacaaattaagggaactaaatctaaaaatttaaagctaaagagtaaaaaaaaaattgacaactaattataaatttacaatgaatgataatctgaacacaataaatgaaaaaaaaaatgtataaagaaatttaatgactaatatacatattatataaaactaatactatatatataattgaacgaaaatagaaaaaagaaaaatatatatacaaggcatataataaataatgacaatttttttaagttatttgacacaaagaaaaaaattaaaaattaaaaaaaatacaagtactatatatacatgaggaaataagaattacaaaattaacaaatactatatatacacattataaaatgatttacctcttggccgaatattccactgttttgatttcaatctccccggcaacggcgccaaaatttgattatgcccaaacttgtcttcacaa

SEQ ID NO: 150432 - DNA, 628 bp, Cannabis sativa
aacgaaaatctgcgttaacaaaaagtaaaaaagttgtgactaattataaatcatcattcttatgttgtgcctaaaaggtccgtaactaaaagtattagtcgcaaaaatttcttgttttgactaattgtatttttagcacatacatgttgtgaccaaaaataaataagtggctacttgtatctaaatactatgttttggtcccaagtaacgttttgttgtgactaaaagccacatttagttacaaaaaattatgttgtgactaaaaaattatcactcaaagtaaaggttttttgtagtgagaggcaactttaggggtacaaatagagggttttagaggcgttcctaatgctcttttttcttggaatgatagtactagtagcagggccgaccctgagggtaggcgggctaggcgtgcgccttgggcccacgaacgctcagggccccgaaattgtaaaaaaaaatgttaatatatagataaaatattaaataagaagaaagtataacaaaaattgtttggtgtactcataaaatgtctctctttaaactaagagatcattggatcaattcccaatctctactttttaactttttaaaaaaatatttaatgtgtagttatgagggattgaac

SEQ ID NO: 150433 - DNA, 548 bp, Cannabis sativa
gaaaaataattccaagtttaaagaccgcttggccggtcatgatgtcttaaaaaaggccttatggctgaatagatatatattaaaaaagagaaaagataaaaatagaagtgtttaaacagctagagtcccaggctcttggttcggatgttcagggccagtaggagctggaggatttgttgtttgagcggaaggcacatcaacattctggccaaaagtagaagtagtagcctctggttcaccataagccacttgggaagcacagtactcgagatacatgtctttggcctcgcccaagtaatcaaatttgcctgagggttagccttccaaaagtcataaaaagtctcgagaccggctgtctctaaggtatgaactttctcttctagcctcgtcacctccgatttgtacttctcaacctcagctttaagctcctcctccttagtattcttctcttcttccagctgatggaagacagtccaaagaactcccctttcctcttgaagactattcacttctgccgacaaggtgccgatggtagcttcaagttggtc

SEQ ID NO: 150434 - DNA, 632 bp, Cannabis sativa
gtctagtcgggtccgaaaaggtttaacagagaattttttccattttaaattttttcaaaagttttctcatgtttagatcgatctataatactatatgaatatagtgatgtatatagaattcgaaatacataccgaaaaagaaaacgcaaaaattcaatcagacgaccgataactaaaattcatgattatatatatatactcgtatacacatattaaactatataaaaatatcataatgaattataatcaattatatagaatgaaatgaataaatgaatgcgtataatatataaatatatataaaaaaataaatatatgtatatacgctgtctgaatgtgtatatatataaatgtatatacaaacgtgaaacatgaatatgaaagtatatatttgattaaaattatatggatataaatctatatataatatatatatacataagtttgaaatcataaatcaaaatccaaccaattcaaccgatgtactgtatatatattaatatttatatatatcaatgaacatgaacattaatatatatataactaaattgagtatgaatatatatatatatatataattgggattatataatatgaaattatatatataaatatatatatataatgaagaa

SEQ ID NO: 150435 - DNA, 1082 bp, Cannabis sativa
gtaggcaaattttccctagaggtgtgactccttggccggagaaaccatacacgggttggattggagacaggggttaaatctttgagctggagccccatctaatgttgtcttgaataagatgttggaaaaggctccattttctatcattgttaggcccaccatcttgttggctatcgagatttccacgacaaccgggtcgtagtgtggaaatctaatcttgacaccatcttcatcattaaatgttatggtgggctcccctgcccgtgggatcttcagctttctttcttctacaacaaggactacttcttgctcgtgttgtactattcgggcatacctctcccgggctttgcctgaatctccagctatgtgcggacctccaataatgacttgcagatgtccatctactagtggtggtagcaagtcttggttgttatcgcccctttgattctgatcgaccttgacatacttctgcacatgttgattatttttccttatcaggaattcgatttcccactttagattgttgcattcattggtgtcatggccataatccccatgaaaacgacaaaacttggtaatatctctcttactgacatcttttttcatgggtgcgggcttcttgtacggggctaatgactgagtagccatgtacacactttctatatcttccgtcaacacagtaaatgcagtatacttggcaggattctcccagggaacttgtttggtcttgccattgaactttctctttttcccattcccttgcctattattgttgttggaccgtttaccacccgagcttgaattgcttgggtaatagaggagctggacggatgtccctgtataaggaacttttgactggctaggtttttgctcaccctctgctcgttgaatggcttcttcaagcttaataaaaccttgtgcgcggtcaagaaagtcacccatcgagtctaatggtctgttcttccttatgtcctttcaaagttcaccaaggacttcaatgcccccaatatcgcggacaactttctgtcttcaattacccgtgcaaccttagcgcctctgtcatgaatctgctaatgtaggct

SEQ ID NO: 150436 - DNA, 610 bp, Cannabis sativa
  modified_base (37)..(46): a, c, t, g, unknown or other
tcgtgtaaggctaaataaaaaaagaatcgttaaaccnnnnnnnnnnaaaccaagaattgccgttagatagtcacttttaatatataaagataataacatattaaatgtggcaatgtacttaagcgaataaactctaaatcttatgtttattctagttctctgtagataattttctcaaataaaattaaagtgtacatgaatataaaaaatatcaaaagaagagtttcatgaataattttagttgtacaactaaaaactgcataaggggtaatagaatctcatatttactttacgatcattgaattagtgttacagcatgcctttagtcaatgatatgtgatcaccgaatttagtattgcattcttaatgactacttatcacactttcttatggctaaatacttaatgtcgatatgttagcttcgaccaatagtcttatagtttttagccataaatattgtagctaaatttatcgcaaaatttacttgatggcctaaaaatgtaaatatgaactctaggcctagtatgaaactctataatacatcatacaagatgtatcctcaaaacaataaatgaatctaacttccataatgaaaataacaattaaggtt

SEQ ID NO: 150437 - DNA, 565 bp, Cannabis sativa
tctttactattttgttgtataattatttgagtaaataaaagatatttaatttttttaacactaactttttttttactaggggatagccctcacactatcattagtgtgtccgtccctgcctaagagggatcctatggcgtcggttatcataaaataactgataccatagaaccctagctatgtcatcggttattatacaataaacgataccataagaccctcaggagtcggttattgtaaaataaccgactccatatagaattttctatgatttttttttttcatatttacaagtgttttaacataatttttttttcaatttttattaaaaatatattttttcatatatatatttttttattattaatataattaaattaagtataaattatatataataagcataaataaaattaaactgaaaagttaaataaatatatatctacattactcaacgtgtttacatattagctatctttttattaatattttatattttatattatgtgtttgtatttctgtagtatattagtgttgatgatgagaactcatcaactaacttgtt

SEQ ID NO: 150438 - DNA, 670 bp, Cannabis sativa
  modified_base (30)..(40): a, c, t, g, unknown or other
caaaaaaagttcagggggcacaatttagtnnnnnnnnnnnttcagggggaaaaattactaattaaccaaaaagaaaagacctcagttatgactggacttttcttgtaattttgtacatgtcattacggaaaagaaatcatctgtttctttcaaatttaaagatattgaagttgcatatattaatataagatgacttagtttttctacttcattttctaaaatatataccaaaacttatttattttgaaaatatattatcaaaattttattttttttttaaatattttattaatttcaaatatataatattaatatatacatatattcttataaaaaataattattaaaacttaaaacaattaataattcattttgaaaaataaatgggtcaacttccttctaaacagttcagcaaccatcactatgctagagtttcctcgattgtgccttgccatcatttttcgttgttttcaccgtttttcagcgtttatgttcatcctatgcatttcccctagtggcaatagcttctggcaagttctaacggctgcttcaacggggtcaattgtagatcacggtgagattcccctattgccattaagtctcgttgccaagcagataagcctcaaatcacaattaactttcggcaatatgtctattcagagtttaattt

SEQ ID NO: 150439 - DNA, 529 bp, Cannabis sativa
gacaagaacttggagtttacaatttgtatcagagccagctatttctgttagaaatattgatccttagagttcttgcaagattcgttgtactgaaattcattgtcgctgcaattcttgatttttctgaatttttttctttttgtaacacccagttggaactaaccccctctccagacattactctgggagtataccgctctctatcattgttttgtttttccatgtttcgtacaggaatggagatgtttcgagaaggagggtccacaacacgacccccaatgctggaaggtaccaattacccatactggaaaaccaaattgcgagcattcttgagggcggtgaatgaaagagtttggatggccatagaagatggttggatgtgcccagcagtgatggataatggtgtcaccaaaccaaaacctatgagattgtggactccagataagatggagagggccaattttaattcaaaggtcatgcatgctctattcaatacagtgtccataaatcaattgaaggtcattgcaaa

SEQ ID NO: 150440 - DNA, 937 bp, Cannabis sativa
agcgcggtacagtcaccaccgagtatttcaagtcgaactggattcggggccgaaatacaattctgtaatgaattatgggcattttatttatgtgtggataatctgaatttatttgagtatatttgtgatgggaatgactcttttgccttgaatttgtacttatatgtgtgtatggccctaagggcattcttggaattttctactaatttgttatttgtaacaaaaggaaattttaagtaaaataaagttttattttctgcattgtttcgtcatccctattagccaaccctctccctctctctaaagtcctttctaatccttgaattttgattgtgaattgcttggattcaagctttgtgttggtggcttttggtgctagcgattggaatgaattgagatagccctttatgctggttcttatttggaattcttgctgaaatttattgttcaaaatcatgaaattagggtatgatgttcttggtatgcatgtttgatgatattggtgtaatctttacaccttatgcatgtttgcgttagaaagttgaagtaggatgcttgtgtggtatttttgagatgatttgtaaggattttaatgatattttttaatttgttatatagccctcatttagtggcgtgtttgagtttatgttttgggatttgaaaattcattgtgtgagcttgaatttgttgatattgtgctcaagtttggagcctatgttgtttgttgtttaaatctgagtttagatgcatttgagctgtgattttggagctttaatatgtgtttttaccctttgttttggttgaggttcgtaatttaggaaaagtggcatttttagaccttaaaatctagttttctcggtttttcgaaccctgtggccgtggccaaaaaccaatcagagagccatcccttttctcgattttgttttggccataactt

SEQ ID NO: 150441 - DNA, 759 bp, Cannabis sativa
  modified_base (533)..(534): a, c, t, g, unknown or other
tatcttgcataattttgactttttaagacctaaaagagtgttttttaccaaaatttctcatttttcaacattttttgattctgtgagtttgcactcctcacatttcacatcattaaactactagaaaaggaatttttcaatttcgttgcataagactcatttttggtagatttctagctttcaagcaaatcgaaaagcttaccgaaaagttaggatttttgacatttttctaattttcttgtttgagcatgtttgttatatcatatatcaagattttgcatgaaattttttcataaaatcaatttctggaagtaagttgcttaaaatgacttgttatggccaaaacgagtaaaagttgccaaaatctctcatttttgaagttttttctatttttccaacttgtacacttcatattaatcatgtttaagttgatgcaaaaataatttttcaaaaaggatgcataaaacttatttttggtacatatgttgtttttgcttaatttttttgaaaaacttaccaaaaagtctcaattnntgtcatctaattgatttaagttcatgaacatatttgtttttatcatactttaggtatgataaaaggttgaaatcataactatgccattatttacttgtatctcttgctttcaaggagttggacatgttttttagtagattgaatgttaaacttgttttgactatatgaactttcatcttttatgcattttgaaatttttccttacctattgtgcttcattgatat

SEQ ID NO: 150442 - DNA, 544 bp, Cannabis sativa
tttttgggcttcattgtcagtcagagagggattgaggcaaatctagaaaaaattcaggctctcctgaatatgccatccccgaagaaacacaaagacattcagagcctaacctgaaaggttactgccctgagccgttttatctcccggtctacagataagtgcattcccttcttcaacatcttgaagaagtgtcagaagtttgaatggtcttacgaatgtgaggaggcattcaaaaaactaaaggagcacatggccaagcctcccaccctgtgaaaacccattctcagagaggacttgtttctgtacttggccgtctccgagcatgcggtcagcgaagccttagtccgggaagaggagaaaactcagcatcccgtgtactatgttagcaagcgcatgataggggcagagacgcgatcctcgtcattgaaaaattggtctttggcctcctgatggcctcgaggaagttgagaccctacttccaagctcacccaatcaaggtgttgaccaatcacccactccggcaagtcctacaaaagccagaggc

SEQ ID NO: 150443 - DNA, 965 bp, Cannabis sativa
aaggaacatgtttgctacttccttaacatatttgcacccttcatttgagaatggaatttcagcatcctcttgcagtatttttgaaatcataacccaggcatgtgaatcatcatagtctttccagtaaactttgattgaaccctcatgttagtacagatatgctcgggccacaacattgtcgatattgtcaaagcagagatatattagctgatcaagggccttctggtcatcggaattgtatagcagaggtggctcgttgaggcaaacaaactcctcagcataaatttatggtcgaccctcatcctcacaagcgtaatgttgtggaacagccacctctccttcttcctctttttgggcaatatttttcttctatttaagggatttgattttggcttttaatttatcaatctccttctattgccgagtcacaacatcagaaacttcctttttcttcctgccaaacaatttagatgccctggtaaggaacctgcaaatcattaaataaaattagctatgatttattttgcataactaaagaaacaacatttctcaggtactagcatatctagcagccctgacatgtccaggatgctttggtatctcgagcgcctgcgttaggatatcgttttggccatagatgtgaatttttccctgagtaagttgctcctctaattgagcctaatgcacatattcaagcaattagtatatgaattatatatactaactcattagtagtactcaattaaggattaatatatacttactatctttttggcaatttccttatcgtaatcagtaaaaaattttgttctcttggtccgagattggatccaaacactgtggcgttggggatcttgaacctctaggtcctttttctacattattttataacaattaaatgagtacaattatattttgaagcacattattagaaatcattgattaccacatcttcccttacgttc

SEQ ID NO: 150444 - DNA, 623 bp, Cannabis sativa
gagaggaaagtaaagttgactaaggacctcgaggcttttgaccaacttgaagctactatcgcaatcttgttagcagaagtgaatagtcttcaagaggaaaggggagttcttcgggctgtcttccgtcagctggaagtagagaagaagtctaaggaggaggagcttacagctgagttcgagaagtacaaatcggaggatgaacagcagagagcggatgtgacgaggctggaagagaaagtacatgccctagagatagcgggtctcgagattttttatgacttttggaaagctaatcgtgaggcaaattttgattactttggtgattccaaagacatgtttctcgagtactgcgcttctcaggtggcttatggtgaacccgaggtgaccacttctacttctagccagaacgttggcgtaccccccgctcagacaatagatcctccagctcctaccgacccagaagacacgaacaaagagcctgggactctagctttctaaataattctcttttatctttctcttaatatatctatcaggccataaggccttttttatgacatcatgactggccaagcagtctttaaacttggaattatttttcattttataaacaacaggctgac

SEQ ID NO: 150445 - DNA, 1052 bp, Cannabis sativa
tataattagaacatgtatttatttcaagcatgcattgttaaattttctttttttgtgtttgattttgcttgtacctctcggactcgtaccaattttgtatcgtatcaaaaatcctgacctatatttacagctctaacatctatccaattcgccatcttgaagagatttttagtatatttttttattatcgtatacgttaaatttatttaggattatctataaatttttataaaattttaattaatttacaatatcaaaaataaaattaaaatattttgttatacgcctgactattttcttatatatgtagcaaataactatttgaactttacttttgtcactgtaaactatttcgaatttttaaaaatttacagataattttaaataattataacgtacataatcataaaaaatagactacgaaacacatagaggtctgccaaaacatccctttaagggagtatattgacattattatcattgttcaatcaataaaatgttattgagcaccaatggtacctaacaccttttataggtggtgccctacgattgattaacgatattcactaaaagctattttttaagttatataggacccgatacttaattacaccaatagcattatgacactgaggaggatgctaggcactagtggtgccttttagcaattctcaataatattgggagcttctatgatgcacttcccaaagaagggtgcaccaatacacccctcacagtttcaatatctatttttttattatcgtgtatgttataattatttaaaatattatgtaaaattttgaaaattttaaaataatttacaatatagaaataagtgcttaaacagatcattttatatgtatataaaataaaagagtcacacgtgtaacaacctgtttgaacactattttttatatattaatcttttttgaagttgtcaaaatcttacataatattttaaataagagtattgctaaaaggtatcactggtgcctagcactctcttcggtgtcataccgttattggtgtaattagatatcgagtctcatata

SEQ ID NO: 150446 - DNA, 508 bp, Cannabis sativa
cggttttaggcggttttaggcggttttggcagttttttggtttaactatttttttatttcagaaaccgaaatcgactgccatgtcaaaaaaatcagaaccgaaaccgaccgccaaattcggtgatgacgtggaaccaaaaattcgattacggtttggtcagtttgatggtcgatttcgatttgtcggtttttatgaacacccctaaatactacagtgcatttttttaaaagtgatgtactcatgtatttttatctgtttcggcacctaatagactttttttatcctgtaaaattttaataaattcaaaaaaatttaaggcgccaaaaataatgtacctctttaaaaatggtgcactgatgtactcctacatgttttaacattcgaaagactttttttgtttatttttttcatggtcatgtgcattatagttatttaagacatcctttaaaatttcaaaaaattcaaaaaaaattaacaagccaaaaataaaattcaaactgtctgttg

SEQ ID NO: 150447 - DNA, 789 bp, Cannabis sativa
  modified_base (26)..(27): a, c, t, g, unknown or other
  modified_base (55)..(57): a, c, t, g, unknown or other
  modified_base (565)..(572): a, c, t, g, unknown or other
tttcattgttttagagatattcatanntaggatgttaattaacatacttgttagnnnatctagatcctcgtaaaatattcccataaaaaattttatttttattctgaaaatatttatttggattccttgtgaaaaattaagaaattttagtttttacggaacttgattctaatgaaaaacgagaaagttatagatttttgaaaattcgggatgcagaagctcgatcgcacgcaccaggcctcagacaatgaggtgatgcgtgcgcggacaggggacaaaaccctgtctaaagccgtgtcatgctcatgtgttcagacacgatgtgttcatacacgatggcatgcatctgaaggctgcacccgccgagatttctcggcgcctcaccctgcagcaagctccttctatgcatgtaggaggctgcatgcagcctcctcgtgggcaggaggtgctcatgcaccaaaaatctgatttttgtgggattttttcacaaatttcgaattttccctattttaaaccccaaaaataaaaataaaatattacttttaatatatttaaacttaaatannnnnnnnaaattaataatatttaatttttaagagattattattaattctttgatattttgacgtttaaatttaaaatttgatttttttaaaattataatcagattttaaaaatatgttaatttgtcaatattatacattatttaattataagattagatattttaatattggctatattttaaattaaaagataacattatccttttaatttgaaatattatat

SEQ ID NO: 150448 - DNA, 590 bp, Cannabis sativa
ccgtcctcggcaagcctcacgtcccccctcctcgattgcccctgcccaaacccagcagaatcgacacccacaccagaaaaaccagcagcacaggcccccaaaacccaacttccggcactcacttccaccccctgaaactcctccaaagcttccttagctaactcaataaccacttccaatctagactgctttttcccaaacagaacatagttcctatcataccacatccaccaccaaatctttgataacaatgcaaaattattttgatcaagctcatcaaaaagataaacaagcaactccgctaaagacccattcctacctcggtatagaagattccaaatctgaagcttagaccatattggaagcaatgaagagcaaaaaaccaaagcatgctgcagagtctccgtatcctcaccacatctgtgacacatcggctgaacaggaatcttacgtttgagaagttgggaattaattgggagagcccgatgatacatcctccaaagaaatattttgactttctgtggtacctaaattccacatcccattccaccattgagcttgattcacagaagagcatccattcctttcac

SEQ ID NO: 150449 - DNA, 555 bp, Cannabis sativa
  modified_base (524)..(525): a, c, t, g, unknown or other
aaaaggttttggggtcaattaggttttggggtcaatttatttttggggtcaatttattaaatcaatttattaaataagagttaaataagagactttgtatggtctaattaataaattacataaatacaatttaatttgataattttattaattattaaataaatggttttgacattttataggattgaattggaaaatatggtatttttgaaagaagaataagtggttgaaaaaagtggcaaaattgtaactagagattggtccctttaagtggtcggccctagtgtttattttgcccaatattttattctttcttaatttatataattcagccctaagccctagttgaaacaccataaaaggaacatgatgctctcactcatccaacttttgacaatttaactattgccttcaacctagatgagagagttcattcttgagtgatttcaacctccttcattgttcttcacctatttcaacctatagtgaatgagtgccatatacccacacatagcaagtcaagnnctcaatcatagtgagtaagacggtggtaac

SEQ ID NO: 150450 - DNA, 709 bp, Cannabis sativa
atagattgatatctaaatgggacactgtatcagtttattaaaaaccttgaaaaatattaaatatgtttttttttggttttttttacaaacatatttcgtaacgatgaagagaactccccgatatttctggcaggaacttttgtatgaatttatagaaccaaatgatttatttctgtttattgatatttgtagtgtcaaaatggacaacccacaccccgaccctctcctagtaaatgcctttgcaaataaactctatagtgtgaaaatgcttcctggtaagagcattaattcacacttgttgatgatgaatctgaagttccagaaagcaaatttgctgggaattgatttatctagagaacaatgggttcaattcattcttaatagtcttcctcctgagtaaagtggatttattgtatcttatatgatcaacaattttaactcatccgacatggacaagctagaagcagaattgcgtgcttatgaacggagcttacctgcaaggaggacaccctccaattttgcagacctaagtaagaggaaaaggattaagtatgaagcttctaacaattctgcttcttcaagtacaaatcatgaaacacttgataatagtactcttcaatgttcaaattgtaatgagaagggacatcaggaagaacgatgtcccatacttctaaataatttgaatgaaggtaatgcttttgtttttgaa

SEQ ID NO: 150451 - DNA, 588 bp, Cannabis sativa
ttaattgataaataaaggaggcatttttcaataaaccccaataaaactccctttaataaactctcttaggaatcctcttatttcattacaatatgtcagctatagtggagtcaaaattggagagtgaagataggtgttttcaaagaatatgtaaagattttagagacaaaagttgaagaagcgaagctctacccatttgtctcatctccatgtcagcctaatgcccattctcaaactgactcatcaacctccgaatccgtacagagtacggccttgtccatggctatgactgttctcgagaaagatcttgagtacaccgcgggtgtcctcgtagatgagatcgctgatacgcgtggctcctccctttcccaaaccctttcctccattgcctcttcctcacattttttattacgaccgttggattaggttgcgatccgcctgtggagtcagtttgcatttgtaatcgttggattagattagatataggatattgataaaatgcctagggctgtaaaaaaaattcgtaaactgcccaaaccaaaccgaaaaaactgatagaaattacaaactgaaataacccgaaaaaat

SEQ ID NO: 150452 - DNA, 520 bp, Cannabis sativa
  modified_base (114)..(119): a, c, t, g, unknown or other
  modified_base (209)..(215): a, c, t, g, unknown or other
acccagacgaagaaccaaacccgaacccacacctagacctcgcacccaaaattagaacctgaagaagagtcgccgaaccaggactttagaacaagactaggaccctgacccagnnnnnnaaccgaacaaagacctagcctcatacccaaactgacactcgaattcgggctcggacacagtcgtttacccagactggaactgagacccgnnnnnnnacctaaatctaggacccgatcccaaacatagacttggacctagatagggatccacatacgaacttggactcggatcaagtcccacacatgaatcaaaatgctggacctagatttggaccgggatcctgacccacacgcaaaacttggaaccgcactcgggaccccaacttggacatggacctagacctagacccaaataggggtacagacccggaaacaaaccaagacacagtctcggacccgaactcaaatccataactagaatcagacccaaagctagaccggacccggacccaaacccgaac

SEQ ID NO: 150453 - DNA, 556 bp, Cannabis sativa
gcattataattttgctgaatagtctttaatttatatttttttataatctttgtggtcgttaataataaactagtttggaactttgtgttcttcctgagctttctataataatcactgcttctatggataaaattgctcgtttatggcatactttcacttataagtaaactatttatatatatttatataaagatatatatatatatatattttgtgtaattctcactctggtaattttaattaatttgtaggcttgaaaatacttttaattatgatcttggaagagtttgggccgttggatccatcaaaggaataaatcagtaagcttatttgcttatttttaaaaatttcccaattatttattcatcttcttacttttattgtgtcatcatatatgtactaacattactttttcttttagggttgtctttggttttgacaaaggattttgcattgtcaagataatgaaaggtggagattctgtattaagtggtcaaacctaaaagagtgtcatgataaaaaaataattgaaaataagctaatttcaaagttgact

SEQ ID NO: 150454 - DNA, 837 bp, Cannabis sativa
attaaatcaatcttttcaatgttttggcttagattgtgagagatcacaattgtaactaaaagagcaattagaatcaaagagagaggaatgaccaatataggtgggggctaaggatgtgttgttccggtgacccacagatggttgatgttctagagaacccaatagcagttaaggctaatgctctgattggggtattagcaggactacaagcacaagtaagacgatatgttaaagggcttttacaagcttaatgtaatagattgctagaactagtagtgtaacttgaagcacgtaatgaaatgtaccaatagccaatatcgatgcatagaattcttcttgtccacgaatagttaaagatgcagtgtccacacctagttatgaaaggaagtccaacctataggaagtagggaatggcttaggatagtgaataatatactagactggatagggtattttatgaaactcacttattaagaaggatgaatgaatagacctataaggagcaagtactatcttgatggatattctatggatgcacactcctaagttagatggtaagaagtaggaatattgtatgtgaagactttagagaaaagtctattatacaaattagtccagggaggactatgccatcatgtagaaaggactgtagcgtactgaatagaatctagaataagaagttagaaagagacttgatataatttctagaaatatgacttatgaaggtatcctgaacaccaagagataagcaaagcatcaacaaatcatagattaccaaaggagaagttgaaagcttcaaactcaaggtcatctactttaggaggagacaacaaattt

SEQ ID NO: 150455 - DNA, 639 bp, Cannabis sativa
gaaaactaaaataatctaataactaaaaaaaaataacaaaatttgaaaataataaatcaataagaaataagaaatgctatccaaaataatatatataccttaattactacaaatctaccaatataaaaagtatttaaaaaatgcaaagataactgcattattccataaaaaaacaagtaatgaaataatataataaaacaaaataactgctcaaaaattaaataaaataataaatagtaatattactaactttcttgttaaaattaagcaacaaaattaagcaacaaaaactgaaaaaagaaatatttaaaagaaatatttaaaaaataaaaataaataaataataatttaaaataaaataactgtcgcaaatcgacagagattaaagtcaccggaggatacaccgcaaccaccacaaagtgcacaacctctgtcgaccaccatcatcacaccaccgcaaaaccaccaactacaccagatcagtaatatttatcgtcgaaagcacgtaatcgttgctttgatactgccactatttattccgaatttgtaaagacgacatcgttgataacttagatggaaaagtggttgttcttaattttaacactatcccatttgagggtctgatcatcatcaccaacc

SEQ ID NO: 150456 - DNA, 712 bp, Cannabis sativa
  modified_base (538)..(538): a, c, t, g, unknown or other
  modified_base (652)..(658): a, c, t, g, unknown or other
aaaagagaatccgacgttgcttcattttagtcgagagtcaaggtcattcttatttcatgagcttccaccattgtttcataccttgtaaatcttattcttagcatccactattcggatggatgttactaagaatacgaacacttacaataatacttatctctacagattctacagcattaaattgctaatgaacgtccatctattagggatgaatctcactaaaataagaactatgtagaacaaacaatggagatcgaatatccttataactaaagctcgttattttaaagagttgtattttcatttgatacttattttaatctatttacttaatatatatttatttaattaaaattactaatttagatagctctagatataaattttaatctaatatttataaaattatatcttaagtagatctaaaaaaaataaaaaatattttccatccttagtattaaatttcaaataaatattatgaaaattacttaatttaagttggtctaaaaataattaaattaatttttaactcaaattnaattttctataaatatatatgacataatttgaaatccaataattaaaaaaaaaatccattttcgaaattctctaaaaaaaaataaaaccaaactggaaaaattattctaatttnnnnnnntctaaaattaaataaattaatttccaacataaatataattttcctatttactta

SEQ ID NO: 150457 - DNA, 695 bp, Cannabis sativa
  modified_base (160)..(166): a, c, t, g, unknown or other
aactatcccttctgttaccataaagtgacacttttcccagtttaggaccaagtttgacttttcgcatctgattaacaccttctccgaattctcaaggcagtgatcgaatgacgaaccaaagactgagaaatcatccataaagatctcaatgcatgattcnnnnnnntccgaaaagatagccatcatacacctttgaaatgtcgcaggagtgttacatagtccaaatggcattctcctaaaagcaaaagtaccataaggacatgtgaaagtagtcttctcttgatcctcagctgctatggctatttgatgatacccagagtagccatctaagaaataataatattcttgccccgccaaccggtccaacatctgatcaatgaagggcaagggaaagtgatcttttcgggttgctttgttgagttttctgtagtcaatacaaatcctccaaccagaacttttctaaaagggattaactcattcttctcattctttactacagtcatccctcctttcttaggtaccacttgaactgcgctgacccacttgctatctaaaatgggatatgccacaccaggatctagccactttaccaactcttttctcacaacttctttcattggtggattaagtcttcgttgtgcatcaatagtcagtttggcgccctcctccattaaaattcgatgcataactgtaga

SEQ ID NO: 150458 - DNA, 981 bp, Cannabis sativa
gctgaggagctgttgcctcgctctccggagttagcttcgcagttcatcgccatgttctcaaaggcttttgttactggatccaaggaggttgaaatcgcgaagagacacaacatttagcttcaagaagacattaagaagctgaaacaagatgcgacttctaaggacaaagagctcgaggaacttcgcaaggccaaggagcaagtcgagctcgaggccaagaacgctcagacgaagatcggggagatgtctcgcgatttggaggtcgagaaggagaatgggaaaaggcagtatgaccaggcggtctcggactacatatacaccactctctccaaaattccagacttcgacttttcaatcctcggagcagaagccgctgaaatggctgaggcttttcgcgccatgtcgcccacacaaacttaaggtggtggagggaatcttctcgaggaggctgaggttgcagatgctgaagaagtcgagaatgaagccgtcagcaaagtcgcagatgggtctactcctactgctccaagtgcttgacttttcccttagtatttgcttgtgttaaactctatctttttttatttatttatgcggtacaagggtactcgcaccatgtacttaaacgaatttacatttgtgtttattttgaacaacttttatatcctcggggggatatctatttatagtattttcgcagtacacgggtactcgtggttattatctataatattttgattgtgatttttattataacttggtgcaataagtagaaaatttcataaacttgaaaaatttcaaacttgaaaaaatttcctttatataatcaatagtacattatggtatataccccctatacttaggatttttttgtaaaaaatgacaaagtattaatacaaggcgagtacaaactataaaatgcgagtactactgataatagaattttaggctttcgccattccaagcccgtggaatcgcagtaccatc

SEQ ID NO: 150459 - DNA, 907 bp, Cannabis sativa
ttaatatataaaatggttatgtaacgatttttgttgtgtccttttaaaggtttggtgtctatgtaacagaatatacttaaaaacaagttaactttaacagacaccttaaattcattctatttactaagattattcacagaccaagacaaccatttgccgttcgcaatacacccattcgtaaaagcacccattcattcacaaagtcataaatcataaatgaaacaaagagaaaatcatcttctcaatagtttaaaaaaaaatcaatatcaaactttttttctttgacactactatcaccattacaggccagtgagcccaccaccaaccattaacggcaccgccatcgaccaccacaaaaataactgcaatttatttcaatcaatctcaaattcaaattcaaacacaagctaaaatgaaacttaaaattaatatcagatacaaaacaagacaaaaaaaagcctcaatctcaaatcttaaacaagaaatgaagaataataaaaaaagaaaaaaatcactaaatctagatctgaattgttctcctctctcttgcttccaccaacctgtacgacgaactttatcacaaatctccattgatatcggcaatgaaacagaggccacgaatggccgagaacacgtctcacacaatttctctctcacacaattctttgtcaagacgatcggactaccaccgacttcccgaagttccataaatctcgatcttgtctttttcctttgatctgtcgtcctctgcctccgtcgtcccagtaccttcgagatgggtagctagtcatctctgtgagaagagggaggaaagaagaagaaagagagtaccgatggaaaaaatgattttaatttagggttttattttttttaacttttttttttattttataatatgtttttaaaa

SEQ ID NO: 150460 - DNA, 777 bp, Cannabis sativa
  modified_base (317)..(319): a, c, t, g, unknown or other
cctgatcgcataagatggaagaagtggcagcaagcaagaaacaacttctaggatgaatcccttacaacttctcaatgcaatcactacggagaaatcgagtttgttcaaaggcttgatgtatatgaaagcatttgttaatgggagagaagtcgcggctatggttgactcgggggcaacaaataattttgtggcacagaaagaagcatctagacttggtttggaagtgatcgggagttcaactgggttgaaggcagtgaactccgaggcaaaagcgatttaagggtatgctacagtaatgttgaaggttggggcgtggnnntctcaatccaaactcatggtggtcctgttggatgattttgacatgattcttggggtggaatttttgagtgcagccaaggcgatggttgcacctcatttgagagggattatgatttgtgtggaggagtgcccatgctttgttgaagcaatctcctcaaattagaataaagagaagggcgttgtgttggaatcaacgacccaatttggaaactctattaagaagaaaggcaatcaagcgtatgtggctgccttgatagagataaaacaagattagtgggtagaggtacccgatgaagtggctgggttgttggaggagtttgctgacaccgtgccagatgagttgcctgaagaactccctcctaggaggtcgattgatcacaagattgagttgataccgggagctgttccgccagcaaaggcgccgtacaagatgggtccttcggagttggaagaactcag

SEQ ID NO: 150461 - DNA, 720 bp, Cannabis sativa
gggggttggaagattgaaaattttggagcatttcttcccagacaaccggaattccggttggttcagggctgttccaaccggaattctgattggatagtatcggaaaaggccaattttcctgttttggccataacttctcgctcgggtgttcgttttagacgttctatgtaccgttttgaagcttgtgacgagctctatagtatggtttatattttagagccaaagtattagtattttttaagggtgttttcaccgcgtagtttggtagaaaaccatagattcctttcgggaattaggaagtgttctggagaaaacactttcctgtttttttatggaaatgtgacataaggccttctatcactagatggtatttccactcagattaactggcattcatgaacccagaattgacgtaagattagcatagaacatattatatatgcatgttgtgtttgtgattgtatatgttttgggtgatatcatagcagcacaactattgtgtcggttcggcagtacatgcatcgtactggttaagagtgatattcaccccaaagagtattaattggcgtcatcatagtggcacaaccattttgtcggttcggcagtacgggcacagtactcgttaagagtgatatcatgaccaattatactctttggtgcaattgatgctatcatagcagtacgaacatagtgccggtcctgcagtgcgatcatagtgct

SEQ ID NO: 150462 - DNA, 567 bp, Cannabis sativa
gttcttcttcttgggaatgagaaccacattagtttcattaacctccgagagaacaccacgatcaaaaaaatctcgaaccatcctcaccatatcatgaccaactatctcccaatatttttggaaaaaagcagaagtcatgccatccggtcctgggctcttctctaggtgcatttggaacaaagcatgtttaacttcttcttctaacacaggcttgagcaactccaaattatgagtaatcgaaacagtaagcgaaacacactaaatcacctctcgccagttagcattagaagccgaaaataaattaaaaaaataattcaccaccaactcctgcaggccattgtcccactccacccaatccccttgatctgttttcagccaccaactcctgcaggccattgtcccactccacccaatcaccttgatctgttttcagcttatgaatgtgattggtatggtaatataattttttatacatataacattaataataatattcttaaagaaataatttaatttttttaaaaaaaaatactgaataatttatattttacaaataaaaaaataaaa

SEQ ID NO: 150463 - DNA, 732 bp, Cannabis sativa
tgaaaggcctcttcatactcttttgtccactcgaactttttgttgcctcgtaatatgttgaagaacggcacacacttatcagtttacttcgaaatgaatctgataagtgccgacattcttcctgtcagggcctgtacttccttaggctttgtcggggatggcatgtctattaatgccttaatttttttcaggatttgcctcaatacccctcgcgttaactatgaatcccaaaaactttcacgaggagactccaaaggaatatttttttgggtttagtttcatgttatacttttttaatattttaaagcattccgcgaggtctgaggtatgatccttactctttattgatttcaccaacatatcattgacctaaacctccatgttttgtcctatttggcttgcgaacattttgtttactagtcgctggtatgttgccccagcgttctttaatccaaacggcatgacttcataacaatagagtcccatgttggttacgaaacttgtatgttcttgatatggaacgtatatttttatctggttatatccagaatatgcgtccataaatgacataagctcgtgcccagttgttacatccactagctggtcgatcttgggaagttaaaaacaatcttttgggcatgccttattcagatcggagaagtcaatacaagttctccaagttctatcaggtttcgggacgagaacaggattggctatccacaagagataaaa

SEQ ID NO: 150464 - DNA, 512 bp, Cannabis sativa
tttttcatatcttaatgtaagagataagataaatttttgttttaacatgtaaaaaatctattcctttaattattgaacaaccagtgtagtgtatagcaatttataataaattttacaataacataaaaacaacttgattttattttcaagttgaaataagatgttacaaaaacaacacaaaagaaacttccaatgtataacatgagaacaacttaatgattctttgtagatattgtctaggtttttttttattgttttcaaccaaaataatatcaattgatgaacaaataattataaatttttcaatattcaacatcttcggggatttgcttttggttattttcttgttgctttatggttgttttcgctgtcaaagtcacagtatcaactaaaataatatcttttaaaacaggtcccccccttaaagcagataaaagttttttaattattgttgttgtgttgttgtcaggttgctgcacatgtgagtatattgagtgattgtcactttctgt

SEQ ID NO: 150465 - DNA, 504 bp, Cannabis sativa
taattctaaatatcaaaatttgaaaataatttttaataaaaaaataaacaatatgaacaaatttattattaattgcaacactttagtggattaattatatatatttaggtttaattaactatggatgctgaccctggaaacatctaataatttgttattttttttatttaaaaaaaaggtcatccaataatttctcataaaccaaaattctgttatatagccacattttatatagaatatatatatataacattgaatggatagtttgtatcatttaaatagctatgtaatagttaggaatgaggtatatgatagatgttaagttctagtttgatatttttcaacttattaaagctaactatttgagaactaggtccagaattgtaggtattttattgttttatatatctttatatattaaaagtgcctatttaacggcaattcttggtttaacgattcattttaacgttttattttttttatagcaaagttaacgtcgagtta

SEQ ID NO: 150466 - DNA, 856 bp, Cannabis sativa
  modified_base (314)..(316): a, c, t, g, unknown or other
gcataaaacccaacattacattgtttttaaacactattaaaaaaaggagaagaaggaaaagaaaactctctttacaaaaaaaaatctcaaacaggtgtctaccactcgtgatttattctatggttatagtagaaaacttcgggattaagaagaaagagaggatgagctaagtctctcaacgaccttcattcaaatgagagaggatgttcctgagtttatcagaaatacgatcgtctctccatttttcaacggcgacaagcttactccgccaactcgaaacatcaccctgaagaagggaaactagagaacataannnttccactgtttctttagatgaggaaagctcctcagttaaccttaacagctcatcacgaagctcctccatagtttttgtgccagtatcatggaaacatgaacattgctttttggtaggaacaggaatgatagttgtgtccttcaaagtatgtttgccagatgtggaggacgacatatttggaagagaaataagcagataatagaacactgagtatgataaatgaaccacacagttagtcttatttatagaaaaaaaaaaacaagaaggtgttaaggagatacaaagaaatatgtcaggaattatgataatgatatgtaggctctgaatatagccttatcacgaggagtaacttcttccatctagcctgacataaaagcagtatacctattttagtaaacaagttatattatattatattatattatatataactaacatattactaagatataataagttcatgacatctctttgcaaccattaagaatagcagggtgctacaaaactaggctgttgagattttaccaggatctagattta

SEQ ID NO: 150467 - DNA, 1275 bp, Cannabis sativa
taataaatgccctgacgcaattaatgcttcgaaatctaattttctctcaccacgtttgacggttacacttgattgcttttgatttccaatatttgctttagggggaaccaagacgtctgaggtttttgaaatgattaccccttttcgttgttttacctataaatacggctgatcatcgtttacaaactcattttcaccaaccttctttgttaagcaagttcagagcacaagagaggtttttagcttcaagtttgctgaaaaattttcacaaaaaaccgttcgttcagctttgcaaaaactgaatccagacgtcaatccttgagtaagttctcaatttcttttactttgcacatttactttctgaatgcgatcttaactttgctgtagaaggtatgtagaaaaccctaggtttagaaactctgcgattttcctttgtaacgattcatgcgacttcgccatttataatgcttgctttttgaactgcacaatgcatgtctttcatcttgcttattcaaagcttcatgaaatttttgccctaagtcacgaaaatttcaaacttctgagttttgacttttcgtcgaatttcattctttaatctgttgagtactcctagtcggcatatttgcctgtttaatgttcgatatcccgaccaaacactcatctcgcgtgttgtcttttgtagatgaacctaggtgagttttggagaagcgaacaccgaattgactaggatctgcttcaactcttgtacgaggatcatcctcgtctttgttctagtccgcccttttcaagcgacagacattttagttcaattttcccgtccagccacaggatgatggctcgcaccaaacagacaatgcgtaaagtcaacacgtctgaccctcacgtggcccatcacgccaccttgcccagccctgaacaggatccacccgtgcaggaggagggggatcataaaggggacgccaaagtccaggagatagaggagcagggcgatgtccatcctggtagtccttccaaggcggaggaaaaggaggaagctacacccccaaactttgggggatacaacgaggttggggagctagtagacgcggatggcgatgtcctggtcaagggcgtggacttcgtcactgaggaacttactgccgcagtttctcacaggaggcagggtgccttgggcgcaaggtgggtgagccctccgtccaaggtcaccgaggcgcgcttacgggatctctactagggcggctatttgggcgagctggactgttatgttcccgcctc

SEQ ID NO: 150468 - DNA, 633 bp, Cannabis sativa
  modified_base (585)..(607): a, c, t, g, unknown or other
agactcagtaagatatgcataacatatatgaaagcaatgctctatcgtctttatgcttaagccgtcctgagctcatcaaccaagctcaccaaatggttagaaacgttcttaatgaaagtacgaccactataccatatgcactaaagtataaactctatactcgtgttggtagggtcttcactgtactcccaggagttactaagtgttgtaccacatgcacgacgtacctcccctggtactcgtgttggtaacactataactactctaaaatcctacactgtactaacacccttaaaaccacatttccattagtgttagtagtataaacaactaatacaagcataaaatcagatatatatatatatattatttatgctatcttacttcgctctagattcaagcgtgccggtcgacttgaatagaaaatccttgagttaaacggaggtcctaagtcacataacacaattaggtaaattactcgaacaactattccaaaaccctagctcaaaaccaagggtaatctggatgacatatccaatatactactaccctaaacgctataaattatgaaacaatggtggaagnnnnnnnnnnnnnnnnnnnnnnnctctcgcctaaacgagacactgatat

SEQ ID NO: 150469 - DNA, 585 bp, Cannabis sativa
  modified_base (211)..(212): a, c, t, g, unknown or other
  modified_base (290)..(297): a, c, t, g, unknown or other
taaattattttaatttttataacaaaactcttaataatttaaaattatacacatataatttcataatttaaattttataattaaatagcttgattgataaaataattaagctaaggaatttatatataaataaataaaaaattatttataaattttaattactaaaaaatatcttcttaaatatttatttaattacttaaaaaatagttanntataattaattaattctaaaaatggaatttttacttattggtaacttgctattacaggtaaaaaaaaatgtaaccatnnnnnnnnaataaaaatataaccattgaatagtcacccatatacaggcccgaccctgggcatagacaggctaggcctgtgcctagggcccacctagtccaggggccaaaaaaaaatactttccttttaaaattatacaatttttttttactgattttgaaaaatactatatctttttctaaataagggtccgaaatatttttttttcctatggcccactaaaagttagggccggccctacccatatatatatatgtttttcatgtatgtgtgtgatttcttttaatatgatactat

SEQ ID NO: 150470 - DNA, 1367 bp, Cannabis sativa
  modified_base (1338)..(1341): a, c, t, g, unknown or other
cttctccgcaggttggaggatgaggccaaggacaagaagactagggaggaggaacttgaggctgaggttaagagccagaaatctgaggtgaagaagctcggcgaaaaggtgaatgccttagagatagctggtctcaagattttttattacttttggaaggaaaatcccaaggcagactttgaatctcttgacacttccaagacatgtttcttgactactacactactcaagcggcctacgggaaacttgaaatattacttttcattttttgaacaactggctgaccaggcatcctttaatcctgggtttgaatgctttgttattcttaatgaatttcatcctttgtttataatcattgtgcaattgtgttcgttttgtttttgttttttaccaaatgctttgtacaggtataggtgccccccaagtgactgaggagacttttgactcttggtcacttatttttcacaagtatgttttttgtctgttcagggttttgggtacgaccagaccttttgtatgcattggatggtaaatttgtaacatgctagtgaacttgactcaatttgaattgaaataaacatctttattcatttattggtcagaaatatgtctgttattgtagtaacttacattgaagttattatgttgatctgatctaatcttgagcttagcatgaacaaaacaaattgcagaaaataaaaattgtactttcataagtggtcatccgacctgagtactttgtaattttatctgaacctttgggcgtggtctacccagaaggccattcacttaagagtaaatgttcttttgtttcgtacttaatatggtcatccgacctagtacgtttactggtagtattttcttaagtgttccccgttccaataccttagtactagaacgagatgtattttttcatcatacttacccagtttatatgctcctgattctagaacttcgaccacctgatatggtccttccaaattttgtcccagtgcacctgtcgtgctgtctttggtgttcagaaatactcttcttaggaccatatctcccataaagaatttccgtgctctcacttgtttgttaaaataccgagctactttttgttgatgggctatcaatttcaagttcgctacgattcgtttttcttcaacttcatcaagtgatcctgcgaggagtgcatgattggcttcttggttatatgtcaatcatctgtgggatggcggttcgagttctacgggcagcgtagcttcatatccatatgtcatggcaaatggagtctgtccagtcgttgttttctaaattgtgcggtacgaccataatgttgggttttatgccctnnnnaaaactctatttcaatgtaatccaga

SEQ ID NO: 150471 - DNA, 620 bp, Cannabis sativa
aatgagtggccccagagtcaaaaagcacagagaaataagagttgttgaccgagagctgacctattactactgaagggttggcttctgcatcagccgagttatcgtgaacacccttgctagagtgggtttcgctgcagtctttggtgcttcactcttgagttgggggcaatcctttttataatgccctggcataccgcactgaaaacacccctgccttttacaactagggcactctgggtaagtgtatcgggtctcagaattaccctgtcgattgcctcgacgttggttccctcagaacctcttgttctgacctgagcaactggatgcagtaggtgcctttcttttctgatcagtggccgagccactacctcccttactaaaacctgaggtaggaagggtaggacccccgccaacaaccggagtctctcgagattctaaggtgcacttcactgcaccctcagctcgcaatgccttatccactatatcagcataggtggtgttgtcatcggtagtaatcattaagtcatgtctaaattttgcatttgacctgtcaaaccttagcacaattcccgaggcaaaccttgccaagatcaaactgagtcgtgtattcagtaacactc

SEQ ID NO: 150472 - DNA, 770 bp, Cannabis sativa
  modified_base (95)..(100): a, c, t, g, unknown or other
ccataaccctatccccatgtccaagacggtactgagtcaagaccgttcaaatggcagtactattggccaaaatattagcctatactcggtacgcnnnnnntactctagtcgtatcgatgtgatactatcaagtattatagtactattgacaacaatatcagcctatactcaatacgttagtcatactctagtcgtaccgatgtgatactgtcaaattgtacttaagccaacatacattaattgatatctaatataatattaaatatactgatactgctattctaatgtaatctaacaggccaaacaaacatgtacgctaaacatgtaaacacatgcatatcattatacaaatcttacctcacttttgcattcaggtgtgtcggccaacctgagtggaatagctgctcgacgatttataagcccctaaatcacattttttggaaaattgatgagtcatacactaaatcacttttcagggacataaaattgaaatgaaaaattttcctatcgatggataacatggaaataccctaaaaattgtagaaattggaaaaacaagggttcccgaaattgccccaaccggcagaccggttccccaaccagtaaaccagttcgaggggggttcctagggaccaagctaaattaattccattccagttcctacaggtcccactgaactggttgacctgttcaatacgggaaacacccaaaaccacctacatgttgggttttgtgccctaaataaaaccctttacaatctgattagttat

SEQ ID NO: 150473 - DNA, 573 bp, Cannabis sativa
  modified_base (26)..(38): a, c, t, g, unknown or other
aacacagggtccaattggtaactttnnnnnnnnnnnnngtccaaaatggtatttatccaaaatataatttaaaacaaaatgaaacatttttttacatataaaaatttttcttcttttaaatttgttatttgttatttatttattttattttgttattagaaacataaaatagcaataatttattttattttattttattgttagttatgtcttgtggattgaatttgagctattgtgcagattggattggattcaaaatacgaaatccgcacttaggctatgtttggtaggaaggagggagagtaagatagatggagagttttgaaaggatggggtttggtattagaagtaaagttagaagagtggagagtaaaataaatattaaaattacaatttatcattttaattttttaatataattatatactttataatgggtagaaatgtcattttaaataacttttaggaagttctatttgcatcccataaaataataaatacaccacattattaaaaaatttataaacttaaaaaattttaaaaaattattcttaatatatttttaaatttttt

SEQ ID NO: 150474 - DNA, 564 bp, Cannabis sativa
tgtaaggtttcctaaaatttatatatgtttatttacattgttttagatattcatatttaggatgttaaagagcatacatggtagtaaatctagatcctggtaaaagatattccaatagatgttccatctataaataatgagaagactttcccaagaaagttagtgaaatgtaacaacattgaatctgatagtatgcgagtgtttgttattggaataatgagtttggaggaacaaattgaagagttgcaaagaaagttggcggagaaaaacgctgaagttgaatatcttgcatcacaattagctaaacaagctagtttaagtaagcaaaaaccagtggaataggggcaagtatcatcaactttgccaacacaaccttgtccagaagagcctacaccatcaactttaatacctcatcatgaattgaaagcattaatcatggaaagcatccgagaatgttatgaaacaacaaatatgcctattctcagataccataaaccatatccgacccattatgattatgttccatatctcctaaattacataaacttacaatttgaaaagttt

SEQ ID NO: 150475 - DNA, 527 bp, Cannabis sativa
gttggcctccatctctaaaggctgacctcctcttgctaaagctggtaggaacatgacctgcaagatcctaacagacacatggacgatcagaccttggcaggcacatggccggccagtccctggcaggagcatggccaaccagacctcaacctacagacattctatggacagctagcctccatcctaggtgcacggccgactgacttttccttggcaggacattaatgcacaaccctcattcgtggatagcaagtcaagcaacagattgggccttaacatcccacaaaatagaggggaaatatatatttttaaggggaaatttagtcatttgtatttattaattaaatatgtaaagaataactttattttacctatttctaaggatattaggcatgtaagctctactatgtaaagagcattagcctatctctaaaaccataagtcattaacctctaagctccctaagctctcttctttaagtttgaaaccctaatctttgctcctcctcttttctacacgcacaaagg

SEQ ID NO: 150476 - DNA, 635 bp, Cannabis sativa
  modified_base (576)..(588): a, c, t, g, unknown or other
catataatcgcatatatgagcattagaatactgtgacacgcccaccatttgaaaggcttaaccaatgttcccacaacaaaacatacagagtacaaaatcctggagttctaagcagcgactagaaatgacaaaatctctgtgaaacctaggatgaacggacatgcgagcattcgaagtgttcatccaaatacccgcgtgtattcaaaagataaagttgcgactagtcaaaaattcttcctacagtccacggttatacggatttcaggtcattttccctaagattacccagttccttaccaaaaagcacagtcctatatgtatttcctacaaacgtacattcccaaaaaccctcaaaatacccaaagcccataaaaagcttttttcttcaaaacagaaagcaaaaatgcaataaaattcgaaactaacctttagttttggaaaattgttcatgcgattgctcttgataactcctgaaggttgagaaaattctagagagaaaggtagaaatctgggcaaggtgtgaaaatctctttgaagtctctaagaaggaaggaagagggaagttaagaaaatgannnnnnnnnnnnnattttgattcgaatcaaagggtttaaatacccatatccctcattaat

SEQ ID NO: 150477 - DNA, 530 bp, Cannabis sativa
aatccgcacaagtacggatatccgcattttgcggattggattagattggatcgtgcggattaaattggatcgattattttatgaacactcctattaaagcatctctaatgacgtggcctgtgttataaaatataaatatagtgaatatgtattgttagtacatgttcataaaattaaactctaatagtaagtataataatatggtttattaatgttattaattgttaaaaattatgataaatttagcacaaaatataatatgtgtcaagttttatagtacaataaattagaagttttcatcaaactgtacgtattacactacattgcatgaaaaatgcagtttaaaatcttttgtagtgtgattgtaatttgtatttctattaaactgtgcagtggtttgcagtttagattaaataattgcgattcaaaccacatcgcactatttattacaaaattacaaatttttacaatatgatttatattcttttttttttatatatataaaagaataaatatatgtatttatatat

SEQ ID NO: 150478 - DNA, 526 bp, Cannabis sativa
aaaataatacacaaattaagctaaaaaaaatgacaagtaattctttattcaagagttatcaatttgatagtctataacaactttcgataattataaaacgtgtggtaagacaataatatcatccaactataatagtttattgttgtaaaatttatttgctatgtaagtacacaccatggtaatttatttgctatgcaagtacacatagtaaaataaaagtaaatatttctttatacatacaattttttcttcctttgtgtttgttattttttgttttatttattttagtttgttgctagcgacataaaataacaataatttatttttattttgttgttggttatgtgaaaaaaaatagtaaatattaagtaattcaatattaaaaactaaccaatctaaaataaccaatccaatccatacttttgcgaatttaatttgagttactatgtggattggattgaatccaaaatataaaatccgcacttagtacagatcgaatgcgctcaaaatagtgcagaatggattg

SEQ ID NO: 150479 - DNA, 606 bp, Cannabis sativa
gacagtttttagtgacacttcaaaagtgtcactaaacccttttacattcaccttttgcgcgtcactataggcgtataaagttaaattttgtcagactggaaaagtatcagcaacacaaataacgtgtcactatatctttcttttttttttattaataattttgaagatatagtgacacacaatgagtgccaccacattaaatatttttctaaaaaaaataatatttaatttttttaattaaatttttttataaataattatctttttattattttttttaaaattcaatttgttaatttaagcagaaaaaatcattattttttaattcatcaaataatttatttgattggtgctcaaaattaaaatggaaacaaaatgaaaatctacacaaaaatttattatttgcaccttaaaatttttttaaaaaaacttacaaaattattataatgcaaaaaaaaaattcatatctgtacaatatcaagaacaatatgaacatatattaatacaaatacaaaaaaaatccagatctatatacacaatgtggcaacaaatgctaactgtcgcggccacaaacccaatcctctatccttggcaacaaatcctaaa

SEQ ID NO: 150480 - DNA, 773 bp, Cannabis sativa
aacaatgatcctagatcactgaaaaaaaaaaagaatgtctcctagcaaaagtagacacaattgctaaggggtaaaaatcaacaagaacaataaattttgaagaaaaattcctatccaacgtcattaaaattgccagaaaatatgcttgaaatgcagaaatctccatctttcacacctaaattttcagtcgatgcttattctactccctccaaatgttccaaatgaaaataagatgatctaagtgcataaaatacaaagaaaattagcaactaatataaatcacaaaaaactatttctaatgagactaaatgtaccaaaaaaacttatctgctaaaaatgtcgttttctagcgaagcaagcatatcatttgaagttgcaaaactcgaaaatttctattccaataactctttaattttaataactcaatatctttataactctaataaccaataattaaaacactccgcgtaaaaaaaaaaaataattaaaacactcgaaaaacccataaatagtataaaattagaatactattattggacttattagaaagataacttggagaaaataaaacataccgattcacaatgtataggcctaaatcaatttaaaattttatatgtaattgcataaaagagtagaaaaattaatgtgtattaattgagtatacaatatataaaagtattgttcatggttattaatggtgttcatcagcttctatatgtggcgccccacgattagttagcgatagtctttaaaaattattttttttaaat

SEQ ID NO: 150481 - DNA, 1016 bp, Cannabis sativa
  modified_base (710)..(723): a, c, t, g, unknown or other
  modified_base (773)..(774): a, c, t, g, unknown or other
ttcttcacttcttacactgttggtgactttggcactgtcagaatgggaaacaatggtgcatcaaagattgtgggtattggagatatttgcttggaaaccagtgttggtagcatattgattctcaaagatgttacgcatgttccagacattcgccttaacttgatatctactggaagacttgatgatgaaccgcccaacccgaataacccgcccgaaccaaacttacaaaaccgataaaaaatacaaaccgacataacttgataaaattctaaaccgcccaatcaataaattgggcgggttaaaaattgacccaaaccgcccaattaaaccgtccaaaccgatttaacccgatttttacttttttttattattttaaatatatatattgttcattaccacattttcatatataaatatttatataatttgtatttgcatgtttctttctggtatcagaagaaagtgagtgtgtacatatatagtagtgtgcgttatgttatgctgaacttgaacaaatagatggtattttataatttcaaggtgtaatctgttgtgtaatgctgaagttgccaaatgggtgttgatctaattcttttttttttttttgtgagtcttttatttaacttttatatcattaattttcatcaagtatatatctattctatataaagtttgtctatataacataattcttggtttatgaaaaattnnnnnnnnnnnnnntatttatattaaaaataaaatagtgtattattaaaaataaaatggtttannagaaattcatggatcactttttatttatatcactttttatttatatataataaaatgaataaaataaatcccattaaattcaaaaaaaaaaaaatacgattgggtttttgctgttgtacatctacgattgggttttctgtaagtatttattgtattcctttttctattacaatttgaacattcccatgggatcacacataatatttcaatccgcgcttctcttttttcttcttcacaactta

SEQ ID NO: 150482 - DNA, 1143 bp, Cannabis sativa
caaaattaagacttaacgaggctagacagacgacaccttaaaaatgtaaacagaacagtactttgaaggatttttccaccaaaatatgaggttggatagttttttaaaagtaaattattaattggagggattttgccacaaattactattattatttttttaactaaagaaccctcttaaagccaatttacaaagtgatatgatcacaaaaataacagctaatattaaatcaagtcgattagaataatgtaacaacaagcattaacatagacaaaacacttgaaatggaatagtttgattgtgaatccaaatcatgcaaacatattaatagttagtctttcaaagatcttgcaatcaagtaaaactgtgtttcaaattgaactaggaaacaatcaaacaaactaaattaaaattgacacaaaccaaagtatgttacaacaacacaattaattcgaatatggtaaacactattgcacccactcatattgatcacaaccaaccacaaatctatttgacactgaaacaaccaacccccatgtcgtgaagagccaagagagagccaccgttaagaaaccatggaaaagcacgagccaaggcaagcaaacatcaaacatttggagccaagcccatcaactaatagataatgctcatctcttgggagtttctccagtttaatgaagtttctttctttcaaaagacaaaaggtgaaatttgtgaaagataaattataagttcttgtttaaaaagtacagactttcaaaagacaaaaatttcttaggaatgaaggaaacacaaaataaataaaggaaagtgtctaagaatatatttctttttaaactctttattggattcacttttattttttcttaaatatattttggttatcttaatttatcttattcctcatttttattatcttaatttttgttatcatatttgaaatagttgtgtaattaaaaggtaatataattattagagtagtaattacacaatataataattacactatattttaaaatgcagagtgtgtttagatatgaggtgaaattacttatgaattcctaatgaggggtgttcattggatcacatccaatggatttggacccatccgatccaatccaattatttattggatatttaatt

SEQ ID NO: 150483 - DNA, 647 bp, Cannabis sativa
ggggaaggagtttacgggtaattttaaagagagaattcaacaatgcaaaaatgaagtgcaaaagtgaaagttggggagagatgatacctcggtggcaaattataatctggcaaggaacaatatgaatgaagcttatacccaatgtgaggttttttggcgtcaacgatcgaagcaattgtggttgcaagaaggtgataacaatagtaaattttttcatgcttttacaactaatagaagacgtaataacttcatttcaaagctcaaagattcgaatggcaattgggtggattggtcttcgggttttccacaaataatggtagattatttttctgctctttttgcttcatcttatgcaaactggagagaagttacaagtagtgtgcaagctcgtgctacagcagagcaaaatatggagttgcttcagtcggtctccaatgatgaagtccgaaaagcattgttccaaatgtatcccaacaaggctcaggggcctgacggaatgacaccagcatttttccaaaaatgctggccggttttttatcaagacgtcatacaactggtacgtaatttttttagctctggaaatcttcctgtgggtttaaacaatactaatctggttttaatatccaagaagaaacaacctatggata

SEQ ID NO: 150484 - DNA, 562 bp, Cannabis sativa
agtagctctaggattctaaaattcacagcctaaaatgttctatttatagtgcttgaaaagatagatgaatccccttagaattaagattttttttttttttttaaaaaaaagacaagtacaacactgctatttagtattttggcaataactttttcaatacaactcaaaattgaatgattcaagatgttctgaaaagctaagaacgagatctaaaacttttgtgctgagcttcaaatccagttctgcttctaaggttgtcaaaattttcaattaagatctgccttgtaaaactgagctcgtcgatgtacttccactatttttcaccaaaatatgctaacatcccttcaaatgactctaaatgcatgattagttctttaaaatatccaaaacaattaaaatcacactaatcaataatttcaagaatcaatttaagaatattaatatataaattcattatatttataagacaaacatggactcatcacaacccatccaaccgcagtacatttatttcgcagaacctacttcactatggataaatatttaagatattcaaacccat

SEQ ID NO: 150485 - DNA, 770 bp, Cannabis sativa
  modified_base (29)..(31): a, c, t, g, unknown or other
ttttagttcccatcaatgggtattacccnnnaagaagtgttccatatatataaatctaagcatatatatatattgtaggggggccaaagcccctgtaatgtataaggtaggtccgccctggttcttcatttgattgttgccaaaactttgtattcctaactctccaaatttgacatatcattgctgcacaagcagcaaacagcacttgtcttcggaaggctgatactttcttcttctctataattcgaaccagttcagccaagttggttgtactagtcttccaacacagccaagttttaatctgctgcaaacattcactagaaaaaatgctcacaagattctgcttcacccgggtatagtaaggaagaaggattagttgctatttgaaatctgagtaaacgaaacctgattatatttatcaactagttaaaaatttaaaacaaaaaaattaattctgtaaaacaactaagataaaaatttatacacaaaaaccagttaaataaaaataaataaatcaaaacctggtttcctgaattaactaaatcaaaaatcgttttccaaaatgactaaattaaaaaccagttccttgaattaattaaataaaaaaattaagttctgaaataaataattcaagaactgatttctgaaataacttaaataaaaaactatgtgggacctaaatttaaatagaaccggttctacaataaaataagtaaaaataaataacacacaatagctcagaaaatcagttctaattaaaaaaaaaaaaa

SEQ ID NO: 150486 - DNA, 888 bp, Cannabis sativa
gtttttgacttgatttcatttcctgcagcatcagaaaaactacctttctcatttcttttaaaaggaaaatcaagttcattgaaaataacatccctacttatgatcactttgttatctttagttgacaatagcctatatcctttaatgccatttggatatcctaagaaaacacatttaacagagctcttccctagtttgtcttcaactttgtgtgcataagctgcacaaccaaaattttttaaatgagttagggaaggaggcttacctttccatagttcttcaggagtctttgcatcaagctttctatttggacttctgttaataagatagcaggcagtgtgtaatgcctctccccaatatttcttgctcattccagcctctagtagcagacatctaaccttgtttagcaaggttctgttcattctttcagcaatgccattttgctgaggagtttttatcacaattctatgcctttctattccacacttcaaacaaagctcattaaattcatcattaacaaattcaagaccattatcagtccttagcactttaatctttgaatttgtttgagtttctacaagtgttttccagtttttaaaggcttccaagcaatcatttttgtgtttcaagagaaaaatccagacctttctactatagtcatcaacaatggacatgaaatattgattacctccagttgttttgaccctactagctccccaaagatctgagtgtatgtattcaagtactcctttagctctgtagttgctatttgaaaattttattctgtgttgttttccctgcacacagatttcacaaaatggtaagcttgcatgtgtgtaattatttatcagaccttgctttgacaattctaccaatccttgttcacca

SEQ ID NO: 150487 - DNA, 570 bp, Cannabis sativa
agctaaacaagcatatggatgattcttcaagcctttctctcttttactattgattacacttttatttgctttcttttaatatttattagcaaaacacaaaaaatcctcaaactcattggttactattgtcactctttattaaccttttgtgtttatttttctactaacgcttttgtccataatcacctcctcatgaaatcgaccgcccgatctatactacaactactgctagtggaagtcacattttgggcgttaaacaatgccacgctttagaagcttggaagaacttgatgcggtaactaagaatcaaaatgatatttctcttatgtgtctatggtgattgtgaacttctaaactaccaagaagcagtataaaaagcaagaaattgagagatgcgctggatgaagaaatcaattcaattacaaaaaaatgacacatgggaaccagctactcctctacaaggatacaagccaattggagtaaaatgggtgtacaaggaaaagaagaatgctaaaggcgaggtggagagatataaagcaagattagtagtaaaaggctatagtcaaaggg

SEQ ID NO: 150488 - DNA, 650 bp, Cannabis sativa
caagagagctggaaacatgcttaaccaattcatgtacgtttatggacattttcaaaagcttgttccaggtgttcgtaaaacaacataaaaacaaccattaaacaactgtttccagttaactcaaaattgagtttttgtaactcctctccgagttaaatcttcctccaacgtccaatactcatttaaatgatataattgagtattgtaacaattttcaacagctagaaacttatcccattgatttcataacttctatatgtaataactcacttaattacatgtgatccttaagttataatctattttcaaatttgtaacttctcgtatgttataatttttatgtgtattattatactatatatgatataatacaacatcttacacatattatatattaatctcatattaatatataatatgtcacatttaaatattttaatctatattatattataacatataatataacaattaattatcttattttttttattgtttcaagttttattcaatttgtctaattattaattatatttgaattttttgcggctaaatcttcacaacgactctacttgtacttttttttttttgaggaaataaacttgttatcataaattaaaaagtatagtcatttacaataacagagttta

SEQ ID NO: 150489 - DNA, 1001 bp, Cannabis sativa
aaaagtttaaatatgcatgtgtccgtataaatgtaaatacgaggtcttttttgtatatttgagaaaaaatcccaagagaaggcctatgcaagacgaagcaagttctagctcgggatactcaaggtctcaagggcaaagtcgatcaggaaggcaaacgtgagaaggaagcaaacctcagtgttatgctgatcaagaaagcatgagtaatacaagaagttatcaacctcggaaacaacatgggaaaggctccagctcggtgtcagagttattgctgctatcccagcgagacgccctagcgagatgcaccttgtagcgtatctgaatccatgtcacaattgacccagtaaaagcggataaatcacagctacatgattttcaaataataaaaactgtatttatttacgtggtgcgtaattaaagtccacaattttgaggaaatgttgtggtgtgattcgtatctgattgtaattaactgcttccctatgttattattaataggggcagaatgtactgaaaaaaggacaaaaaatccttgagagaaaagaacatgagtttgtattcgaataatctaaataagattgactcgtggactatgtagaattttaactgtaaaaccatgtaaaaagcttcgtgttttgttttcttcatattttctataatttctgtgcaaattaatcatgaaataggctttattatcgtaacaaaaatctgcattaacaattagggtatttatcaatttttttttaatattatttcaaataatttattataaaataataagatatcttgtcatatatacttcgtgaattctagatattttgttgagaaaattactttaaagagaataattttacaagagaatattaaaaaatatttatttttactaataatttttgtatctaataagttactaccatattagtttggatttaatagtaatgaacaagaaaataaggttatttttgtaatttaagaagcccaaaacaacattccctctttta

SEQ ID NO: 150490 - DNA, 606 bp, Cannabis sativa
atccttggggcagaagcggctgagatggctgaggcatttttagccatgtcgcccatgcagactcaagggagtggaggaaatctttcgccggaggatgctgatgcttaggacaccgaggaagttgtggacgagtctgccagcaaagtcgtagatggatctactaccccaactgcccctgccgctcctgatgcttaatttttactttaatatttacttttgctagacttttttatgcggtataagggtactcgcaacttgtacttagacaaatttatgcttattttccttttgaacaaatttacatcccttcgggggtatttatttatatgataacatttttgcagtacacgggtacttgcattttttctatttataatatttcaattgcggcttaattacaacttggtgtaataagtgttaactcaaaaaatttcaaaatctcgaaaaatttcataactctttattgatcaatagtacatagtgtgtcgcttatataacccctatacttagaatatttatgtaaataaaatgactaagtataaatacatagcgagtacaaacgatacagtgcgagtactattaataatgaaattttaagctctcgcc

SEQ ID NO: 150491 - DNA, 548 bp, Cannabis sativa
tatacaaattcaataaaaacaaataagtatagaacccattatatactattgacgtcacttaaccacttcatgtcatgttaatatcacatgtgtaattaatttgaaaaaataatttaaatttttttaatttagttttatgtaattttcttaattattaattgatttttaatttaataattgtttaaaaatatctaatttttaatattaaattatacatgtagtattaatgtggtaagtaactaaacactcatgccatcattttatttataaatgtagtttaaaaaatacaataaatatatgtcatagttctaaaaaaaaaatcttaaatagacaatttaaagtttcgttgactgaaaaagctgcgatgacttattgtagtgcttttcgtttgaacaaaaataatgttggctaatttccaaattatactagaattaaattttgaaataaaatatttctttgaatttatatatatagagatatgattttgttccgttattgtatttttatggattgtaatccgtgatgtacggcagccgttagatgagaga

SEQ ID NO: 150492 - DNA, 718 bp, Cannabis sativa
aaacttgccataaaaggttattaaattgttacattattaatacttcttagttcccatccatgggtattacccattaaaaagtgttccgttaatatttttaatatattatttacacaactttttaaattcatatatatatatataaatttgtaaataaaaacatttttatttaccaaacaaaaaaaagtgtcacattgtttaaatattcttttaggtgttgtacatgtaaagtataaataatattttttgatatgtaggtgattgattaatatcttaaataatattttttttaacacagagtttaagtgaaatcctaaatttttctattctattttaaaaaatttgtgaggttttacaatttgtttaaaagaaaactgtaaattatgtttagaaaataaataaataagctggaaaataaactatacatttaaaactatgaatattgtttcttcgacaaataaattaaatctaaaaggcttacttggcttaaaaactattttaaatattattcatgtaggttatgaataatgtttttattatatcattttgatttctcctttttattatgtttctattattcattggtaattgattaatgttttatccaataagatttttttaaaaaaaataaaataatatataacatattatttatatttttagaagttgttgaccgaggttttcggcaaccagattaataatatataagaaagctgta

SEQ ID NO: 150493 - DNA, 1188 bp, Cannabis sativa
cacatatttataaaaaaaaaataaaaaaattatacatacaattaatatttaaagtaacaaaatagtaatttaaaaatctaatacatattacacaattatatttataaacttaatagatcaaatatatactccattcttaaatataattttttttctacgtacaatttaaaaataaattaacaagttctttatacatataatttttttcttgctttgaatttgttattggttattttctttattttaatttgttgttggagacatgaaacaataatgtgttttatttttttgctagttatgtggaaaaaataattttttttcataaatattaaataatttaatataaaaaagtaaccaatctaaaataaccgatccaatctgcacttttgcgaattgcattggattggatttgagctattgtgcggattggattggatccaaaatatgaaatccacacttttttttttgaagaaaagcgtgctgttatataacataaaaatagttagcaatattatgaaatccacacttagtgcggataagatacactatgagcaaaatagtgcagattagatttgatgaacacccctaggctaactaacacatctagtgttttaaatatgggacgagctttttgacataacacgaaattggcatgagcctggaagatacgagcacgactagatatgaaaaaatatgggcttgggcacgatatgacacggcctataaattggcacgagacgacatagaaaatatgtgattaagcacgacatgacacgagaagcacaaaagacttgacacataagcacgaatagactagtttgaaaggcacgacacacgacaagcgacaagcgcgacacgaaacatgaaaaaaccctataatttaataataatatatgtatttgtcaatgataaaataataataaaattttataacactgaatattataatttaaaattattaaattttcaaaaaaaaattattaaaaatgtaaaactaaaactatatattaatttatttatagagtgagatataaaaatttaagattttataggtaaatatttaaattctaataattttaattatttttttatatgactgcttaaaatattattgaaggattacataaatataattgaaactataaaatatacttatagtttagtaattaacttattaattgtaaaaaa

SEQ ID NO: 150494 - DNA, 782 bp, Cannabis sativa
agagagagagagagagagcctttcttacaattttgatgttgagtggtgcatagatatatcttaattgaggtttgagtaacgaaatatacctcaagtgccaaatctgtgttaaagtttcagctccaacgattcttgtcaaaattcaatcagacatcaaagagagcaaccatgagtacaatagttaatcttaaaccccccattatagaaatttgggattgatctatccacaatcttcatcttcttgagtgagaaacttgcacagaagctgaatagaatcagagatgaagttttgaagtcaatgaccacgaatagctgagagaatttcaggacgtcagagaagaaaattgttgtcatcaagcttcagtgatactttatcagcaaaaataataggattgaaggttgcggttgttggagcaaccattgaagcaagcagaagtgaatagagaatggagaatggagataaagaatgagatgatcgaagaggacaatgcacgaaagtgataactctatgaatatagagttatttatatctttttgtgcattaatttagttttgttctcaaatatttttagtaaatttagtgacttttaattagtttgatttagttttaaataaattttaattttgaaattatttagtttcctatctataattattaatctcacttttgtgtatttttagcaacttaaatgtaaatattaaaattaaaggagatcaaagaacaattgaggcctcattcaaagactatgtgttcaccaaaagcccaaattgattagtgattt

SEQ ID NO: 150495 - DNA, 568 bp, Cannabis sativa
cagacaaccggacccaaacccaaacctagacactgaatcaaaatcgaaacctagtctagttacactacactaggtcctagtctgggtcgtagttcagagtctgggtccaaggtcaggtcttgggtctcagtgccagttcaaaagcccgggtctcgggtccaagttccccatccaagtcccagtcctaggtctcagtccgtgtctgggcccattcggggttcaagtcctagttcgagtttaggttcgattttttatccctctccaggtcaagatctgggttcgagtcctaggttcgagtcaagatccaagttggggtctgagtcttgagttctgatctgggtttgggttccgttgcctgagtccaggtcccccactatgttcgggtccatgttcggtttcgggtcctagtcccaattcaaatttcgattccgtgtttgaatttgagttcgggtctaggtttgggtcggggtttgagtactggtatgagtctagggttggctttgggtcaaagtccggatcacggcttgggtctgggtttgggtctaggttcgagtccaagtcttgggta

SEQ ID NO: 150496 - DNA, 1175 bp, Cannabis sativa
atctctattaagtcaagctattaagtcaagctcaaagtcaagctcaaaggaaattatcatttcacttctatataattatagaagctatagatttcatatctatgattagcactcccactcaattatactactattttttcaaaatgtaagtattggaaagatccatttggtcaactttaacgaacaagtcaaagaacacaaataatacagttaacctagaacctaaccatctcatgataagatctattgatctaagatcaactaagcgatattgacttagaaagatataacgataagtttatgatatcttttccactgtcaatattggtcaaatttgacatatactccatatatctgatactagtacattttgctaatgccctagaaatgacattccacttatacaagtgtaagtaaattttattgatgattatcacgtcaattgaaatccaatgcactgataaatcatggaactgaaaactttgaaacatacaatcacaattactttccactatgacgacatggttgtaattgtgaataactagtaaatgtataattgagatctaatctaaatttgtgtgcaactttttaatttcagaattaacacataaaaggaaccaacatttgatccgttagaaaaatcaagattccataactttagatcatgttcccggccatccacatattacattccaaaacagaagttgtaagaattatcttctttgagaaactttaatgagtgaatcaaagacactaataacatgaacatgaattcattattacttaagatttaggtcgatctactattgatcatctttattatatgaattatgtgtttatagtaaacagcatgtttgataaatacaacttaatatcatattcattcttatcatatataatctctattatatacaacacattcacttaaatgtcatattacatcagtattccaaattgagattacttgcacataacaagcatcagtgaatcatactagcaaccattgattgaagattcctaaactttaatacgttactgattattttattcatggctaagtaatcttactccataaaactacaagtcacaacctcatgtatgaataagaaattttttgatatttatatatgaatattcaatattaaatttaataatttaacaataaaaatgttcaa

SEQ ID NO: 150497 - DNA, 523 bp, Cannabis sativa
tttttcatttagagaaaatcaaaggaaaataaggaaaaaaagaccaaaaatcaaagaacctctcttctccttctctctctcttcgaaccagccataaactagggaattggtggctgatttgtggtgttttcagcaaggaattcaaggggaactcaagttaaggtaaccctaaaacctatggttgttgtattttgaagcttttacttggtttgagtttatggttttgaaaagtaggagttgttagggtttgattgttgtataattcgaattctaagtttgatttgagttgactatagcttctagcagttggtttggttgtattatgatgaaattatgcaagtttgaaccttggaactcaagtttaagtctttaatggtatttcttaatttagtgtgttttctgggaattattggttggaatatattgtgtatatcctaattaggtactcttgaaggtttggttgcatttgctggagttttgagcaaaatatgagatttttgggtgaactggtgtaaaccggcta

SEQ ID NO: 150498 - DNA, 537 bp, Cannabis sativa
tgtctttctcgccgaatacctctctagctgcacataatttctttgctcatactctcaatatgcctattactgaatgccatgagcgatatttatgattgccttcatactccagtcgggacaagcaggagctattcagtaacatcaaagaaaaagtttggaaactgcttaatgcttggaatgagaaaaatttttctgttggtggcaaggaggtacttttgaaagctgtggttcaatccattccaacatatgcaatgagttgtttcaaacttactaagaagttttgtgatcaattggagagcatgatggccaacttttggtggagtagcaatcaaaatggcacaaaaattcattggaagagatggaaatctctatgtaaatctaagcatgaaggtggaatgggattccgatcttttgttcattttaatcaagcactcttggccaaacaagcatggcggattttttatatgcccgattctctactaagtcgtctcctcaagcatagatacttttccaattgttcgtttctggatgcaaaca

SEQ ID NO: 150499 - DNA, 680 bp, Cannabis sativa
ttttatgatttagattattattttttctgtaatgtttttgttttaattctatgattttggatgaaaatctttttcaaaatccttaaaccatcactttttttttttgtgaaaagcttggacactattagaatctctctaatagtcatatttactctctccttaattctcttattttttttattaaactatattttaaaattattcccgtaaaacaaatatctcataatctatttttatggtatatatatagggtatttctagcgtagggcatagtatattgtacttatgctataaggtagtttttttaacccatttgtaattagaaaagaaaagatgtatataacttttgttgaaaaagtgtataggattatttatttgaaattttatatatttctattttcgctgaaatcaatctttatatattgttttattgattgagtcaccttaagactcatcaagcacacgctttagacattggcgcagggattgtgcaagtggggttgatatttggattttggcattctcttaataagtatataacacaatattttttttttataaaaaaaactatatttttacgtttattttcttttatatagttttacgattttctatagaaacaacaaaaaaaaaataacaaaaaaatacataaaagtaacataaaaataatatctaaataa

SEQ ID NO: 150500 - DNA, 726 bp, Cannabis sativa
  modified_base (381)..(382): a, c, t, g, unknown or other
gacttcaagcaatccttccatttcgggaaggagggttgaagacgtgccatacccccagtgatctttcttgcacaaaaaacatcatggatgcaggagtcacgttgaattgttatgaggcaagcttcagcttccgtgaaggaaggctgaagttgcataaaatttaaagcataaattttgcctgaaaagatcaaaaggagaaagcaccacgaggagtaagacatactttaagtactcgttccattttgggaaggatggttgaagacatgccatacctccagtgatctttcttgcacaaaaaacattgtgcatgtgagagtcactttgattttttgtgaggcaagctttgccttcgtgaaagaaggctgaagttgcataaaaatnnaagcttagactttgcttgaaaatatcaaaacgagaaagaaccacaggaagtaaagcagacttcaagcaatccttccattctggagagtagggttcaagacgtgccaaacaccctgttatctttcttgcacaaaaaacatcgtgcatgcgagagtcacgttaaatttttataaggtaagcttcggctttcgtgaaatatggttgaagttgcataaaaattcaaggttagattttgcttgaaaggatcaaaaggagaaagtaccacggggagtaagacagacatcaagtagtccttccattatgggaaggagggttgaagacgtgccatagccccagtgatctttc

SEQ ID NO: 150501 - DNA, 528 bp, Cannabis sativa
taatattagcatatattgaggcagtagaagatgaactagctgaatatagaacaaataaaacaagctcacattaatatgcataataaaacaataaattcaaacattggttaatcccatccaagatactaaacacacattaatataaagtctttggacagtaatattaactgtaagcggtactcttggtgtagcaatcaaacattgacaataaaactttgtcaaacaatagattaatctttggactaacatattgttcacacaaaataccttataattatcacacatttatttccacaggtatatttgaaatttagcaaaatattcatttacctttgggttagtcatatatgcatcaattacaaaaacacaactatcctaatatttaaataaattaatctacacaaaagaggtcattttgacgacatattgttttaattagggtaaatagtggcataggtaccccaaattttcgatttgtaagcggcataaacccaatgattttttttagtggcataagtacccaatgtt

SEQ ID NO: 150502 - DNA, 632 bp, Cannabis sativa
ttcaattttaaaataatcaaacttttccaagttcttccgaaccttctctaaatattttgccattttcatgccttttgcttggtattcccccaagacttgatttataactaattgtgagtcgctaaatcatacaagatttttagcctttaatgtctccgttattctcaatccagcaaacaaggcctcgtatatagcctcgttgtttgaagtatcaaattgaaatctcaatgcgtagtgaaatttgaagttgtcaggcaacatcattatgacctctgccccgacccattctcatttgaagcctcatctacatatagcttccaagtttttgcatcgtgctcaacagcagggtcttcttttgagattgtcccttcaattagaaagtcagccaaagcttggcctttgattgatgctcttgggtggtaagtacatcaaattgtcccaactcgattaaatattttatcaatcttcttgaagcatcaggttttgagaaaacttgtcttagtggttgatccgttaggactttgattggatgtgcctgaaagtatggctgtaatttgggagatgcatgaatcaggcataatgcaagtttttcaagagggggatatctcgattctgcccctagtaatctttta

SEQ ID NO: 150503 - DNA, 551 bp, Cannabis sativa
aaaggacgaggcataacttggatgtcttgggatcgtatgtgtgctacaaagtctgaaggtggcttgggctttcgtagcttgtacgactttaatcttgctatgcttgctaagcaaggttggcggcttttgtgtaaacccgatttcctcgcggggaaaatttacaaagctagatattaccctcattcggacttccttactgccgagttgggtaacaatcctagctttgtttggcgaagcatttggagttctcaagatcttttgcgttctggaattcggagaactattggctctggtacaaatgtcaacattcttcatcatccgtggctccctaatttgaagaatccgtatgtatctgtgcatcaccctgggttagtgaataaatatgttgactctctcttcataacagattctagagtatgagatactgatgttgttagggacatgttctgtgcctcggatgctgctgcaatcctaggaattcctctcagtcttaatgctacatgtgattcctggtcttggatgtatgagaatactgaagaattctctgtgaa

SEQ ID NO: 150504 - DNA, 621 bp, Cannabis sativa
gggtacaaatctatatatatatatctgtgtataaatctatatatagataattttagggtttataaatttaggtatttattttttttatttgtgtatataggtattttaatttgtctatatatattttttatttgtatatatatgtgtattataaatgtaaagatgttttaaatatatataatatgtatatttttttatttatatatacatatataaaaagtatatagtatatattaatgtgtatatataatatatatatattgtgtacagtttattaatgatatatattgtattgtattattttgtagcatttttaattaatttctgtaattgataatatattatacttgttgttttcagattgaacaaaaagatttttagcagtttgagaaggtgtacacaaaagttcttttgtgaaatgtatatttttaataatgtgtattttatttgatttatattatattttatttaaattaaataagtttattggttatgttgaagatgtattattatcataaaaaaaaatgagaataaagaaaatatttaaaaaatatatataatttattaaaaatttgttttataaagataaaattttaattttaagaaataaataatatatta

SEQ ID NO: 150505 - DNA, 520 bp, Cannabis sativa
caaataagaggcatctatcttctataatactaacagaattgttaaatgacaacaatagtgcttagtgaaattcattattcaatttttatatattttgatttaatcattactattattcccccttataatcaaatactattaattaatgcagtattaaacatcattaatacttaataggtaatagtattgtattatttgcataatctatatgctcatatactttagttatactatatagtacagttttaaatactattaatttatactatatagctaatattatatagtatagttttaaatacttagttaattaaaaaaaaatattctatttggttgtgttcttgtggagagaaaaagctagttatttatgttttgtactattagcttttgttaggtacataattagttaaaaagtggttaagtgttagaggttattttataattacaaacatatatatacctctctaatcattttttcattgaataatacagaatactctttatctctcaaaacactctt

SEQ ID NO: 150506 - DNA, 772 bp, Cannabis sativa
ctgcattcctatgcacttgcttctggacaaaaagttaactttgccaagtcttctattttctttagcaagaacactacggctgatgtgcgtagcagaatgtgtggtttaatggggttgagagaggcatcggatgatagcttttatttgggtcttccttgtattatgggtataaacaagaacgccatcctggggttcttgcaggagaagatgaggaagagaatttttagctgggaaactaagtttctctctaaagcgggcaaggaagtgttaattaagtcggttgctcaagcattgcctagctatgctatgagcgtttttcttttgacccaagagatatgttcgagtcttgaagaaatgatggcgaagttttggtggaagtctcaatctaagaacacaagcaagggtgtaagtttggttagttggaaatgtctttgccaacacaagaatgtaggggggttaggatttcgtgatcttcgagattacaacctctcttttttgggtaaccaaggatggggattactaactatggaaaactcgcttattggtaagatttacaaagcacgttactacctgaatgacacttttatttctactgaattgggacaaaatccaagctttatttggaggagtatttgggctactcagcgactggttaaagaaggtgcaaaactatcaatcgcagatggttctcgagttaatgttcataaggatccgtggcttccccatgagtctaatccttatgtcataactgagaatcaagggcttcaaaata

SEQ ID NO: 150507 - DNA, 682 bp, Cannabis sativa
gttaatagtctttgtgagaaatattggccaacttcatcctctattactaaagaatctgttaggaaatgttttaccaccaagtggtggggtgattctgatgaggatggcgtgaagttggcagttttgtattttgtagaatggtttttgcttagtggtactaagcataaaaatgtacctaggtctattttagatgttgtagacagtgggaggtacgatgaatttgcttggggacggagttcttttgaattgactgtttcatccttgaagtgtaagcttgacagttgggttgaaagtgttagaaaagcaaggacttcacggaataggccgagtgttttttacgctttgattggttgtcctcatgtttttcaactttggttttatgagtgttgtaagtacatgaaaggtaagtattgcaaaaggaaaattcgcgtattccaatgattactcagtggacatgtaacagtccgccgactttcaaagttttgaagactactatttttgatgtttccaaagacaaggtatatctgtttgttgttttttagttttttagtagttgttttttattattattaaactttattgttgaaattttcattttcttgtttttcatcagctggaactatcaaatatgagacccactcctgctgagttcaaggctttgaaattgagcagtttcaagttt

SEQ ID NO: 150508 - DNA, 897 bp, Cannabis sativa
  modified_base (835)..(837): a, c, t, g, unknown or other
gttgagtcctcctggaacgagtgggccttgtatttgggccaccttcaggttgagtcctcctggaacgagtggttcgtatagatcttgagttgggaggccttcgggagcctattggctcttttccaggacggtgagtggtctcttcaggatgagtatcaacattttctctgttatcagacatggagaaaaggttttttttatgaagagggttttttcttagcttttttcacgaaggctctcaatgaaagcaccattaaagcctattttgtgattaattggcacccaaataatagtaataaaagaaataaaaaaaacacaaagcttttttacgtggtaatgcagttaaaattttgcatagtccacagtctatcttattagatttctgatacaaaactagggccttttctctaaaggattttatgtcccttattcaatatatcctgctcctatttatagttacataggaggacagttaattacaaattagactgatatcctacaaaaacaatcccctaaaattgcaggatttgaattcatcccacgtaaaataaatgtgattattatttaaaaatcacacaactataatttatctgcttttaccaggtcaatgcgtacatggattaaatgcgttgcaatgtgtatcgtgttgggacttctccctgggaacatagcgacaataaccttggcagcgaactagagcttttcccatgtcttttcgaggttgataatgtaaatcttgtcatttttgtgattgaagacattttttccatttgataattgcagctcttggtgataagatgaacttcaacagtcaacatcatttgaatgtcagctnnnatctgagagagctgactcgatggagcagtgaatcttattgaaagatgtttgaagctgatt

SEQ ID NO: 150509 - DNA, 598 bp, Cannabis sativa
tgttgaactaaattagttggattatcatcccactcattacctggttaactcataatataaatataaaccctaattattaattattaagcttattgggatattacaattagattagagatttgaaagataaaaatctaaatacaaaattacacaaaaaatttgaaattaattccatgaaaaagcatgaatttttttttagatttggtgcgaatggtatgcattgcataccatccgcgcgcgtgggaaggaggccctgaccgagaaaatgcagcacgggaggctgcatgcagccgctccgcgcgcacatggcccctgttcagacaaaaaatgcccaaacaggtgaggaacctcggacagattcctgtcctaagccgtgtgcaccccgtgtgacacagggtattcgcgcgcgtatggggtgtcaccacccctgatatttttccaattttcaaaaaatcataactaattcaaataaaattgaaatcacattctataaaaaaagtgaattgcttaatttttttccatactatccaaaaaaaataatttcagaacaaaattataattattttatgtaaaaatcaaacaatcattaataaacaca

SEQ ID NO: 150510 - DNA, 1038 bp, Cannabis sativa
  modified_base (47)..(58): a, c, t, g, unknown or other
  modified_base (146)..(148): a, c, t, g, unknown or other
  modified_base (184)..(187): a, c, t, g, unknown or other
  modified_base (942)..(947): a, c, t, g, unknown or other
ctcagatcttgattatactctactcagaaaggaatcaagggttagannnnnnnnnnnnaggagacatattattctgctgcattcaatgtaagatttctcatacttcatttgtgcttaattaatttcgttttagaagttcatatttnnnttgttaattaacacacttgtgagtagatctaagatnnnngtaaaataattccaacaagttatctgcgatactggtgggcatcgaagtcctcggtgaactttggaaggacataaggaagaacgggccggtagaatcaatgagtgatgtccttgaccgagctaaaggcttcatcaagcttgaagaagccattcaacgagcggaaggtgaacaaaagcgaggcaagtcaaaggctccttccactggaacatctgcccaacttcctaactacccaaacaattcaagctcaagtggcaagcgttccagcaataaccacaagcaagggaacgggaagaaaggaaagttcaccgaaaaatccaaacagacttcccaggagaatcatgccaagtacactgcattcactattctgactgaagatatagaaagtgtatacatggcaactcaatcgctggccccgtacaagaaacccaggcccatgaagaaagacgccaacaaaagggacatgacaaatttttgtcggttcgatggagactacgcccacgacactaatgaatgctacaacttgaagcgggaaattgaattcctaataaggaaaaataatccacacctgcaaaagtatgtgaagaccgaccgaggtcagaataaccaagattttctacctccaccagtagatggacatctgcaagtcattattggaggccctcacattgctggagattcgagcaatgctcgagagaggtatgcccgaacagtgcagcacgaagaagaagaaattatcctggccgtggaagaaaggnnnnnnaaagttccacgagcaggagagccgaccatatcattcaacgatgaagacactgtcaaagttaagtttccacacaacgacccgctagtcgtgg

SEQ ID NO: 150511 - DNA, 652 bp, Cannabis sativa
tacatataaataatatatataattatttttcaatgggtattaccattaatacttattcaccaaaatttttaaaaacaaatataattaaatgtctatttaaaaaatattaatttttacaaatgaaattttaatgctatgataataaattgttcatttttacacttctaaacaattttttttttacatttctacggaattcaatatagaaactcctattgcaactaacgctgcaacctaaatcgcaacaaaaaatcgtataaaaatccctatttcaactagtactgtaaccactttagaaacccaaatcataaatttgaagaaaaaaaaaacaatttatgaagtaattcccctaaaatttatgtgtttatttattatttatttttaaaaaattatatttttacaatatatcgaaatatatttatatttaatattattgttatggctttttctcaagctcaaactaatatttttatctctcataaaacaacctcaaccatataatataaaaataattattttaattaaataacaaaaataagtataaatactcacctttttaataataactattaaaaatgcatctatatatacatatttatatttgggtatactcttaatggatattacctatgaatgagtattctattattag

SEQ ID NO: 150512 - DNA, 653 bp, Cannabis sativa
cactaagtgatataccacacatccctgtacttgagctggtaacaccgtaatgtactccttaaacaatatgcactataccaatgcactttgtaccatttgtgtacaagtgttggtagtgtaacaataataacaagcatgcatatacatttaacacatatatacattcatatatatataccacatattatacactgttcttacctcttttctgaattcaagtgagttggctgacctgaacgaaaagtctcgtgctagatggatgccctaatcacatattaaaaccgagtaaatcacacgccaaaaccttaatctaggaaacccgaacctacaacttaaggttctgttattactagtagggactacaatatcctaggaggcagggaaacacccaactaaggcactgaattgacgtgaatcgagaaaacgagttgtttagggaatctgccgaaactggttaaccagttttacaggtcatggaaaacctcttaaccggcttgcaccaggttttctcaaacaactccaaacttgctcaaaacttgtccaaatgtcaccaaactttccagaatacctaaaatgatcttacacaatatattccaagcaataaaacccagaaaaacactatgaaacaaaatatgccattgatgacccaaatt

SEQ ID NO: 150513 - DNA, 592 bp, Cannabis sativa
  modified_base (30)..(30): a, c, t, g, unknown or other
gtgacatgaatcgaaaagttcttggcttanctcaagaagcttacattaatcgtgtgctcaaaaggttcaacatgaatttatgtaaggctgaaactgttcctactctgaaaggggacaaatttagtaagcaacaatgtcctaagaatgacttggatagaaaaccaataaagaacatcctaagtgtagtacgatttttttttatgtatgcttaggtttgcactagacctggcattacttttatagtcaatattcttgaaagatatttatttgatcctggacatgatcattgggttgtagcaaaaaaaaaatcataagatatttgcaaagatcgaatagttttatgcttgtgtataagcatgtcaacaatcttcgagttgttggctattaatattcagattttgatagttgtgtgaatgatttaaattgaacttctcgttatattttcactttaactagtgcaagtatatcttgaaaaagtattaaatagactttaatcacatcatctactatatatgatgagtttgttgtatgttatgggccatctatgaagctttatggttaaagaaatttgattttagagatacgactagtt

SEQ ID NO: 150514 - DNA, 541 bp, Cannabis sativa
agggaaatctcactataacaatttaattaaattcttaataaaattgaaacaatcaaaggaaccaaaataataggcagcaagtaccccctaatagaaatgactctggtttattcatgttctacaactgtaacaagccaggtcatatgacacgaaagtgtaagaacatgtctaggtctgcttcgcaggctaacgaaaataataggcagcaagtaccccctaatagaaatgactctagtttattcatgttctacaactgtaacaagccaggtcatatggcacgaaagtgtaagaacatgtcttgttctgcttcgcaagttaacctgaaagaacagctccattttacagctatgatttcagagatcaacctcattggtggatctgaagggtgtgggtagatactggcgcttctcgccatgtctgctatgataaaaattcatttaaaacatatgttgttgctactggggatcagaaagtgttgttgggcgactcccacaccattatagttgctggtactggaaatgtggaattgaacttcacctct

SEQ ID NO: 150515 - DNA, 583 bp, Cannabis sativa
cctttaattttctacacttagctcaatatgctaaagtttttcctctgtgcaggtcggtctgaagttggcatacacttactcccgaactaagtccgctgcttccaagaaggcggctctgttcgacaccttgaaggcagaggtggacttgggcaagaaggaagctgaagaacccagggcagaagcgggagctgctcggttggagttgggcgaagccaacaagaagctgtttgctgctgagaagaaaatcaccgtgctaactaaggatctcgaggttgctgaccgttttgaggagaccatcaagatcttatctgctgaggtaaacagtcttcaagatgagaggacttctctgcgagcagttcttcatcagatgaaggaggagaaggatgccaaggagacagtcggtctcgagctcttctttgatttttggaaggctaatccccgggccaacttcgactacttgagcgacgctaaggacatgaaccttgagtattgcatggcccaagtggcttatggtggaaccgaggtggctgcttcaacctccggtcaggctgttgatgctcctcccattcaaacaacagatcct

SEQ ID NO: 150516 - DNA, 643 bp, Cannabis sativa
  modified_base (43)..(49): a, c, t, g, unknown or other
  modified_base (589)..(590): a, c, t, g, unknown or other
acaaattcttaataattgttttagaattaacaattatttatannnnnnnaaataatttctagtgtttatgtaataatttctagggcttgaatcttctctagattggcttcaattcctcgggcgttgatgataaagcctaaaaacttacccgagctgactccaaaggagcactataagggattgagtttcatgctgtacttcttgaggactttgaagcattcattcaggtcacctatatgccccccagccttcctagattttacgagcatgtcatccacgtacacttccatgttccgtccaatctggtctttaaacatcttatttaccaatctttggtatgtagctccagcatttttgagaccaaacaacatgaccttatagcaatacagacccacatctgttcagaaacttgtatgttcttggtctggtggatgcattttaatttgattgtaccccgaataggcgtccatgaagcttaatatttcgtgccctgctattgcgcccacaagctgatcgattcttggaagtggaaaacagtctttggggcgtgccttggtgaggtcggtgaaatcaatacaaactcgccatnncttgttcggcttgggtaccagtaccagattagcaacccaagccgggtagaaag

SEQ ID NO: 150517 - DNA, 809 bp, Cannabis sativa
  modified_base (375)..(381): a, c, t, g, unknown or other
accattacatctccttagtcacaaaatctttgatattgtgaaattcatttctatatgtctactccttttagggtattggattctttattatttggcaactatatatgtattagtttaaaagtgacactagtagttaatccatgactggaataacgccaaaaatcgtatagaactttctacatactgaataattatctagtaggcttctaggccactttaacatctagtctcactagtagatttagggacttcgaattggtttttatacttctacaaaaattactgctctacccctagagtaattaccatttcataagtagactttctagcattaacgcaagtctagaaaacttatttggtgtagtctaagagtannnnnnnaccacccttattgaccaacatatagttcctcttttgttcttaagatttatttaattgtcttccaatgttcctttctttgaattaaactgatacttactcataactcccactcaatagcatgtgtctggtctaatgcataccaaagtatacatgagacctctcattgtcgatgcttagggaatttttttatgacttttatcttttctaaaatagttaaaattgttctttagataaataaaatctatgtctaggagtcaaaaaacttcctttagagttagcaattagaaaaatgcttcaacatctcactaaagtaagtaacttaccaagtataccacaagccacatgtttagataatctcaaacctatgatactaagatcgagaagttttgttaagtccattgaataaacttattatcaaaatttctctt

SEQ ID NO: 150518 - DNA, 577 bp, Cannabis sativa
gtgcatttttattgagaatttaaattattttattacattgattttgtgcatttaataactcttttcttctaaggaaagtttccttctcagctggtctctttttggtttaggaaacttcttgtaagagaatgaattctctcatggaaggttgtgtaattttgggaaacttgactttccctttttctaatggatgatttcggttttgcctttatttgaacaaatcaaataaactttatttggcaggtttgaagtccgaattcgtgatcttggtttaatttgaaaagtttccttttctggtctaatttgctgcgacagaatctgtctctgatgctgcaagtcaggaattttttaaggaagttttgtacagctgagaaatcatttttgtggttgtctcgaggtttttatgttctataaataggacctagagagcagtcaaatgattttatctcttctattctcttattttatctcttctattttcatattttcatttgtaaaaacctagagtgttcaactaggtttttgttttcttattatgatctcatactattcgtagaataggttgaagagaagcttt

SEQ ID NO: 150519 - DNA, 690 bp, Cannabis sativa
  modified_base (75)..(83): a, c, t, g, unknown or other
agaaactatatagagcaacccataaactctcaaaatacaaaaacttgaaatctcacttttctctctctctctctnnnnnnnnntctctctctctctctctcttgctacacaccgcctctccttttcaatttctttctgcggtcacaaccctaaaagtataaatatcctatatatatcccacaaaccctaattaagccttaaatatatatacatatatattaacgtaaaaacaaaactgttacaaataaaaataataaaagaaaactaaataatgaaataataataaaaactaattaataatagtaataataataatatattaataaactaaataatatatacccatattattattcttaacatacctataatagtattcataaataattaaatattaaattatctctaataatttaattatttatctatacacaaccttaaactaataaaaaaaaaattattgtcactaaaaaaatttcatattccactaaacttataaatattcaaaataataaattatcgccattagcaaacaaaataaactaaaagtatatatatatataaaaaaattaattacccaagaaggagaatgttacaattatcacctcggttagcagaggacatggtcagatctagcattgagtttgttgtaagcaagcttcacaacttgacgctgcaatctaatctgtt

SEQ ID NO: 150520 - DNA, 586 bp, Cannabis sativa
caccttgttgtttctccagagtactttgactggtcttattccgaaggaccttatcctttttgtcaaggatctaaactagttgttcttcgtatgacaaatctggttgcagcccaacattttcataaattagtacatgagcagggtctgaagcgtactttgttagcatagaaacatggaatacgttatgaaccgctgaaagagctggagacaaagctaaatgataagccacatgtccaaccttctcaagaatctcaaaagatcctgcaaatctagggcataacttacctcgtttcctgaaacgcttgatccccttcattggagacactcgtaggaacacatgatcccctacttgaaactctacatttctacgtttcggatttgcatatctcttttgcctgctctgagaggcaagcattctggctttaatcttcttaattgcttcataagtccgctgttatgactctagacctaagtatttcttctcccctgtctcatcccagtgaatgggagacctacactttgtgtcatataacaattcataaggagccatccctattgtactttgataactgttattatacgagaa

SEQ ID NO: 150521 - DNA, 503 bp, Cannabis sativa
tgggctggcccaaaaccaatgtaaaaaacaaaaatattggaatttgggttaaattttacaaaaaactcttatacagaaatcttttaaaaaatactgtatctttataaaataatatctttataaaataatagtggaatacaaaacagaacaactaaaaataacagtgaaacaactaaaaattaacagtagaagaactttgaaaacttaacacagtacacagtataaaatttatacagtaattttgaaaaaatttcgcccacagtataagtgtaaaaacattaaaattttcagtatgtggtaaatttgtaaacatatctttttccatgtcatgtttggaaaatgaaatgacaggtatcaccaccccaaccatttcgtagtgggataccttttggagaattttcaaaaacacaaaaataaaaataaaaattttgtttataaattttgttttggaacaatcaaaatgtgttctataactatttttgttttacaattttaaaaataaa

SEQ ID NO: 150522 - DNA, 612 bp, Cannabis sativa
gaagaggaagaaaccttagtgaaaagaagactatcgtcagcaaaaagaaggtgagaaatggacggagcagagcgagaaatggaaatcccatccaaagagttagaatgcgtcttaccattgataatcccagagagaccttcagcaacaagtaggaaaagctaaggcgagagagggtcgccctgacggattccgcgagtggggagaattttgtgagagagacaattattaatgcggagacgaaaagagacagaggaaagacagttaagaatgagggagatgaagggataggggaaaccaaaatgttgaaggatgtgctcaatataggcccattcaactttgtcaaaggccttttccatatccagcttcaaagcagcccaaccgactttcccatgtttacggtttgatcgcatgaataacttcgttcgcaataataatgttataaaaaatgatgcgatcagagagaaaggcgccatggttatgggaaataagatccgagagagaagatttgaggcggtttgcaatagttttagagacgaccttgtatagagtggaacagagactgatgggacggaagtccttaacccgagaagcatttttaactttgggaatgag

SEQ ID NO: 150523 - DNA, 613 bp, Cannabis sativa
atagcatttgaatcgagaatcaaaatttattgttaatctccttacaaaaaaaaaattattgttaatctgtaaagataatatgggtggaagaagatggaaaaattaatctttatttcatttaatattaatatgtatataatattttttttgaataatatgaatttattttaattaatttttgttttttaaaattattttttcaaaataattattagtttgaccaatactatatttacatgtggtactttatttatcaactaacagaatgaaaaattaagtgttaagtttagaaatatgaggatatgaataggaactacaataatgacatcaattttatatgattggaatataaaaataatggcattatgaaaaaatttgatttataatctcacacctgtttcttcttctacataatctcacacctcctttttttttttttttgtcaattcataataaattttttctatataaaaaaatacttttcctatattatgcaaagtaaaaaaaaaaattccacatatatagttatgaatacatatatatataaatatataaattattgaataattatttaatttaatttatatttataattatgtattttttaaaaaat

SEQ ID NO: 150524 - DNA, 601 bp, Cannabis sativa
ttttaattattaatatatatatattttctaaactttgatgaacactaaattttgcccatttttattgaaagaattaattttaattttaataataattcttaaaaaatgaacaaaaaaattattaaaaaatgtgatcaaattattaaattaataaaaaaaaaataagtttacttaaaaaaaatctaaattgttcctaaaaaattatattcaaaccttattatatttacaaacacatatcttaaaaattcaaacaagaattattaaaaatctaataaataaatggacaaagtttttgtgaagaaaaaatcaaataaaaatataaattattaaaaaaaataaactaaaaaatattatatatgtttatttaagcaaatcaggatttttgaaaaaaaaaaaaatagattgaagtttgtttcataaaattaagtttctataaaaattgaatttttaatgtataattttttttatatctaaatgaatatttttataaaaaagaattaatttttaaatcgctaattggtttaaaattttggtttcttttttcagttttttaatccttcaaaatgattttttttttcttatttttaagatttgatataat

SEQ ID NO: 150525 - DNA, 513 bp, Cannabis sativa
  modified_base (458)..(472): a, c, t, g, unknown or other
aaaaaaatatattttttaaaataattttttttttaatttttaaaatttttaatagtataaaatatatttttattatttatttatttttataatattaaacttttttataatattttaataattaatattacatggaccactaaaaatttgccacgtgtacaaacgtgtacacgtgggcagtctactatggcacttaacagtgatttttggacggaggggtacatagcaaaacagaatgggagtttaggtagttttgcccctaaaaaattaatttttgtggttaagtgttaaaaaatttaaagttcaagtagtgtagctgccaatatccctaaacaaaatattataaaacacacctttaacatttgactgtagaacagacctttaacatttgactgttttttttttttgaataaattacttatatattaaaagaacatgttggatatttattttaccannnnnnnnnnnnnnntcacaagtatgttgtttaaacaccttaaatatgaactttct

SEQ ID NO: 150526 - DNA, 547 bp, Cannabis sativa
gtaagtggtattattgtaataaaataaagatggtaagtaaaaatgttgatgtaggcgtgtaggagtaaaacagtaataaaatgtgcaaaacagatttttggtgtaaaaatttctaatctaaatatgtaaatactttaagagatatttctaatttattgagaagttgaattagaaatactaaaattaataatctatttggttatataatagtagtggtcctcaaaaaacaagaacaactctattcttatctttcttcatcaagaaattagaaaccctaagtcttgtattcttgaaaaatcattacccaaagagctagtcaacatcactaaattaattatctctatcaagaaattgagatacgcttctgctattgatcatgttttttttctcctctttgaatcatcaagggctttagatctatgattatacacttctaataatatacaatattttgtgtatggaatttaatcttaatattgcatattttatgagtgttaaagggccagtttggcacagctgtgctgtgggaaaaagcagttgtagctgt

SEQ ID NO: 150527 - DNA, 586 bp, Cannabis sativa
aaagtcttgaagacaacttagatgaatttctgaagatgcatatagagttggctaactcgggagaaggagaagcattgagtgatgaaaaccaagcaatcatcattctgaactcattaccggaatcctgtaaggatgtaaagatagcaataaagtatagaagaacttcgattaccatagatgaagtcatctctgcactaaagtctatcgacttagagatgaggaatggaaagttggggagccctaatggtgagctaaacttgagtagaggaaggcctcatgagaagaagccttggaacaataggggaaggagtaacagcaaagattcttctaagggtggaagacatggaaatgggaagtctccatcaagaggagaaaaagatcctaaaggctgctatcactgtggtaaaccggggcatatcagaagagactattatttttggaagaaaagtaacaggggaaaacagatggtagcgatggtgactttaataatggagaaaatcatttctcaaaggaaaagggaaagaagcatgaagccaatctaagtgatggctatgagagtggagaagtttacattactgcaactaaa

SEQ ID NO: 150528 - DNA, 682 bp, Cannabis sativa
taatttctcatccttgattaaacacctttattgatttctttaattttcttgtctttttttttttatattttaaaatctattataattatttatctaccaaatttagtggtattcagttcaattccctatggttcgatctcactcgtgtcagtttattacttgaacaatgatacgtgcacttgtgtattattaaattttgtcacaagtttttggcgccgttgccggggtattgtttaaaaattgatattacaaaaattagattaaattctactttggttaattctttctgcttattgctaactatttcttttagattgtctaattatttcaggcattgggggtgcatgcgacgtcaaggacaaagtgtaatactgccggttgatcttgaaattgaaaagacttgtagaagaaatagaagaaacaaaaggcaagaaagaagcgcagcaagagctaaaatagaagaagtcatggctgataacgctaatggcgataataatggcggatacaatggtaataacggaggtgtcgtagaagaccaggcaaatggtcgtattccacctggccgtagcctgacgtactatgttcttccaactttgatgggggttcagtcttgtataagaccacccgccgtagatgccaacaactttgagataaagccagccatactccaaatggtgcaatc

SEQ ID NO: 150529 - DNA, 546 bp, Cannabis sativa
  modified_base (467)..(472): a, c, t, g, unknown or other
ttagtgaatatttattaaaggaaggatatacaaatgattctatttgcccatatgtttttataaaaagttcaagttctgagtttgttatcattgttgtttatattgatgatttgaatactattgaaactcctgaaaaacttttagaagctgtggaatatctaaagaaagagttcgaaatgaaagatttaggaaaaacaaaattttgtcttggtttacaaattgagcatttaaagtatggaatttgtattcattagtcaacttatattgaaacgattttgagacgattttatgtggataaatcacacccattaagtagcccaatggtagttagatcacttgatgtgaaaaaagatccttttcgacctagagaagaacatgaagagctcatttgtctagaagtagcatatatatcttagtgcaataggagcattgatatatcttgctaatttctctttgtgtctctcttnnnnnnttttttttaatttttttctcaaactattttttttctctttgtatatataaacatatatacagtagaacctctat

SEQ ID NO: 150530 - DNA, 524 bp, Cannabis sativa
cctgggctcagccaccatcgtgccgcccacatttgatgagctaggcaccccagactagagccatttagctcccatcgcatactgagtttgtcgtggcattattttcatgaacatgtcataaggcttaacgattgttaaggttggttgaataaacaatcgagaacaaaacttatccgtatgcccaatcaccccatagataaagcagaaagtcgacataaattcatactaaaaattaatccaaaaccagtcgccaccaatctgttgcaacttcattatgtgcttcaatggtttttcaatgtttaaacgaacccgaacccgcaaataatctctccaaacaccattaaaattattcttatcaaacttaataaagctaccaatataatttccagcatcccgtacaacttgtttcgttttgaagaccgacctaatatcatgtagttgcacccatatattgagatgatgcaaaggaacctctcgagaaacatcccctggtttcaactgttcaaagatgagaggagcatttt

SEQ ID NO: 150531 - DNA, 659 bp, Cannabis sativa
agaacaaagaatacaatgtttcctctcttgaagctctcacaatgaaatctctgagtgtttactcttagatctctctaaagtaattctttcgacccatattccagtgagaacggatcactatttatagggctaaatgcatgaggaaagatttcccttttgcttacaatatctataattggtaagaacatacattacatatttagaatacataaattgagggattcggatagcttgccatatccctttgatacgatccctagattgtagggatttcttttgtgcttcccgatgtaaatcttggaattactaagtgttgatatgttgttcggatcatctacccttaccctgctcggtcacgcagactctatccgtgcagatgtgtgctggctctgttcggaatatctcttcagccagatgtaggaaataggagtaacgtgtcactagtatgtgttgccatgtcatagtgcgaaaaatgggataacagtagaattctcaagaaaattcattccaagaattgaatcttcctagagccagcttgaaataccattgctgggctatttctgataaagttgctagaaagattcagcaccatacatctgttaggctaaaattagtctaagtttcgggtcatattttcggttagttttcactctttgttt

SEQ ID NO: 150532 - DNA, 661 bp, Cannabis sativa
  modified_base (341)..(341): a, c, t, g, unknown or other
gatctgattgtagccggcataagcatccatgaaggataatagcttgaatccggaagtggcgtccaccatttggccgatccgtggttgggggaaacagtcttttgggcatgccttgtttagatcgataaaatctatacatacttgctatgtcccattcgctttaggcaccagcaccgaattggccagccattctagataatacacatctcggatcatggcactagtcagtagtttgtccacctctttctccagggcttctgccttcactgggtcgagggggcgtcgcttctgctgaaccggtggcatgtccaggttaacgttaaggacatgggttatgacanggggacttatgccggtcatgtccccttggcaccatgagaaaacattcgtggctgcccttagtgctttaattattttttccttttcctctggctcgacttatgccggtcatgtccccttggcaccacgagaaaacatccgtggctgcccttagtgctttaattattttttccttttcctctggctctagattttttcccagccggaggaccttggcggtgttaagttcacatactgatatttcctcgacgtcctccattggttctacgatattttcggatcccaaacgaggatccaactcatcttcttctgccattcctgg

SEQ ID NO: 150533 - DNA, 643 bp, Cannabis sativa
atccaaataatatttattgttgtatgaaattgatataaaatagttgcatattttaataaaggtaaataacaacataaatacttaatgttttaagtttgtaagtctcataaatctaatatgtatttttagcgacatataggtactcaatgtttgtaaaattataatttttctcctgttttgtcagtacagatttattttctaaatttagtaaaagaacatttgaaaataactgatatatatatatatatgtttctatttaaaccacatgatctagaatttgggtcttatatgtgccatgtttaagataataatactgataaaagtagagaaaaattacagttttacaaatagtacgtatttatggtgttaaaaataaatattagaattatgtaacttacaaatttaaaactttaagtacttataatgttatttattcttttaataattatttattattccaaataatgtattactattgttataacgctaatttgtcatatggtcgataaaatccattttggagatttgctgtccatatgttgaatataggaagctttaaattttaggggaattatcccatatactgttttttttaactttttttttttttttcaattttacggtttaggttgtctcgttggtt

SEQ ID NO: 150534 - DNA, 506 bp, Cannabis sativa
  modified_base (231)..(233): a, c, t, g, unknown or other
aagctaagcggtctttacattgatagtctgcttgcacaaatctgggttgtgccgcgaacgtcttaaagagagcgacctagtccgcgactcaaaccagattcgaattcggttactttgttcttttcaatttatgcagcaactagtttctaaaaattttaagatgtttagtttctgccatgactgtcgatgagaattctagtgttattgatataaacaaaccttttcgttttnnnggaaaccattttaaaagatggaaattaaaaatgttatttttcctcactacgaaaaaggttgcttatgttctaaggactgataaacctgttgtttctgatactacaaaggatgatgaaaagcagaagcaaactgctaatttaacaagctgggccgaggatgattttctatgcaaaaattatattctcagtggtttatctgacgatttatatgattactataattttgacaaaactgccaaggaaatctgggacgcacttcaaaagaaatacgac

SEQ ID NO: 150535 - DNA, 523 bp, Cannabis sativa
tttttgccagcacagtttgcgaaatgcgctggtaaaagttacttttaccagtgcagtagcgaactgtgctggtaaaagtgacgtttcttgtgatcactaaattataatataataaaacataaaatgtaaaattgatatattatcatcaaaacaaaaaataaatttatattatgaatattatattacactactttttttaacaaattatattgcactacataattaattataaacttgatgaataatttgttgatggtttgatgcactgctacatatttattaatttataataaatatttattaaataaatataaatattattttaattaacggtttctaataataatattaatcatcatttatatataggtttaaagactgtgcgaagcgcgataatctgttctttaatattatattaattatattttatacaatatttttaaagttaattaggatttttttttcccgaactttgatatgtatcaaatcatgccccctaaactatttttgccgttaaaaattc

SEQ ID NO: 150536 - DNA, 654 bp, Cannabis sativa
aaaaaaaaccttttattattctaaaataagaaaagaagacttaaaaactaaactaaattaattttctatatatattttttgtaaaacaatacctcataataattattgtaaaaacaactgaattacctattaattaagtaccacgcacatttaattttttctacttgtaaaagctttacaaaattatatacactaattttagtaattatttttaaattaattttttaaaattataatacacttttaaattttcaaataatttgttaatgtaataatatacgtatgttagaaatatttttaaaatttttaaattatttttcatttttttaaaaaaaatacatcattttgaaaaatattgaataagttaaaacaacgataaactaatttaatttgttctattaatataatggagggtggataaagctactgtaaatttattttgtaaaataaaaaaaaaaatatttagttagtttattacttaatagcttaaatttaatgctgtagaatactaattgattttgctacaaattaatttttcaaaataaaattagattacataacttatttaaacatctaaatgattttaaattaaaataaattattaacgaaacagtaagaattttataaatcttgtatataaatttgtaaaaaaaa

SEQ ID NO: 150537 - DNA, 830 bp, Cannabis sativa
tagtgcttcaccaactcatccccacatcaaaccatgaatgttttgtttctcattgtaacaatcaaaactatacgttctatatacttggataattatgggtcagactcttgttactatcctatttatttaatttgttttattttagaatctaagctatcttagctatatcctattttgattattacaataggagcaaataaaaaagatatatgttactttgtaccacttgtacacaaagtttttatctttaaggacgtactaaattctgaaaaataataataaaaaaagtataaggaaaaaaaaaagagataactgccatcataaatacaatccataaagaaataggaaaacgtaaaataaagtgtgggaatgaaaacataaaaagagtaatgagaatagaaataaaagtaaaaataaaatagaataaaacttaaaatgtatgaaaaaaaatttaatataaaaattattagttttttttcataatgtcttggaatagaatttattttcatttcaaaatgaaataattaatttaccaaaacattagaaaggtcattttattggaatgacatttcaatactttaatatgtaatcaaataagacaatggaatgaaaattatctctttttattctattccattttatacttccactcaaattataaaatatatatagaagatacatcacaaagttctaatttatccttgtctttttttgcataaggaactaaattataaaaaagttttattactacaaaaaaatttatttttgccggttttaaattgacccaaaatcgaatattatttgccctaatttccaattgatacttttca

SEQ ID NO: 150538 - DNA, 785 bp, Cannabis sativa
  modified_base (364)..(365): a, c, t, g, unknown or other
aaggaagaacggaccagtcgacttgaggagtgatttccttgaccgtgcaaaaggttttatcaaacttgaagaggctatccagcgagcagaaggtgaacaaaaacctggcaagtcaaaagctcgttctactggaacatccgtccagctcccccattacccaagtaattcaagttcaaatggtaaacggtccagcaacaataataggcaagggaatgggaaaaagggaaagttcaccggcaagactgaacaagctccccgggagaatcctaccaagtatactgcatttaccatccttacagaggacatagaaagtgttcacatggccactcaaccactagccccgtacaagaagcccgcacccatnnaaaaagatgtcagcaagcgagacatgaccaagttttgtcgatttcttggagactacggccacgacaccaatgaatgcaacaatctaaagcgggaaatcgaattcttgataaggaaaaacaatccacacgtgcagaagtatgtcaaggctgatcaaaattagaggggcgataacgaccaagactttctaccaccatcagtagatggacatctataagtcattattggaagcccggacatagctggagatttaggcaaagctcggtagaggtatgaccgaacagtacagcacgagcaagaagacgtaatccgtgtcgtagaagagaggaagctgaaaatcccacgggaaggagagcccataacattcaacaacgaagatgctgttaaaattagattttcacacaatgacccattggtcgtgg

SEQ ID NO: 150539 - DNA, 658 bp, Cannabis sativa
tttctatcagagagtccagccaacacaggacccaaacctgcgccagaagatctttgcaccatcctctttctggtatcgaggaatttcctgaggctgggaaagagatctcggctccaagaaatgggatcctctgatgacgaggagaatgaagtctgtgcagagatcaaggctctctacatgtagccagtctttctcaagctatgtgtagtcggtctttctccaagctacgtgtagactgtctttcacaggctatatgaagacggtctttctcgagtctcccctctcatccttggtttaggaagataacttaatggttttcccctagtggcatttttgtaaagacaagtttgtaagccaacttgggtttttttgttttatcttgaacgccttgtactattttcattcgaacttaatacaattgtgttttcttgcgtttttattcacaatgtaaacaactatattttgatcaaatgtacagtacttttgggcttttctattgctcgtaatcttcctgtttaagtagttagtaatctaccaaacttttcgattttcaagcattgtcaattctgcctcgctatagcagtaataatctgccttaagcaaacttaaatatactttaatgattctatcactttgtatatttttaatttgctcgtat

SEQ ID NO: 150540 - DNA, 509 bp, Cannabis sativa
  modified_base (42)..(43): a, c, t, g, unknown or other
  modified_base (202)..(206): a, c, t, g, unknown or other
  modified_base (455)..(468): a, c, t, g, unknown or other
taattatctatcttatgtttaaattttgattattttatcttnnttttaaatttaaggtcagatatcatttttttaaaaatattctaattttttaaataaatggaccttatttaaatttaaaataagatattataatcataatattttgaatagaaataagatattatgctaactttttaattttgttatttttttatttaannnnnattataaaatcagaaaaaggatattaaattatcatgttattttattgaatatttaatttattaattaacatgaaatttaaaagatagttagtattttttttgaaatgatatttaggttagttgaaacctagtttttcaaaattgtaggttttaattttaaatttttttaatttaaatttattttaaaaccaatttttttattatttattattattttcgaattctttttttaataaattaattaatttnnnnnnnnnnnnnncctacatccaactatctaattcaacttgttccaggagtatg

SEQ ID NO: 150541 - DNA, 517 bp, Cannabis sativa
agttgcagagatgaagatgaagggcaactacaaagctgctttgaaattaaaggtacaaaatttttctaaaacataatttcataatgttgaattaatgttttatttatgttataataacaaaataaatacacaacatattttttctcaggttagagcatcaaatgaacacatatttaaagtgtacaaagtaaaaaaaatcatgggttgtgaatgtagaacaaaaaacatgcacatgcaacaggttttaaatagatgaaatgccatgtgcagcagtgatgaaagagatgtatctcgacccacaaaattactattcagattactatagcacaacaaattggttcgaaacctatgaagcaactgtatacccaataggaaatcaaagcaattgggacattccacaagagatcaaggatatagaaatattgccaccacttgaaagggtgaaagcgggaagaccaaagaagaaaagaacaagacctagttgggagacaaagacacaaatcaaatgcaccaaatg

SEQ ID NO: 150542 - DNA, 598 bp, Cannabis sativa
  modified_base (294)..(303): a, c, t, g, unknown or other
  modified_base (478)..(487): a, c, t, g, unknown or other
  modified_base (552)..(552): a, c, t, g, unknown or other
atagtatagtgtcataagtagagggactaaaaaagctaattattctaaaataaacaactaaataacataagttaactgcaagaaaccataacaaacacaatatttatattcattcagaatcaaagttatatcagctttgttcttagttttagaaccatcatctctatttctttattagtccaaagaagagtgttatcatcaaccttctattatagtttcttagacaatcttcatgcccaaaaatatattatttttttaatttttttacggcgatattcgttatagttacaatannnnnnnnnnaaatttttaaaaaatttcgaataacttacaaatgtcaaaaataggtttgaaattttttgaagacacatggtaaaaagaaatattaagaactctattttcggtactgtgaactattcaaaaaatttcaaaaatttacagtaatgatattacataagagtaaatagcggcataagtnnnnnnnnnnttgagtttgtaagtggcataaacccaataattttttttagtggcataagtacccaatgtttgtanaactgtaatttttctctatttttcagtacaggttccgttttaaatt

SEQ ID NO: 150543 - DNA, 543 bp, Cannabis sativa
actaaattcaccctcttgtactgacctaacatgacatgattgcccaagtgtaattccacatgtcttcagcatgtcgctgtgtagcttgagatagatcgcacctttgattctattaactcggcctcaaaggtgatgttgggatcatgacgagttttggacgtacgtggtttgggaggcataatctcgaaatccaagtcacctggttcaaaaaaaattgtgacgttgggtaaaaaaaaaggctttgcaacaggaatacaggacacactaggtggttctggccaggctgcttctcgcaagaaccggcgtctgcctttggatatttcttgtaagaagcgcctgtggcgactagaaatttctccctgttgggttctcactgtgcgttcccgttccctagccctagccctagccctagccctagcatcttagctctaatttggaggtgggttttgagggcttgtttttatataggatttccaattctgtaggaaactcaaactctaaagcttctggatgataaactccttaaccagagtgggacattgc

SEQ ID NO: 150544 - DNA, 750 bp, Cannabis sativa
aactaataattaaacctgttatgacatttttggcccccgatcgagtctccaaggttgccaaacctgaaaatatttttattccacgtttagcttatattacattaaaacatactatataaatctccataatttataaattacgcttatttacttacttatagcgaatttaaaatttatgttgaactagattagtacgatcataatcccacttattatctaattaacccataatataattagaaaccctaattatttaccaaattatttaccattaggcttattgatttaccattaggcttattgggttaccattaggcttattgggatattacaaccatcccctccttataaaaatttcgtgctcaaaatttacctaaataatttggggatacagctcctctacaactctaattctcaagtcgcttcctcgtaaaataagttgtatggaatttaatgtcatcgtaactcaaaatacgtatcggatttgacacatactttgttaacatagaaatgtggaagacattatgcatccctctcttaggtggtacaaagaaaatactatgtctctgaccctcaaaatatatcacacatgcttgttacagactctctcagcatttaaatgtatattttaaatgttaatctgagataattactttcggagcatcacagggttgaactattcccttgacaaatagattagcacactaatccgtaacgggaaataccaggtcagctgtgcaatcccacatc

SEQ ID NO: 150545 - DNA, 870 bp, Cannabis sativa
gttgccggttcattgtgaacaacacgtacatgtgtttgagtacgttatcggtaatcgtgaatttaaaaatatatattaattaatttctgaataagtttattttacaaaagagaatattgttaatattttttaaaagttattttcttttttttaagtaatataagattcgttatttaattatactaatactttaatattaaaaaatgtgttaggtaccaataatacaatttaattattttctgcaaaataatattatctacaatacttaaacaagtggtgatctataatcaggggcggagccaggattacattgtagggggtcaatatcagcaagtgatacaacaagtaaatttcagtgactaaaactgtttttcgaaagtgcgtgtcaattgaagaaaatattatagcgttttatttttataaatattttatacgatatctagaaactatgaatcaagtaattaaactgaaaataaaatacaaattctaaggctcatttgaaaagccaagaggaatttgacttgggtgtaattgaaagtaattatattattttttgtgtttgtctgaccatatggtgttacactcgtcaattttcatacccagaattgagtgtgattagacactgtaattacttaaaactttttattttaattattaagtattgattaaattttttttttatataattactaactattttgtcaaacatgatattataaatttataaataattactacatcatatctaaatacaccacctagtggtttaatttaatattaataaaattaatatttacttgtatttttttttttaaaaaaaaagaaacttatattattttaagaatgttaattctactaatattaatttgt

SEQ ID NO: 150546 - DNA, 829 bp, Cannabis sativa
  modified_base (201)..(212): a, c, t, g, unknown or other
  modified_base (708)..(730): a, c, t, g, unknown or other
tttaaaaatttttaaaacgggatcccgatgctttttaatattttattatattataaagtttattaattaatataaaagttttaatttgacacgattttcgagaaaaattctttgattagaaagattgcactgtaattgataaagcactgtagcgtgctttagcattagggcgctacatatatcatgctaacaaaattatannnnnnnnnnnnaaaatatgtatacataccaaaaaaatttatacataacaaaataaaaactaaatatcatcttaaataaatgatatactacagacaactaaaattatataccattcaacaaaatatatgtacctacaataaaaaataaaataaaataatataatattataaaaaaaattgtatataccatattaacaaaattatatacaaccataaaataatgataccataattacaaaattatatatcacttttatatataattaaataaaaattaaacatgcatgatctaaaataaaatgatatagtatataataaaacttatataccatataacaaaaaatatttaccttacaatcaatatatatataattacaacaaatacaaatattagatcggatccatctaatattttagatccaatatttattgaattgaatttatctgatccaaaagataaaaataaaaatgagtaaagttttaatcctaatttatatatatatatatnnnnnnnnnnnnnnnnnnnnnnnattacccatgaatgggtaaaattagaaaaatttaagtttttatgcttaatttttctatttaattaaaaaaaatctctcatttttatattatatgggctg

SEQ ID NO: 150547 - DNA, 849 bp, Cannabis sativa
  modified_base (757)..(760): a, c, t, g, unknown or other
tgttaatcaaacatacttgtgagtagatctaactgataaaataatttccaacaatattcatatttaggatgttaatcaacatactcgttaataaatctagatttgggtaaaatattcccaacaacttgcctcagagccatggtaatgatttactttcttgtaatatggatttaaaacgatgaatattatttattgtgttgatttggatgtgctcatgttggtttatgtgttatttgatgaatgtatgtaatttaagaaaattttccatgaaaataattttatattctttctaaaaatattttatttgcaatcctggttaaaaaaaatcaagcaattttattttttacggaactcgattccgataaaaatggacaaagttatgaaagtttgaaatttttgggttgaatgggttatgatgctcaatcgcacgcacaccaggccttaggacaaggtgatgtgcgtgcatgtgcctacgacaaacaatgtctgaagctcactgacgcccacatgctcgaacacgtctcgcccatgtggacactgtaggcgccgagggagagtatgcagtcgatcgagttttctcgatcaagaaggctgcaaatccttgctccgcgcgcgcgtaagggctgcttccagccttcttgggctgcacgtgcagcctcctaggcagtaacaccccaaaattcgatttttgtaggatttttatacaaatttcgaatttttttaatttttaactcctaatttcaaaataaaatattannnntaatatatttaaacttaaatattaattttaaattaataatatttaatttttaatagattattattaattttatgatattttgaggttta

SEQ ID NO: 150548 - DNA, 680 bp, Cannabis sativa
tatttataaatataaagtagattataaatatattagagggtaaaggttcaaatcccactaactacactttattttttctttttaaagttatggaatctcaactattccctttatgactatctctaatggttacactaatttagcgtggaatatacactaatttagcgtagaatcttttactttttgatacaacaactttaataatttaaactaaatattatactaaataaatatattttactaaaaagatttcacattttatattatttacattaataacaaaaaaaaaataaaataattaattttatgaaataattattaaaaaatatcatgactactagtaaaaatttaaaatcttaaaattatttagtaaaataaatatatattaaatcaattaaatattaaacatttttttttaaaaaaaaattatttgagttctatagttgattctaacatgcgcgattatttccaaaatgagcaaaaagaattatgcaaaaaagagctcaccaataacatcaaacatctcaagaatatcaagattctcaaaatactgaaagctcatgtagccaatattttgatattcttcaaagctaagatctacaagtgatcaatttgactattaaattattattttacttaatgttcttatttttagttttatagggtgtgtttggaagtaa

SEQ ID NO: 150549 - DNA, 512 bp, Cannabis sativa
  modified_base (172)..(174): a, c, t, g, unknown or other
  modified_base (231)..(239): a, c, t, g, unknown or other
gagtgctattcatattctttgatttactttcaagaaatttggactcaaaacaatttgtgtgtgatttggatggtttcatgtgtatttgtgtgttatatgacgattgattgatgcttgtgaaattttataaaaaattattaaattttcgtttatggaattatttttattggannntatggaaaaaattaagcaattcaattttttaaagaactcaatttcaattttatttgnnnnnnnnntgattttttgaagttttgaaaaaggataaggtgatcaccctcatctcacgagcgcggatggcccattcacacggccaggagcgtgttcggacaaggtgttgtccgagcatcacgcccagggatgtctgaatccctctcctgcgcgcgcagaaatcatgccaggagtcccttgcgccgagttttgtcggctggtcacctaagtggcacgcgcggatgagtatgcaactgcataccatccgtacatctcacatttttttttattttcttcgattt

SEQ ID NO: 150550 - DNA, 567 bp, Cannabis sativa
  modified_base (56)..(67): a, c, t, g, unknown or other
gagagagagagagataaagagagatcatcacaaagagagagagagagagagggagnnnnnnnnnnnnagagagagagagagagagtgaagctatacctaagttcgtctccaaagctaccaacgctaatctttccaagcgaaagacgatagagagagagtgagagaatgagggcacctaatacgattcagagagagagaaagatagatttaaggttttaatggagtgaggctctccatttcgtggtcagattagaccaccggaggtcgacacgaacaaagtgctagagagggaggtgctgcattttttttcaaagggaggaggtgctgcgatttttttcccatgcaagggaggaggcggtactttgtttttggataggagagaggaggcgctattctaaaggagaaatagtagggttttgttatttgatatttagggttgtgtaagagagtatattaggttttattttattatttaatgatggtacacgatttttttattaactcaaattatataattataatatggggacaatgaattagggctaagagattataattataattttt

SEQ ID NO: 150551 - DNA, 912 bp, Cannabis sativa
  modified_base (187)..(188): a, c, t, g, unknown or other
  modified_base (271)..(274): a, c, t, g, unknown or other
aagcctgacatctcccggagatgctttgataccgcttaagcctccgggagcatataggacttcgtatgccttctccgggaggcaaatcctggatgacgcctttctttacaaagacttagccattaatttgaatgttaagatcttcgtgtctacgtgtccctgtgtggttggtccacgtatattgggnnaaatcaggggcaacatttacccacaagccttgtttaattgtgaaatgaacaaggcttgtccagatgcctccggttggctcctnnnnttcctggcacgtgctttgggcgcgtgaaggtgtaattaatgatagccattactgcagcgattcaatttttgcaggcgtcgattcgtttcacgtccattaattgatacggcgcattaatgggtgtcagacggacactcaagcgtttccaccgccttaattacaaatcaatctagccgttggatcttgggaattcgaatcgtgtgtcttcccaaccgcacgattggtaggtgatcacgcctgttccacatgcactttggcctataaaagccaccattcttccctcatttggttactttcagcctttcaccaaatttcttcgaattttccagagagaaagaaaaccctcaaaccagaaaactttcaaacactataggtttcttactaaccttcattcgttactgtcagtcaacatttcatcgtcgatcaacaactcccagttcgaacactttatgtaagtttttcgcatcccttgctttatcgtttgtgttcatggcatgctttactgttcatctgctttttctaggtttaatgttcgaagtttctgggaattttttgccttgagtttctgtgaaactgttaggctaaaattaatctaagtttcgggtcgtattttcggttagttttcactctttgtttct

SEQ ID NO: 150552 - DNA, 728 bp, Cannabis sativa
  modified_base (215)..(222): a, c, t, g, unknown or other
aataaaagtgtgagcgtaacacgtaggtctatgccacatagacataattaggcgtgtgagtgtaacacgcgggtctgtgtcatacagacaaatgtaaaatcgcattaatcttcctgagcttggctcatgggtgctctactgtgcaggaaagggtaaatctgtctctgattagccatgagtgagagagctgggtgatgtatgtacatgttcgggcnnnnnnnnaccaagcgggttggggtctactagtgatgtatttttaaaactctgattttgccgcctaggtcggcagtgaaaaaggcttataatattttgtaaaatatttttttgggatcccgaaacatgtaacttttgattgtaaagttatggttattacaagttttattttcaatctgttttcgattaaagtttaaattactcgtgtttatctttctagtaatctcatgtaggggattagggtttcttaatcaccatgggtaacgtgcctaatagttagggcgttacatattccctcaaaggtattatcctagattctaaggatttaattatccttttttgtaattcaaatttaagataaaaaagatgttattttccctattttaaagggatatctttacctatttgaattaggatattttgtaagccctacaatatataaaatgtattagatcaaatgaaaaaggaccacgaatcctaagctacacacctatagttctctctctctctctctc

SEQ ID NO: 150553 - DNA, 513 bp, Cannabis sativa
gactgcagggcctgttaaggacttgaagccttggtagaagatgacacaataaaccccatatacacaatttttgtaaaaagaaaatatatgatgattttgtagaatgagataaaccagttggcaaacttgaaaagaaatttaatttcaaacatgtgagcaaatggcaatttctaaaaggattaatgttgtgtagaaaagaaatttactccatttttactttttatgattcactgtgtgttcctgcctacatatccatatcaaatcaacaactcactttgtcattatgtatatttcttaagcttgaactgtacctgtcgttttgattcctcaagaataccaaactaatgcacacactttcgtccaattggcatctatgggctattttaaaaaatatgagaaaaattattaagattatgataaagatggcatataaaacattaaaaagagaatttgaatttaaaattcaataaaaaataaaaacttaattgaattaccataaaaaatattaaagtt

SEQ ID NO: 150554 - DNA, 815 bp, Cannabis sativa
  modified_base (410)..(415): a, c, t, g, unknown or other
gtgtttggggtttttaggtttgctgtttttgggattagggttttgggtttagggtttgaagtttggggttttaaggttttgcggtttaggggtttgggggtttaggggttggggtttgggatttgggttttagggtttggggtttggggttttggagtttttgcgtttgagctttttgggtttggggaatcgttatgggaatgggctggggaatgggaatgggaatagggtccattttaaaccctatgttctgcaaaagttaccgattgaaccctgtattttcttaaattataaaatggatcctgtattttccaaaatggcaaaaataagacccagagtttaatttttgacaactttttttttaatataactaatttgaaaacaattcttaatacgaacagatacagaannnnnnaacagttttgtcataacacattttgattagattataataattttattttgacaaaaaatcaattcaaggtcctatttgtatcattttaaaaaatacaggatccattttgtcatttaacaaaatagatggtcagattggaaacttttacaaaacacagggtccaaaatggtatttacctatttttttttttttcaattaatgaaaatatggtatgtttatttaagctagataaaatgtggcaaaaataaaagacttaatttagagtcaattggacttaaaaagcccttagaaagggctattttcaaaaatatggaaaaaattattaaggttataataaatatggcataaaaagtaaatgtcactatatatgacattttctaaccaatcaaactaaaaatat

SEQ ID NO: 150555 - DNA, 561 bp, Cannabis sativa
gacttttcttcagtgatataactttcttcagtgataatacattagtgtcttttcaagatagccgttataatttctacacctagaataccctcctcatagatttcattgtacataggtttgatagttggtacccagaattccatgtccaaattagttgtactgactcctactatgggatagccgagcagtatgggaccatgttggataggttaggacatatagattcgagctgggatttagaaccaattaactcctacgacatatttaggatcacatgatgtagagattttagtgaatattatagtcctcccacttcgtcttcttatgattatggtaaatcccttaggtggaaaataattacccaatttctccttttgcttgtttttaaacaaatattaacatattgttttgtctcacagaaatggatctcgaaggccttctccattccttgagcaagaagggaaagaagaggttaactgcgtcggagacttcctctgatgtcaatgtggagcctcttaaaaggccaggaagacaactgccaataagaagcgagcctcccaa

SEQ ID NO: 150556 - DNA, 694 bp, Cannabis sativa
  modified_base (171)..(178): a, c, t, g, unknown or other
ttatttggagtccacgtcctggtccggttacggttcttgatctaggtccaatttcagttatgattccaagtccaagtcctagctccagtccaggtcgacttcgagttttggttccaattttgggtcacacggtatgggttcggttccaattttgggtttgggactgggttnnnnnnnnggtgtgggttcgggtcctcgtcagtgttcgtctccaggggttagtcccaaatctagacaccgactatgggttttgtccaagccctaggtccagatctggaaccccatctcgtgtcctagtcttgttccatttctggtgccgcgtcacgagctagtttctaggttcaagttcaggtctgggtcaggtactaggtcacgatcctagtttggtttcccagttccctatccttattttgggtccaggtcccagttattgtgtggatttgggtcccggtccttgttcgggttcgagtcctagtctccctacgggattaggtctctgtcttggttttgttctgggttcaactttgggtttaggtcctggtcctggtcctagttcagttctagttccatttgcaattatgagttcgagtttgggtcggagttagagaattgtctgagtttgggttcgggtccagatttcagtctccgtccagatcaggctcctggtgtgggttcgcgtcctgggtcttggtct

SEQ ID NO: 150557 - DNA, 628 bp, Cannabis sativa
atcaaaacaacaaacaaataacaagggaaaacaataaacactaacataaaaatattacaacacaagaataacatgaaaatatatgtttggctgtgttttcagttttcagaattatgttttcaaaactgagaatagattacagttttttgttattttaaaaaattaattgtgtttgacccagattatttaaaactatttttttgaattttttatactaaaaaaataaaaataaataaataaatattactacaccataccatgacatgaacctattttaccccggactggatcccagagcttgacctcggaccccgaaccccagaccccgacccaaacctagacctggacatggaccatagaccctggataaggctagcccaagcggtttgggggccttgggcgaaaaaataaaatattaagtcttttattaaaaaaaaaaaatatcaatcaaaacttcataaattctaaaataaggaaaatttttaaaatcctgtgtattgagactacaaagttttatcatatttttttatttttggatattggcggctaaaccacctaaattttacagtttgtaacagttaactgcaaaaactaaaattttagtggcataactacctaaaccctggtt

SEQ ID NO: 150558 - DNA, 1111 bp, Cannabis sativa
ttgtatcacactttataatagcatatacattatacatatgtgcccacaatatgattttaatccaacaacgtgccctcaaaatcatccaagaatatctacaacaagtattagatatttgttttaaaatattattttatattttaaacctaactcaactatatttaggaaatgaggtatatcgagttaagaaattttaaaccctataatgtaaggtggtgaagtcacttgtaaaagggacggattctctcgaactctcactttctcacattttaaaaactcacttgagaattgaagtattggaggacataactctgaagaactccctccaagcattgagaacaataattatccgagtggactagcctatattacctctgaaagggggtgacccactttaaaaatgcgttgttcatcattgtcaaattcattccataaacagttttacttttgattgatattcacttgtgtttatcttgctcgtttatgatcttcttaggtccgttgacaaaaaattgcgtcaacaatttaaacacacaactatcattttttttttagatatttactttgaaatattatttaatattttaaaattatttatatatataatagacaacataaatagactatagctgcatttaataaacagtatattattcacttaattaacatatattggtttaattcattataatatattattattattattacttgatataattcaatatcattttcagctgcttattatctatttaatatttaattgttcatttatctatataacaaagaatattctactttatagttcataattttaactaatatataataataatttaaaaaaatattaaaaaacttttcgtactgatcttcttcttcctattatcatttacaaattattttgcttttatacttttgttttttgttggttaatttgagaattggcaacaaattaatgatgtgttggccttcctattaatacaccaatacaataattttaaagttaattttttactaaatattaacaaaaaccccccacaaaatataaattttctcttaagaacaaacaataaaaatttatacgttcgctaatacaaataatatatattta

SEQ ID NO: 150559 - DNA, 591 bp, Cannabis sativa
aagtgttgataaagagcgatgctaaatataatttttctagtagatagattaaacacctcttaaagttatgaaagactagttggttaatgtattttctccggacctcgttttgtttttagagatattattaattatttcgaattatttgatgataattatttagtttgtatttttttgtatttgtttttttttttcacaatgtatttacttatgatattgcaaaattattaagatagtgattatttatcaagtaaaaagaaattcatcactagtgaaaaatgtgcatttcaatcctaatatattattttatgtaaaaatttttttaagtaagccatagttttttaagtataaaattatataataatttttttataaaaatatatttatatatttacataaaagtgtatttgtatgattaaaagaaaagtacatttatattgtattattttttgtataattatagtagattatttttctttaataaaatatacaatacaattaattttgagttccctcaaattatatatagttttttttattattcattataaaacatatataaatattaatggaacactttttaatgggtat

SEQ ID NO: 150560 - DNA, 704 bp, Cannabis sativa
aaaaggtttgataaacattggacttagctttcctttctttccaaatcgtctaatacccttcattggcgaaacccgcaggaagacatgatctcctgtttgaaatgaaatgtcctgacgcttgggatctacatatcttttttccctggtctgcaaagcaagcatccgagctttaattttatccattgcttcatttgtcctctggaccagctcagggcccaagtatttatgttctcctattttgtcccaataaattggggagcgacattttttgccatagagcagctcataaggagccattcctatggtactttcataactattattataggagaattcaatgagaggcaaatacttgctccacgaaccttcaaagtccatgacacaagctcgtaacaaatcttcaagtatttgtatggttcgttcagactgcccgtctgtttgaggatgaaagaccgtactaaactttaaactagtacccatggccctctgcaagctcatccaaaactttgatgtaaacttagggtctctatctgaaataatagattttggtaccccatgaaggcgaacaatttctttcacatataagtcagcatactattccaccgtatatgttacttttataggaaagaaatgtcttgactttgtaaagcgatccactatgacccaaactgaggcgtacattcttgtggttttgggcaaaccga

SEQ ID NO: 150561 - DNA, 571 bp, Cannabis sativa
aaaacccaacaaactcctacttgcactaatataaaagaaaaagtgcaattcaaattgttatcccaacttttgcactctgacgtggtatcacattaatggtgacacgtggaatccacttggaatatctgctcgagaagagtggtccgagcacgacatatcgctggcacgctcagagcaaagtattcagcaatccgcgtagatcaaccaacacttagcgaattcagcctcaatcccacgatccttgtatttagcattgatcccacaatctttctgtttacttgccctataaatagtgatacatgttcactgggcaagagatcggtcgaaaagaagttgagctaagactatactattatctaagaataatatattcagagatactgttgtaagagctataagaaaaggtatctttctccttgatcttaagtcaatacaagtaacgaggattagtctattactgaattgatcagaactgaacctctataaaatccttgtgtcttattattgctttaccatatatctgttattatatatcatttatcgcttataaaatattttggtgctttcattg

SEQ ID NO: 150562 - DNA, 621 bp, Cannabis sativa
ggccttaaaacccggttagccagttttggcaggatccccgaacaagccattttcttaattctcgtccattttagtgccttagttcggtgtttctctatttcctgatttagtgtgatcgctagagagtataacagaacctagagttgtgggtttgggtttcccggattagggtttttgatcatgtgatttacccagtttcattatgtgattaaggcatccatctagcacgagacattctgttcaggtcggccaacacacttgaatctagaaagaaggtaagaactgtatataatatgtgatatggatatctgagtgtatatatatgttaagtgtatatgcatatttatatgttagttgcgttaccaacacttgtacgattatggtacagtgtgcattggtatagtgaatattgtttaagagtacattacagtgataccagcacaagtacgcgaaagtatagggtgtctgtcgtatatcactcagtggtactcggggtatgaaacaaaccctataaacactcgtacaacaaggtgcgtagtgtatgtggtatagtggttgtaccctagtatagaacgttcgtactcatttgttaagccttgtaaataggtgtataggcgccta

SEQ ID NO: 150563 - DNA, 637 bp, Cannabis sativa
  modified_base (575)..(611): a, c, t, g, unknown or other
gacctatgtccaggatgtttccttgtggcatagaaagaattagcaaatatttataaattgtctgatccacgtgtccctgtccggttgatccacgtatattgggcgaaatcaggggcaacagatttcattctctaaacgtgacctcgtggactagtagtgtgtgaaagaacactataataccatgcataattttcttgtgtcaagttttaaattctgtacaatttatttatgattctgtttaaatactacaaatatatgttctgctgtaacaagatttaaacctattactgcaaatcgttgtatttaattacagtttctaaagaaataaattaaaatactcacaaataccatttttcaattatattgaatggtagtatgtaaagttcatttttattttcaattttaaaaacagaaaacaaaagtgtgttatgtaaagttcatttttattttcatttttagattttatttacgtcgggtctaggttcagggttggatttgggttcaagtcagaggccgggttcagtgccaaggccgtggggggatttaagtttgggtctgatcgaagtccaaaatannnnnnnnnnnnnnnnnnnnnnnnnnnnnnnnnnnnnaagtgatttttttttttgtttttaaa

SEQ ID NO: 150564 - DNA, 518 bp, Cannabis sativa
aacaaaaatgtgttctataaccacttttgtttttccattttaaaaacaaaaaacaaaaatgtattctttaaatttcattttcatttgttgattttatttaaatcgggtctgaggccagatctaaggtcaggaccggggcaagtctaagtctgatcgggtcctaattcaatttccaaggtctaagttagatcaaatcagtccaaattattggtaagaaaaactgtttaaaaaaattttaaaagtgattttttttttatttttaaattttagattcttaataaaaaaaattgaaaaagtaaaaacaattttataaaacatgattttaaaaaatattttcacttttttaattttttaaaaacaaaaagctgattaaaaaagtgttaccaaacacacccaataatttttcaatgaaaaatcataaactatccaaagctactaacactccagatacaaatcttggagttatttaatctcaaattttgattacttacggaaaatgaaaaataataataataata

SEQ ID NO: 150565 - DNA, 527 bp, Cannabis sativa
ttagatcttatccttttattacagttattaatataattttagagtttttctccaatcaagagtttatcctatttttcttattaggagagctgaagagataaactcttgaccctaaaattgtactaataatgtgtgtataatgtgctatacatcttaactaattaagttataaataccatagtaattattttcatgtttttttctctgtatgagatgtggtaatactaactgatactctgttatcttctcactcgttttttcttctctctttcgaaagctcaatggatagtgaaaatgaatctttgcctactactttggaggaggtggaaaacctccggcttcagttcttcgaggaaggaaccttggaactggaagcggattttgagttaaatgctgaaatagttaaaacgggggtcgtggtcaaactgttggggaatcggagcatgtccaaaaacaaaatcaaacagatccttacagaggtgtgggggtttctgaaaggagcatggaagataaagacccttgagaaa

SEQ ID NO: 150566 - DNA, 586 bp, Cannabis sativa
tttacagttgcaacaatacaaattgaattttttgagttctggttctatcatttctcgaaatgacattcaaatttgtgttgcatttatggaacaagggctttatgctgttagaccagattaaccatttgaccttaataacgaactgtttaaggtagctaaacctagataccacaaaaagcaaaagatcaatgatgaagatgaaatatatctatggcaattatgtcttggtcatataggctatggtagacttcacaggttaaccaaacgtggtcaattgaaaaatatcatcttgggtgaattaccagtttgtgaatcttgcttagaaggaaaaatgaaaaaccgttctttctctgcaaagggagagcatgccaaggaacaactaggcatagtgcattcagatctttgtggaccacttaatgtcaaagctagaggtggttatgagtactttgtaaatattattgacaattactctagatatgttcacatttaccttatgcataagaaatctgaaacatttgagaagtttcaagaatttctagcattggctcaaaactaattgggtaaaactttaaagatcttgcgaact

SEQ ID NO: 150567 - DNA, 514 bp, Cannabis sativa
  modified_base (111)..(114): a, c, t, g, unknown or other
agaaagaccctttctttttttagcggatttgtattgatcaagaagagttcttgctgaagcaactacattcgcagtagtacggctcctttgttgccaaacaaagtcgttacnnnnacgccaaattgaccagctaacaactgcagcttcctccatctcttcccgcctaccacggctgaacaacaccagcagccaattgcagaatgtgtcgttcaaagtgctgcccacatccaccatagttctatgccagcacgcacgagcaaaatcacaccccatcaaagcatggtagatcgatcgtttcatctgaagcgttacacaaaggacatatagaattaacaggaacatgcctgttcttcagctaaaaataagtaggaagcaaacccgaaactgccctccatagaaaattactaacttttggtggaaccttcagattccacagctccttccaaaaattcgaaccaccatcattaggccaggcccctttcatttcttgtaaatatttataagcactcttgac

SEQ ID NO: 150568 - DNA, 675 bp, Cannabis sativa
atttaaactaagtggtctttacagatattgggtaaaataccttctcttgatcgagttttcttatgataacagctatcggtcaactatcaggatgaccccttttaaactgctctatggtaggaggtgtagatcacctattcactgggataagttaggtgagacaaagtttcttagtcaagaagctgttcagaaaatgagcgaggcaattaataagattagaacttgaatgcttactgctcagttaaggcagaagagttttactcatatgaagtgattgaatgttgactttcaggttggagatatgttatttctctgcatttagcctatgaaaggagtgaaaccctttggcaagtgaggaaaacttagactaaggatcattggaccttttaaaaccttggagaggatagggcaaagtggcacacatgttggctatgcccctagtgctagcatctgtacagaatttatttcacgtttaaatgctttagaaatatgtgtcgaactcatcctatattttgagttacgaagctttagaactttaaccagagctttcacacgaaaacaatcaaggcagatactcaatagaagagagaaagatctgagaaacaaaatactagtgttagtaaaagtgttatggagaaacaacaaggtcgaagaggttgttggaaatattttacc

SEQ ID NO: 150569 - DNA, 528 bp, Cannabis sativa
tccaccattgttccatacttttgtaagtcttactcttagcagccaccattagggtggacgttactaagaataacacacttacaaaaaatacttatctttcgagattctacaactataacgccctgactatcagggacgccacgcgcattcttttataaaattattattactaatctataaacttttggaaagggtgtggtttaattaaaacttttgattaaattttaaaataaaccttctttatgaacacaactaaaatatagggatcccctgtttataaaatttctttataacaagttacaaaatcgttattacaaaaaaaataaagttacactttcatacataagagaaaagtggtcgaccctgcttcccagaagccaagacaacacggttgatatgtacactgctggaagacttttgacccatggctgaacagaactgctaatcttcttacctgcaccatgaagtacccgtgagtcatagtaactcagcaagaaaagctattagataaagaaaatcatggaaaat

SEQ ID NO: 150570 - DNA, 783 bp, Cannabis sativa
  modified_base (292)..(294): a, c, t, g, unknown or other
gagagagagagagagagcttcaagaggaaaagtctttttcctaattttttgattttccttcaaatgagaaaagggtttctctaattgattatttgctgaataaaggaggccacatgtcacctcccaaggcagccaccacaccacccctttaaatgactaaaatgccctttaggttaaaacttaaatatttctaaagctaggggtaaaatggtcgaattccataacctcgctcaatcccgataatttattttttctaaaatatttcctactaagaaataaggttctaaacttnnncatgtgatcaaactagccatccatcgcattttccgttgacgccgagcaaaaattataaaaataacatatttcacatataggacaaataatacccctagagtttaataaaatcttcggaattgagaaattataactctaatacccatttctaatattggggtccacaaataaattaattcataaataattataaaattaacagaaattagtgctaattacctttactaatccaaattattaaagcggtcattacaactattcccttgttaaaaggatttcgtcatcgaaatctaacccgaatagttctagatattgagtcctcatatcagactccaactcccaggtggcttcttccaccttactgttcctccagaacaccttgactagagctatagtcttgtttcgaagaaccttttcttttctgtctaagattgcacaggttgctcttcataggataagtctgattgcagttccagggcttcataactc

SEQ ID NO: 150571 - DNA, 605 bp, Cannabis sativa
attgagaattctctggcagagttggagaagggcaaggataagtgcaaatcaccaataccgcgatcaagatctcgcagtccccgagggaagaactccaggggatgaagcccaagaagacgcaacccacggagacagcaaagtccgaagttggccaagtctcctcccaagaaggagtcctcgccgaacaggaaaggtggaccccgtttcgtcaattatactgaactcgcagtgccccgagaccatatctatgcaatcgaagaaagaaatggagtcttcaagaagccgcccccatcaggggaaatcgcgacagaagagaccccaaaaaattctgtaaataccacaaagacattggtcataccaccttagaatggtgggtcttgcaggacaaaatcgaggagctgattcggagaggaaagttcgacaagtataagaatggcgaggaaagtcatccccgagcggatgacaaagaagaaaaccaaaatgcaagttgttcgagaatgccttgcaacatcttaactatcattggaggaccccatatcgcaggagactcccgcaagtcgccagagcgatatgccagagaagcgaaggagaagccgctcaccaat

SEQ ID NO: 150572 - DNA, 834 bp, Cannabis sativa
tcagtaattagccctccatgtgttcgtaattagttttggttaaattaccattttattcttctaattacttctttactctttagtaccattaattcactagtggaagtataatttagatcccttttaaatttgtgcacaatattccagttctagaattaacacttaggtggtgtttggttggagggcataaaatagaatggaaaagaaagaaaataacttttattctattcatttgtctggttttattttgaagtattagaatgtcattcttattttagctatattttcattccttctaaccaaacgctacgtaatgggatctttgttatgtgagtttgagttagaaagagtagagttggagggagtagacatggagagaatatgaaacccatgcatatgaggggattaacattaccactattttaattaaaaaagtgagacctacttagaaacacaaaccccttgtcatttaaatttaatttaaattttacattcccatcctcatcaagtttaaacctcataccaaacgccccattaatgggaaccaaaattcaatctgttatgaaattcaatattccataattataaatcatgttcttctcacccacccacattatcagcttcccaaaacagaagttgtaagaatcatcttctttgagaaatttaagagtgaatcaaagaaactaataatatgaacaagagttcatgattactcaagatttagaccgacccactattgatcattgttataatatgaattagatctttatagtaaacgacatgttagataaagacaacttcattcatatcggtccttgtcatatataatttcta

SEQ ID NO: 150573 - DNA, 550 bp, Cannabis sativa
cctcatgtgaaggaaacaaatcaatcacaacttcttcatcccagcttcgttcgttgaccttgaaaagagaattcacaaaggtattttgaagacttgggtggctagacacaaggcacttagtatgttgattcggtagccaaggagtaccaaggatttttgtgcttagtccatcaccaattgtacgaatagctccaagacgaaccacatgttgggcgccccaaatactacgccaaacaaagcttggattattaccaagttcggctgatagaaaatcagtttgaggaaaatattttgctttgtaaactctagctgcgagagaatttgggttacacagaagacgccaaccttgtttagcaagcatggcaaggttaaagtcgtgtaaatgtcgaaaccccattcctccttcttctttaggcttagcaagcctgtcccaagacatccagatgatacctcgaccattgctattattagatttccaccaaaaacttgccattattttttcgatctccttgcaagtgccgaggggaagtaaaaaaacgctcatagcgta

SEQ ID NO: 150574 - DNA, 590 bp, Cannabis sativa
  modified_base (147)..(149): a, c, t, g, unknown or other
  modified_base (249)..(254): a, c, t, g, unknown or other
ccacaaagtcattccttcatgttggccttttgtacacttggggcttaagaatttattttaacttataacaatatactcaaatctgaaaaatatcacaaaattaaaataaattaaatatttccacttaaataaattttactattaaannntaaggaatatttaatttatattaattatacgtacataaataaagacttaaaatatacaaatttgagctgtaatcaccagtgaacatgcatcactatttannnnnntgtgaacttggagaggaagtgtttcccttctcgttacaatggatataaatagaaagattgcacgatccatgcagaatacactgatcgtgtgatcaatgcagaatacactgatcgtgggataaatacagaatacactgattgtgagatcgtgggtatgccatatctctgtaatctgatccccaagttatagggatttcgttgatgactcacaatgcgaaagatgaatttactaactgttggtagctctgcgcggattgctgattgctttgctctgggcatgccagcgaggcatcctatttggattgtaccctccgagcagatactccaagttgattc

SEQ ID NO: 150575 - DNA, 520 bp, Cannabis sativa
gattgttatggtttctaataaactaatatagtgttctgtttaggcgagagtcaaagatatcatttattgaatagactagtcagctatttaaaatggacactattctagcaactttttattcgctcaagactagaatctggcgttgtgctgattaggcgagagtcaagatcattctatcttatgagcttccactattatttcatactttgtaagctctactcttagcagttactattggggtgatcgttactaaaaataaaagacttacaataatacttatctttcgaaattttacatcgttaaattgctaatgaatgaacatctattagggatgaatctcattaaaacaagaactatgtaaaaccaacaatggagatggaatatgcttatagctaaagctcactactttaaagggttgtattttcgtttgatacttattttaatctatttattttaatgttaatatatttatttaattaaaattactaattcagacaactttaaatataaattttaattt

SEQ ID NO: 150576 - DNA, 534 bp, Cannabis sativa
cgaggcacacggtcgcgcgaaaaatgagcccattgttactcagatggttggaaggctgaccttggcttagagaagtcaaggtgccgcacggctgtttcgctgtctgaaaaggtgagccggtgacagttggtatcagagccaagttcatctcagtgggaggtgaacctggttggcctatcctagagaggatgtaggcgtgaggaaggattctagaaagacaactaccacatgcaattgtggagaggtgcgacagatgtttgaaaccatactatatgctcggtacactaggccaagtttgcctaagtgacatcgtaagccgtagaaggcagttttgttgaaaaggaagcttgttagtatgtgtgtggaagtagtgctgggaccttcagattcttgttagtcccgacagaggtcaagagttgataaccgagtttgttcaaatggggatagacatggaatgcttcagttgctacattgtgtgtccagagggacgcacatggagactaaggcgggtaggtgccgcaatcgtcagaggat

SEQ ID NO: 150577 - DNA, 589 bp, Cannabis sativa
agaattaagcaaatctcatagaatctcaaatcatgaatggaaacaagcacccttcaaaataaataaaatatttgaatgaagaaagaattcaaatcatgtgaaaggcacatcgagccgctgccaccattaaatcatatctgtatagcataaaatctgtctctaaaaccaatttcttgtcacgattttatattctgatttgaaatagatctgaaattgaagtgaagggaaaagaattctgagagatgagagagagtctctcgaaagcatatagtggtcatggtaaaaagtttgaccagctgctaagcctgatgactttgtatcacaatttgacagctttaataactctttatctttaaatggaatcacctaaaattttctcatcaatagctcttgcttaacaatcaataacctcaataaacacccaaacaatcaaattagggcgatgcaggtttcaatagaggatcaagagcaccaagtagtgacaatataattcatcaatttcatccaaaatttaaactaaagaaaacccagaaaacattaccgtgctctctgtactttcaatgatggcgggagcaacaatcaatgatca

SEQ ID NO: 150578 - DNA, 725 bp, Cannabis sativa
ctctctctctctctctctttgaaaccctctagatcagctagggttgggagttttctttgtgattcaagttattctcagcaagttttagtaatctccaagccaaggtaaggtcttaagtaacttcccttttagtttcttgtttttaaagaaagtgaatcatgcttatttttgtgttttttttgttgttcttgctggttgagattgtttatgttttctatagttgatttatgttaaaataagttagtttgggcaagttttgttaggttgtttgttgtttgagcaagctttgagtttttaaactcaagtttggctcattaatggtgattttgaattctgagtatgggtagttgttctatcacttggaaaatgtttattggggtgtattatgcaggtctggaaagtttggttgggtttggaaactttttggttagggttttgagctttgtgggttttctaggtaaaactggctaaccggttttacactgcttgtaaaaccggttacccgaattttgcagcagtggaaactcaattttcagcttgttgtttcacgtctgtttcaggtttcttgttggttgattccctgctagtttggaatattgcaatattaagttgctgtagataggtttttggtttgaaacctaagtaccagttgtgatattagcgagtcacttatgtctggtgttattgatgtgatttaggagcctataattcgccgagcagttgtt

SEQ ID NO: 150579 - DNA, 800 bp, Cannabis sativa
tggttgtcccatcgagggtttcgaaaaatgacagctgtaattatttcgttttatcctatttatggtgccacgtcacgaaactctttggttttcgtgtgggcgtgcccatggctggctgttggataggatgacgttaggcattctggctgccacatgtcataatcccaatttatgagggatatgagtatttaaactcattgatacgaaataacttcctcattttccctctcgttcttaacttccctttctctctttcactaagattcccatactttgtccagatttttgcttctttctcttgaatctcttcagtttcagaggtgattgaaaccagccgcattaagaatcatcagaactaaaggttagtttcgaatctacttgcatttttgttttctaattgaaagggaaagctgcattttctgggtttttatgcttttaggggtttgaaaatacatgctcttatacatagggctatatttttctgtgtagaactaggtaatcctagtagaaaatagacctgaaatttgcatagccgttaacttttggaagaatgtttgaataatcgcacctttcctgcttgtttatttcttgaatacacgcgggtattcggatgaacactttgaatactcagatacctgcttgccttaggctttacaaagactttatcattcctagtcgttatttagaacctagggttttatatcctctgtatatgttgttgtggggacactagttaagtctttcaaatggtgggcgtatcgcaatattccaatgctcatacgtgcgatcgtatgttcctt

SEQ ID NO: 150580 - DNA, 640 bp, Cannabis sativa
tagagcccagggctctaaaatgtgtgtttttgggttaccccgagggtgtaaagggctatagattgtgggtaaaagggaaaggagttttcaaaacactcattagtatagatgtgattttaagaaatgattttccttgtaaaaatactaatgagcttgatgcaggttctacagaaactaaccctgcaggtacatatattggagttactcaaaccggcccaactgaagtagagtcgaatccagatcaggtggaaccaattcaaatggaacctcaagaagcaccaaatcaggtggaactagttcaggtggaacatgaagttcaagatgaagaagacgagaatcaggaagatctcacagaatatcagcttacaagagatagagctagaagagttcctaaacctaaccagaagtacagttataatgtgtgggatgagagtattgcatatgcctaatgtgcaaacttaaagctgagatctatgagccacaatcttatgaagaagcacttaaaggcagaaattacaaggcttggtcaaaagcaatgaaggaggaaatgtactctctcataaagaataagacttggagagttgtacttagacccgatggcaaggaagggaggactgaggatgaaccggtaaggttcaaa

SEQ ID NO: 150581 - DNA, 656 bp, Cannabis sativa
aaattactaattagccataacaatataatggttagtttggtacaggtttgccatgaaaaaaaaaagacaattgtattgtgagattagaaaaattgcatcaaatctttgataaattataaaataattagtaacttttctttactgaactttcgattatatctgattctgcccctaaaatatatagtttattaaaaaatttcttgaatttttaaatttacaaaaaattaatcattatgttaggttttattccattattcattttaaatgttgatgtgtctttataaattagcaattttgccccctaaactttaacaattatcaaactgtacctccctcaaaaaaaaaaaagattgaatatttttttaatgaatcttcagaaattaatttagatcttaaaaaagtaagtgattattctagttaatcattttttattaaaaaatttattttgataaaaaaaaagtatattaaaaattcaattttcgtaaaaattaaattttacaaaaacacgtttaagtctatttctatctctaaaaatccaaattcacttaaataaacatacattttttttagtttaagttctaatttttttaaaaaataattttatattttttttttattaaaaaatttattttgataaaaaaaaagtatattaaaaa

SEQ ID NO: 150582 - DNA, 613 bp, Cannabis sativa
tatgtctatggtaagcactttagttttgtctctatagtaaacatatttttatagccataaatatttaacctaatggttataaattgataagtgtatataaatagttaatatgtagaatgtactagattattcataaaattatttttttttataatattcttaaattaaataataattatttaaatatattactaatttattcttacctcctctaattaattatttttttttctttttctctctttcattcagaaacccaaactttcaaaaataccatatttctttcccattcttttgcttgggaaccatgtttattcatctacatttttacatgtttttttcggtgttatctacagatcattaattaattaattaaaatgtaattggtgaggtttgatgagaaagtgctaatgatataagtcaaagtttattacttgtaaaaagttatggtatctcagtcccacttttaattattttcttttttttttattattttctttggaataagattgattttcactaattaattattttagcaaaataaataattattgtcttaattgttttggtcaaagaaaataatttaaatgggagaaatatatgtttagaagaa

SEQ ID NO: 150583 - DNA, 676 bp, Cannabis sativa
  modified_base (233)..(243): a, c, t, g, unknown or other
gaccctagaacaagactaggaccgtgaccaggacccgaacccagacctagaattgaacacatacttggcctcaaacccaaactgagacaagaactcgggcccggacacaatagtgtacccagactggaactgagacgcagacctggacctaaatctgcaacccgatcccaaacacagactttgacctagatagggatccaaatacgaacatggactcggaccaagacccagannnnnnnnnnnatgctggacctagatctggactgagatcgtgacccagacctaaacatggacctagacccgaacctagaccctgatcggggttcagacgtggacaaaaacctagacacagactcggacccgaactcaaacacccacacctcgaatcagacccaaagctagacctggaccctgacccaaagtcgaacccagaccaggatcagaaccaaggacttagacccaaaactgaatccagacttagaccgggactggaacttgggattggacccaacctagaccaagacctaggacgcgaacccacatccaaagcctgatctggacatagactgacatccggacctgaacaaaaactcagaccaggactcgaactccgacccgaactaaaaccgaaactcgaactcagaatcgcaagtggaactagaactgaactaggact

SEQ ID NO: 150584 - DNA, 526 bp, Cannabis sativa
tcctcatcaagaataaagatttatttctttcagatttttttttttttttgacaaatctgtaaaaaaaaaaactcatattataatttgtggtctacaaaagaaagagaaataagagatattatcaaatgatatagggtaataaaatactaaaccaaaataaaaatagagattaacaaatattaaaaattgaaaaaattctcaccgagaatagagatctcgaaaaaaattgacaaatttataaaaaaaattcattatataatttgtgatttaaaatagaaagagaaagaagagttattgtcaaataatataaggtaataaaagactaaattaaatagagatctacaaaaataattgataaaattgaataaaactctctatataattataaacagaaagaactgtgagaataaaattagaataaaaaataaaattaataatagttaaaaagagacagtaatattataaaattagaataaaaaataaaattaataatagttaaaattagatttaacatattgttttaata

SEQ ID NO: 150585 - DNA, 618 bp, Cannabis sativa
agcacacctgtcgtactgtctttggtgtttagaaatactcttcttaggaccatatctcccagaaagaatttttgagccctcacttgtttattgaaataccgagctactttttgctgatgggccgtcagctttaagtttgatgtggtttgcttctcttcgatttcatcaagtgattcagcgagtacgtaatttgcttcttggctctacgtcaatcttctatgggatggtggctcaagttctacgggtatcattgcttcatatccctatgccatggcaaatggagtctgttcagttgtcgttttctcagttgttcagtacgaccatagaacttcaggaagttcctccggccagtttcctttagcatccttaactcttttctttagtatatccttcaatgtcttgttgactgcttcaactttaccatttgcttggggatgtgccactgcagagaaacttttgatgatacaatgatttgcacaaaaatcagtgaaggattgactgtcaaactgtttgccattatccgaaactattttgtacggaaatccgaaccggtagattgtgttctttacaacaaagtcttgaacttttttggatgtaatggttgccagtggctcggct

SEQ ID NO: 150586 - DNA, 516 bp, Cannabis sativa
catatctaagcataattcatccacagaaaacaacaacaaacactagcagcaactacaacaacaaatctcacaaagcatgcataataccatagcttaaaacccaagaaatcaaaaaggaagttactagagactataccttggcttggatcacctaagacttgctgaagaataatcccaaaccctagctggttctagggatttcgagagagagaaggagagagttgagtttgagagaaaatgtaatttttggtttaaccttttattttttttttaaaatgaattaaaagagttggttttatctaaaataaccagccaaataatttctataaaatcaaattaaaacttaacttaatctcacaaaaagacaaacacacaaaagccaaaatgactattttgccccttcatactaaaaaccacttaaagtcactaagggataacttgggaaattctaaaatcccaactattctcgacattcccaatgtccaactatatcaccccgctatactaaaaatacta

SEQ ID NO: 150587 - DNA, 525 bp, Cannabis sativa
  modified_base (472)..(472): a, c, t, g, unknown or other
aatacattccgtgaaagtacaatcacgggacaaaatcatgtccctaatatatttatgggtaaattgtagtataaatacataaaattttagattttatgtacacttaaatattttatctttatttttggaggtaaaaatacttaatgttacaattctcttacatctgttactaccacttctgttaactcataaatatggacacgtagaaggtccaaatgcattacattaatttattttattttaaaatttaatattcttgataccaaaaactaaatgttatttgtttcaaaaaaaaaaaaataataagagagatgcaaaactaaattaccataactgagtaaacccgttcagtatctgtgaaaattgttatgagaactggtttttttaaatatcattttggaccctgtgttttgcaaaagctaccaattagaccctctgttttgttaaatgacaaaatagatcttatattttncaaaatggtaaaaatagaaccctgggtttaattttaaacaatttttttttttt

SEQ ID NO: 150588 - DNA, 531 bp, Cannabis sativa
gaaagactataactcgatcggatcccctggctgttcctgaatttgaagatgaattggaaggatcaattactgtttcgactgctcctggggaaggcagtttcaactctgatgcaattcaaactggtgaactcctagaaactcaggccgagagagaagtggaacaagaaggaaatgaggtacagaaaagccctagctgggctaaggaagtcgaaaaggagagtttccaagcttcagcgaagcaacaatggcagagttttacatctggtaagatttcttacgataaattgaaacttagatttactgaaccagtggttaaagaggggaagaaaatagctatgataaatatagaagaggttaaaatccaggctactaattggagttcctcagtcatatgtatggtattgggagctaatcctccttttattgtatttgagggattcatcgaaagagtttaaggccattttggaatagctcagattgtgagaatgaaggcaggttttacatgttgaaaatattttaccaggatcttag

SEQ ID NO: 150589 - DNA, 758 bp, Cannabis sativa
cactctttccctacacgacgtttgatgactcacgatgcgaaaaccgaattcactaagtgttggtcgctctacgcggattgctgatcgctttgcttcaagcatgcctatagggcatcctgttcggactgtactctctgagcagatactcaaacttgattccacgtgtcaccatcatgtgatgcaatgtcagagtgcaaaaattgggataacatttgcccgcccaagtctgtacgggacttccaaagttgtgtgtagacttcatccgagctgcttctacatttggatggggacacgtgtcgagcgcgtctgttcaagactcgatgtgaggctgactatgcatcccttcagtttttggctaattaatgctctgacaattaatatttcaaaatctgatattctctcaccacggttgacggctgcactcgattatttttgatttcccatattcgcttttaagggggaaccgaggcgtctgagtttcttttgaaatgattacctctttttcgtttcatgcctataaataccaacaagcatttgtacacaaacttattttcactatccttctttgctaagtgagttcagagcaaacagagaggtttttggcttcaagtttactgaagtgccttcatcgaaactgatcgttggtttgacattactttaatccagacatctgattcttgagtaagttctcgatttcctttatgtttattttttcatgtttactttttgaatgcatcttcgactttgctgtagaaaat

SEQ ID NO: 150590 - DNA, 558 bp, Cannabis sativa
  modified_base (53)..(55): a, c, t, g, unknown or other
  modified_base (200)..(203): a, c, t, g, unknown or other
  modified_base (512)..(513): a, c, t, g, unknown or other
agtatgtcgtacccactgctatttgccccttaactctcacacaagacccaaannngaggaatttaaccttaaaatgaaggggagttttcctaaatatggaaattaagagtataatttactttttatggcataaataaataacacaatagggttatgggatttttttttttttacatttatatgggtttttttatgccatnnnnttgtaaaaaaaaaatagaaatcccatatttgtaaaacaacaataagtttttccggaaaagtcgctggcaccagaaaagtcgccagaaaaatcatggtcgccggaaaagtcgtcggaaaagtcaacgttgccagaaaactcaacatcactggaaaagtcactagaaatgtcaccaaagtaaatgtctcatataaactaaaaatataaccggttatatgaacaaacactaataactcaaacccattataattgaaatataaccagttctacaccataataaataaatataaataacataaaataactcaanncagttataattaaaatagaatcagttctataacagtgttataatg

SEQ ID NO: 150591 - DNA, 552 bp, Cannabis sativa
  modified_base (269)..(275): a, c, t, g, unknown or other
tcctagggctgctagggttggtatcttcttcagtttttactctgaatctcagctggttgttagtgatctcaagctaaggtatactcttttaaaattctactcttgttttcttgaattttaagaaaatgaactttgcctgaaatggagtttttagttgttgttgttgatgtagtggttagatgatgttttgagaggttaagttatgttagattatgtttatttatggttgatttggtggctgttgatagatttaaccaagttttgagttnnnnnnntcaaacttggagctttaatggtaattttggattttgagcttgggtaattggttttgttgcttggaaatgatttattggggtataacatgcaggtctggaaagtttggttaagtttggaaacgatttgatttgggtttgtgattttttgggtttttttgcagaaaactgggtaaccggctttacaggtacctataaaactgggtaaccggttttgcagcagggttccccgaaaaatttagctcgtcgattcgtcctagtttcaggtttctagttggtt

SEQ ID NO: 150592 - DNA, 757 bp, Cannabis sativa
  modified_base (708)..(711): a, c, t, g, unknown or other
tccaaaagacaccaatagacgagaaaatgctaactttaaagacccgaaacataggctacttataacataacagcctccacactttggagtatataatgaggttgggaagccagtattcgagcaggatgacgtcttggtcgagggggaagactatgtcaccgaggagcataccgtggtggtccctcacaggtggcaaagtgccttatgggccagatgggtgtgccctctgtccaacataaccgagggtcgtttgagggacctagacaaagctggatacctaggcggacttgagtgttatctcccttccccaaatcaccgagcaactaacccaaagaaagggttctgtgactggtcgggtgctcacactaagcaaggggcgatgctgcctttgctttcgtacttcaagagggtggcagactatttccgcctctgtcagacccagttgacacccaagggcatcaagtacttatctaccttgttcatcctctacgccactcaaggatggggtgtgtcgtccccacacgacatcaacaagctttttgatctgaagtctactactaagcagagcaggtcggggtacttctatttctctcagccagactacaagtggctgacaggcaccatggacatagaggtttacaagaatgggggtttttattgatgtgtactacttcgtggaaggcatggattgttggaatttattttacnnnnatcttagatctactcacaagtttgttgtttaacatcctaaatatga

SEQ ID NO: 150593 - DNA, 549 bp, Cannabis sativa
cgcccatgaaatattattattttatgtcagcatcttttataagtgacccttcatgatagattaggaatattttctaaaagatattgttttaagtgatataagactcaatacaccaaatagaatactaagtaccaataatactttttagcaattctaaaatattggactgtagtgaaaaaagtacagtcagactaaaaaaaatataattatacgattataccaatggtagaacctcatttataatgtaattatatggttagactagtggtagtcagttttcttatccagtttgattttttttgcttttaaatgttaatattaacattggatattttcgtaatttacatatcttttattggattgagtgaactttgattgtaatttagtacattgctatgtgtggcgtgctgccccatgacacacccataaagaggtcattttgtaacatgagcatgctttagtgcttgattattagtcaagtcttgcaccaaacacttcattgggatgggaagacttttgtcattagcttttctttttgtaattccattc

SEQ ID NO: 150594 - DNA, 546 bp, Cannabis sativa
cgaataaatttacaaaaatcctataatttttttaagctagttggaaatcaatgtcaattaataaattttaatttttttttattagttcggatgataacttgagtttgcttttagcaaaaaaaaattcttacataatcagttttcattagttcattgaaacttcgaaatctcgcaaaaattacaaagcgaaaatgcaataattttggaggggttattttatcatacccctaattaatctagtattagtaatgctaaataagaaaacaatctaataaaattctgtcaacacaaaaagaaaatagtaatatgtatcataaattttgtccagaatgaaaatttttcattaatcatttacaacaaggttgcatcgctcttgaaaggaataaacaccagagcatgtcaacaaggttacttgaagaactgagtagagtgatcactcacagttactgacggacccagaaattttacattatagggacttatttatcattcaaaaatatttatacatatattataattattcttactagatttatttaattttat

SEQ ID NO: 150595 - DNA, 554 bp, Cannabis sativa
aaaaatagcatgtaaagccttattgttataaccaaataatttttcatcttcagtagtccaattaagttcaagttttaccttagtattaccttcatcgccatttttagtaggtcgaaaccaacttctaagtatagctctcgaagccttctcatcttgtgacttaatgaatgctctcattctgaccttccaatatggataattcaaaccattcaacagaggtggtcgagtaatggagctttattatgaaaacaaagatatctcacactcaacaaattatactgaataaaataatctcaagatctcactaagagtttagtgacttgctttgatactaattgaaattttgtattttaatattgccaatttattatttaattgaattgttaattaaatgtaaaataataaaactggtactgaaacagtttttctgtagctacctctgtaactctaaaataaaccaaaatccttccatattgttactagttcacaaggccgcgcccagagataagattcattagatagatcttaaaaatacaaagtaattgacttatgca

SEQ ID NO: 150596 - DNA, 708 bp, Cannabis sativa
  modified_base (215)..(224): a, c, t, g, unknown or other
  modified_base (659)..(670): a, c, t, g, unknown or other
tagggtgttaatcaacatatttgtgagtagatctaagatccttataaaataattttcaacaaattaatgtactgtagtaataaaattatataccacaaagaatttaataatagtaaattaatactaaaaatatatatatcatggtaacaaaattatatataccactattaaaatatgtttacataccaacaaatttatatataataaaataaaannnnnnnnnnatcttaaataaatgatatactataaacaacaaaaaccatataccatataacaaaacataaatatctacgataaaaaacaaaaaaatataatattattgaaaaaattgtatatatcatatcaataaaattatatacaactataaaataattataccatacttataaattatatatcacatttatatgtaataaaataaaaattaaacatgtatgatctaaaataaaatgatatactatacaataaaacttatataccatataacaaaaaaatatatacctcacgatcaaaatatatataatgacaaaaaataaaaataaaaaatttataggatgccaataatattatatatcatgtcaataaaactacaatagaaaatagaacttaaatattattttaaaaaaaatgatataccgtataacaaaaaatacatacannnnnnnnnnnnatatatatactaacaataataatagaaatatatattac

SEQ ID NO: 150597 - DNA, 576 bp, Cannabis sativa
agtctggcgaatgagtgcttcccccaaggaatccagaagaagaactcgagatcttcgatatatctaagtatgtcaagcgtaatcaacgcattagcctcgcgacctagaagcactgcctcaacaaacaagcacaagccaagcttgaacaagtcttccgggttctgacagtttgtgaacctatcttggagtgcttctatcttcacactaccagaccggttataatatttgttgatcaatcggtctgaccctgagcgagcaacctgtgcagccttctcctcttatgttggccccgaggagaagtccaggcctgtaatgagtgcaaactcaagcactccgaatttgagctccttccgaccaatgtaaaaccgcatcttcaactcctcctgagcatcaaccttcattttgtgcaacttcagttggtgaaataacactgaggagaatgtcaaaggtacgacattccaaaagttattgaaacggctttccttcgccatgttattcaaattgtactcctcaaaccgagccttgatttttgtaaaagttctggtgcctctatatgtcacacggccagtaaaatgc

SEQ ID NO: 150598 - DNA, 671 bp, Cannabis sativa
  modified_base (178)..(185): a, c, t, g, unknown or other
caactacttccgtgttagtcaggaagtaacactatttgttaataaattattggtacaatgccaaaaactatatagaactttccttgtctgaataagtatctttcctcaaaatttaacattcagtctcactggtagagttagagactcagatacgttttttacacttctccaaaatcannnnnnnncccccagagtaatcaccatctaattagtagactttctagcatcaacgcaagtctagaaacctaatttggtgtagtctaagagtattaaaataccacccttatcgactaacatatatttcctcttttggatcttaagattcacttgattgtcttccaacgtttctttcctagattaatctaatactaactcattactcctactcaacagcaggtgtctagtctaacgcatagcaaagcatatctgagacctctcactgttaatcacatggaattctttccttgatctttatcttttcttgaatagttgaaacttttccatagataaataaatctatgtctagaagtcaaaaagcttctatagatatagcctttaaaaagatgcacaaccatcttactaaagtaagttgctcgcactagagtaagtaaattaccaagtataccacaagccacaggtttagattgttgaaaattattttaccaggatct

SEQ ID NO: 150599 - DNA, 985 bp, Cannabis sativa
aggtctcccatgtcgagatagatgcctcaggcaattggctgaaccaatcgtgggtattttcttccaacgttgacgcaagaatgcgacatttagcgagttgaggtacctgatccacttccataatattattaatttttttctaaatagtctatgggattagaagtacctttgtattttagggatttagataaccggaaccccttggggagtcgagcttgtcgcacttctatagtgaaaggagaggtcccatgcagcttgtatatggattttctctgctgctcgagcatttttaaggcctgcagaagcataccttgatacatattcccatctaggggagtagtgacttgtgttgccgcaggcgttgttactactgcggttatatttgctaggatattaaccctagtagtcgcagctggtgcggtaggcggattgatgcgattatttacaccctgatcgcccattcggggatcacggggctcttcgacatcacgaggcatctgggagcgcgccctaaagacagcgttaaggtgatcgcgtagatcgcccctgtgaacctgttatcgtcctccttgcagtgtttccaccgaacccgatctagtgtacttgttgggtgtgtgaccatgcgaggatgaggaatcagattcaatgtcgttgtctcgcgactgaggcctgctgcgaggattgcgtcgttcagggtcttcctcagtctgtgcctcctgatttgggtgtcttgcagattggtccctcaacgttggttggttcaaatcgagtccttccgggttggccctccattccctacgaatacggttattacagtgtctagagttagttacctaaggattttttgcgagtagcgggtactcgaggaggacgttgagccctgttttgtccatccacctcggcatgtaaagcgcgtagctggtcttggattgcagtgtactgatcggtggtcagttggataataccttcggataccaccgctgga

SEQ ID NO: 150600 - DNA, 910 bp, Cannabis sativa
gttaatataattatactatctttttatacctcttttatactcatctgtttgcaattctctaggcttccttggcttcttttgcttccaatcgactactctctgagtgacttgaatatttgaagaacgagactcacaaattaatatcccagtccaaggatgtgtgtgagaaatgagacaatgcccaacaggagattacccgcctcaagcaagaagccaagaaagagaaggaggaagcaaagaaggaagtcgagaaggcaaaagaggaggctaaaaaggccctcaaagtctaagctgacgagtttgaggagaagcttgctgagaaacttaccgagaaagaaatggagaccgaagaatggtgcgataaagttggtctttcggctgtataccgggcctggctttggaaccctaacatggataccagcttcttggaggagaacgaagaggaaactttagctctctgcgagaagaccaagatggaagaagaagacaacgaggttgaggaagaagaagaaattcgatccaagtctcccagcatgtagacttggtttatttatctcccttttcttttcttttaggaaatggccctttgcccgagacaatggttttgcccctagtggcaattttttgtaaagacatatttgcaaggttggacagccaactttgcttttttaatgcctcgcactttcaagtatgaactttattatgcggatgtttacttgcgttttagtcacaatataaactatcacaagcataaagtttattaggggtttccgttgattgtcctttctttcaacgctaagtagttaatttcctactttacgtgcgagcaacttatctgctcattcctcaatctacgaaccgtcatcgattccatctcgcgatcattgaaaatgatcccattttaagcaca

SEQ ID NO: 150601 - DNA, 579 bp, Cannabis sativa
gatgatgtacgttatgaacaactcgccaattttgacctctaacaagatcatccaaaaaaaaaaaaaaacttgcttagcttgattagcaagaatataagagtcatctttgtaccatacatcactgagatttatgctagtgatgttattttcagaaattatttttttcttttttggatctgtgttgaaccatttacactgaaataatactaccgaatatgcactactaaaagacaaatgtaatatttcttcaagttctccataatagtcaaaactttctgtccctgaaacagacaccccactgttttgagtattgcgatctttatctcgactgtgtacaaaaaatcgaacaccattaactatacatgccatatgaatacacatcgagatcagacccagatgccaaagctagcaattcatcactatgttctaattacccgagcttatacaaatcaaaaatctgaagaaaaaaaaaagaagaaatttaacaattatgatttgagaggtttggcgattaggaataagtagataatagagaaagaaatacttgcacaccttcttatgaaaccacgaaggaaattc

SEQ ID NO: 150602 - DNA, 539 bp, Cannabis sativa
atctatatgaatgtcttaatttttgcatttagattcatttggaattgatttgggcctttttggtcgtcggaattatcttttctgatcgggtttgggtcgggtaagtcggacccacgtgcagaaaaacgggtcaaactcgacccggttggctgaagaagacgactcaaaatgacatgtcgttttctaggaaatgacgtgtcgtttggataaaacgacgtgttgtttggctaaaacaacgtgtcgtttggggggtacgttgcaattgtcgttcgttgtaaacgacatgtcatttttccgtcttgtgaagcagccctacaggagagaaacgacgtgtcgttttttctatgcattttcagcccccttcatattggcaaaaacgacgtgtcgttttgtttttttttaaaaaaaaaacaacatatcgtttatacaatgtgatttttcaaaaaaaaaaaaattccgaatttttataaatttttttttatttatttggaatattaattattttcctatttttggttaatttagtcaataaattgcat

SEQ ID NO: 150603 - DNA, 518 bp, Cannabis sativa
  modified_base (482)..(493): a, c, t, g, unknown or other
tgttgtttctggagttgtctcgacagaagcttggttccagtgatatcaatagcgagttgcggccatttttccttctgaggtcgacaatgcatgtctggtgttgattgtagttcttatttataaagaatccttcgaggctcatttaaatgttatcttctggctcgctaggattgtaagtctcgctaatgctaacgggatgaagtttcttctcataacgagatgggcacttcgctcacttgttcttgagccgatctgacttttacacttagtttttacattgtacgctaaggacttttcacgattggtacgtgtcgctttctttggtgcctcgctattcgcattcagcgacatatgatttctcgataatatactaagtgccagtttgtacattgattcctcacctaagaccttacagtcagcgggttacaaatataactctgaaacttacgtaattaatgagttattccataagaagcaattgnnnnnnnnnnnnttccctttatcttgacacgtgtcct

SEQ ID NO: 150604 - DNA, 722 bp, Cannabis sativa
aagcccaaatcaatcccaccagtattcataagaaaatcacgaaggaaagcaccttcccgcctagaacatctgtttcctcccaccttctcagaattatccaaaatggcattcaaatcccccaacaccatccaaggctctccacaaacagagaccttatccgtgagccacttccaaaaggctgccttcttctcaggatacggggtcccatagatacaaaaaaggtgccatctacagcttcctctcgaactaggaatgactccatgaaatcccgagtcaaaagtttccacaatatcaatagtaacatcgtttctccaagctaagcaaaatccacccccaatacccaccgaagctatgcttctaagattgacatatcccaaacaattcataatttccgacattaaatcagtaccaacctttgtttccgacaagaaaattacatcagcatgagtatcatggatcaaactccgaagagttctctccgtcgtgggtctacgaatcccacgacaattccaagagaggcacctcatgaggacggtgggggcatgcttgaggccgcctcctcgccatcgccaaaattttgagcaaattggaccggtaactccacacagttatccaaaacaacttccaaatttcccgaaaactctcgagccaataaggcctcctttcttctttctctatgagtcttgactcccgaatttctctttgaatttgtgatgccactt

SEQ ID NO: 150605 - DNA, 635 bp, Cannabis sativa
caccttcgccagagtcaaatgggtttttggttgggccaatagcggctgatagtggtccacttgggacaacggcggcgaccaatgctttgagtagcagagaggctgttctaggcctttgtttggatactggtatatcgagaaacaccgatcatggccaatgtagttcagatcatctattcctaaggctgagtctttgagtgttaagcaaaaaaaatgttgagatttcagagagagagataggaggcgcaagaggggctgtgagaaaaagagatgtacggttagctctagggtttaatttcttatatatataactggaaaacaaatcgcgcttcgtgtgcggttgtttataaaattttaaagtttctattaaggttgatcacctcattttcaaaaagaactatgatcatcctttaatcatacaatctagatctcttaatctgtatatatactcttatgagcattcaactcattttttgtacttaattaatgttataaatatgtaattgactgaactagtccatatctctcttaagttaattaattttctaaaaatactttcattatctaacataatttgaagaaatttaaatgaattaattattgtcaatatatattattattattgaatatataaa

SEQ ID NO: 150606 - DNA, 587 bp, Cannabis sativa
tggtaaatacatacccttttctgattttacaatctaatttaagtaaaaataacaaaatttaaaaaagttaacaaaaatatcttacttccccttttaaaataccttgtttatagtaatcttattctaaaaaaggtcaaatttacaaaaagaatattttttataaaaaaaaattaatttcggaccttatatttaaaataagataaaataatcaaaatttaaaagaaataagaaaagtggtaagcaatacttgattttaacctattttcaaattcaaattacaataatatctaaaattaattttaatataaaattaatttatttatgataattagattttaaaattgaaaaacaaaaattaaaatacaaaaatacacaaaaaatcagaagttaattccatgaaaaatcatgaaaaatcgaagaaaacgaaaaaaatggcaggtggtacggatagcatgcaaagcatgctgtccgtgcgcgtggaaggtgagacacagtcgagaaaactcggcgcatgcactcctgcgcatgatttccgcgcgcgtagggtgatgtgctcaccacctcgatttttcccgatttttaaaaat

SEQ ID NO: 150607 - DNA, 1024 bp, Cannabis sativa
  modified_base (778)..(778): a, c, t, g, unknown or other
ctgccttaattatgctctcatgtttatctgatatcaagcactgttcttctatgatcccatatgtttcccttaattttacgaaaaactattgccatgagttgttttttttttctgaatcgacaacagaaaaagctagaggaaaaatatgtccatttgcattttgtgtacaagcaaagagcaatatccctccatatgttgatttaaggaaagttccatcaataactattatgggtttgcacttctccatccttttattgaagcatctagtgctacaaacaagtacttaaagttgttatcttcttctatatgcatgtgtacaattgttccgggattagttttctacatcatgtgcaaaaaacttggcagcaacttgtatgattcgtttacttttcctcgtaattcttcttgcgcgtgctcttcgtttctccatcctttcatgtagttcattcttacgccatacttatgttttatttctcctttgatgtcttgtggcatttaagttggttttatgttggtaaaccttggcttgatgtagtttccaatcaaatttcttgtagcctgtcttttgtctgcaaatcttatgtttagatcacaagtgtgaatcacctttctgtcatatttacggattatgaatgacttggttggtccgtttctagatgccgtgagtgcccacttgcattttggatccaagcaacaaattttgtatgttcttgtgcaagactttttcaccttgaattagaagttgtttctaatttcatagaaaccaagcacactttgnaatgtttctttgtccttgtatatttgtgcttcttctattttcaagatgttgcggatccgtgatgagtagttcgtcataatctgtgatttctgtctctctgtctttgttgttttccagctgctcaactatatcccctaccataagttttgcatagtccatgaagtcaaaatttttccccatcttccagcattgtcccttgcattgtatgttgttgagttgttgattcttctgttgttggtgcattgt

SEQ ID NO: 150608 - DNA, 572 bp, Cannabis sativa
tgaagcaatttaaagtgaagctaaaggagattaatcgagaggggttctctgatcttcatagtgcactgactgtagcaaaaacagatctggacaaatggcaagacttacttcaacagcaacctttgaatgaggaaattcatagcaaagaaaaggaggctcgagaagttttagtgaaggtgcagaaagattattcttcttttctccaacagaaagcaaaaatggcgtggattgagaatggtgacagcaacactgccttattccatgcttgcattaagcatagaattagaaaaaatcgcatcctctcaatagaaacacaagatggaaaccgggtgcatgaaccagatctcatcactggtgcatttctgaggttctacaaagacctgctagggactaaaatggtgaatagaaagaaatttcagaatagtgtaatctctaaaggagcaggggtatcagtagagcaatcaaaattactccttcagggattcactacagaggaagtgaaggcagcagcttttagtattccaagtggcaaagccccgggtcctgacggattctctagtagtttcttccaa

SEQ ID NO: 150609 - DNA, 1071 bp, Cannabis sativa
acaatcaaatcaaaatgcatccaccagaccaagaacatacaagtttccgaacatatattggtctatattgctacaaagtattgtcgttcagtctaaaaaacgctagagctacataccaaagattgataaacaaaatgtttaaataccagatcagacaaaatctggaagtgtacgtggatgacatgctcgtcaaatctaggaaggctgggggcacatagacgacctggacgaatgcttcaaggtcctcagaaagtaaaatatgaaactaaatccctcaaagtgttcctttagagtcagctcaggaaagtttctgggcttcatcgtcaatgtctgaggaattgaagccaatctagagaagattcaagccctcctggatatgaagtcgccaattaaaaccaaggaagtgcaaagttttactggtcgaatcgccgcactcagcagatttgtttcgaaatcaacagataagtgtgtcccattcttcaatatcttgcgaggaaacaagcagttcaagtggacggaggaatgggaaaaagctttccaagagctaaaagcacaatttgcaaaacctcctgtactctcaaaacctctggacggagaagaacttggaatatacttagctatcacggaatatgctgtaagtgtcgtgctaatcagagaagagaacagcatacaacacccagtctattaaattagtaaaagactcattgaggccgaaggccgatatccattgatagagaaactcgcttactaccttattctagcaacaataaagttaaggccttattttcaagctcattctgtccgggtgtacactgaccaaccattacgccaaatattgtaaaagccagatgcctctggacggctactcaagtgggcagtggagttgggccagtacgaaattactttccgaccccgagcagcaatcaaagaccaagccttagcagactttgtggtagaatgctcaggcagccggtacaaacacctcagccaagtaacaatgaagataagtcgacctggaaactgcatgtagacaggtcagctatagatcagctatctggtgcaggaattgcc

SEQ ID NO: 150610 - DNA, 510 bp, Cannabis sativa
gaagggtcttcatcattcttatgttatgtgtacactcattgttcaattcatatattatttataatcaccatatccatacatacagttccctaatgtgtgtatcatactaatataccaaaacctcataagcttattttagagggaagttcgtataataatcattctttttattttcatctatgtcctcttttttttggttttattttctttttttgtgtaattataatcgttttttatttctatttatgtccttttttgttttattttttttttctatcttacaattttttttcaactgtaaattttattcaactagaccaactcggctttaataatattatttgcaacaataaaaagaagattatacttcgaaaaaatacgatcatcacatataaataagattgctttagccatatgacgagcaacctgattgacaaatcatttgacaaaacataaagaaacatccctagaagaagataaaaattatttacaatcctcaatgataccacc

SEQ ID NO: 150611 - DNA, 520 bp, Cannabis sativa
atgatcttggactctctctctctcaactgaatctaaagtatgagcattggagattagagatcagaactctcccctcagacctccttaaataacccctatatatagttgctggtgtgtcccttttaagttggtattaaagccaactgttataaattgcagcaactttctttaaattcatctgataggcaaatagatggacatactgacttgagaggttaagtgagtttaatcccaacaatagtttttatgttttgaaatacatgactgatatcgtcgcacgtgcgaaccccaatcgttatatacaagatcaaaaaacagtaaattttaattattgattatagtatttattataataacaaataataacatatataaactaatataaatttttactttttttttttagttttggagacaagcaggaatataatttaaaaaccaatttattaccaatacagcgacagtggatataacggttgatggcggggattcacgaagacttggacgattgatgctaaaa

SEQ ID NO: 150612 - DNA, 905 bp, Cannabis sativa
ctagtttcgcgatgtgacaggtgcggtcacaagggaaactatacttgagagacaggtgaaaggttgtcacgaggaggtgacctttggttgtcccttcgaaggtttcgaacaatgacgactgtaattattactttttattgcatttatggtgccacgcacgaaactctttggttttcgtgtaggcgtgaccattgttggccggttgattaggcgactttaggcattccggttgccacgtgtcgtgatcccaattaatgagggatttgggtatttaaaccctttgattcgaattaaaatccccctttttccctcattttccttaactcccttaacttccttgttccttctctttcagagaatccatcgaagacttccataaattgcccagattttcgcccttctttgtgggatttttctcaatctccagtgctgtcgagagcaatcgtaggaacagattatcagaactaaaggttagtttttaaagttcactgcattttgtattctgtttgagaaaaaacactaatttctgggttttaccatttatgagggggtttaggaatatatgtttgtagggaatacgcatgaagctacgttttttaggcaagaaactgggtaatttcagaaaaaatgacctaaaattggcataaccgtgtattgtagaaaaaatgcttgaacagacgctagttcatattttgaatacacgcgggtattcgaacgaacacctcgaatactcgcatgtctgttcttcctagcttcacagagacttactcagaactttaggatttcgtgtttctgtaaatttttgttgtgggaaaattggttaggcctttcaaatggtggatgtatcacagtattctaatggtcatatatgcagttatatgttccttgagatactgagatacacc

SEQ ID NO: 150613 - DNA, 953 bp, Cannabis sativa
  modified_base (915)..(925): a, c, t, g, unknown or other
atgattatcatggatgattttatattttgcagtggagacacaagccatgatcaattcgatctaatgctctaaaaagcccatcttacgaagcatggcttccaaaaaagatcattcgatcctattgtaagccttactcatgtccaattaaagtcataaacctcgtcttgcctcttctcttccttttcaagtaatggaggacctcaaaagacaccatcacaatgtcagagataagtcgtcccagtataaaagcactttgcgactccgcaatgatagtatccataaacagtttcatacgattagtcatgaccttggttattaccttgtacaaaacgttacatagagcaatcggtctaaggtctttcatacattgcagattcttcttttttgggattaagactacattggaatccccacaaccatcttcaaaggaactcgtttcaaagaaaagttgaacaagctccacaacatctactttaacaatatgccaatatttttagtaaaatgaggaggccataccatccgaacttgaactcttatctgagcgcatttgaaaaactgcttcatcttcagttacatggtgagatagctcaacattagcatactcaggcacagcagtagagacatcatcaataactccttggtagtaggtgttataggcaggaaacaaagaggagaagtagtaaaacatcaaaggagagaccattttcccaatcgacccattgaacttagactaaaatataaaagttgaaagaaaatatataatatggaagggtagggttgtttgtatatcttttttatttattttttatcatttatatttatatattttcatttcatttggaagcatcaaaccattgatagatacccttatatctttatatattaaaagtgcctatctaacgacaattcttggtnnnnnnnnnnntggtttaacgattctttttttttattta

SEQ ID NO: 150614 - DNA, 537 bp, Cannabis sativa
cttctgttgtgccccttggcaccgtacttgccacaatttcgtggtataataatcctttcaccattacaagcagttcgttttgacttaattcttacaaccttttgcttcctgggttgccctactggttgcttctcaacaggcactccaactgtcatgttctttatgtcatcaggtaattcccaatcatcctcgtcaccaactggcataattgtaccttcatatgtgctcctccaatattctgttgtgtaatatggcgagcatagtgcgtacatgttaatacttcgttgctgagttgcagcacatgcatgaggacaagaaaacctcatgcactggaacaaactgcaagtgcaagtctgtacctgcaagtacactatgcaaccggtctcaactgttcatccagggtgaacctacaacgtgtaaggtccacatgtgtcaacatccaaattccgtgatttttcaaattgcaatgccaagtcctcctccatttctagtgatagggtcttcgtcaacttttcagctttttcttttcgtgtagca

SEQ ID NO: 150615 - DNA, 526 bp, Cannabis sativa
agatagtctcagacaacgggaagcagtttgactgcgaagaatttaccgacttctgcaactaacacggagtcatcaaaagcttctctacagtggcaaggcaacaaataaatggacaagtagaagccgacaataaaatcctcaaggtccataaagaagaagctgctggcctgcaaaacaattggcctgaagaattgcctagagttttatgggcctaccggacaaccccaagaaccacaatcggccactcgacgttctcaatggcatacggttgtgaagcaatggtcccagtggaaacattattcccatcccataggaggacaacttatgatccagcagcaaacaagactttattacaagatgcgctggctcaaattgacgaactccgggatgagtctcaaatacgaatggcagcttatcaaaagaagctggccaaacacttcaacccgaaagtcaaaaatagaaaattcactattggtgatctagtcctaagaagggtctttccagccactcaggaacccggagtggg

SEQ ID NO: 150616 - DNA, 547 bp, Cannabis sativa
taatataatacttaatataaaacatagcatacgtgcatcgcacgtaacaatatactagtatgtacatatatatatatatggatcacaaaaagaatgtaaattaattaaacattaatatatatggaatacttctcaatgggtattatccatgggtacttaaaaaatttaactataaatattaattttaaaaatattaaacgatttaattttaattcgatagagaataataaaatagaaatttgaatttctatgcttatttaagtttcttaattaaggaaaatatcaaaaaatacatctttttatattatattaaaaatatgtttatatgaaaaatatttaagtcaaactcaacttttttttatcatttttttgccgaaaactttttttttattattttttttcaactgatgaaacaactctagtccatataacgtaaaaataagaaatttgtctaattgaataaaaaaaattaatcataaaaactcaattttttctaatattactcattcatgcgtaatacccattaaagagtgtaccctaatataca

SEQ ID NO: 150617 - DNA, 645 bp, Cannabis sativa
aatttaaaaaccagtttcgaacatataaattttatatcaatatctaataaccaaatttctaactttattctttattttggcatttaattttttgtttgcttgctcaaaaaccagggttgatttaagcatacaatatgcagtaaatataacaaagagaatcagaaattaaaattaaagagaaaaaaaaagaaacaaaaaaaataaatagacaaaaatgcaataaaaaccataaaagaataacaaaaaaaatagtggaatgtgagaaaccaattagtaaaacaatcaaaataaaaacaaagaaataaaaatcaatttctgaaaataatcaaataaaaaaattgaaacttaaaactcaattataaacaacaataaaaaaaaaaacaagttaagaaaactagttacttaaaaaaaatcaattataagaataataaaataatatgtgtgttagaaactgataaaactggcataagtacccaaagttttaagtacccaaactctattattttcttacatagaccacatataagcttcagattctagatcattgattctagacagaaatatatagtatcagttacttccatatgttcttttaataaattcaaaacggagtctgtactgacaaaactggaggaaaattacagt

SEQ ID NO: 150618 - DNA, 692 bp, Cannabis sativa
  modified_base (372)..(375): a, c, t, g, unknown or other
tttgtaaaaaaaaatttgaatatacataatataataatcaaacaatacaaaccaaaacaagtaactgatctggaaaatctggaaagtaggctaaaatatctcaattttaaaaacttaaaaaaatttaaaattcaaaaaaaaaaatatcttaactagaatttaaatttaggttgttagagaatatttgaaaaaagaaattcaaaaaaaaaaaaaaactaacaaactcctaaatatcctaaattcgaacttaaaatcaaaaaaatatctaactaattttttaaatttctaataagataacataataaaatatcttgaattttaaatttagatatttctcatattatattcttagtcttataatttaataaattnnnntattacaaaataaactatttgaaaaataatatatttttcatatggttagaatatttccaattttattaaaaataataaaataaaataagtttgaaaaaatttaaggttcgaaaccctaaaatttctattcaaagtaaactaaccaatttttcaaatttcatgttattttttccaaactataattttaataaaaaatatctaataagataaaatgtttaactaacatattcgtaatattataattttaattaaaatatatttcaaaaataacaaatttgaaaaaaaaatatgatatggttagcaaactttaaaatttg

SEQ ID NO: 150619 - DNA, 971 bp, Cannabis sativa
tgtagcaatatagacccatatctgttcgaaaacttgtatgttcttggtctggtggatgcattttgatttgattttagcctgagtaagcgtccatgaatctaattttcatgccgtaccgttgcatctacgagctgatcgatccttggtagtggaaaacagtctttagggcatgctttgttgaggtttgtgaaatcaatacagactctacatttcttgttcggcttgggcactaacacgagattcgcaacccaagccgggtagaaagcttcaattataaagttgttgttgcgtagcttttcaacttcttccttcagggctactgctcgttctttgtccagcagccttcgcttttgttgaactggtcagaagttgggatcaatattaagaacatgtgaaattatagaaggatcaattccaaccatatccgcatgtgaccacgcaaaaacgtctaggattgctctcagaaattttatcaattctgattttacttccagcaacaaaccttttccaatctttagctttctggtaaggatatctagatcaatctcgatctcttctaattcttctacaggtccaacattgctgcttggttccccaagttaaggatccacattttcatccccaccttcgaagttccctacatggaaatgttttttcacttgtctgtgctctaggctagaggacatttccttcttagccttggccactgcaatgttgtaaccttcccgagcagactgctggtttcctcttagacactctaccccattctttgttggaaacttcaggcatgagtaaagtaatgatgtgacagcctttaagtcatacaaggccgaccaaccaagcattatgctaaaagctgaagggacatctaatatcaggaactataccatgacagtcatgctcgtcggagcttgtccaacagtgaggggtagatgaatttttcctacaggtgcgactccttgaccggagaa

SEQ ID NO: 150620 - DNA, 681 bp, Cannabis sativa
  modified_base (129)..(139): a, c, t, g, unknown or other
  modified_base (431)..(431): a, c, t, g, unknown or other
  modified_base (632)..(640): a, c, t, g, unknown or other
gaatttacttgttaaattctagttctgcttattggaagctctgttgtacaggcccatggtccccatactagttcagagcatcctacttgtaagactcagataattgatttaattaatcaattataattnnnnnnnnnnnctatgtctagtttatgatttttcactaagcaagggtttaattttgaagaaaagagattctagggcttatttattaattaggagactttgctaagtctaattaataaatatattaaatggaaattttacttgatatttaattttaattattaagtaaatagttttggcatttaagttgttagagttggaaaaattgttaaaagtggcaaaattccaagtggggacccacatatccatggccgtccacttgtagggtaattttcatttaatttttcattattttaatgcctaanaaatcctaacctaaacctaggtggatgtcaataaataaatagtgatggctgacactaaaagatgatgaaaattcttgcctttaggaaaaagttgagccttctattgtatacctaatttcgaaccccactctcttcttctcttcatatttgtcatacattgagtgatagagtgagtgcccacatacatcaagtggtatctcnnnnnnnnngtgtaaggctgtgaagaatcctgaatcaagagaaggacatt

SEQ ID NO: 150621 - DNA, 1033 bp, Cannabis sativa
  modified_base (157)..(158): a, c, t, g, unknown or other
ttagggcacaaagcccaacagagaagaccatcaaggcccaagctgatgaatttgagaagaagctcactgagaaggaggtcgagaccacaaaacgatgcaacaagattggccttcgtactgtatatcgagcctggatggcgaatcccaacatggacannagcttattggaggagaaggaagaggaaactcatgctttctgcgagacgtccaggtcggaggagcaagaggtagaggcagaggaagaagaagaagatctatccaagtctcccaccatgtagacttggtcttttatgaaaatggcctttcggtcgagacaatggttttccccttgaggcactttttttaaagacaaatttgcgaagttggatggccaacttttctttttaatgccttatactttcaagtttgaacttcaacatgtgggtgtttgcttgcgtttcattcacaatttaaataatcatatgcataacgtttattagaggtttccattgcttgtatttctctctgacgctaagtagttaataacctactttatgcgcgagcagcttattttccctaccctcgatttgcgagcagtcttgattctgcctcgtgatcatcaaaaataatcttatttcaagcaaactcaaatatatttttaatgaccttgtcactttgtatatatatttattacttacatgagtagttagatctcttacccacgtgttaggtttaagtactttttcaagacactttgatgtctcgtttaatactttcctttagcgcaagccgttagcattcagctttatgcgcgagttatgagttatatctcatttataactttttaattttcctttctcgtcagataggttttagataaaaaattatacttatttgatccctttctcgtcagaaaggtttgatcagggagctataatgattcgacccctctcccgttaaaaaggtttggtcaaggagttataacagttctattgagttttgtgccctaaataaaactctattttaatgtaatctttgttggatattattttac

SEQ ID NO: 150622 - DNA, 1731 bp, Cannabis sativa
  modified_base (1075)..(1075): a, c, t, g, unknown or other
agcataataacgtatatatgaataaatgcatgtttttactatttacactactaacactaattgtttatgcatgtagtttcaagagtgttagtatagtgtaggatcttgatatggatacggtgttacaaacacgagtaccagggggtacgtcgtgcatgtggtacaacacttagtaattcctagaagtacaataatggctctaccaacacgagtacagggttggtactttggtaaatttggtacagaggtcgtacttcccttaagaacattctttaccacttggtgagctcgttattgagctcaggacggtttacgcataacgtcgtactagcattgactttatatgtgttgcatatcttactgagtctgttgactcaccagattgctaccttgtgtaggtaagggaaaagcgaagctggagaaatagtgagatggggctcgacggtgattgtacatatcgcgacagtgcaacctggagggtttcaatctttcactattttgagttgcctgtacacgtttttgtttaaaatatatatatatatactagtaactttatattagtaaaatactttaaactgtattttgagatttgggatcccgacccatatgtttataaagttattacactatcaaattaatttttgagttagtaagtttcaaatacgggcgttacagtttggtatcagagccgccaggttgttcactgaagaccgtcaagatatgtacaatcaaggccagtgtcgagctcaaaaaataatataaatttttacttttttttcagtttggagaaaagcaggaatacaatccaaaaactgatttattaccagtacatcgatagtagatagaacggttgatggcggtgattcacgaagacttagacgattgatgctgaaaggcctaagaatttttcttccctagcttatttttttaggttaacttgtagctagatttattaacatgttaatacttggactaattttacaatatttgtgcaatatttaattgcaatttatttaattacttctatgaaatgaaattaggtatattggtcaatcataaaattaatttaaataanatttaatttaccttttaaaaaaataaatatccaatttaaatttaaattaaatagtataatgggtgactactcaattgttacatttttattttaatcatcatggttacatttcttttttacctgtaatagcaggttaccaataggtaaaactttcttttttagaatccattaattataaataattattttcttaaaataattaattaaatatttaacaagtcttattttagcaattaatatttatgaataattttttatataaatctctactataattaaatattttaacagttaagccatttaattataatattttacaataaagctttcttttttctttttataaaaattagacttctttttacacagattagaattctcttcttgtataataaatttttaaataattaattatttttaattgatattaaattattttttttataactaaaagcactaagtatgaatttgatgttgcttcgttttttagaggagtttgaatttgccttttgactttggtttggtttttttgagtaaatgactccttataaaaaaaagatggggagtttggccattttttttagaaaatacattcaacttatttcatttttttactttttaaatatttaaataaaaaaactaaataatgaagtata

SEQ ID NO: 150623 - DNA, 670 bp, Cannabis sativa
acatacctccatcgttcaaatcagcaacacaaccagaatgaaaccaaaacgagggtaatacaatcatcaattccgacaaaatttaactggaaagaagaactgtaatgatctaaacagaaaattatgaagaaaaaaaaaaccagaaaaactggaaagaaactgaaattaaatatttgatttcggttttaatcattcaaaacaactccctctaaaatcgaaaatctagattcatgcaatgtagatttgtattaaacagatctggagctccccctcgaatcaaaacaagatatgatatgaaatttttttaaatactaaatctctgttatatatagtttcattttggttgattcctggtttacaatgggcaattcagctttttaaaacacaataacaagatctaattctaattaaggaacgacatgttacgtataagttcgttttttattttttgtggttgtcttatagttgcactatcgttttataatagtttataaattatgcaagaatttcagttgacgagtaccaacaaatagcagttatacaaggtaagatttatgtaaagagttacaaattaattttataatagttgaaaattgatctgactcaaataaaactgatgaaaagcacagggatcacaactatgttaattggagttaagtaccatattttt

SEQ ID NO: 150624 - DNA, 632 bp, Cannabis sativa
gggaaaagagattcacgaggcaaagctcacgactcgcagaccaaggggaaggggataaccaagagatatactcagaatcctcaagagatgcaacctgagggagctgaggaaaacctggagacacagcctgagatacgtcgaacatcagagaaaaatcgccaacccactttttaggctcatgagaatgaactcgtgcaaaccctaatagggagaaaaagttgaatcaaaccttgagaggaagggcaaggtccgaccataatcatgacaagagtgatctaagagaacatctgaacctaagaaagcgtgacctccgtcaatgaatcggttcaaggaaaaaggattcattccatttgcgaataaacaagttggaggataagttcagagggcatcaagtcacgaaacccaggagacaaccggggcacgatactgttggaaaacctgattcggaggcctcgagaccaaagagtaaagacgattccaaaaggtggcccaaggataagaagcccaataggtatatccctctttatgccgaatataccgagctcaataaaacttgggaaaaaaactacctcgcatgtaacgccctaatgctaaggcacgttacagtgctttttcaattattgtgcaatctt

SEQ ID NO: 150625 - DNA, 581 bp, Cannabis sativa
ttaatacactttattttgtttttttctctcctccttcctttgaaaggactgaattttgtaaatttagacccaaacaaaatgatttcctctcctttccttctacctttccacctaaaaatctttccagccaaattaaacatagttcttgaaattaattaaattgcatgtaactaagtagaaaaccttatctttatgatctcctcagacctctttagctatattctgaatgaaggtatattgaccacctattaattccttatacatggtcctgatgaaatcatgaaataaaagaatgaaaaataaataatattttgacttaaggaaagcaaaatctaattaataatatatagcaaacttaatctcctatatgaaaaaccagctgggtatgtatatcaaacttgacacatagtacaaattaagtggaggtagctctagggatttacctggtctcaaattcattttgtgtccctttataatagagattaattatataagctttaaccatatagcccctattcactaataagttatacagtcatgatacaattgttagacatttatatgtataatataaaatatat

SEQ ID NO: 150626 - DNA, 592 bp, Cannabis sativa
gtatatcatggtcagtactagacctgatatagatcattctctgagtgcattaagcaggtttatggcaaaccctgggttagattactggaatgcagtgaagtggctgattagatacttgaaaggtacaatcaagtatggtttgatttatcaaagagacacatcaaatatgaggttagaaggctatgttgatgttgattaagcatcaaacaaggataacagaagatctactactgcctatgtattcatggtcaacagaagctgcatatgttggcaatcacaacaacaacccgtggtggcactatcaaccacagattctgatgattcatggccaccactgaagctttcaaggaagctatttgatcctctaaaccaacctcatattaactcacctactcttaactaacttaactaataactttcaattatgttagttagttaggtggtgttgatattacacctatttctagttgtgagttgtacctatgtataggctaatcttttcacttctgaattagagaattgagagagagtttagagagtgagtgcttagttttttaagctgtgaaaccatgttcttgaaggggtcaagaac

SEQ ID NO: 150627 - DNA, 942 bp, Cannabis sativa
gctttgtccaagtggttagtggcttggttttgtgagctattttctaacctatttaaacaccaattgtaatgtaatttgtaaggaagagagatttcatgagagagtgattgaatttagagaagagagttgagagattgagagccaaagttggagacttttggtggtgaagaaccatggtattcatggtgttctaaacaactcgatcatggaggtttgagaggcaatatctctttgtgtgtatctctgattgatgaactctttattggtgtttgtaaactacattacatagtggataaactccttgggggagagctggaataggactcacattgagatctgaaccaggataatttctttgtctcactcttttatttttctctgtttttctgcattgtttttgccaaattcatgttcatttttttttttggtttatcatctggtttatgagcattgcattgtgtgtgtgtgtgtgttgagattgtgttgtagggatttataatagtggtatcagagcaaggttcttggaggatccaagactcaacaccaaagctgccaagaatcaagaaaggtttatcaatggaatcttcatcaaccagattcgacttagagaggtttgatggatcaggggattgcagcctttggaaagagaagatgatggcaatactgatataccaaaaactggactctgcattagaagaaaaggttgaaaaatcaagaaggagatgcaacgaagaagggtgaagctgaaaccataatgaagcaagctacatcagtaatcattatggatcttgctgataatgttctgagacaagttataggagagaaaacaggcttgggaatttggaaaagattagagcaactgtacatggaaaagtcaacggctaccaagattttcttaaagggaaaattctatggattcaagataaatgccactgttccatt

SEQ ID NO: 150628 - DNA, 799 bp, Cannabis sativa
cagttcagaaagctagcattatgggctgtaaaaccgcatgaaaccatgacaaagaagaatcgcaaagtttctaaacctagggtttcctatgtattttccacaacaaagtcgaaggtacattcaaaaagtaaacatgcaaaactaagcataaaggaaatctagagcttactcaagagtcagatgtctggattcaagcaacgtcaaaccaatgagtcttgaagctaaaaaacctcttttttcgctctgaactcacttagcaaagaaagatggtgaaaatgagtttatgtgccaatgcttgttgatatttataggcaagtcacgaaaagaggtaatcatctcaaaaggacctcagacgcctcatttccctctaaaaagcgaatatgggaaataaaaaataatcaagtgcagccgtcaaccatggtgagagaaatcggatttcttaatattaattgtcagagcattaattagccaaaaactgaagagacgcacagtcagcctcacatcgagtctcggacagacgcgctcgacacgtgtccctatccaaaggcaaaagcagcccgaatgacgtctacacgtaacttcgaaagtcccgtacagacttgggggcaaatgttatcctaatttttgcactctaacttggcatcatatgatggtgacatgtggaatcaactttgagtatctgctcagaaagtacagtccgaacaggatgcctcatcggcatgcctggagcaaaatgattagcaatccgcgcagagcgatcaacacttagtgaattcagctttcgcatcatgagtcatga

SEQ ID NO: 150629 - DNA, 1057 bp, Cannabis sativa
  modified_base (1005)..(1019): a, c, t, g, unknown or other
gtcacaagtttcgtttgtgggcctagcagtaggcgggcagaccttgtctagtaattcatcaggagaggtcatacctgatagttccaaccaggttaacggcgccattccacatgtcaaccaagcaaatcaatcactgagacagccaggcgcttccatattcgaatggttggggataactcatgacctaaggagcgatctgaacagaaggagaggagtagacaatcagattgtcacgacgattgtacagcccggagcccgtgctcaaattcccgctcagaaagatactgatgtgattcaaatcgaccaaaatgttgagcaggttagtctagttgtgcctgctgtgcaggcaccgctagacaagctgaaaaatatgtttcaaggcatggccggacagagaaacaatgatctcgagctggaccgagcacgtgaaactcccttctctcccgagatcaatcttctagcattgccccacaagtttaaaatgccaacatggaaaatgtacacaggaagagaagatcctctttcccacctcaagtattttgaaatgcaaatggatttgtaggggatacgaggagatgtgtttcagaatctttcctgctaccctttcggaagctgccctgtaatggtatttcaagttggcccctggaaagttcaactcttggaaagccttctctttggaattccatgcacaattctcctcctctcgtcaacttctgttgcatctgggagatcttgtcgaagtcaagcaaagaccaggcgagcctctccgagcatacgttagcagattcatgacggaggtgaccaaagtttcacgggtaactgaagacgaaaagttgtccgcgatactggggggcattgaagtcctcggtgaactttggaaagacataatgaagaacggcccagtagactcaatgagtgatgattttcttgaccgtgtaggcttcatcaagctcggagaagctatttgtagaaaatagtgaatcgaattgtgtatgtatttcatannnnnnnnnnnnnnnatatacaaagctaggagactaaaataggaaactaccaa

SEQ ID NO: 150630 - DNA, 580 bp, Cannabis sativa
  modified_base (382)..(383): a, c, t, g, unknown or other
ttttcaaatgtaaactataatttcagacatatttattcgtacaatactttattttaatacagtttaaaccatttcctatttaggagttgtactaattttggactactaccattcttaatagtctccattcttaagttgttgggaattatttaaaaattatccaaataatgtaatcttcataaccaagtatggactgtttgctgtaattttaaattgtagatactcactaaaaacaccaaaggacgtcttatcactatttaattttctgtgtacgtcccactgtgtgcttatggacgttaaatggggtatttcctatactttaaataacgtacgtcagcgatttcacagtgtaacgtgaaatcaaactcagtacattatgacnngcagatctcatgggattccctgatttgagttaattaagatactatatcaaaacacgaaacctacctataatacttaaggagattaaatattttttggattctaatatactaatatgacctttttcttattaaaaattggacaaatcaattaggtaagaattaatacgatagtagtccctatgatagtattacccaac

SEQ ID NO: 150631 - DNA, 732 bp, Cannabis sativa
tgcccttacctacacatgcaaacttaactatgagtcgacaaacttagtaagaaaagcataaataataacatagcattaacctagattatgattcggcgcccatacacccaaccataatcctgacaaagtatgacttactgagaatccaacctatactcagtactctagtcatactgatgtggtagtagataactcatactatctgaaagcctaccataaatttgttggcatctcggtgcaattctatgtacacctcaccgatgccttgatatgctaatctgatgactataaatttcctattctaacggcaacaaacatgtatgctaaacatgtataaacatatgcaaccattatgctaatcttacctcgtttccgaattcaggccgaccaacctgagtggaatagctgctcgacgaattacagacccctaaatcacattattcataaaactgataagtgacatgctaaatcacttttcggggacataaactcgaaactaaaagttttcctatcgatgaataacatggcaataccctaaatatcgtaaaaatgggaaaaactagggttcccaaaactacctcaattggtagatcgatttcctaactagaattttggttttgtggggtttcttggggaccaaccgatcgaccgggccctaaaggtccccctgaaccggttgaccggttcagtgcaaaaaaattccaaaaattcactactctctcaaatcaaccc

SEQ ID NO: 150632 - DNA, 509 bp, Cannabis sativa
  modified_base (28)..(47): a, c, t, g, unknown or other
  modified_base (103)..(106): a, c, t, g, unknown or other
aagcaattgataaggtgaaccaaaacannnnnnnnnnnnnnnnnnnnacttttgtttctttattgatgttgaataaaatatattacattgaaatggagttttnnnnagggcataaaacccaacacccttgagtcaacactggagccggagtatccactcgcctcgatttctttacagcatccatctccactattttgactttacgcttgcggtccaagggaggggtgatctctccttcttccacttcctcgtcaatgagaacgacttggtcctcaagaacaccaatagaagatctcttcggagtcaccactatatcacgtgactcggacaggccagcctcaggactgtacgtacaggcaagggtttcaaggaggtcttccatcgtcttcgctgcttaaggaaataaacaaaggggtttgaacattgccaaaaaatcaggcatgcaagaattgttggaaatattttaccacgatctagatttattaccatgtatgtttcattaacatcct

SEQ ID NO: 150633 - DNA, 598 bp, Cannabis sativa
  modified_base (544)..(544): a, c, t, g, unknown or other
gggtaatagtacattgaatgtgtcgttatgattaccctaggttttgagttagggtttcgaagtggttatttgagtaatttacccaattgtgtattgtgacttaggacctccgttcagttcaaggattttccatttaagtcaaccggcacgcttgaatcgggaatgaggtaagatagcataaattatatatatgtatgcttgtattaaatgtttacactactaacactaatgtttatgttattttaagggtgttagtatagtgtaggattctagtgtggttacagtggtaccaacacgagtacagaattggtactctagtgcatgtggtacaacactcgataactcctgggagtacaaattggccctaccaacacgagtacgaagtcggtactctagtgcatatggtagagtggtcggccctaccaacacgagtacagagtcggtgctctagtgtatatggtacaatggtcgtacttccattaagaacgttcttaaccatttagtgagctcggttgatgcactcaggacggcttaaacataaagncggtctagcattgcttttatatatgttatgcatatcttactgagtctgtcgact

SEQ ID NO: 150634 - DNA, 1002 bp, Cannabis sativa
cgggaaacccaaacctacaacgtaaggttctgctattatcactaggaattacaatatcctaggaaacagggaaacaccaaactaaggtactaaaattggcaggaattgagaaaatgagttgttcgaggaatctgtctaaaccagttaaccggtttgcactaggtttcctcaacaactccaaaacgtatccaaatgccaccataccttccagagtacctaaagagggcatacacaacatattccaaccaataaaactcaaaaaattacactgaattaaaatatgccagtaaagacctaagttcgggtttcgaagctcaaacttgcttaattccaacacaatacaacataaccagtatccagaacctagaatcaactcaaaataagcttagaaatcaaatcacacaacctaaccctaacaacccctaacttcaaaaattgcatatacaaaccaagtagaacttaaagaaatcaatagacaagagcttttagcgtttcccttggttagaacgtcgtcaaattcttactggaaacaccaaaaactagcagtcattcccatggttcttgcggggttcgaagaaagagaaaggaaagagggagaattttctatttttggtattttttcttatttttcttcaaatgaaaagagattaactaattaatctcttgctgaataaaatggccaggtgtccacaccctaggcagccaccaaatccctcacacgaaaatgaacaaaatgcctttttacttacaacttaagcaaaataaagtctaagggtaaaatggtcaaaaaccataaccccgctcaaactcggtattctatttcctccaatatatatcccactaagaaataaggttctaaacttacctatgtgattaaactagccatgcatcgcatttaccgttgtcgccgagtaaaagttgtaaaaattgcataattcacatataatacaaataatactcctaaagtttaataaaatctccagaattgagaaattataactc

SEQ ID NO: 150635 - DNA, 540 bp, Cannabis sativa
accccttgtagatccatttgcatctcaaaatacttgaggtgggaaagaggttcttctcttccagtgtacattttccaggttggcattttaaacttgttgggtaacatcaagagattgatctcgggagagaaaggggttccacatgctcggtccaactcaagatcattgtttctctgtccggtcatgccttggaacatactcttttgttcatctagctgtgcctgcacagctggactaacatgttcggcattttgcctgatttgagtcatgtcagtatctttctaagcgacaatttgagcatgtgtttcgggctgtacgatcgtcgtgccaagctgatcgtctactcctctccttctcttctgatcatttctaagatcatgagtcgtccccaacctattgaatgcagcctggttgtctcagtgattgatttgattggttgacaagtagaatggcaccatttgcctggttagaactatcagctatgacttctcttgatgaattactagacaaggtctacccacctactgcttggcccacagg

SEQ ID NO: 150636 - DNA, 1086 bp, Cannabis sativa
ttaagtttaattttttacggtaatgatgcctaagctaaaattctagaacttctctaggtacctagtcattaagtgtcaagttaatggccacatggcagacctagattggtccagatcattaaattttattttttatttaaaaattaatttaaatataccaagaaaaaaatgacgggtagataatgacttgacacttaatcgccaggtaactagggaagttccgaaaatataacataagtattattaccgcataaagttaaacttaggtatttatctacaataaagagttaaacttaggtacttacgccgcaaattactcaaaataaattaaattttttttttcatacatattaaaataaattaatattacacatgattgtgtaattggtttgaattttatttgtagggatgtcaatcaaatagttgtagtcaatcatgcattgataaacaatgttaaatgggctatttggattatgattgaactttcttgtgctcgtcatgctttacagttggggtggcaattagtgttggtgtgtaatgttcttgttttgttgaggtcttaaatttattaaaaaattttgctgacatgacacgagcacgacacgacacgtgagtgacacaaaaaatttataaaacacagacacgaacacaactcgaataagttcgtgtcatgtcgaacctacaaaattgcatgtcgtgttgtcgggttgtaagctaaattattaatttgaatgtcatcatctcatgttcttgttatgttgaatttttaaatttattttagatagtagacacaaacataacgagtaacataaaaaattgataaaacacaaacataagtagcaaaattttcgtgaagccgtgtcaaattcgtaaaatatcgagttgtgttcatgttaaacctgtgtatcgtaacttaaattgttctcctattttacgactcgacttgtcttttccttgcatagatgtttttaagtcattgatgaacaatttttattttttttaaaaaaaaaataataacaaagttgtaaaaacctatctacatcatatactcttcccaataaaaaaaattgtatttaaagctttttt

SEQ ID NO: 150637 - DNA, 624 bp, Cannabis sativa
  modified_base (164)..(172): a, c, t, g, unknown or other
gctaaatgctaataatttctgaatgtgtatgattttctgttaaaccttacttgatttctatttattgatatttgtagtatccaatatgactatgaacaacaccatggtgtcactgttgattgaaaacaagctctctagtgctaactttatcaaatggagagagnnnnnnnnnattgctctcattggtgaaaattccctgtttgtgttgactaaagaggctcctgagcagccaggtgagaatgcgaccaaggcagtcaaggaaaagtttgagtgttggcagaatgctaacaacaaagctcggtactttatgctatctagcaaggtcgacaccttgaacataaggtttgccaatactctcacggctgcagaaatcatgaaccaggtaactgaactgtgtgggatggcgtcaattcaaactcgctttgaagcgaccaagaatttcatcaatgcacggatgaaaccgcatcagaacgtgcgtgatcacctactctagatgactagttatttctaaggggctgagaatcatagagctgttatagatcagacaactcaagtgagtttgatgttgaatagttttactccagcttttctgccctttacatcaaattatgtcatgaacaagtt

SEQ ID NO: 150638 - DNA, 624 bp, Cannabis sativa
  modified_base (28)..(59): a, c, t, g, unknown or other
atgagttgactactctattcaatggatnnnnnnnnnnnnnnnnnnnnnnnnnnnnnnnntatcagtttgttgaaaacctttgaaaataaaaatatgttgcaattttggtatttttataaacatatttgttatacatgttatttttagaatttgtgtatgaatttattgaatcaaatgatttacttttgtttattgatatttgtagtgtcaaaatgaacaacacacaccccaacccactcctagtcaatgcctttgcaaatgaactctttagtgtgaaaatgctccctggaaagagcattaactcacacgtgttaatgatgaatatgaaattccaaaaagaaaacttgcttggaattgaattatcaaaagaacagtgggttcagttcatacttaatagtcttcctcctgagtataatagattttttgtatcttatatgatcaacaattttaactctcccgacatggataagctagaagcagaattgtgagctcatgaacggaacttgattgcaatgctgcctctcgattttgcaaacttttgtaagaggaaaaggattaaggatgaagcttctaacaatgctgcttcttcaagtacaattaatggtaatactcttcaatgttcaa

SEQ ID NO: 150639 - DNA, 502 bp, Cannabis sativa
  modified_base (432)..(437): a, c, t, g, unknown or other
tattattattattattacttttcatgcatggtgttttttttatttgaatatccacactaaatagtaatttttctttaaactttacattttgaatgagctaatgttaataaggtaatagtaatgtgaaacattactttgtttgttttgagagtttaaccttaaaatgttattcccttagtaatattataagtacccttaatgaaagtaatattgataccttaaaaaagagtgagattaaattattctcttccaatatattaatttgaatagtatttttaaattaataaataaatttaaatattattaatattttgatttattataaacaaaatattacgatatatatatatttagtcagtgagaataatttttttaactaaattatttttatgttattagctataatattatatatattgttgaccgagattnnnnnnaactattaaaatatgattataatattgagctgtaagaaagtgagataaggatttttacgtggttg

SEQ ID NO: 150640 - DNA, 1358 bp, Cannabis sativa
  modified_base (1116)..(1127): a, c, t, g, unknown or other
gttccagatcttatctttgattgattgaaaaagaccactcttgcttttcctcgcaaaataagagaaaccaagatatttatcatggtaaggaacacgtgaaacccccaaaatatgagccatgaaatcacaaaaatctgtaggcatacttgaagagaagcaacatgtcaacttgagcaaattaactagctaacccaaagaattttaatacataaagaagatctctttgaagggtgtacaactaaccacaaaagttgttaaggtttataccttgaaagcttgtaaagatattactgattataaataagagttgaatatttttatatgtgcttgaatgttaaattattaatattgaatattgaataatttacatataaatatcagacaattccttattcatacatgaggttgtgataggtattgtacaaagagttaatatcacttagccatgaataaaacagtcaacaacatattaaatttatagaatctttaatcaacggttgctagtgaagttcactaatgcctgttatttggtgcaagtaatcttgattcagattactgatgtagtatatataacatctaagtgaaggtattatatataatagagattatacatgacatggaccgatatgtaattaagttgtctttatcaaacatgttgtttaccataaagatctaattcatatcataaaggtgatcaatagtagattggccaaaattctgagtaatcatgaaatcatattcatgttattagtttctttgattcactcattcaagtttctcagagaagatgattcttacaacttttattttgggaatctaataatgtggatggttaggaacatgatctacaattatggaatcctgactttcctaatggatcgaatgttatttccatttaagtgttaattctagaactgaaaagttgtgtaaaaattgtgattagatctaaattatactttactagcgaattaatggtactaaaggataaagaagtaattagaagggtaaactggtaatttgaccaaaactaattacgaactgacacaaggaggactaatcactgaaattgattatataaataggcactgcactaaaacttagtaaatataattctannnnnnnnnnnngttcaattccatatttatagtggactaatcatggaattaataaataagattatttagttgatgagattcaataaatagtctaatttattggatcttagaattataggtccatggtcaccggatcgccaccttcaaacactgtcaaggggtgggataaaaattgtatatagaagttgaaaaaaatctattttgaattgttaaaatagtaattaacatatttaatttaaaata

SEQ ID NO: 150641 - DNA, 707 bp, Cannabis sativa
gtcaaaagcttattggttttcttagatttcctcttttcaacaagagaatattagtcaatgagaattggatgatcttccacaacttgaatattagaatcaacaaaaacacatgttgtacccatctaagtatatatatataaaaaaaataggggaaaaaatataaagtcagtcattatcaaacaactgttgagcaactaaacaaaaacggtaaaacaaccatacctcaacaccaagaccatgactctccttaatctcaaaattttcaaaatctggaacctggttaccaaaatcaccactaaacccacatgaagacatctgtttttcttttcttaaaaaaaaaataattagaaaaaaatctaatcattcacaactatttaacaaccagaaatcatcaaacaaacaacgttaccataatctcaactgctttcacacccgactgaagaggattctcaacatcaatttgagtggctccgtcattgaaatcaacaaaattcttgataattaaaaaatacaaacaaaaaaaggggaaaacaaagtttttttttttaagatttaaaaaacctaaaaacaacttcaaataaactaaaaaacaaacaattagaaaaaaaataaaaagatcatgattaaatgcaaacaccataatctataatataaccattacaaaaatataagaaatacaaattaagagtatgactattagtggtaaa

SEQ ID NO: 150642 - DNA, 820 bp, Cannabis sativa
ttaacatatcatctacatagagtagaagatacacaactgctgactcttctagtgtttgaaatacaaatagtgatcaaacttggaccttgtgaaaccatctcttttctatcttgttccacctgaaattcaggtggttgctttatgtatatctcttcttctagataaccatttagaaacataggtttaacatcaagctgctccacttctaaaccttgttaagttaccatcgacaacataagtctaatggtcttatacttcagtataggtgagaacacctcggtgtaatctatcccttccacctgagtgaaacctttggcaactaatcttgccttaaaccttactggctcatcttctatcactccttctttgatttttagaatccatttgcatgaaatcaccttcttatcctcatgtcttggaaccaatacccatgtctttttctttctaagcgagcttaattcatcatccacagcccgataccactccttcttgtactttccatttaaagcctcttttatactcaatggttcttgtatgtcacatgaatgatctattgacaaagcataggcaatcagatcagcttctgcaaaccttgctggtatatggatttctcttctggttctatctctagcaagttggtagtcagacagatttggttgttcctcagtctcatctagagctgtgtttgtgctgtcattcttctcactagctggttcaaatcctttgatctcaatttcaaactctgctaaatcttccctcttgtcagatgaatctgcatcaggtaacacactgcctttctcgactttcaagtgaggaaaat

SEQ ID NO: 150643 - DNA, 548 bp, Cannabis sativa
tctatattctctttagtaaaatgtctcaaatccaagaagattttgagctcttctttttaggtatgtcaaaaagatccatttagttggagcgggttggagttccgacccaacggatcacctctgatctgaaacattcagatacttattggatcttggattagatccgttctaccctgcctaatttttttactggatcggatctgattcgatccgatttcaatttacttaaaaaaacttaattcaagacttagatcccttaggacttggactcggactcggacttggacccagactcggacccggacccaaactcggacccagacccgggcctcggatccagactcggaccctaaccctgacccgggatccggactcggacccgaacccggactcggaacccggactcaggacccggacccagacccgagacttgggaccgggacccagactgggactagggaccgagacccggacccagacccgaacccgggacccgagacccggaccgggacccgagacccgagacccaggaccgggacccgagaccg

SEQ ID NO: 150644 - DNA, 568 bp, Cannabis sativa
tgatcaagaacagacccctctatttcccttgcagttgctcgagcccggtagaattgccagtttgtcacttctgaaaatgcttgaatgctgagtactccatgttgaggtgcatcctaaactggtcaagaaaatgctttgccaaccattgtgcatcaatgtgcctattattcaagactcaaacacatgtatgagtgtccttaagacgattgattcggaaggtttttctatttacaagaaccaaaacaaacaagataattttaacattagtgaactataattacaacatgatgccaactattgaaatagaagatatccaagttacaacttttctattagaataaaagatatattgtatatccaagttaccatacttattgatttataatgatttgatatggtctttagtatataaaaaaaattatattgtgattttttttgcttaaataaaaatattctacacagctattcaaaagcaatgacaagaaattaaattagaataaatatatacctcctttaatatgtccatgtacaaagaaatgacacctcgacgctctacactcagccctaa

SEQ ID NO: 150645 - DNA, 543 bp, Cannabis sativa
tttggtgaaccaaaaattgagaagcagaatactcgagagccagaagtttgcaagtggtcggcagctataacagatttgcatatcgacaatgatggtgaagatgaaagacttgaatttgaatttgatttagcaagtgtagatagtgatgaggatagttcgagtaagacaaagttagaacataatccaagcaccaacatagctgacttcaagtgggatgttggcttggaatttgggaatgtacaattacttaggattgccctaaaggagtacttcatacacattgatgcagaatataattgctagcgaatgatttaggaaaatttagggctgagtgtagagcgtcgatgtgtcatttctttgtacatggacatattaaaggaggtatatatatttattctaatttaatttcttgtcattgctttcgtatagctgtgtggaatatttttatttaagcaaaaaaaatcacaatataatttttttttatatactaaagaccatatcaaatcattataaatcaacaagtatggtaacttggatatacaa

SEQ ID NO: 150646 - DNA, 519 bp, Cannabis sativa
cttcctagtatacatcttccaggttgacatcttaaacttgtgaggcaattctaagacattagtttctggggagaaaggggatccacgtgctcagtccaactcgagatcattgttcttttgaccggccaggccttggaacatattttttagctcatccagctgtgcctacaaggctggattaacttattcagccttttggtcgaccagagtcacgttagcatctctttgagcaggattttgagcacgagtcccgggctgaacaactggcgcatcatgcttctcatctaaccctctccttctattcagatcatctctgagatcatgaaccgttcccaatcgattgaatatagaaacacacaactgtctctgtgactggttggtttggccaatcagctggtcggcaccattaacttgcgttgaatttttaggtaaaacctctcctgatgaatttctagacaaggtctatctgcctaccacttggcccacaggtggaacctgtgactggggattggacggctg

SEQ ID NO: 150647 - DNA, 546 bp, Cannabis sativa
cgtgacattactaaccacatcgctaaatttccacaattgctgggcccgaaaaatattttatttcaaaattgatatccttagtactcacatatcccaatataatctacgtaagtaataaattacgctatttatttcattttgtaaattctcaataattaccctaagcaagatcataatcttcgttaccaaaataattacatatttaataaaatatatctatttaaatattatttagtttctgggacattacaactatccccccttataggaattttgtcctcgaatttacctgaaaagctcgggatacaactctcgcatctgcgactctaactcccaagtcgcttcttcaaccttgctgttatgccacagcactttaactagcgaaataatcttgttccacagctcctcttctttcctgtccaaaatctgcaccgattgttctgcatttgacaggtcggtttgaagctcaatgtcttcataacttaagacatgagttgtatcagatacatattttcgaagcatcgagacatggaatatgttatgaac

SEQ ID NO: 150648 - DNA, 585 bp, Cannabis sativa
actgtagcgtgccttagcattagggcgttacagatgagaaagagacttttgaatattatgtttatggaaagatttaattttaaacatatcactacgaaaatcctccaacaattgtaacttagtaagttgatcttactaactctactcatgagttgttacggggttgacctccgagttggacggatataccctgagacttgcaagcatggattttcaagattaacgatccatagaccgtatgcattgactcaatcattcttcgaccgactcttatgattgatgtctctcaaccgctgggactaatcattgactaatctcgaaaatcaactttgttgatttttgggcttaacaatatgccctcaacaaaatcgacctacaaaataataataaataaactctattactacacaatttaataattaaaataaataatgttaaagaaaaatagtaaaacaatctaaattataaatattaaaataatcattgaagtagaagtcatgagcacaaaatgaaccacttctctagaacatgtctttcggggtcaacccgtattaacaaagatcatgttggggtttatgccctaaa

SEQ ID NO: 150649 - DNA, 657 bp, Cannabis sativa
ttctgaaagtggtaatctactgaaattcttatattcaaattctaaaataccgcattctgaactacaagtggcttgattcttcataaagaagctatgtaggcagctgagttagccaaaattactaagttcaactgcaattccaaactctctccaatttttcccaaagtttacttcaattatttaatatcatcgtaattggaaagtatgttttctttaaacaaaaggattatcattaagaaatcattcttataatcttagatgggtcgaatttaaaattaataaactcttatggtatgaatttgacataagtaaaattgtgttttgcactcatttttaatattttgaatgtgaaattttttcttaacacttagggcccgtttggtatgcaggttttatttcatgggaataggtttaacatggctgggagagtgatgaagggaattataaacctaggaaagcaatattactgtgtttggttgtgcagtaatgttataatgatgcctaggaatatgaaaattactttgtttggttgacatggaatgtgaattttttttttttacaataatgattatttttttaaaaaaaaaaaatactaataatttcatattttttttcttttttaaatgttcaaaataatttttatttattatttttcat

SEQ ID NO: 150650 - DNA, 615 bp, Cannabis sativa
tgcctttactaatccaaattactaaagcggtcattacacaatctttcccaaatcaaccataattctatccttctgacaatatgccctgcgaaggacacttatgataaccagaattcacacttgttaaacattgcataaaatttatgatttctgagtcattgtaaaaccatcccaagatgtttctcatgttttgcttccgtcagagagtatacaaggatgtcttcgataaacactataacctagttatctaagaaatccttgaacactctgttcatgagattcataaaagctagtgaagaatttttcaatctaaatgacattaccaggaattcgtagcggcaatatcttgttcaaaatgctgtcttcaggatgtctgcctcctgaattctcaattgatgataacccaaatgcaggtcaatcttagagaacactgtcttaccctaaaactgattgaacaagttatccattctaggcaatggatagttattttttattgtcagcttattcaactcccaataatcaatgcatatccgaagggatctatctttcttctttacaaacagcactggagctctctaaggagatacactaggttgggtaaaccctagatccaac

SEQ ID NO: 150651 - DNA, 1082 bp, Cannabis sativa
  modified_base (322)..(324): a, c, t, g, unknown or other
  modified_base (394)..(416): a, c, t, g, unknown or other
ctctgacgtggcatcacacgatggtgacacgtggaatcaactccgggtatttgctcgcaagatacaggccgaacaggatacctcatatgcatgctcaagacggagcaataggcaatccacgcagaatgacaaacacttagcaaattcagctttcgcatcatgagtcatcaaaaaaatccctgtaacttggggatcagattacagagatatgacaagctgtccaaatcccacgattagtgtattctgtatttactatgcaatctttttgcttttatcaattgtaacgagaagggaaacacttcctctccaagctcatagcccnnnaaatagtgatgcatattcactgggcaaagggtcgaaaacattttagttgagagattttgtctaagaattnnnnnnnnnnnnnnnnnnnnnnngagctataagaaaaggaaccttttctccttgttcttaaataaataaaaataacgaggattaggctattaccgaactgctcggggttgaacctctataaaattcttatgtcgttatattgttttattatatttcaatcgttataactacttgtcacttacaaaattagactcactgtcgttggctaaaagcgaggtcaacaactacaatcctcgtgggattgacctcactcttggtgagtctactatttgtaaacgatatgtgcacttgcgtgtgcaaaatatcacaatagtccttgtgaattacctcctttgtatccacttggagtagagttttttaccggtgcagaattattacgactcaccaaggcgctattaagaggagttgaagaggtagtttttgtgcgaagaacacgagtaaacacaacttgtaaagaggagacatcagaactagagagaacttgtgactttgcagagtcaaattcagatgagagtcctacaagaaaactcataatagccatctattctcattggcgcttttgaactttcacatcatgactaaatgacaataacacattaaactcttcatatattttcttaaatgtcataaagtaactcataagagacttatcttatttcttcgcacgataaaaggctttgcaaacatca

SEQ ID NO: 150652 - DNA, 574 bp, Cannabis sativa
tgctgagtccttgtgactcacgggtagggctgaacatttagacccgcaaacccgaaaaccccgcaacccgctgccgaaaaaaaccgaaaaattaaaaacctgtgtggtcgggtcgggtccaatccgaaaatactccacgcgggtgtcgggtttggattttaaaataagccaaatattatttcgagtgttaatccgaaactcaaaaaattaggcacggtataaattttcgtgctactaaagtcaaaacaaaagtacagattttttatttattataaaataaaaaaagaaaatgtgtgagagaggttgtctttacctctaccacctacaaaagtaggtcatgcttctcatggcacgtgattgatatgcctattcaaattgttttacttaacaaacaaggttcattggtttgttttattttttatttttttattttactttcataaaaacaaaatgttattacttgtactttctatatcagtgagatagacacaactttttattttacttttcgtttacagtgctgtccaaaaattcaaactgtacactattatttttttatgtaaatattgattcg

SEQ ID NO: 150653 - DNA, 517 bp, Cannabis sativa
gttgctgtagttaaggttggatctaggtagaaggacaaagagaggaaggaggagtaggcaaagagatgaaagaaagagagaggaggcgcagagatgaaaaggctattaatttaaaaccctaaaattatttttaacataagtgcttttttttttcttttcagtaattattttttaaaatgtccttaatttttccagcgtatagtgacacgccagcaattacataagtgccttttaattattttttattaatgtcattattaataaaaaattaataatatatgtgtttttttaattagggttgagtacatatagtgacacgccaggcatgtggggacacactttcccagtctctcctggcgtgattctattggtcaatattttttataaaaaaataaatagaaaaattacgaatattactctttagtgacactttatgtttttagtgaccaacattacatgaggctaacattgaaagtttagagtctaattgtgtgtgtcactaaaaatccttcctagc

SEQ ID NO: 150654 - DNA, 689 bp, Cannabis sativa
tgttccatgaaaagtactacaatgaatttattcgagctgctaaggtagaagaatttatactgctaacccagggtaatgtggcggtgacggagtatgccactaaatttgatcggctagcaaacattgttttagatgaaatggccactgaggctgcttgagaagccaagtttattcgaggattggaagaacatattgctcaaaatgtaattgtagctaccaaacaactaagggttgtctgcacttatgctcaggtagttgagctagcccttgctgctgagggtgtagaagatcaaaattcgagagaaacagtatgaaaagagattcatggaagcaaacatctaatgttgattccggtaagggtgctgatcctaacgatcgtaagaaaggcctaatgatccgtcagctacgggaccaaacaagagattccaaggtcacaaggtttccaacgaggtgaaaataaaaattggcaaacctatcctgagtgcccgaggtgcaagagatgctatcagggcaaattttaagctagagtctgcttccagtgtggggtagtgagccatttgaaaagaaattacccatagttacagagaccagtgttgcgatattttgcacacgcaagtgtacgtatcgtttcaagtagtaaaactcaccaggagtgaggtcgatcccacagggagtgcagttaagtacgt

SEQ ID NO: 150655 - DNA, 621 bp, Cannabis sativa
  modified_base (210)..(220): a, c, t, g, unknown or other
gtggttgacaggcacggacgatacaaccatcagtaagattgggccttttgctgatgagtacttcatggtggatggcacgggtatcactcgcactgagttccagcagattctgacatatcatcgccctcccctcactcttgctctcaaggttagagctccaaagcttgctcgactaccgggggaagaccggaatattatccaattgacctnnnnnnnnnnntttgtgaagtacaggctctatcctaaggacttcattcctaagtccgtgacggggaagaagaacaaatctggtgcttgacggaccgaacgagctcattcggagaatgagtggattcaactgaagcgtgaagctaagttgaagggaggtgcaagggccaagtagtatgctcaggagcccttgaatcctaaagatgaagctgaggaagagcaggtgacccaatgaagaggaagaagaaacttccgaccccgcccaggcctgttaaacatggcatttgcataagggagcccatttcacctgatcagtcgtcccctcccgtgttcggtaaagagaaagttgttacgtctgaaataagagaatgggcggaagctctagcgcctctcctccggtcaagaagtctaagg

SEQ ID NO: 150656 - DNA, 541 bp, Cannabis sativa
cataaaaatataaaatttctgccgaactgggagagccccaactctgggcagagtaaaaaataaacaagcctgaaagtaggcggtaagcttgagcgataagttggtatggagcaaggccgacaaatacaaggaaattaataaaataatcttgaaggggaagcatggccccggccatcaagtgcatctgcctccaggctctgaagcccccgtagttatggttgggcatctcctcgtcccggggtggccggtggaaggtctcggaggttgtaggcttgatgcttgccaccaccacaatctgttccaacgggtgagggcaggtcagggtggagtgaagctcagctgcttcccacccgttggcacgagatctgtgcccttcttgggccaccggaaccttcatgacttcctccagtgtggccaagcgtttctctcccgtctttgaagatttagaaccacacccagacattttggttctgaaaaagattgaaaaaatccagcagtcaggccccaaaccaaaccctaattcaaaaaagggaatgggggt

SEQ ID NO: 150657 - DNA, 617 bp, Cannabis sativa
aagagacatagacgtgacatgatgtctgttaaggcacttagtgtataatacacattatacaaactaagtataacagttgaacgaatccaaacaacgaatagtgaggtatccatcttgctatatgaaggcacactcatggtaccttcactaatcagcttcaaatatctttcaatgagatcaacagctctctcagatagaagctgacattcaaatgatgttgattgctgaagttcaccctgtcaccaagaactgcgattgtcaaatggagtgttatgtctttaatagcacaaacgacgagatttatattatcaacctcggaaagacatgggaaaaactctggctcgctcccagggttattgatgccatgctcttagcgagatgtctcagaacgatatgctttacaatgtatgtaatacatgtttgcattgacccggtaaaagcggaccaatcgcaactgtgtgattttcaaataataatcgcatttattttacatgggagttaatcaaatcccacaagttcaggggatgattgttgtgagatatcagtcaaattcgtaattagctaccctcctatgtaattataaataggagcaggttacactgaaaaagggacgaaaa

SEQ ID NO: 150658 - DNA, 937 bp, Cannabis sativa
tgagagtaacacgtaggtctatgccaattgacataaatgggtgtgtgagcgtagcacgcaggtctatatcaatgagacgaatgtgaaatggcataatggcattattatgtatgtggttatgtggtatgttatttgtgattattgatatttatactgccttactgtgtagaatagggtaaatcaatcagtgatcagccatgagtgtgagagcttggtggtgcttgtacatgtttgggctacactagaccaagcgggttggggtttaccagggatgtattttgtagtttctggtttttgccgcttaggtcggcacgtaaaaggaacttgtaatattttatgaaaatgtttatgggatcttgaaacttgtatcttctggtttattgtatagttaaaattattacaagttttattttcattctgttgtaaacaaagtttaaatttcccgtatttatttttctagtaatcccggattaatgggattagggtgattatatcggttgtcgtagcaacctcattgttagggcgttacagtttggtatcatagcgccaaggtttttatactttctatagaccagctaaacatgtacaatcatcttcagagacaagctcagctcatggtgcagtaagtgttgagagaaaacgcttaactacttatgtgattatttgtttaccgctttccattttaggtagtatgtgagcatcttgtatatttatgtgatatggaagccatgcttagtatagtaaattattaaatgtttatttatatgaaatggaatagttgagttatggtttaaaggcaataagtgcataagcgtggtattggtgtctgactcgccgaggttgttgattacagggttatttgtgaaaatggaccctctgcaataatctagaccacagggcgagcaagtagagtttggtgtagaccaaaccaatccac

SEQ ID NO: 150659 - DNA, 888 bp, Cannabis sativa
tttattatttaaaaaaaaaaacttatttgtaaacatgttagtaactaattaattatttttaagttatattatcgtagattataatttaaatatatttagataattttaaaaaatattttcgaaactaataagttgtcatataatataacaagctactatttttatataccgattattttatatatctttttgttattttgaaacttaattagttattgtataatataatataattcaattaataatattctaaaatgattgttaactaagatttaaaaaaaattgtaaaatagtaattaatcactatattggtaattaaatacatatatttttttttttgaaatagtaaaaaaaatatatatttctcatattttgaaatgttcatattgaagagtagatctcaatgatatttatttaggctcatctaagtaacagtatgatcagaaattatttttaaagtttgagagaagagaaagaaataagaaagagagaagatgaatgcgaaaaggaaagtaagtaagagaatgaaaaaaaaatggaaaaaagaaaaaaaagagagaaagaaaagaatatataaatcaaggtattaaagtatacacacattattaaaacttcactaaattatttttcacaattaaataaaaaaacaagttatttcggagaatttctcaatttattttttctccacctcattacccacataatccttcctagtatatcctaaagagttatattggggcaaatcacgtggtatatctactttattttactcgttttaatttttatctctatttttatatcctgtaagatatacctacttttatagatgatgtctctattagatcccttagattaatgtaaataatatgatagacttaagtagagagt

SEQ ID NO: 150660 - DNA, 547 bp, Cannabis sativa
aacaatatttagttcttcgtatcttctttcaatgatagttctaataaccatagaatacgacaggtgaaatttgcttcccctcgcttgtccccgaaccacactaaatcaaagaggaaaatataagataaaattacatagattatagaagcgatcacaaagtaaatactttgtcaatggaagattgtattttgagtcgtttcttgggtttttgagattgtaattttggagaaagaattaccaaattctttttagaatcttctgaggtggtgggtgacctgatcctggcaaacaattcctaaataaatgtactattatcctttaataaagaaacaacctacaaacatacaagattaggttaaaataaacaaaaagcgtagataaatgagtggtgtaatctcggcatttatatataagtagcaaaatcttacaacaacattgtttgaatgaattatggagttaagatttccaagtgtcgtctcatccaatactctggcaaaatgacatcctaaaaaagtaacattatgtaagaatgacaaaaccaaacaac

SEQ ID NO: 150661 - DNA, 543 bp, Cannabis sativa
atttagaagtcgtggctcttagggagcatgtcttcttggagtgaccagactttccacataacccacaccttttaatccattttttgccatttccaatagatgggattctattcgttttcttctaccacacttgattgggacatttggaggaaaaaccttcggaagtaattcaacttcatcgatatcccaatcttttaattgaggcactagataaattgtatcaacataagccaacgcccaagtttccaacttataataattggagcacaaatcatatatttctattctagtttgttcatatgttgctaatgcatgcacgcaaggaagtttatcaatgtcaaaaacacgacaaagcattgtctttgacccaaatcaactatggcatcgttgcctttaccaataatttcgtactcaaatcgattaagctgcttgacattcatttccaatgctttcttgaatcttttccgaatgatattatctgccattaaagttaaaggtgtacatgatgtattgatagatgccactgttggaattattttacca

SEQ ID NO: 150662 - DNA, 643 bp, Cannabis sativa
  modified_base (45)..(57): a, c, t, g, unknown or other
taatattttattaaagcataaatttacaaattaatattttactannnnnnnnnnnnnttttctataaaaatatctatcttataaattttctattattttaaaaaaaaaatacataataattaaattaaataattattcaattatttatataagtagatgttgtaacctgaggtagagtgtctaatgtctatcatcgattgaactcgccctgtcaacatctgtatatgctacaatgtataaggactcagctggtttgaagttaggtatgattggccaaaggggttcccatggcagctgagagtttgatcctaacatgttgattttagatagaagatcagctgtatacttagcttgagtaaggtaaatcctagtggagcttttgatgacttcaaaccccagaaagtagtgagctttgtcaatatatatacatactaagattttcatttttggttaattattattattacataactgcaacaacttgatacacaagtataaggaagataacaattgacataatctaattggtccaacagttgtaattggcataatctgaacaaagaaaaattaaatggaattcttcacaaaaataaaataagtaaaaaattcaaacagagagaatcaatgaattatcctttctttt

SEQ ID NO: 150663 - DNA, 1066 bp, Cannabis sativa
cttacaatagtaacactgttttccagctttggaattagtctttgttttgtgtgactgacttgaacctttatactgtttgttcttgtgatttgatttgtgatatccacctttgttatctctggtttcagatctgcctctgacaaataaaccttcaccatagcgattcgatctatcttcatttcttttctgaatttctttggaattcagtgcagatttgacctctatcatagacaaagactcttttccataaagaattgtgtccacaaagtgttcataactctttggtaatgtgctaagcagtagaattccttgatcttcatcttctatcttgacaccaacgttgctcagatccaagattattcgattaaactcatcaagatgcttcctcagatcttttgattcatccattctcatcgtgtacagcttcttcttcaggtagagcttgttggccaatgatttcttcaaataaatcgatgccaacctttcccataaccctactgcagtgtcctcatttgacacctccctgagaacttcatctcccatactcaacagaatggcactgtgtgccttgttctgaatttctttgattttcttattgtcatctccaagagcagcaagctcatctcgatcaatggcctctgagattccttgatgtactaggaatgccttcattttaattctccatagaccaaagtcatttgtcccattgaacttgtcaacttcaaaccgagcagaagccattggagattagttctttgtccttttcttgatgttcttgatgtccttgattcagttctttgatgattcccttcgactgagctctgattacatttgatgtgatcaatgcatgatcaatcacctcgcaaacaacacaatacaaagaatttgatcaagaacagaactaaacaattgaaattaaacaatgcagctgtgaacttaatgcaattaaaaaccagtaacaaaaccagtaacaaaaaccagagttaagcaagaatagttaatcaattaaaagcaatagaagtaaaagaaagaaatcaaacacaatgaatttatgaggttcgaacaa

SEQ ID NO: 150664 - DNA, 679 bp, Cannabis sativa
ttttcctttttttattattaccatattcatgtttctttgtgggagtaacatcaatcctagaaataagaaatacttataatctacaactcccattgtgaataatatgaaaagttacagttttagagtatacccgcactaggcatatatatttacttttttttttagttcaagataattgaaagaagtagaaaaaaaatatgtgcaaaggtccactttattactttgtgaggagtatttctcttttagatgtttgataataaacattttgtagcagctttcaattttcctaatttcattttattctgttgttttcacgtaccaataaatactatagctaatattttataactggattaagctagttactttcattatttacaaagtgcaatgcaattaaataaatttcacttattcattttcctagattaatttgctttacttgtatttattttttatttattttaaaatgtatataggtgccgtttggtaacacttttattttctaattttttaatcacaaaatgaaattaaaatttttgtttttaaaaattttgcctttaaaaaataaaaatgcgttctgtaactacttttgttttttttcaaaaaaacagaaaacaaaagtgtgttctctaaagttcatttttatttttattttttaattttatttacgtcgggtcta

SEQ ID NO: 150665 - DNA, 567 bp, Cannabis sativa
ctttctcttcactttatttctcttggtttttcttacaatatctctcactaactatctctatttttctctcttgtttctgaggtgggttacaaaggaaaaaacacagctgctgccctttatttttactgctagccgaagtggttatgttgcacaaagtggaaggttgaaccacttatttataatgttgttgttgttgttgttgtgtttgtttctgatctgagaaaaatggttgtaatctgttgagatattttccttgtaaaactgaaagttgttagagtcttgagatattttatttgcttccttttattgtaaagaaataaaagacctaagcctatgaaaacagaaccgataactctatgagttataatggtctgttgaggctttgtaaagaggtctaatttattttttccttgtaactttatttatgtgacagtagtatgggaatttatccaacagaatcaatagtgtgaggttataacaaatcacttaatctccgtacaagattaaagcatgaattttcgagggatgggacctaaactcccttagtgtttttctcattgatggtaa

SEQ ID NO: 150666 - DNA, 1104 bp, Cannabis sativa
aagcagaggttaattacagctgcagtgttagctctgccttttgataaagagaagtttgtagtttattgtgatgcatccagacagggtctggggtgtgttctgatgcaaaccgatcgagttattgcttatgcctcccgtcagttgaaagattatgaacagcgatacccgactcatgacctagaacttgctgcagtagtgtttgctttaaagatttggcagcattatctctatggaggaggtgtgaaattttcactgaccataagagtctgaaatatttctttactcagaaaggttttaatatgagacagagacgttggttagagttggtcaatgattacgattgtgagatcctttaccatcatgggaaagccaatgtagtggctgatgccctaagcagaaagggtcccaagcaggtagctagcatggttcaaattgcgtcccagttagcagaagatatggtcagatcaagcatagagtttcttgtatgcaaacttcataacttgacgctgcaatctgatttgttggaacgtattaaaactgctcagttaactgatcccgagttagtaaaattcaaagaagaagtcttagctggtcaagccaaagactttacagtctcagatagtggaatgctattgtttaagaccagagtctgtgttgctaatagtatggaactcagaaacgaaattcttgaagaggctcatactactccatattccttgcatcccggcaccaccaagatgtatcaagatctgaaactttacttctggtggagcggaatgaagaagaatgtggtagaattcgtatgagatgcctcacttgtcagcaaattaaggctgaacatcagagaccggcagagttgttgtagcctttaacgctacctaaatggaaatgggaagatatcggactttgtgggtggttgggtgggttgttacctagtaccacgggtttgtttgattctatttgggttgtggtggatcggtttacgaagtctgcacaccttttactagttaaaacaacctttttagtggatcaatacgcagatttgtacgtcaaggaaatattaaggtggcatggtgtgccaaaatccatagtttcaaatagaga

SEQ ID NO: 150667 - DNA, 531 bp, Cannabis sativa
aacaggggagaagaaatacttaggctcggaatgagtacaatgaaccaatgaagcaattgagaagattaaagctagaatacttgcctctcagagcaggaaaaagagttatgcagatctgaaacgcataaatgtagagtttcaagtaggggatcatgtgttcttacgagtgtctccgatgaaagggattaagcgtttcgggaaaagaggcaagttatgccctagatttacaggacctttcgagattctcgagaaggttggacaggtggcatatcgattagctttgcctcgagctctctcagcagttcataacgtattccatgtctctatgttaaggaagtacgtttcagaccctactcatgtacttagttatgcaaatcttgagctgcaaccagacatgtcatatgaagaacagccagttcagatccttggcaaaaaggataaggttctttggaacaagaccatagctttggtcaaggtactctagagaaatagtaaggtggaggaagccacctgggagttagaatcagacat

SEQ ID NO: 150668 - DNA, 510 bp, Cannabis sativa
  modified_base (331)..(333): a, c, t, g, unknown or other
tatgttcgaggactaaatgctacaattagtcgggacttgaagattaccacatcacatgacactctgtataagagagtggtagacttggccttaattgctgtggaggccgagcagcaggtaatgaaagagcaggttgcaaaggatgccgtcatggcatcaaaccctcctgttggtggtaatgtcagtaaggggaccgacagtggcaaccctgagcacgaacggaaggctgaggcttccagagcttcagggggaaatagaaagtttcggggaaacagaggtggccgtcagggttgcgggtcctcatttcggtcatatcccgagtgccctaaannnaaaaagcatcatcctggtgagtgccgagccaaggcatgtttccaatgtggcatggtgggcgactttatcagagactgtccccacgccaaaaaagaagagcctaagaagaatgttgctcagaacccggggcaactttttactataactcaggcagacgctgatgctagtccatcagtt

SEQ ID NO: 150669 - DNA, 574 bp, Cannabis sativa
ataatttaagggcaaaaaaaattattaaaagatccttatttaataataaattaagaaaaattaattaataattataattaatttatttataatatataattaatcttcattaaagttttataaggaaataaattgttaggtgactattagattataagttaattattatttatttttatttaatttttaaattgatcacaactattcaatagtaatttaatgggtaaaaaaatgtaaccataatggttacatatttaatgtaaccattgaaacctatattataaactattctctttactaatcttttactactctaaaaaaatacatctctcgatatttaaaacggataaatatgtatcataaatatgatttatactatgtatagaatctgcttgtgaattcatattaactaataatttttaaaatagataatcatacaatttttcatgtgccaagaaccaaatttaaattggtgacacgtaaatttttactcctctgctctaccaattgagctacccgaccattcatgatacatcatcattttactcagggccgtctcaaggtgagaagaggc

SEQ ID NO: 150670 - DNA, 542 bp, Cannabis sativa
cccaggtaacaggtaatcaaaattcgaaattcgccattcgcctgagctgagggttagccttccaaaagtcataaaaaatcgagagattgctgtcactaaggcattcaccttccctttgagcctctctacttcagcgttaagctcctcctccttggacttcttctctgcttccaacctgcagaaaatagttcgaagaacctccctttcttcttggaggttggtcacctccttggacaaggaggtcatagcagccttaagctggtcagaagcgtctaaatccttggtcagctcggccactttcttctcggcagcaagaagctttttgttgacttcacccagttccattcagacggctccaagttgaatcctaacttcatcagcgtccaacctggccaagtccacttccgccctcatggtgttggacatggtagcattcttggaggtagcaggcttagctcgagaataagtgtaagccatcttctgaccggtctacacagagaaaaaacattagaatctaggccaagtaaagaaggattaaagga

SEQ ID NO: 150671 - DNA, 771 bp, Cannabis sativa
  modified_base (680)..(697): a, c, t, g, unknown or other
aatcgactgcccgatctatactacaaccaccgctagtggaagtcacatttgggcgttaaacagggccatatatcgagcatatcgggcccaactaaaatttcaaaattttgaaagactatcgagctctatgtcgagcaatgcatcaggcctatcgagcccatactacaatttaaaagttagaaagagtatcggaccttgtatcgggccatatattggacctatcgggttatacaaattttttttattaaaaatggagtgattttagtgataagtagattgttcaaaaagaaaagccaagtaaagattgttcaacaaatataataaaaagaaacacccaaagttcatggcaagttttgatagaataaatctataccccatctctgtcggaagagcggcacatgatcatcatctactccaacgaatggtagatccaatagcttatgctcgatatgttctatgacgtacattccgcaatcgccaccgcataagtagttaaacttaaaatttagtaaatcaaataattttttaatttaattagtaaacgtattctcaaaaatacacttaaattacctcgcttttgtctgtggtacaactttattgtccatgagattccaatccaacgttttgacttggcttttagaggttttcatttgagggaccatctgttgggttttgtgccnnnnnnnnnnnnnnnnnnaatataatcagatttacttattacagtagaacctctattcaagaatacacttgggaccaagtaaattatattct

SEQ ID NO: 150672 - DNA, 1177 bp, Cannabis sativa
acccttcctactcctgtttatggtagggatggtggtgattccaccactgatcagaaaaggaaagttaatcctgcatctagtggctcgaggcagagtaagaggttccgtgggaaccaaggaagaggtggacgccagggttattcttatcctgagtgtccacgttgtaagaaacatcatccgggggagtgcaaccggaagacatgctttctgtgcggcatggtggggaatttgaagaaagattgccctcaggcaaagaaaaaagagccgaaatcagaggcaaaaccttttcctgctcgggtgtttgccattactcaagttgatgctgcaagcagtccttttgtggtgacaagtcagcttcttgtcaacaactccttgtatattgtactatttgattcaagagctacatgttcatatgtggctacacggataattgatcttatggctaggccttgtgatattcttgaaagagggtttggaaccctaatgcctagaggggagttggttatctccaataggcgcattaggtccatgacggttaggattgaggatagggagttgagtgctgaccttatagaactggaattaatggagttcgacatcatacttgggatggactttctgtccaagtattcaaccagtatagattgtaagtgaaaaatggtgacttttcagccagaaggtgaagatccatctgtttatgttggatcggttcaggggtatcgaatctcgattatttctgtgctaagggctagggatctactacacagtggatgtgtaggatttttagcagtggtcatagactccagcagacctgaggtagtcagagtggtaaaagattttctggatgtgtttcccgaggagttgtcaggattaccgccgcaacgagaaattgactttgtgattaatctggcacctggagtcgaacctgtttctaaagctgcatataggatggctccggcagaactcaaggagcttaagttacaactgcaaaggatgcttgatattgggtttacctgacccaatgtatcgccctggggagctccggttctatttgtgaaagagaaagatggttcccttacaatgtgtattgactatcgggaattaaacaagttgaaaatcaaaaacaagtatccattacctagaatcgacgatttgtttgatcaacttcaaggaaaga

SEQ ID NO: 150673 - DNA, 769 bp, Cannabis sativa
catattattgggtcgtccagcactaatcagactaggggcagtcagttcgatcaagcacctatctttgaaatttcaaacaccagatggcgtgggagtggtgcgaggtgaccagatgtttgctcgtgattgctatcgcattgagctgtagcataggaaagccagtcatcagttgatgacgatcttagaagaaaaaaacaagaaggaagacaaaggtcttgacccttgagctcaagacgagaaaaacctattgaaaccaatcgaggagttggaagaggttattctcgaccaaggaaatcccacaaagtgtgtatacattaggaagaacctggacgagcagctcaaatagcagctaataagctttttgaaggcaaaccaggatcaattcgcttggagccatggagatatgatagggatcgaccctaatattatctgccattatttaaatgttgatccaaaatacccagcgaagagacagaaaaggaggcccttagattctgagaggcaagggacactaaaacatgaagttgacaagttgttagttaacagctttatacgcgaagtgttttatccctcatggatagccatcctgttctcatcccgaaacataacagaacttggagaacttttattgacttctctgatctgaataaggcgtgtccaaaaagattgtttcccacttcctaagatcgaccagttagtggatgcaacagctgggcacgagcttatgtcatttttggacgcatattctagatataaccaaataaaaatg

SEQ ID NO: 150674 - DNA, 1180 bp, Cannabis sativa
  modified_base (1110)..(1112): a, c, t, g, unknown or other
tttttttttttttttttatagctatcatattttctgtgacccatcaatataaaaataaacttttatcttctccatatttttggtaaattatccatctaattagggaaacttacaaaaatactgaattttgacccaatcttaacaaaaatgctgctacatggtaaaaataacttttatactgccttgggacttttttttttcttttatactataaacaccgaaaataaaaaatgagggctccatcttctacacccacagacagcaccaccacagcaacactagaacagtggaaaaacaaccattaaatccggtaagttgaagcagaaacattaaaaccattaatattggggctatatatcataatttttctaatgttatttttgggttgttccactattgtttcgtatgtttaacaaatgttgattttaaattacacatgttaaaccaaccactaaatatttgtttgaggtaaccagaatgaaacaatcatggacagtaatagtcttaccttccattaaagtggtgaaatctagaagacaaaaaaaaaaagaggatggaagctgactggaaaaaaaatagcataacaaatgcaacaaatgtgagaagctaggggacaacaagagaacatacatgagaagatatcaaaaatgaaaagaaagagaacaattaaaaaaacaatagtagaacaacaaaggaaaactgaacatatattgaagtatatgatactgaagaaaataacttccataaaaattttattatttccctattgctattaaaaatagagcagtacaataatatttagaaaaatgtgataaaaaataaaagaaaacaacagtaaaacaacattacgacaataataaattaataacaaaataagtcataagagtcatcaaacgatacaaaccactcacaaaaccagagctaactataacccaaaaaaaaaacataattagtaaaaacaacaaaaatccagtaaagaaaaaaagagatttttcttacttagaaagtttgaattgtctgttgttcttctgtttcctctatattgttcttcttgaagatattctcacgggacattctctctcctatttaacggcatttcttggtttaacnnnatatacttaaaaataaaaaatattctgttaaatttaacgattacgtttcatctcccgttaacaaataa

SEQ ID NO: 150675 - DNA, 901 bp, Cannabis sativa
attggtactacctatatcaacaaggtgtatcttattttttggtagcccgaaagaactccacagtcaagcatgcttgacctgaggtaattttaggatgggtgacatcctagaaagttttcccaagaagcatgcgagtgaggacaaaacacgctagaaatacttgagttggtttgtagagtcagtcgtcattccagccagagtgacatacttgtgtgtataatattcatcattctgtgagtgtaaggacctattagaggcttgaatcaggggatgttacacttatatttttttttttaaaaaaaacttattaaataattttaaaatttgtaaaactatttttcaataaaaaacttattaaatagttttaaatttaaaaaaaaaattaaataatatttatttaactaataaaaataataaaaaaaaataaaaacactgtttactagtatatctctctctctctttgtttcttctcttaaaatataattgtcgtttttaactttattattgtttagttattaattttttttttttgaattatttaataagtttttttattcatgaaaatatgagtagataactaatatggcataatgtcaatttagtctattttaataaaatttaatgaactagtagctagtgacgaaagtaacataacataaaatgttactttatgtatttaatccgttaaaaaaatatgtatatataagtgtttaaaataaaaaatattagatatttattaagagtattcattggatcacatctaatatatttggactcaacccaactaatctaatctaattatttattggatattgaattttgtcatttgatccaatgcaattgtgacagtcactagtcccgtgatctgtaaggagaaataccgggtaagctgtgcaatccc

SEQ ID NO: 150676 - DNA, 770 bp, Cannabis sativa
aacctgggatttgtcccaggtgccgcgacatggcttgggcatgctgcggcccgccctcaactttctaagcagttttagtgcacactttgaaattccataacttttgattccgaacttcgatttgggaattcgttatatcgttggaaagctcgtttcgagatctatatgattgtctgaattttaaatgccatgaatatattttatgagtatggaatcaggggttaaccctatttatgaaaatcccggattgtgttactaggattatcggcacctgaacaggagcacccagggatttggaatctcttcttttgcaagacaacaggtaagacagtagttagcatgtagagtatgcacggtggcacttatcttgaatatgttatatgtgagcaattgcaaccgggattagggttattaccctaataggaacggttaagagcctagggttattaccctagtgatataagtgagtaaatgttatgccatgttaagtgtatggttatattgagatttaagagttatgcgttcaagggataatcaggttggactcggtaatcataaccgacatgaaccattctaacgccttattgtatttagacgtgtgagagcaacacgtaggtctatgccacgtaggcataaataggcatgtgagagcaacatgcaggtctgtgtcacacagacgtatatgtgaatggcattactttttaaatagtatgatgtgcattttattgatatgtttttactgttttgctgggcttggctcacgggtgctc

SEQ ID NO: 150677 - DNA, 711 bp, Cannabis sativa
tggggtggcagccggacctccggaggagtggtgacgaggagagggtgggtggtggattttgatggtggggagctgagggtcggcagagtcgagcggtggtgtttggtgatgcatttgtcttactgagtcgatcgatgaacagattgggaggaagatgtttccagatagagaagaaaatgtttcagtcagaagcggaatatgtttcttttttgttttcacagatgacaattaatggaacttcggaagttacgggctttatacatctaaattaaataggatatttttgtttttcaaaaataccatcaattttattttgttattattataccactttattatattcattcctacactttttagcttcaccccttgtccctttaatcttttgtatctatatcaaatatctatgtaagtacaatatttaattttttttaattaggtaatatatttttttttttaatttttgatatgggatttaagattatctttaagaatttttttttagctattgatacattagtgtgtcatttgaatttaaatatatatacgtattttttaaattttttaattaggtaatctatctaataatgcatctattgtaatttactatattaaattcaaggataaataacggcataagtacccaaagttttaagtttgtaagcgggataaacctaatatttatttttagcagcataagtacccaatgtt

SEQ ID NO: 150678 - DNA, 500 bp, Cannabis sativa
taaaatttggtagcaataagctacattttgctaccaataaaatttggtagctaaaagcatggtagctaaaagatatttttcttgtagtgtggttcttgcttctgctctattacattctgttataaagtctgctagggcctgtccttttatggagatgcgcgggacatagcgtatatcgaactggcttaactccatggtccacttaaggagtcttcctgaggcttcaggtttttgtaagacttgccaaagcgggtgatttgtaagtaccttgatgggatgggcctggaagtagggtcttagcttccttgaagccatcaggaggcaaaaggctaacttctcgatcaagggatatcgggtttcagcccctatcatgcgcttgctgatatagtatactgtgtgttggactttgtcttttttctcggactaaggtcgcactaacagcgttctcagagatggccaagtacaataacaagtcctctccgtgaaccagttttgacagt

SEQ ID NO: 150679 - DNA, 698 bp, Cannabis sativa
taataaattgtgcaaaagtgatttttcatgtaaaaatttcttattattttgtcttttttttttttaaatcatttttagagttattaagggtgtatcatatatttaattagtaacttttttttttttttgagaacaagtaaccttccttatattgatatcaagaaattatgtaaaaaaatattataagaggaattaattaaatattattattaaatatgagagtgacacataatgaaaaaaaaaaaatatatcggtatgtagagacgttttttttttactctacttaaacattttccaatactatattatccatacaagtttaatacaacaataagtttgaaataagtaaaacaacactactaaataataaagtagaacaaaacatcataaaacaaatacataaaacaagtaaatattacaaatttaacaccaaaaacctaacggtcagtataaatataattaatatatatttgtaatatattttactatataaataaaaataaatataataactttttatatataataaatgtaattggattttgagatcgacattcaataaccgattcaatttaattagaatctaactttttaccatccaatccaatctaattgtatatttaatttttggtgattagattagattgaattctatccaccccttatacaaaaccgtacatgtttaaggactaaaaatg

SEQ ID NO: 150680 - DNA, 631 bp, Cannabis sativa
  modified_base (579)..(582): a, c, t, g, unknown or other
actctaaatgttcggtatttattacgcagaatgtgtgtcactaaaaatatgaagtgtcactaaatactaaaacccaaaatttacaattttataaaaataagaaaactatggcctatagtgcatgcgacacgtgtgagcaaacgtatttaccaccactttgcgcgcgtcgctaaagacacgttattcacgtggctttagcggcgcgcataacgtgtgggtaaagacgtttgctcacacgcgtggcgtgtcaccatatacctttttattttaataaaataaataaaatatataattataaaataaataaaataaatataaataaataattatattaaaaaaaaagaaattagatgagtataaattcatctctttctaaccaaaccctaaaaattctaacctaactctctctccctctctgcttcgtgcgaacagaaccccaagccgccccctccaatcgcgaaccccaagcccttccagtgcgaaccagaaccccaagcccctccacatatttgagttctccatcacccgaaaccccaaccatcgacttgttgggtttaatgccctaaataaaacccattnnnntataatcagatttacttattcataaagatcacaaataacattttatgtt

SEQ ID NO: 150681 - DNA, 862 bp, Cannabis sativa
aaagcagaatagtggatgagtatgattacttctatctttgatttcatgtgggtagaagataatgaccgggtacgatgagctatttatatgttacgcgatgatgcccggatatgatgggagattatttcccaaggtcataatttgaataatatgacatgtgatgcattcaggggactgttttatgagaaatcttataatgagtccattcgtgccgctcaagctgaagagtttgcacgattagttcagggtagcatgactgtgactaaatatcctaccaagtttgacaggctggccaagtttgcttcggatgaagtggccaatgatgctcaagaaaagctaagttcatcaaaggtcttgaagagtatattgctagagatgtgattatggcaaccaaacaataaggggttgtgaagacttaatcctcagattgtggacttagctctcactactgagggggctgaaagcctgattcgtaaaaagagtactcagaggaaggacgtgtggaagacctcatctattactggagtgagtaaaagctttagccccaatgaccgaaaaaggaaaccagatggaccgccggttgtgggtccaaacagaaagttttaaaataactagggcttttgtcggggcagaaatgaggtttggtagccttaccctgaatgcccaaaatgcaagagacatcacctgggtgaatgtcggtctagagtttgctaccaatgtggagtagcaggccattttaagatcaattgcccacaactatagaagcccgaggctaagaaagagagtcctatggttcctgctagggtgtttgctttgacctaagcagatgctgaggctggccctttgactgttacaggtgaga

SEQ ID NO: 150682 - DNA, 516 bp, Cannabis sativa
atatcaaaacacttttaagaatatgattaaatttgtaatacatttatatattttttttagagtttttacaaatcctaacatattaaaatctctaacaagttggtgaggattgcagagctcgcgtgtatatgaacgagcctgtagcttagattctttccgttagttagttttgtacaccttggattctctgttgtaataatcttgatgattatgtgcaagtagttctagtagtaactcttttccgtttaggcagttttcggttggatttaattccaatctcgatactgaccttgtgatctatttgttgaggttgacttgtgtagggataaatccggaatttcccaacacagattcgtcttgattataaaaagaggagttctatttgcaccctataaacttatgaatacgtacaattattaaaaaaaatataaacttaaatatatttttaaaaattagttttaatatttttttaaatttttttcttcacattattttatgttaatttcaatacctatt

SEQ ID NO: 150683 - DNA, 800 bp, Cannabis sativa
atactatgttttaatcataagtaactttttgttgtgactaaaaatagtcacaaaaaaatttatgttgtgactcaaaaattgtcactaaaagtagcatatttttgtagtttttgtacaaatttttttatttttttttataaaaattaaacttatatcagtcataaatattttttttaatttagtattaattatgtttaaaattaattttttaatatattttaaaatattacaatagtataacaaattttttttcaaataataaaagattaaattcttaatcttttttaattaaatcacgacaaaaattatttactcatttaattttaaacaaaattaaaactaaaaagaaacttaaaacgaaaagataaaaaaataaatcatcaatgaacatgaacattagactaattccttacaagaaaaaaaaatggacaaattaaaatattatttagtcaaaagtaaatttacatagtcacattatgtattataaaaatactaattcctccatttcaaaatttgattttcatttattaatttactattattagtttaattctaattaatgtttttattagggctgttcatataaactgggaaaccgcagtttaaatacagactactacaatctataccattgtaaaccgtaaccggagaaaccgtttttagtggtttggtcaattgggaccgtttatgtcataatggttcgattgcggtttgtaatatataattaacggttaaaccgggccggaccgtttataataaataattaatttatattttttttatatatatgactatatgta

SEQ ID NO: 150684 - DNA, 588 bp, Cannabis sativa
ccaacaatactcatcccatcgaccgctatcaacgacatctagatcaaacctagaaatttccttatccggagtattgctaagaagaaaacattggatgaaatacaaagcagatagtttcaaacctagggactcatcctgtccccacctactacctaagaaagcatcctctatagctttatgatcaatggtttttatgccacagaaacaaacctcaattaactggtttgattcatgggaaaacaatagtttgttgcaatcgcaaaagcaatcaagactagtaatcaagtaatactcctcggcaaccttagcccaaaattctttgggattgggctggtaaacctccctcaaaagtaggctatgaacaacttgggggtgaaaaacaaagtctaatatatcccaaaaaatgaccaaactggttgtctcggaacatagttaacaaattcacaaacaaggtattcttaatgttattaataacagaaaaattactcgtacacacacttcgatctgtagaaatcattgggactgtatttgttaacccagtcctgcattttaaaaagaaagcaaatataatgaaataacatatgcaag

SEQ ID NO: 150685 - DNA, 738 bp, Cannabis sativa
tatgtatatatgtttatatatgcattaaacattctgaatcaatacattcatatattaatatagattgttctaagcatgaaaactcattttcaaaaacaaaaaaatctaaaaaaatttctggaaaaagattttcggacccgaagatttttggtgattttaaagactttgtttcacgtgttttcgatgcatgaaatctatatgaatgtcttaatgtttacatttagattcatttggaactgatttggagtgttttggtcgtcgaaattgtcttttccgatcgggtttgggtcaggtttgtaggacccacgtgcagaaaaacgagtcaaaatgacccggattggctgaagaagacgacccaaacgacgtgtcattttccataaacgacatgttgtttttcaattattttgctgctgtcgtttgatcaaacgacatgtcgtttttcctttatgaaaaaacgacgtgtcgtttttcaggatgtggctgctgtcgttttctcaaacgacatgtcgtttttcatttttgagatcagcccttcagtttgtaaaaacgacgtgtcgttttgcgttttgcaaaaaacgacatgccgtttggaagtgtggttttttcaaaaaaaaaaaaaaagagaaaaattctgaatttaataaattttcatttatttggaatattaattattttcctatttttatggtaatttagtcaataaattgcatttagttaattttctatttttgtttaata

SEQ ID NO: 150686 - DNA, 625 bp, Cannabis sativa
tttaaattgagacttaatttttttgtaacaactaaaaaaatattattgaatagagtattcttaaatgttttattgtataaaaatacactatgataaacaaaataaacaaacaagaatacttgcaaaaatacactatgatactattttttattttgtactatttataagaaaaaaaattagacgagagttcctctacatggtgatgagctctatgttcatctctccattcattcttcttggcattagttaattaatggtgggttttactagtaagattgaaaaatctacaagtaaaatggaaaaacaatagaagagatagttagcaagagagaaaggaaggcctttttggtctgtgaaatacaaataggttgtgttttaccaaaatggtcaaaacaagctttattcactgtgttcttctcattctttcatttgacccttacattcatttttctctttattaatgaaatttagtgaaattgtgtgttctactgcttcaaaaaaaaaaaatattgttatttagtattaatggttcttctaaatgtgtaattttataattgactagtactattttttaaaaaattattatattaaattatatgaaacctcaatacttagttggactaat

SEQ ID NO: 150687 - DNA, 1356 bp, Cannabis sativa
cttttttcaaactatattttaaaatctaaacatataataatatatatatataataaatatattaattaaaaaattatcacttattgaattcaaaataattagaataattaattattaatttatttttcttatgttattaagaataagaaaaacaaaaatttaatagaatagttattcatactattaaaaaaatatacaaaaaaaatattaaaatttaaaatataaagtacaaatatttttaatataattttatgatttaattatcattaaaaaaatacaaccgcacgagaagcgcgggtggtttcctagttataatatataattgattatgttaatattttatttatttttttaattacgatatatataaatgttaacttttaattttattatgtaacatatatatcatttaaatttaaataatttttactaatgaataaatcataaataattcgaagttatcgacaacagtgaagtcatcgattataaaaaaaattatatttctccaacttatcgagaaatattttgatgagtgaaagaaagatcgagaatctatatatatgtataatatatataatatatatataatagaaaaggtaaaagtaaagagaatattgacaataatttgtaatatacaaagaaatatattataaaatatagagaaaagaaataccaatagaaaatcgatgttttgatgttgctcattgatgtcactgctactgctcattatttgtgaagaattaaaagttggttaaactctttaacacaaaaaaaaaaggttgtaatacataaaaaaatatattataacatataaagaaaataaatactaatagaaaatagatatcttgatgttgttcattgatgttactgctattgctcattatttgtcaagaattaatagttagttaaactctttaacacacacaaaaaaaaaattaaatttgagaaagatggagaatatattggcattaaaaacaaaactaaagaaaaaaataaaagaaaaaaaatgcattgagaaaaagaaaaaaaaaagatatgaaattaattttaggtttaggattatatatttagggttatataagggaaaaaaagagtaacgaaaatacatttaaaagaaaaaaaaaatatgtttccacgtagggtgattttattttaaataatataggaaaaaaatataaatgaattacttaattgtttttagagatttttattattattattttagataattaatatttataaatctattaaaaaaattaaaaaatggaagaattaaggagagaatagaaaaagctatttagagtgatttgagagtgacacatcaccgtattatacttctcttatatatatatatat

SEQ ID NO: 150688 - DNA, 602 bp, Cannabis sativa
tgtcgtgtcgtacttaaggatataattttcgtgccgtgtcatgttaatttataacaccgtgtcgtgtcgtgcccaaatccatattttttcgtgcctagtcatgctcgtgtctttcgagctcgtgccaatttcacgtcgttttgaaatgtccaacctaggggtgaacattgggcgagttgaccgggtttcgggttggcgggttttgggttcaaaaaattgtacccggacccgacccgtgaaattgttcgggttcgcaggtttcgggctcgcgagttcgcgggtctacgggttcgggttgaccgggttggccgggtcaacgggttgacccgatcaacttgttaatttaatatctttttaaaaaaaatcaaattttatgtagttttttttatatattaaattaagcatataagttataaatttataacgccataatttatattcgttagattaaaataaaataaaaaatatattaattttaaattgaaaatacaaaagtcaactatacataatatattatatattgttatttttaatatattatttatgtaacaaaaataaaatgattatatatattttagggtttttttttatttttaatatat

SEQ ID NO: 150689 - DNA, 521 bp, Cannabis sativa
tttgtaactttttttttttataaaatttcacatttgatgtaattttcactatataatttgatactaattagtatttaaaataatttttataatatatcatatgtaagtttatattaattggtatccaaataacaaaaaaaaaaatttaagtactaattttgaaatttaaatatttgtgctacctgttaccaaaaaaagactcattagtatctaaatatattcgttaactactaattagtaaaagcatatctcttatactatagaatgtctaaattaagtgaaatataattttaatgttggatttcaattgaaacataataaaaataaaaataatattaataaattatctcattgtatgtgaaattattattttttgggcaattttgatttatatataagtaaatgtacaatattatataaaatgtgaaaaaaaacataattacataattctatacaattttataaatatttacaaataaacatatatgtttacaattttaacttgttaattactttcaatt

SEQ ID NO: 150690 - DNA, 882 bp, Cannabis sativa
  modified_base (602)..(608): a, c, t, g, unknown or other
aacaaaacacagggtccaattggtaacttttgtaaaacagagggtctaaaatggtatttaccctataatatataaagatgtgtatttatatatatacatatttatatatttgtttttttatctttttatcttctctttttcaaaagtgatatatggggccaaattagtttgccttttccctcttttccttcaagtaattgggtcctcccccaaagttggctatatataatttgaggatattagaaactaagtagctaaaatatatggatggtttcaaaggtaacatgtgtatatagtgatcgatcgttacactgaaaaacaggtttaaaatatatgtttttcttaggatctccgactttaattgaagattatgacttttaattttatttttttcttttacattatacatatatattccatatatatgatttacgacatgcaaaagattgatgatcaataatcttatcggtatctgtctaactagaatagatagatagatagatagatagatagctagagacagagagagagagtgtgtatgttagagagtctcatattgctaatgtgtgaaaagataatagaatatataagatgaatgagcnnnnnnncccattgccaattggttttgagatggaacttcattcaccttattccaaattctaacatgatatcagagcaaaacaaacaaaaaaatctctagtgactatccaacccaaaaaaaataaaccgatcgaaatagagtcgaaaaaaaagagccaccagaaacccaaaaaaacaatcgatccaagagccaaagttaaaaaaaaaaaaaataaaaaataaaagttacttgtgatttggggatagtgagccaaaaataaaaagagccactaaaaatccaaa

SEQ ID NO: 150691 - DNA, 1248 bp, Cannabis sativa
  modified_base (1169)..(1176): a, c, t, g, unknown or other
aaagggatcaaacaactgtaatttttgatttataacctatctgacgagagaggaaaatcaaaagttatgactagcgcataaagctgaatactaatggtttgcgctaagggaaagtattaaacgagatgtcaaaatgtctttaaaaaatactcaaacccaacacgtggatagaaattttaactactcatataagcaatgaaaatatatatcagatgacaagttcattagaaatatatttgaatatgcttaaaatatgaatattttgatgatcgcgagatggaattgatgacggctcgcagactgaggaacgagtagataagttgctcgcacgtaaagtaggaaattaactacttaaagtcggaagaaaggaaagtcattggaaacccctaataaactttatgcatgtgatagtttatattgtgaataaaatgcaagcaaacatccgcataataaaattcatacttaaaagtgcgaggcattaaaaaagcaaagttggccatctaaccttgcaaatccgtctttacaaaaagtgtcactaggggaaaaactattgtctcggccaaggggccatttcctaaaaaaaagggataaataaaccaagtatacatgctgggagacttggacagatcttcttcttcttcctcgacctcgtcgtcttcttcttccatcttggtcttctcgcaaagagctaaagtttcctcttccttctcctccaagaagctggtatccatgttagggttccaaagccaggcccgttatatagcgcgaaaaccaactttatcgcaccgttctacggtctcgatttctttcttggcaagtttttcagcaagcttctcctcaaactcatcggcttggactttgagggccttctcggcctcctcttttgccttctcgacttccttctttactttctctgcttcctccttcgctttctcgacttcttgcttaaggtgggtaatctcctattgagcgttctcttgttgctcacacacatccttgcattgggacattaatttgtgagtctcaccctccaaatactcaagccgctcagaaagtagtcgattggaagcaaaagaagcctagagaattgcaaacagatgagtataaaagaggtataaaaagataatataatatattaacgaagccgacataccatgaagtgacagtcnnnnnnnnttgaaagcatctcctttgggctcctaagattgagaaaatcccaatctaggggaaggagagtttgaagtttgc

SEQ ID NO: 150692 - DNA, 529 bp, Cannabis sativa
  modified_base (66)..(67): a, c, t, g, unknown or other
atcaatgaagggcatttgtgctacaatatcagcactcgacatcatagtgtttaattcaggtaatanntccgcaaccaacacctctggattttttttaaacaaaactcccaaccacgctccgagtgtccttgatagaacttggtgtgggactaggatcgacacaaacattcttctttaacaaagtcacaaacgagggagtaaattcatctggcttcttcgcaagtgtagacaaaaagtaccttgcacgcttatcatttccaataacttcagggcgatatattaagcctttcatgtacttgtaatttgtttccaatttcaagtcatactgcactttgtcaacgtctagtttttcatacaaaagatcaatttgaccaaactatctacagtgaatttagacaatagaattatgagaacaactaaaatcactactagaatatgggcctttagcttccctttttttaacccattttataaaaagggaagctaaagggtgtgagaacacccaccagattcgaaattgacatttaga

SEQ ID NO: 150693 - DNA, 558 bp, Cannabis sativa
ctcgtgctggtaacaccgtaaccacactaatataccacactatactaacactctttaaatcacattcatattagtgctagtagtacaaacatccaaatcaagcatacattcatatatacattcttatgctatcttacctcattccgtgctcaagtgtgctggtcagcctgagtggaaacgcagcttgacgctttacagggccctaaaccataacgtacataattcaatgagagacacgctaaaatatttatctgggatttaaaatcaaaactaataataaccctatcaataaataggatgctaataccctaaattacgtaaaaatgggaaaaactagggctcaggaaaaagccccaaccggcagaccagttcccaaccggaaccccggttcctgggtaccaaccagtcgaccggttctaatggtcccccagaatcggtcgaccagttctgggctgggaaccctacaaccgatccccacacttcaattcaatgccaaactttccaaaactttccagaatacctattcatgtcccaacaaactcattcaagcatcaaaag

SEQ ID NO: 150694 - DNA, 687 bp, Cannabis sativa
  modified_base (341)..(346): a, c, t, g, unknown or other
gcgtcgattcgtttcttgtccattaattgatacggcgcattaatgggtgtcagacggacccttaagcgtttccaccgtctcgatgacgatacaatccaaaagttggatcctgggaatcgaatcgtgtgcctccccaaccgttcgatggtagctgatcacagatgtttcacgtgtgtttggcctataaaagccacccttctcacttcatttgtttactttcagaatttcaccaaattttcttaagttttccagagagaaaaagaaaccctcgaacagaaaccctcaaacaccatagattttttacttcttttccttcgtcgctgccaatcaactctttaccnnnnnncaacaccaacgcccagttctcaagcttcatgtaagttcttcgcattctgtactttagtttattgtttgtgtacatcgcatgctttactgtttatcagctagttctgggtttgatgtttgagttttctgggaatttctgtttcgagtttctgtgtaacacgttagattcctcttttctggtgttcgagttactacgtattttttttctaggacccatcttttcttcacgtaatgtcattcaaggggttaaaggagactttgtcttctcgatttttacccctctttccttttctttgcttattcgtaatgtgaccatctgtgggattcttgcacccgactctt

SEQ ID NO: 150695 - DNA, 578 bp, Cannabis sativa
acaaactttaagacaatttttgacacgaatagatacagaaaatgtacctagttttgtcataatatttctaaatcatattattattaagttttatttcgaccaaaattcagtttagaattttatttatacaattttaaaaaatacagggtctattttatcatttaaatttaattaataacttttacaatccaaaataatatttatcttctatttattgtaatgacaaaaagaaagaaaatacaaaaagaaaaaaactgcttaaaattgtgagagtaggcaattgcccgtctatccacccacccacatgccattgccaagatattttatgacacattaaaaataaatttgccaacatactttttggaaaggcataagcccctttttttttctttaaatgaaagggttttttttttttttcagttttacttaaaaaaaaaaagtaacaatattataaaaatactttcagctggctaaataaacaaatatacaattaagataaaaaaaattacacaaatatcacttacacacaccttcaactcaggatccatgcttcctgggcaactatcgtgcaactacgc

SEQ ID NO: 150696 - DNA, 641 bp, Cannabis sativa
tttaatttagttatttcatgaaccaatttttgatttagttaattcaaggaacctgattttgatttatttattttatttatccggttttcgtgtgtaagtttttatcttggttgttttacagaaccagtttatttgtctcagatttttaactagttgataaatataactgactttgagttattgtgtgttatttatttttactaattttgttatggaacttgttctatttaaatttatgtctcagtcattttggaattgattctatttttataaccgatttatgaggtattatgtgttattcctttttatttattttgttgtgaaactagttttgttttaaatttatgttttagtgttttaagaactgatttcctctttattttataattataactggtttgttgttgtggtatcatttatttttatcattatgttataaaatcgattctatttttaatttatatatgagacatctaattttgtgattttttcgaccaccagataactacgatgacttttctgatgacttttttggtgtcagtgtcttcttcgacgacttttttggagatatttgttattagaaattttatcaattttatttatggtcttttatttggtttctcaaattataaacttttgtc

SEQ ID NO: 150697 - DNA, 606 bp, Cannabis sativa
gtacttgacttgatatgtcggggcatgccactctatcactaagggttcaaattggatgaacaatgaaggaggtttgaaatcactatagaaggtgtctctcatctactagttatctgacagagaaaactagattttttttgcaggttgaaaataaagtggatgagtgagagcatcgtgttccttttatagtatttcaactagagcgtagggttgaattatatggattaaaaaagaacaaattattgggcaaaaaatcacactaagggccggctgtaacgccctaatggtaaggcacgctacaatgctttttcaattacagtgctgtctttgctaatcaaagaattttcttgaaaaagatgtcaagttaaaacttttatattaattattaaacttagtaatttttaaaactatttacaagtaccgggatctcgtttaaaaactttcatacacaaaataccaaaatacattattggtcgcacaacgactacaaaataatagatgtcccgagactgaacactccaggtcgcgctgccttgacatggacaacttcatctcaggctcaggctcactcctgttcaacttttgccttccctttacctacacatg

SEQ ID NO: 150698 - DNA, 822 bp, Cannabis sativa
  modified_base (26)..(26): a, c, t, g, unknown or other
ctgacactcatttaatgtaccctganacccatctaatgtactacggaatacattccgtgaaagtacatcacgggacaaaatcgtgtttatagttactttacattacttccaaacatatttaaaactaataaattatgatataacttattagcaacattagtttaatttttttttttcattttatatttttttaaatataaatgtaagatactatctagtttctttacaagtaattttaaaatatatcaaaagtgttttataaaataagtatatgaaaactacaatttagttacttttacttattaaataatatatatatatatatattcttagtaattatggaattgattagtatatttaattttgtttaaatttaatgtttgattttttgtttttttttgttttttataagtataacttatacgatgttcaagatattatttggtgtatttacaagttattttataactctatcaaaataattttataaaaataagtttatttataatttaatcttgtaatatctaaagataaaacaaaaaaaatattttttagtaacctatcaagttgttgatacattaaattttattttttaagtttaaagattaattacttatttgttaagaaaatataaaagaaactaaaattttatatttaactctaattatcttctttagtgataatgaaaaaatatatacttttcacatattaaaataattatcttaaaaaaaaaattacaatgatataactcttaaaatcaaacaattatatttgtagtaaaaattaatctttttaaacttgaaaaaagaaaaaaaaaaaaaa

SEQ ID NO: 150699 - DNA, 566 bp, Cannabis sativa
  modified_base (35)..(37): a, c, t, g, unknown or other
tattacaggtcaaaaaaaatgtaaccatgatggtnnnaataaaaatgtaaccattgaatagccacccttataagtataattattacaattgtatatatagtatattggtcatgtttaatgtgtgtattctattaaatttttttaaaagtatttataataatctatgtattagacattagtaattttttataactataaaaaaaatgtgatctttaaacataaatataaatttatttataaattagcggagtgatttagttaatggcataagtgtaataaaatgataagattataactaaatattaagtgaaaatggacattgtttaataattgacacttgtcgtaaaaataaagagagagtgcgaaagagagtacaaaagagagtgtataagagagtctatttagcactactcattgaattattttatgatgagtgctaccgtcaatctcctgttacaacctcttagtcaacctttaaggctaaaaacacacgtcggaataattttttttttcacgacggtattcgttatgcttacaacatcatccctgtaattttttgaaaaatt

SEQ ID NO: 150700 - DNA, 555 bp, Cannabis sativa
taggcccacaagtggaactcatgagtagggatttggtggctggccatttgtagtatgggaagtattcatcgttggatcttcgtctgtctcgcccagcgggatgacacttggaggttgctgaccagtttggtaggcttttcatatcagcacagtagcttgctgactatgattgtaaagaccgcttagcttaaatttagaaattagcagttaattaagatttaattatgaaaattatttatagatacttaaataattatttatgttgttatatttgaattcagaatgcatttttatgtcatatagtgaaatttcataattttgcattttcggtgtccggcaacatggaacacaatgtatggctcagtagaatcacaatttagtattttagtatattggggcagtttatttagacattgggaatgtcgaaattagtcaggaatttaaagttttcccaaaatgcccttagtaccccttttatgccattttagtgtgtgagcgcaaaatggtcatttttcccatttgtattttgtcttttgtggtttatgttaggctgaa

SEQ ID NO: 150701 - DNA, 918 bp, Cannabis sativa
cgccattccaggctctttggattatagtaccatagagttctgcgagtcggtatgttgcgttaccaattttttctgcgatgagatatggtccttcccaattgtcttcgaagaacccatgtgctgggttttttcgtgtttggcattacttttcgaagaaccaaatctcctactcgcagaactctttccttgaccttagagttgagataccttgcggttcgccgctgataagccgcatttttcaggtgagcctgatcgcgcttttcttctagaaggtcgaggtaaagcgactacttttcttcgttctgttcaatgttgaaaacatctcttcgtagggaacttgccccaatctcgactggtatcatagcctcacatccataagagagcgagaaaggagtcttgccattcgtggatcggggggtcgtgttgtatgaccataaaacttgcgaaagctcgtttggccatacccccttacgctcttcgagttttcctttgatggtgtgctttattatcttgttgactgcttcagtggcccgttactctgcgaataggcgactactgagaacgcttttttaatccccaatgctttgcataactgtcgcatctccttacaatcaaattgctttccattatttgaaatgagcttgtaggggatgccaaaccagcagattatggagttatagacaaactcgcgcagtttagctgcagtgatggttgctagtgctttggcctcgacccattttgtaaaatagtcgaccacgactacagcgtcttgactccgccttttccttttggtaattcacatatcaagtcgatgccctacaccgtaaagggccaagggctcgtgatagaatgcaagtgactcggaggttgatggacatacgtggctattcgctgacatttgtcgcatttctttgcgaa

SEQ ID NO: 150702 - DNA, 539 bp, Cannabis sativa
atattttttattatatctatataagttttatgtatggtatatcattttattttagagcattcatgtttagttgtttttattatattttatataaagctgatatattattttgttaatatggtatacactatttctttaataatattatattatattattttattttttgttgtcggtatatatattttgctgtatggtatgtgatttttgttgtctatagtatattatttattatctcaatttcggcactctgacgtggcatcacacgatggtgacacgcggaatcaactccgggtatctactcggaagatacaggccgaacaagatgcctcatatgcttgctcaagacaaagcaataagcagcctgcccagaacgacaaacacttagcgaatttaacttttgcaccgtgagtcatcaaggaaaaccctataacttgagattaaattacagacatatggaaagctgtcgaaatcccaggatcagtgtattctgtatttactacgcaatctttctgcttatatcaattgtaacgagaagg

SEQ ID NO: 150703 - DNA, 850 bp, Cannabis sativa
taagaccctactttcaggctcaccccatcaaagtattaacaaaccatccgctccgggaagttctgcagaagccggaggcgtctggaagactcctcaagtgagctatggagttaagccagttcaacatacactacatactgcgcacttccataaaaggataagcgctagcggacttcataacagaatgtaatgaagcagaagctagggcaatcgtaccaacaccacaaaccccagcgtggaaagttttcgtggatggtgcctccaacaaaaatggatcaagagctggggtagcgatgatatctctgaatggactacggctccaggcagccctacgctttgaattgacagcttcaaacaacgaggttgagtatgaagccctaatcgcgggactgagattagcaaaagtcgtgggcgccacaagagtagaagttttcagtgattcacaactggtggtaaaccaagtgtcgggagagtatcaaacgcgtggagaaaaaatggctacgtatgtagcaattgtccgggagctgctccatgagttcacgaactacaaagtggaaagaatccccagagaaaagaatgcccacgcagactgtttggctaagttagcatcagacaacgagattgagaaattgggggtggtacccgttgaacgcctcacggaaccaagcattaaaaccaaaaatactgtggcagtagttgaacaagagctcaactggatgatccccatcatcaaatacataaccaaaggcgagttgccccaagagaggacactgtccaggaggatacagtatcaagcggaccgttatgtgatgatggataacattctctaccgaagaggactcagcatgcc

SEQ ID NO: 150704 - DNA, 2371 bp, Cannabis sativa
  modified_base (414)..(416): a, c, t, g, unknown or other
tattgcaattaactcaaaacaatactctataattgtttgggtttttttttttataaatatggaaaaatgtagtagagtttacttttttatgaaaaaaataaataatgcaaaaaaaaaagggattaaaaaataattaaattttaaaatatgagaaaaaaataataaataaatttgataaaacttgtaataataaggttcaccagaaaagtcaccaacgccagaaaagtcgtcggtgccaaaaaaagtcactggaaaagttgttggaaaagtcacggtcgtcgaaaaaagtcactggaaaagtcaccagaagtaaatgtctcagatataaaataaataatttaaaccggttataattaaaatataaccgttttgtaacataatgaattaaaataaataacacaaaatatctcaaannngttataattaaaatagaactgattgtataacagtgttataatgaataaaaataaataacacgaaataactcaaactggttatataacataatgaatacaaacaagtaacacgtaataactcaaaccgattataattaaaaaaaaataaagaggaaatcagttcctaaaacactaaaacataaattaaaaataaaattagttcataacaaaatacctcataaaactgatcgtaatttttttaaaaaacaaaatggggatcaattccaaaaaatattgagacataaatatgaaaagaaccggttccataacaaaataaataaacacaaataataacacataataactcaaatataatattaaaaaactggttatatttatcaactagttacaaatttgtgacaaaaaaattggttccctaaagtaactaagataaaaactgtagtggccaaaaattacaccaagcataaatacctcttacggcccaaatcgaaattacaacccttcaaaccaggtcagtaaatataacccactcatccaaaatacattaggctttggctaaaatacaaggcccaaacgagcacatcaactacaagattaatctaatacaaaggataggaacgagtctatagctgaagcataagaatcgatccttcctcctggaaaaggggaagaccacttcccacgttcattcttcagaataggaaaattcaaccatcagaggctctataaaaggagaacccaagagtcctgaaggatcattgcatcttcactcactgaacacttattcaagcatttacgaaatacattactattattattaccagtccttctccatcactctacaatggaagtatatattttctatcttctttatttacattcagatattctttatttgaattgtttacttacttgatcgtcggagtcccttcggctggtaccatcctggtgtcccaaggtatcagcaatcctttttcctttgttttataggttgtcagtgcccgcgatattttcattccgatcattgtaaattttgccctctgcaatttggcacccactgtggggccctgacaaactgaatcaagatcaagggacacatatctaataccatggccaatttggaagaaggagagatcgacgttcaagcctagatagctactcttgtatcttagatgagggaaaccaaggaaagccttagaatggtacaagaagagaataaagcatttggggaagagaatgctctgctgaaatcaaatgtggagatactggagtccgttcaacgtagtacgacagagtctcagtcaaggtttcgcattccaattccatccatgcaaccccttgattccactccagctacaaacgtaggccaacgtccagcggtcacaggaagaccacaaaaccaaacaacacagcagcattcaaccacaacgactattggatcagatggatcggtaccagggggatctactctaacacatggaccctctttggtaggtgacaagactatgaccgacgcctaggtcacatgagttccaaacggaagcgttcccgcaccaagaactcaagaaggacaactcaagacctctgacccaatcactccaagtattttgatatctaatgttcctattgttccatctacaggtcaagccgttgcaatgacacccgaggagatgatcgaacaaatggtagcaaggaagcttgaagtcatggaggctatgattcacataatcccaggagtccctgcacctatcaaaaagagcttaccaagtagcttcgcaaactcttcattcgtggatgctatagctctcgtggagatgccaaaaaagtttgtcttcccctcaatgaagatgtatgacggaacaacagaccctaatgatcagatagcgagttacaagcaaagaatgttcacagtcgccatccctcgtgaattgcgagaggcttgtatgtgtaagggg

SEQ ID NO: 150705 - DNA, 995 bp, Cannabis sativa
tcattgtcgttggcgaaaagcgaagtcaacataatgaataaaaacaaataacacaaaataattcaaaccaattatatttaaaatagaactagctctataacaatgttataatgaataaaaacaaataacacgaaataagttaatccggttataactaaaatagatacagttatataacaaaataaataaacacaaataataacacacaattactcaaatataatataaagaaaccgtttatatttatcaactagttaaaaatttaagacaaatggttccgtaaagcaactaagataaaaactcacacacaaaaactagttaaataaaataacttaaacaaaaacattcattcaacatgcttcaacccatcaaataattacactcataccatatctacctcaaaaatactcattcattatgtctatataaccagttctattttagttataaccgatttgagttatttcttgttatttgtttttattcattataacattgttataaaaccgattctaatttaattataattagtttgagttatttttttatttgtttttattctttatgttacagaaccggttatattaaaatataaccggtttgagttattttgtgttatttattttcattcattatattgtagaaccgattctaatttaattataattagtttgagttattttgttttatttgtttttattatttgtgttatagaaccggttatatttcaattataaccggttctatttttgtttatatttgagacgtctacttctggtgattttctagtaactttttttggggacgatgactttcccggtgactttttcggcgactttctggtgattttttttggcgccgatgacttttcgacgacttttccaacaaagcttattattgtacaaatataggattttcatctttttttacaaaaacatggcataaaaaaaacccatataaatgtaaaaaaaaaataaaaaaaaaaatccataacc

SEQ ID NO: 150706 - DNA, 530 bp, Cannabis sativa
actaaccaccacaaaaattacaaactcttgaaattttcatttaatataagaattacttaattataaaaataagaataagaaaaaaaaattttgtttccgtatcctataaaataaaattaattataatattattatagaaactcaattttttaaaatttaaattaaaaaattataagaaaaatatgttattacaatataggctaaataattgattataattaatatttatttatattgataaattattatgtattttataatatatgttatgcctattcaaaaaaaaaaatataagttttagaatggaaatatttgttgtagtgaggtttaaaggtgtaattaacggtttgaagtttttaaattaccataattaaattgtgagatatcaatgtattaatatatatatatggaatgagaaaaaaaatagaaagaataaatataaaaaataacttccatgtcatcaggtaataggttaaaataaaaaatatttaatttaaaaatttaattaatagttataaatatcaaccatt

SEQ ID NO: 150707 - DNA, 759 bp, Cannabis sativa
atctttcgtgtctgatattaaggttaatatattataaaataaatagaaaattatataaattaagttttaaaatttaaatatataatttttaatgaaaatagaactaaattaagaagataaattgtctagatatcgtaaaattttaaatattttaattaataaaaaacttaatacgtttaataaaattaaatatcattaactaagataattaaagttttaatatttacaaaaaaaaattaaatttatgtcatattcttaattttgttttatttttataaaaattaattttttaaattctctcattcttccgcctcttactatctaaatatatatgtcatgtttggttggacttttacttttacctttttttttttttttttttgaatggaagtagataatttcattaagatagaaaagtcaaatcgacaattacagcagtgttaatagcattagaaacattgctactaacaaaagtacaatctgaccgataacaaatatcgtgagccagacaatgagcggtattgttagcagatcgcttaacataacggacattaacattgaccaaaaattaagcaaagtaagacagtcaacaataaatgaaccaaaaacatattgcattacaacattgctttcaaggtttgaaccagggacggacgcagtaaagaaaattagtattaaaaaaaattaaatatcttctatttaattaaataattatacaacaaaatagtaaaaagcccccacaaaataattataatttta

SEQ ID NO: 150708 - DNA, 519 bp, Cannabis sativa
atctcatcagcagactttctagtatcaaggcaagtctagaaacttgacatatagttcctcttttttatcttaagatttatttgattatcttctaatgttatattcctagattaatttgatacctactcattactcacactcaatagcagatgtctggtctaatgcatacgaaagcatacctgagacctctcactgttgatcctaaggaattcttttcttggcctttatcttttctagaatagatgaatctttttcttagataaatcaaatctatgtttaggagtcaaaaaactttctatagagctagccattagaaaaaaaaagctctagcatcttactgaagtaagttgcttgcattagagtaagtaaaataccaggtataccacaagccataggtttagatatcctcaaacctataatactgggatcaagaagttttgttaagtccattgagtagacttattttcaaaattttctttctttcccttttaataaactttttggttactccatatgaat

SEQ ID NO: 150709 - DNA, 730 bp, Cannabis sativa
  modified_base (353)..(357): a, c, t, g, unknown or other
gtacatccatattcgaatatagatgatcctactttcattggatataggcatttttctttttgtaaagaatgatcttgtcaaaaccactatgaacaagatgaaaataccatagatatattaaactaaggatgtggtcttctaatgacttgtgtctagctaaaataaagagttattagaatagtccaagtggatcctagtcacataatacaaaactcatattccatacattaacatacagtttggacccattgacaaaaaatggatatcaaaactggtgaaagtcatattgtattttccaatgtattctaagaaactgaaatgaaatttcgatttggaatctaaaatttaaagtnnnnnacttaaatttataccaaatattcaatgagtaataattttagcttggacaaccactactaatctaactctaagtctaagtttccttaagtaagcatatacaagtaggagatttctaagatcgaggattatatcatttcgggatagaatgtcaggaatatagtcatctacgctattcaatttcataagagaaattagaatgacatcgtaagcagatgattcatataccattcatacgattatataatatttaagaaaattctaaatgaaaaacgtaagaggaaaataaaggataatttctattaaaataagaatacaacgatgtcccgtttaggcgagagtcaaagttattattactttagtaagatgctagagc

SEQ ID NO: 150710 - DNA, 767 bp, Cannabis sativa
  modified_base (516)..(522): a, c, t, g, unknown or other
gctcacctgattaggtgatgtagttatgcgatatatgggtgccaagttgtggcacaggcttgcttgattaggcaatgcaatataggattattaaattatagcatagacttgcctgattaggcaacgtgatgttatgaagatggttactttatgagataacatatatataatctatattaggggtgttcgcggtacgggtggtgcgatttttgactattttttcaaaccaacccgcacatgtgattttttcaatttctcaaaccacacctgcaccacgaaactaaaaaaccaaataaacctccccgtaaaaaattgtgcggtgcagtgcggtttatgcggtttctgcagtttggactatcaccaaataattaaactatcacaaatataataaagcttgaacaacacttgtcaaaactaccataaggcttgaaaataaatatgaaaaaaaagtttcaagtttcaacaatacaataaatagtgggcttgggttgggtcttcacatattggacctaaatnnnnnnnaaaattggtatttttataatatgcagtgcggtgcaatacggtttgaaccacatatgaacaatttaaaaatgcaaaccgcaccgcaccgcaccgcgaggtttaggaaaaattcaaaccgcaaagaatatcaaactgcattttttttaggtgtggtgcgatgcgggcgatttgagcggtttgatgaacacccctaatttatatgattaaatgaatatgaattctattattggtataatggttttgta

SEQ ID NO: 150711 - DNA, 644 bp, Cannabis sativa
gttctccattattgaaattattgttattatagccaccccttccttctcttcgttgttctcgaccacgtccacgttcgcttccttggtcacatcctcttccttttttatttttactgttgtcagaattttcttcttccaaggtgagctttagtaattattctattttctcttttcgcctcttttttcttttttgtttctcctcataggcttgtaaagaacccatgagttactcaatagtaatggattctaaactttattctcttcaatgattatagcaatgtactcaaaagttggactcatagtacgaagaattttttctatgacctttacttcactaatttcttcgccatttgttcttaactggttgacaattgataatgctctagtgaaataatcaaaaaattgattcagtatatccataaataaagtttcaaaatcacctctaagagcttaaagatggatctttttcacttgctctgctcctttgttgcaagcttaaagcttctcccatgcttctttgcccgtcgttgcatctgagatcttctcgaacgcatcttcatccaccacttgatagatgaggtagagagctttcttgtccctctttcttgaatcttttaagacatctcgttgagtttcaaaaagag

SEQ ID NO: 150712 - DNA, 589 bp, Cannabis sativa
tcgaatgttatgttgacgatttagtggtcaaaacaaaagaaaggacaaatcatcttgatgatttaaaacgagtctttgacaggctcaggcaacacaatctgaagatgatttctttaaaatgtgcatttcgggtaacatcaggaatgttcctcaggtttatcgttagacatcgaggaactgaaatcgaccatgcaaagatcaaagcaattttggaaatgcctcccccgcgtaatttacgtcaactacgtggactacagggaagacttgcgtatatctgaagattcatctaaaacctgtccagtagatgtcaacccttttcgcggttgatgcaaaaaaaaatgtcccatttatttgggatgaggcatgccaaaatgcttttgaaagcattaagaagtacatgttgcatccacctgtgttgagagctccaatcttaggaaagccattgatattatatatcacttcactcgaacgctccttgggatccatgttggcgtaaaataatgaggaaggaaaagaagttgctctttactatctaagtagaactttagtaggggcagaacaaaattacccttcaatcgagaaagtgtgt

SEQ ID NO: 150713 - DNA, 592 bp, Cannabis sativa
tcattgtggcttggaaatgtgtgaggaaaaggtcgacaaaggtttcccatgtcgatatagatgcttcaggcaactggctgaacgagtcgtgagcattatcctccagggttgccacaagaatgcgacattttgcgagctggggtacctgatccacttccataatagtattaaacttctctagataatctatagggttagtagtacctttatatttcaaagactcggacagccggaatcccttaggcaaccgagcttgtcgcacttctacggtaaaaggagaggtcccatataatttgtatatgggctttctttgctgctcgattatttttagagcctgcaaaagaatgccctgatcgatacctccaggaagcacgacattgctccgagtcgtcgcaggtgcagttgctacaatggctatattggctgggatgaccacccttgtagtcgcagttggtgcgatcagcagattggtcagattatttatgccctgattgcctaaacgggggtcatgaggctcttcatcttttcaaggcatttgagaacgtgccctaaaaactgcgttaaggtgatcacgaagatcacccctatgaac

SEQ ID NO: 150714 - DNA, 1070 bp, Cannabis sativa
cagaggtcctcctcagactgacaagggatccaggaagaaagtaatcccagttggcgaggtcatggattctactaaagaatccaaatggctcaagaccaaggcttgcacaaggaagtctccgaaccaaccaatcactggtgtttaaaaatttcccgactgggaatgaggtctcggccgcaaggaatgagatctctgctgcatgaaatgagatcttctgatgcaagaaatggaggtcttctgctgcagagaatgaggactatgcagaggttgagtccttttacgtgtagatagcctttctcgagctacgtgtagacggtctttctcgagctctcctgtcctctataaataatcttgtactctttgtttaagaaaatggcctaatggtttgcccctagtggcatttttgtacggacaagtttgtaaaccaacttatcttaaatgccttgtgctttttcattcgaacttaatatatttttgtttgcttgcatttttattcacaatgtaaacaacatattttgatcaaatacagagtacttttggtctttccattgctcgtaattttcctatttaagtagttagtaatctaccagattgatttatgagcagttgtcaattctgcctcgcaatggcagttattatctgtcttaagcaaacttgaatgtgctcgtaatgattttatcactttgtacatttttgatttcttttatgaatagttatattatctatccacatactaggtttaagtacttttatcaagacatctctatgtctcgtttaatactttcctatcttgcgtgaactgttaatattcagctttgtatgcaagtttataacttttgattttcctttctcgccagacaagtttaaatataaaagttatgatggtttgatccccttctcgtcagaaaggtttgaccaaaaactttaaaaaaaattaaagttatgggtttgaattatatcatgtatttcaagatgaattccggttaatcatacataaatgccccttaagtaattttaaagagtgaagctttgtaattacttaaataaaagaaatgattctctttattcat

SEQ ID NO: 150715 - DNA, 509 bp, Cannabis sativa
atatagttaatattgttatataatgaaaagattgattggttgagtatcgataatgtgatgatattatgcatgtgatatatcggctcacctgattaggtgagccgatatacctagcgacgtaccgggcgtaggtacgagagatagtaatgtatgatgagtactgagcgtaggtatgggatcacctgattaggtgacatgattttcctggcgacgtaccgggcgtaggtatgggtgtcagtgatatatgatgagtattgagcgtaggtacggactcacctgattaggtgatgcaattttcttagggacgtatcggatgtaggtacgggtgtcagtggcatatgataagtactaggcgtaggtacgacttcgtctgattagacaatgcgatatattggggtgtcatgttgtggcacgggttcacctaattaggtgatgcaattatgtaatatatgggtgcaggtttttggcacgggctcacctgattaggtgatgcagttatgcaatatatg

SEQ ID NO: 150716 - DNA, 1164 bp, Cannabis sativa
tttattaaaacttgggttgattggacagttctttgatgtgttagcccgtattgttggtgatcaatagttaatgaacttagcatctgtgtgtaaagtctaggtgaaacagaagtgtgggcttttctagttaactaaaatcttagatgagcagacccaatccaactagggttatgtagctaagtttctccctaactctataaatacatagtgtctcatcacaattgtatactttttgataatcaaataaataaactgcttctgatttagagatttagggaggaagacttagttgatagtattgcactatcaaattttgtggtaattactatggatcaatcaggtactcacacctaattattatatattattattgtgttctatactatatacaaattgatcttgggtttattattatttttttctaacactgaagttgattgtcaatttttggagttcgggtcgcgacgacaggacccactccgggcaagctgtggcttattttcgtaactctattgggagtaaaatttggacttgatagccttagaatttcgattgaagtgtgagacataatttgatagagaattaaaatatctttgaaatgcaagttgaatcgcgtcaattaaatcaatattgagtgagttatgactattttactaaaagttgtttaagacccaccagccaccgctcatgttgacatcccagcgcccaagttgacaattggcgtcaacttggatgctaggtaggtgagaaaatatcctggaataaatttgttaacagtttagtagtttggaaagctttactgcctaaatttagcctgaagagttaactgcaaattaaaagataattgagaaaatttaactgccaaaaactattttttattccaatagacaaccaacaccatctcaagctaccctattgttgagggccttataacaatactcacttatactacttttatggactgcagatttgccaacaaacttgagattgatagattttgccactaaaagtaaagaatggagagctaattgttaagcaaataaaaattttagggggttttacactgacaattatctctttttgtttgggaaatttacatgctatactaacttttgccatttttttacaaaaataatgtctagtggtattttttacttttttact

SEQ ID NO: 150717 - DNA, 728 bp, Cannabis sativa
  modified_base (67)..(67): a, c, t, g, unknown or other
gctcctacttttttccaaattttgcctgcacttttctttctcagttttatacattttcataatgtcngacctaattgtattccttgacaccatttgaaatatgagacataaagtgcttgaatattctataaacccgctatgctcaaccatagacaacacttcaataagaatggaatgactaactaactccataatggtgcacaacactcttgccacccatctctattctaggcttgtacttcagtttgatgctcagaacaaaaaaatattcacctagacaattaatcaaacatcaggtaccgaattatctataattaacataggactaaaggatattttctgccagttggctaatgtgactattgactgattctaattaaaatggtgttcatttaatgaccaatgcaggaaataaatcaaatataattaccattgtgaacattaaagctaaactaagttgacattgaagaaaataaaactgggggaattattgaagtgttagcatttatacaggtatatttatttcgatcttcccataaaaaatgattaacactacactaaaagtcctctcatgatatgtcactactacaaaccaagcctttagaggcactttttttcatcaaatattaaggaaccgacgttatagggttgcgattttttagaagtaattttgacaccacctatggcgttggttttttggaaataaccgacggcatagggtgtgcccc

SEQ ID NO: 150718 - DNA, 811 bp, Cannabis sativa
attgttaccttgttcgaacctctcgttaagtttatgtgttcaatattgtttttatacatgtttgtgtcactgttattaattggtgtcattcctcgctaatctctaattggtttcattgtttattcttgtcttttattgttcttgctgaggtgttgttttcacaacaaatatcaaccagcaactgaatcattttagactgttcacctagaatgatgttaaatctgccatgtttattatcaattcggttaaaaaatgagggcttgatggttttggtgttggtttttatgggaacaatactttttgtattagtgcttgtaatgatattaaggtcattagttctagtgttaaagtggctttaaaagcaagagcaaaggagagttgtttctctaatcttaatagaaaggagaaagatgtaattactttgatcaattctttttaatttttttttatgttgtttaggtagcgtgtttgtatagaattcagtggttgttggaatttttttttccaatgccttaaaaaaatataaattataaatttatgtaaaggaagtaaattataaatttatgtaaaggaaaagaatttaaagttgaagattgtcaattaaattaaatatttgatcaacaaattatttgtgggaattgttttgatttaattatttatttgagtttttgtacaactctttaacgaattggtttgtttatttatttttttctcctttattaattctttaagtttttctaagacccatccgaatacattatatatatatatatattctttatatattaaaagtgtctatctaacggcattt

SEQ ID NO: 150719 - DNA, 519 bp, Cannabis sativa
taagatacctacgatataggtcatgtatttcttattttgtatctgctaggaatatgtgcccttatgaagccaacacagaaagacaagtgatccattcctagggatcaccccagataaaacactataaataccccacaaacagattcaaaatgggtcgaacaatttggttttaaggaatcaaagagagaaaacaggagaaaaatccaccaacaatattctctgtaataaatactctcattaatacaaaagactcgtggactaaggctcattaatgctccaaccacataaaaatctcatgcattaaactttctacagctcttcttatacattatttaagtggttgctgaaaacctcggtcaacattaggcaataagacagacacgagcattggaaaattgccaacaataaagctcgactctttatgttgtctagcacgctacggtgttttttaaattactgtgttttttttttgcagtcttgttaatagttgtggagaaatcaaaattttttttaaaaaaa

SEQ ID NO: 150720 - DNA, 772 bp, Cannabis sativa
  modified_base (39)..(43): a, c, t, g, unknown or other
ataggaactttagaattcaactgagaaagtaaatctaannnnncatatggatagaaataacttatcacaattttgaggataagatagaaaaattcgcaaagtctattcgaatgacttgggcaaaatacctaatcgtcaaatgttttatggtatgtctaatgattacttaatcttaggcaagtattttacattaatgttaatactagaatgctatattgatgacttagtttagaaggaacttatgatttcagactaagataatatgtcacaacaagatgtccctgagaaccaatagtaagagactaagtgtacacttgtgtacggacttaaccagactcctactgttgagtgggagccatctaagatgtaatcaaacaaggaacattaggagacaatcaagaaagatttatgaaagtgacttatatgttagatgatacgggtgtatattagaatccttatatctacaccaattcataaccaattcaagatggtggttactctggggtggagaaattattctagaaggatgtaaaaacccatttatagtaatttaagctccctcagtgaagttacataactttgttgctttcaaaaaccactggaaagttattcaaattgaagaaagttctacactggtttatctctattcaatttttgatagaattagagatttgtcttctgaaaatttagatgcacttaataaacaatatagaatttagtatccctagatgagtaatgcatatagaatatgatgttgcataatgttttatga

SEQ ID NO: 150721 - DNA, 564 bp, Cannabis sativa
atatctctatatatataggataggactacaatacaccctattaaatggttattcggttatgaaagtttgttagtttaatttcatttaattttattaacatgtttaatattgataaaagtttagagaaatgatttgatacatattaaaatttgaaaatataatttagtagatattaaaatttgggggccataattttagtacacagataattactgtattagtaaaattaaataaaatttgatagaaatctttaaattcaacaatctcaataatttaaagactaaaaaaatcgagagcatgattagtatgaacaacttgtttggttgacaaatttccctttttgtatttgggataagatgtttttggttattagagtgttgaacaatgatttcttgttcaatgatatatttattgctttcaacccaaaaaaaaaagttacatgagattcgattagacatgcatattttttttagagaaattacattgtatacttattttattttatatattttaatttttatttttatttctatatttttgaagatatattcatttttgtagata

SEQ ID NO: 150722 - DNA, 1283 bp, Cannabis sativa
ttggatttggtttagacttcattttccattctcgacgaggtttgggcccatgagacttatttggttgagggaaactatttggttgactaatcattgctttcaagtaaatctgaaatttatagcacttaggacgaatgtgacctctcctattacagaaatgacatgttggaatgaaattgtcattctgtggcagatttcctacatcaatccttcttccttcgaacttgagtttagtgggtccagttggaacttgtctcttctcatatgagtctgattcgttaatggtggttgggatgtctggtaaccaatcttctttctttgttggattgacatttgagggtagtgaattctcaactgacaagtcattaccttgtttagacaacatcttatagcctaaggaggttcgatcaccataaggcttcttgagctgtagggtttgattaatagttgttgtgcctgggggaatgaattgcagagcttgcttggttctatgcagattagcagtgagtttatagatctcattctccttttcatcaagaagtcaattgaggttttgaccgtgtcctctaactttcctttttcagtctccacttgctctagggagctttttagaccacggatctgcttagtcatgtactcccattgcgcaaacatttcttcatatgcattttgtcgacctacgctataagcttctgatgaagtggagattgcatcatcttgagactcaactgggtgacagctttgggccatgaaagccagtacatgcttatcctcatccgagccttcactggcagtggagttcttttcttcttcactatcactccaagttgctgcaagggccttcttctttttgagtgtgttagcgcactcagcctcgatgtgccatatccgttacactctctgcacttaattcctcgattcttttgatcagtagaaggttgtccttgtttaaagtttccacctttgtttttcttgagagtattttctttattagctgggaaatttcttttgtagttcttttcaaaaattttgcatagtttctcgttaacaaggcaacagtttcgccagtaatgccattcaattcctctaaaaccggtttcttgttttcttgatgaataagtgcaatacttgcatcagatttttccttcactacatccttctgtttcttggatttcttccacctggacagtgaaagctcataattttgcaaggacccaatgagctcatcaagatcaagttcctcaatgtttctcatttcttcaattgaggtaactttggacatg

SEQ ID NO: 150723 - DNA, 705 bp, Cannabis sativa
aatactttccagaatacctgtatacaatattttaaaccaattccaagcagcaaaacaccacaattcacacaatttctcaaatcaccattagagctctatcttgagctctttaactaaatcttcaattcaacttcaaaataactaactaactaagctctaaatactcaaaaccatcactacctagctccagaaaagagaacaaatcaaaagcacactcacagcccccttaaaacccaagactaccaacataacctaaaataaaattaaagaatagcaaaggaagcaagcaagaagggttaccttgaattagagcttcaattacaacatcaactaggtgaattgaacaagaaaaaaaatcccagcttagtgctggttcctacctaatcgagagagaaaggggaaagagagaagtgatctttttctaggtttttctttttacacaaagaacaaattgaccttgactttctcttcttttcttcttaaaagaaaagcttaaattcagatttaaataaaaccaaataagacaaaaaaccttcctttggcaatttactaatttgccctttttctcaaactaaaggttaaatactactaagggcattttggacattacccatcccgaccaattaacaacacctctaatacctaacaataataccccgataataaactaaattataaaatgcaactctctaggcccaacgtcgc

SEQ ID NO: 150724 - DNA, 716 bp, Cannabis sativa
  modified_base (46)..(51): a, c, t, g, unknown or other
ttaaccctaactcattctttcactggattcataatattctagggtnnnnnncctagaccgcattaaaattaactcaaggcactagcttaccgagtctagcttaattattcgttaagcacataatcataatctcaatatatacatatatccaagatggcatagtatttacacaatatatatcactagggtaataaccctaggctattaaaccgcccatgttatggtaataaccctaatcccggttactattactcacatatatcacttccaatatataagtgccactgcgcatactctatgtgctaactactgtcttacctgttgtcccgcaatagtagagattccaaatctctgggtgctcctgatcaggtgccgataatcctagtcacacaaatccgggattttcacaaatagggttaacccttgatttcactttcataaagtactcacatggcatttaaaatttagatattcagatagagctcgaaaagagatttccaacggtatatagaactcccacatcgtagtccggatcacaaagttatggccatttgaagttgcaaaaaggatctgcccagaaagaaatgagcgtgccggggcatgctaaataccacgccgcggcatctgggttcaaaacccagaaaaacagcagcaagaacacgatttcagcaagaaaaatccaatcttttcaccccaattcacaaccaaaactccca

SEQ ID NO: 150725 - DNA, 655 bp, Cannabis sativa
taaaatttagacatggagtttgaaggttagagttaaagaaaataaaagagaaaagaaagaaatagcaaacaactatagaggaggagttttccaaaagggtggatgttgaatcttttttgttcttctcctctttcctccttcttcttcttcttctttcactcctttttctgtagaaaaatggcagaaaatttttgctcccaacgtgttgtcccctttttttttctctaaatggaggctcccttcttttgaaaatctccctaggtttagtaccatttgccccaaataaaccctacacgtggcatgcatctagcctctccatgtaatagctcaagccaccactcctagaatgccatgccatctccacaaatgccacctcttttaatgaaatgccagctcatcctttttccaagaaaataaaacaaatcagctactaacctgtttgctgcagcaaaaacttcacagaattgcaacaaaattaagaacatgactaacttgctattttctttgccaatttatacacaaaagtcattgatttctattaacagcttcaaattacacatataaacataaaacactgaaactttcacaaattaaaagacaaaataattacaatgacacacaattacataaaaaaaaacatgtttaaagtgatatc

SEQ ID NO: 150726 - DNA, 559 bp, Cannabis sativa
  modified_base (26)..(36): a, c, t, g, unknown or other
  modified_base (160)..(163): a, c, t, g, unknown or other
tgtgttgaaaattaatttattaattnnnnnnnnnnnaacataaattagaataatttttcgcgatttattttattttatttttaagctttttcaaaaaatttatttattttaattacattggtttttttttcgaattctgcaatatatatttatagaaaannnnatttgagttgaaaattaatttataattaattttaaatcaacttaaattgaataatttttgtaatatttattgaaaattattactaagatggaaaataatcttaattattttcagatcaatctaaatataattttatagatattaaattaaaatttatatcaagaattttttctaaattggtaattttagttaaataacgagctttatgataaggatattcgatcaatattgttggttctacatagttcttgttttagtgagtaatcatccttaatggatgaacgttcattagcaatttaactccataaaatctcgaaaaataagtattatttgtaagtgttttattcttagtattgatcaccctaatggtggcgactattagtaagacttacaaaa

SEQ ID NO: 150727 - DNA, 515 bp, Cannabis sativa
tgtaggatcaccagtcgacgccacagatggaacaaccatagcaacaggggttacggtaatgggggtgatattctccatgatagagagggaaaaaaactttgaatgatgcagagcttagggtttctgaggggaaagtgaagaagtgagactgatcactttccgtatgccttaagtataggcaccctgacacaactgaccaggcaaaaaaaaaatgatgatgatttttttaaaatttgatttttgccaaggaaaacgtacgcacccaaattgaatatttgctaccacatcatacgacacactaaacgaaacaaaccaacgtcatcaggtaatgagtgtatcaaagagacaagaaatgtgacaaatatacccacaatatttgcatttagcccacacttagacacaacagaaaaaaaataaaaaacttagagatactcaaattttttaaaaaaattgtatcaactgatcaatgaatagtgtttttgagtacacacgacatgcacaccttaagcaacaga

SEQ ID NO: 150728 - DNA, 1232 bp, Cannabis sativa
  modified_base (45)..(46): a, c, t, g, unknown or other
gttgcagcgctagttgcagtagaagtttctatgtagaattttgtnnaaatacaaaaaaaaaaattattttaaagtgtaaaagtgaaaaagccccataatattatatgtaactaattaaaataattttatcttaaaaattaaatagttaaatattaataattatacaattcataattgtcataattaataaaaataataatttcacaaattactattttgttcttaaaaatttattttccatagaaattaattctcacccgaaatttacttatcaaataaccatgtacagtattttatagaggtgactctgggatcatggacctatattttaaagctccaataaacacttgattattatcaatctcgtcaacagaataagtcggtttattaattttattattactccactatatatatgaaattgcactctttgacaatatagaattatatttacataattcttacttgtagtttattgatataatcaataagcagttctccctccaattattaattcataattagagttggtcaagttatcgttttatccttctaattatctcttgactccttatgtaccattaattcaatgttaacagttaatctataacttattattgatttagatccaactgttagcactcctagagataacactacaagagaactaatattcgatccgttagaaaagcttagattccactattgtatagcatgttcctagccaatcatgttattaagctcccaaaataaaacttgtaagaatcatcttctctaagaaactttaacgaatgaattaaagaacttaatgaacacaaacaagaattcatgtattatcaggattcaagctaatctactattaatcataattgtgatatgaataattatttcatggtaaatgacacattaatgaaacatgtttattatatatcagcccagccatgcataatcgaattatacacaacacatttactatatgtctatctacatatgtgattcaaattaaaatcacacacactagaagtatagtgagtagtttcatattaaagattttcaatactttaatatattaccgacttgtttcatatcgtataatcttaattctcttgtacattcttacaagactgtaccttgtcaatatgaataaggaattttaagatatttaataattatactattataattattgtatcatttatcttataattttatttcatatattctctaataag

SEQ ID NO: 150729 - DNA, 1042 bp, Cannabis sativa
tcatccttagacggatgggcaatccgagaggactattcagatcttagaagacatgctacaggcatgtgtgcttgactttgaaggatcatgggtgaagtatttacccctgattgagttctcttataacaacagctatcaggaaacaatcgggatggccccttatgagcttttgtatggaagaaaatgtagatcacctgttcactgggatgaagtaggtgaaagaaagttcttgggtcccgaggctgttcagagaacgagtgaagcagatgacaatatcagagcgcgaatgctcgcggctcagagtagatagaagagttatgctgatccaaagcgtcgggatatagatttttagattggggacatggtatttctctaaatatctccgatgaatggcataaaacgctttggtaagaaaggaaatcttagcccgaggttcattggaccttttaaaatcattgaaaggatagggcaagtagcgtacatgttggctatgcccccagcgttggcagctgtacatgatgtgttccatgtttcagtgcttcgaaagtatgtctcagactcgtcccatattctgagttatgaagcattggaacttcagccagatttatcttatgaggaacaaccggtacaaatacttgatagaatagagaaagtcttgagaaacaagacgattgcactcataaaagtattatcgaggaatagtaaggtggaagaagcaacctaggaacttgagacggatatgcagcagaaatatccagggttgttcatgtaaatttcgaaacgaaatttctataaggaggcggtaattgtaatactcttgaattatgagattggattagcaaaaccctaactagataattttggataattgaggaaattatatcattatataatttaatatatgagaatttatatgatttatgctataccatttgtgagcaaagggcattttagtaattttgacccaagaatggtaaaacagtgaaatttatttattaacgtgcttatgggactatattattatatagtattcctgtgttgt

SEQ ID NO: 150730 - DNA, 535 bp, Cannabis sativa
gagagagagagagttcagacttagtgacttaaagcttaaggtcttagggtttggttaaggctctttatataagagagcttaaatccttttatccagaaaaatatgcaaatatttacttattaaattagtaaaatacaaatgactaaaatgccccttaaaaatagatattttccctctatttttgttggccgttaaggtccaatttgtagtctagcttgctgaccacgcatgaagctgtacgctaaagtcctgccaagctaatgtttagccggccattcatttgaatgatgcaggctggccagccttgtgttgcccagaagctggtcggcctatgctagccatagggccagccagggggtgtccagccagacccctcaaggtggccaattttttgtcccttcgtcccacttaagtattctgaacttcccatcaagtgatacgttgtgtaccatgacttggccttcttgttgataaattgtactccacatggcattgatcttgcccatgtggacatgctgttggaaattattttacc

SEQ ID NO: 150731 - DNA, 557 bp, Cannabis sativa
  modified_base (45)..(54): a, c, t, g, unknown or other
tttctgtatctgttcatgttaaaattgtcttaaagttggttatannnnnnnnnnaaattgttgaaaattgagctcagggtcctctttgtacaattttggaaaagatagggtctattttatcatttaacaaatgagagggtctaattggtaacttttataaaacatatggtccaaaatagtatttaccctaaaaaataactagaaaaataatatcatgacaactattgtaataccctaagattaagaaatggattagcaaaccctaactagttaattgtgtattattatagaattatattattatgtaatttattatatgtgaattaatataatttatgacatgttaagatcccgttggtgagctagaggcattttagtaattttaacacgagaagggtaaaattgtagattaaatttaattacgtgcttatgaactatattattatatagtatgcctgtttgatcttttttttttgttctgacaagtcggtgcggtatagtcacaaccgggtatttcggaccgaaccggattcggggccgaaatataattttgggat

SEQ ID NO: 150732 - DNA, 568 bp, Cannabis sativa
tatataaatccctactataatcattttaccatttaaaccatttaattataatatttacaatttttttacaaaaattaaacttatttttatataaattaaaattctgcctttataattaatttttttacaattagatgatgaggcctcaaaccttacgaggataaacaacatgcctaaccattgagctacccctcttatatctcactcttgaaccagccatcattctaagacttgctgagtcaagctgatacacccttgtcttaaaccaatattaaagaacagtactaacaaatattactctttagtatagaagtttattagtgtaagaacatatttggttattggtgtgaagagtagcgacttgttaaatagaactattggctcacttaaccaattaatgaagaatatatgaatttcttattctctctagactctctcatttctatcaattcatatgtctcttctatcttcttagacaagctaaaacaataattttgatttgatcatcaaatgagagttcccacaattccctgtaatgaagaacccttcattgaaagcatacaaaatg

SEQ ID NO: 150733 - DNA, 568 bp, Cannabis sativa
taattgtctaaccatatctattttaaatttagtttattttgttattttaattttattaaactataagattagaaaatgatattaaaattatctaattggttatttcaaatcatttatttattagacatttaatttaatttgataaaattattcaaataaccctagatatttaaaattagtttgaactttaaattttgaaaagatatttaaggttgtttcaacaatcctaaatttacaaaatagttagttattcaaatgataatttaattacataagtaataaatatttcacttcacatattgttacatgttatgtttgttttatttaaattgtttattcaaaaaaactttttttttaacaaatctattattaatttgatctaaatttctatgattaacttgttgacagatccaatggtctgattttaatcatagtccaatttgtcaatagatcatataaataatttgaaacagaaaaattttgtaatttctttcatatgtgataaacttagaaacatgataggacacatccaaatcagtgtgcttgtgtgagcatatatgtttgcttt

SEQ ID NO: 150734 - DNA, 508 bp, Cannabis sativa
attatacgaaaaactatttgtgtgttcttttttattaaaagaaaaaaaatattttgtatttttatattaaaaaacaatatgtatattctttgtaagtgtatctcttattcatgtggtatttaatacacatagataggaaatgaaagagtaaaatgtagtatgtgccactaattatatataaaatttaaacaagatagcagtaaatgtctccttggtgtttatgcatctccactcttatacattcgcttgaccacatcaatttcttctcttaagttttaataagatatattgcttaattaagtttaaattgtacataaaactatacaaattaataataataagaagaaaaaataagaaaatgttagaaaatgaagaattgaaaagaaagcccatatgtcacgccacatcaccaaccctaataatataattatatagatatatagatagacatttaattatagttagtttttaaaaaatttcatttacccattgaaaaataatctatata

SEQ ID NO: 150735 - DNA, 630 bp, Cannabis sativa
tccttgtataatgaccaatgtattgtttgactctcagcaataaaattggttattatgataaaaaaaaatacatttaatacatatttatttttttttaaaaaaatataataattaaattaagttgtataatttttttaggatagtgatacaaagcactatttcagtaaaaattttacaaatttacgttcaaagatttttttttttttttacatttttacggtgttctataaaaataaaacgaaaactacataaaaaaaaataaaaataacatccaaacaatcacaaaaaataacaaattaataagagtacaacataaaaataacgttttttttttgtagataaaatcattaaaatgtttaaatttcgtataaccgtatttttgtaatgttgttgttatttttgtatatttatgcaataattctaaattttttaatattgcatattattatattgtaacaaaaatgaataaatatattatatatgttaaataatttgtgtcttgaacttagatctaaattcaatcaaaacaatgagaaatgttgagcaactatgtgttatatggtgatatctggttatgggagaatctatgagaaaggaggagaacagctttgtgtgagtgaaagttttatt

SEQ ID NO: 150736 - DNA, 737 bp, Cannabis sativa
  modified_base (706)..(709): a, c, t, g, unknown or other
gggactgctgcgactgcaggagctgtgattactgcggcgagatttgttgggacattaactccagtagtcgctgccggtgcattaggcgggttagtttgagtgtttacaccttgatcgcccacggggggatcacggggtgtttcctcgtcgcgaggggcgtaggagcgcgctctgaaaactgcgttgaggtgattacgcagatcgcccctatggacttggtatcgtcctccctgttgcgtctccacagaaccggaccttgtgtatctactaggtgttcgaccatgcgaggacgaagaggcgtattctgcgtcattgtctcttgaaggccggctgcgaggattgcgtcactcagggtcttcatcaacctgtgtttcctgattgggatacctcgcagattggtctctcgaggttggctgatttaggtccagaccttcaggatttgttcttcgttccctgcgaatatgattattacgacgtctagagtttgttacctgagggttatctgtgcgattagtagggcctcgaggggggtgttgggccctgttctgtccatccacctcagcctgcaacgcgcgtagttgatcctgaattgcggtgtattggtcggtggtgagttggacgattccctctgatactaccgccggggtgactggtggaaagtgcattgttgctggtggtgtggacgtttccccgacttgagggccannnntttcagggaatagattgagaggtctaat

SEQ ID NO: 150737 - DNA, 828 bp, Cannabis sativa
tacccacacttttggtataattatatagtatctaataagaattttataaaagcacacacacacacacatgtggcatccctgttggacagggcattaaattagtctccatccaagctattcgtagtcgctcgccactttgctccatctttaggaacctggtttaagattgtcattctcttttgctttctatgcctttaataaaagtatattttgttaaacgatcagcaaaccgtctagcacatgttgttgcaaggatgtcacggtacttatttggtcgtagtatttctgtgtccaatgctctagttgctattctggatattttgtactcagaatgttaatttaatgaagttgatatttcataaaaaaaaaactaaataaatagtttattttaaatatttttttgatgagtttattttttataaatttacataaagaaaataaaaaattatttgaattaacttgatttaattaataaatgttatttaaaatatttatgatatataatttgaatttcataataagtatcaactgaaaatatctaagaatttgtatctaattttaaatattctttctcatactataaatactttaaaattttgagtttagatttttattttattattttaaaattttaaattattttattcattaataataattcaaaaaaaaattataattataaataatctaaaaaaaataaaatatctaaaatagctcaaaaagaatatatttaaaactatatgttacttcattagtatctttatatattaaaagtgcctatctaacggtaatttttggtttaatagaatatacttaaaaataaaagaa

SEQ ID NO: 150738 - DNA, 634 bp, Cannabis sativa
  modified_base (389)..(392): a, c, t, g, unknown or other
tcctcaagtttaagttaagtgaacgtgaacaaaacaacaaaaccgaaaaccgatgaatgaggaatgaggaattgaggaattgcaagaggttaatgaagggagtgatgagaattgatatttttcttttttacgaaagaatgaaagcaagaaatacaattaagaacgacaaaaaaagcatctactttttgataacccaccatgagcttactttgtagttaagcacacttaaatttgggtaatctcaagatgagaaatctttcagggagtcatcccgaaaagtgtatgagtgaggacaaagtacgctaggaagattcatattaggatgcaaaatcaataatcattccatagatttctaagaagaaagaatgtgttaacaagtaaagatttannnngtatcaagatgagttcatgttagttggtggaaaataagaaatgctctaattgaatatctatcagaaacaaatacttaacttgttactaagttaagtcagtagatcagcttaggagatgtcatagaaggaatagaaagacaaaattacgaattatgtactatgtgatcttatgattttgactgagtagtaacggttggacatactgagttaatatgttgtctattagtgtagacaatttatac

SEQ ID NO: 150739 - DNA, 648 bp, Cannabis sativa
aaaatatgtctatttaaatattatttattttctgggatattacacttgtcgtggccaaggctaaaaaggaagtatcccttagccagagcatagacaaggaaaaaaaatttctaagtagggaacttcctaaggcggggatgaagatgtggatcctcgacttggggacctaagcagcaatgttggacctgtggaagaactagaagagatcgagatcgatccagatatcccgaccaaaaaggtaaaaatcggaaaaggtctgttgctcgaagtaaaattagcattgataaaatttctaagagcaaacctggacgttttttcctggtcacatgaggtcggaattgacccttctgtaattttgcacgtcctaaatattgatcccaacttccgaccagttcaacaaaagcgaaggttgttggacaaggagcgagcactagccctgaaggaagaggtagagaagctacgaaataataacttcataattgaagctttctacctggcttggttgttaatcccatactggtaccgaagccgaacaaaaaataatgaatttgtattgattacacaaacctcaataaggcatgccccaaggaatgttttccacttccaagaatcgatcagcttgtggacgcaacagccgggcacgaaata

SEQ ID NO: 150740 - DNA, 638 bp, Cannabis sativa
  modified_base (562)..(564): a, c, t, g, unknown or other
ttttgacatgattttttagtcttttccttttagttttttctggttcgaatcttgtcttttgacataggttgtgtagctcagaatcatcatagtgctatggtggtaacattcaaaaaggtgaagattggatgtgttcaacttgaaattcactacaagaaatgtcacttttaccagcacagttcgctactgcactagtaaaagtaactttaacagcgcatttcgcaaactgcactggcaaagaagtcaaagttttactagcgtacatttacagtggctaaaatctaacttttaccagcgcatttacgtgctgggaaaagtcatctttgccagcactttttattttatgttggcaaaagttctaataccaatattgatttgtcaaccttcttttaccaacacagcacaagtaaattctattttactagcgcaatactaacttttgccagcacaaaaatatgctggcaaaagtgacatttcttgtagtgattgctgagataataggcattaaagaagcattgagttggaatccaacttatttgtgggatagagtcatgttggaaannnatagcttggtgtgtgtccaagcgattcagagcgatattttatgccttcatagtttgtgttttgtaaaacgatct

SEQ ID NO: 150741 - DNA, 505 bp, Cannabis sativa
  modified_base (28)..(33): a, c, t, g, unknown or other
attgcataaaatacaattcaatataatnnnnnncaatacaatacgacctaatacggcgttccaaacgagcccaaatgggtataaataatataacaaaaaatattggcggcaatattatttcaactaaatttaaaatttttaacccccaataaattaatttttggtattaaatttttttaaattgactattttagtatttatttttttgtccaaaagatactgttaagtgccaaatatgatagcggccatgtataaaaatgtacatgtcatgttcatattagcttacataattttaattattttaatattaaataaataattttaagatatgaaaaataattaaaaataataaataaaatttaacaatattttttttttcttttttatcttattctctttcttttacttttttttttctaaccctaatttccaacagcactccctttctggctctctcttctgtttttctctctctctctctttttgtctctctctctctctctct

SEQ ID NO: 150742 - DNA, 560 bp, Cannabis sativa
atacggtaatgatggagagtattttataattgactggatagtcaatatggtatatatataaggagaccattgaaattctaagaaagtattactttatttagcaattatggaaaggcatgctcacctagaatgggggaaagcttaggaattaagatgcaatttattgaacctgtaattgagtgattggtgaatcttggatcacaaagtaggttttttattaaacaacgagctatataattgagtctaaaataagttttaaagtggttaaccaagtttggagatagtgatgattgcaaggaagaaatggtagcatatgaactagggagtgaaaccttagtggtgatgattgaaaaagaacacgagagtctctgatgttgatgaatcatcatcatcatcaatgggagactcactataagttggtatggtaattcgtaccaaggggttatcaataaaacaaagaatatagttgtggtatatatatatttttggatgtgtttgaatagattatcaagatttctgttacgaaaattatgaacaatacgcaagtgcacgtaatcaag

SEQ ID NO: 150743 - DNA, 1015 bp, Cannabis sativa
gaaactttctgaatgaggtaatggaagatagaatttttaaccctaccaacacaatgaggaactccaagatatttactaatgaaaccttcaccattgaggagcaaagaggtctgaaacctggattgggaatcagggcaggtatttggggagaagagaatggaagatttttccctgttgacagattggcctgaagcttggaaatacagaagcaaaatattatttatagctattgatgattgagaggaaacaggcacaaataacatactgtcatcagcaaaaaggagatgggaaaacgagggagcccctcgacaaattttaatgccagagaacagggcagcatcctcatggagacggatggctgcagaaaaaccttcagctacaatgaggaagagatacggtgataggagatcaccttgacgaatgcctcgggaggaggaaaacacatttgataaattaccattgagagataattggtaggtaactgtggaaagatatttggagataagggagataaaactcggaggagccccaatatgatgaagaaaatgagagatgaaagaccattccactctatcaaaagctttttccatatccagtttgatagcagcccaacctaatttgccagattttctagaatgaatggcatgaatgatttcattggcaataacagtattatcagtaatttgacggccagtgagaaaagcactttggttggggcttataacagagtgaagaaccgttttgagccaattagccaggacttttgaaaggcatttatacagggtattgcaaagactaattggccaaaaatctcgaacagttttagagttcttctttttgggaataaggaccaaaatagtgttattgattggagtgatgtccccttgattgttaaggatttggaggagaccctgacagagatcagatccaagaatatcccaatttttctgataaaagtaggaatttaaaccatcaggaccaggagatttgtctccagagagactgaacatggctg

SEQ ID NO: 150744 - DNA, 770 bp, Cannabis sativa
tcatatataatttaatattgtttaattagaatttttttaatataaagtgattaattgaaaaaaaaaatatataataaatagaagtatatgataagtataagccttgacttattttttttaataaaaaatgttttttttgaagtgtttgaatattattagaaaaattataagtaaattaagaattatataaattattttagttataaaaatagcttctcaaaaattctttcgggacttttaattttttatccaaacactcttagaatgacttttttaattttaaaagttaaaaaattacttctaaacttgatcaaatgttatcatcaaacacaatatctaattatgtacatatatacatgatcacttgaatccaccaagaacttttcaagggattaggtgggtggaagtgggtataagtttctaactaatgaaaattaaactctctatcatcaatagtttaggcaccaaagttcacatttttcctagagaatgaaaaactataatcaatgtcaaacaaaaaaatttgtatgagtattttatacacattatgaaaaatatacatactattatgaaaatagaaaactacaaaagagtaccaataaaattgtcattaacgagagaatatatatatataaagagtgttaattatttttttttaatactattttcctaaatcgtattattttcctaaatcgtatttgcttccatatcattcttttagtatgatatatgatttgattaaatctatgtttcatcgtttttacaaataa

SEQ ID NO: 150745 - DNA, 1040 bp, Cannabis sativa
ttgagtctccaatatcggcatccattgctatgggtcatttgatccaaacatgaacaatgaggaaatcaatacttatccaatagaaagaccatgtggtgtggaaaaagtaaaaaaaaataaaataattaggtaatgatcaattcaacaaactaatggaacaaaataaaaaactcattcaagttattgagaagagtaacaaggataaaattgaacgtcacataagaaaggctgaccaaatttttttattcacggatttgaattctatatccgatctagagtttcgtcagtacattcaaagcgaaaaaagacaaatttacaatgaaagagcacaaacatccgaagttggagaacaatgagaatgatctcaatatgagggatctcaatatcaagaatatccatatgagggatctcaatatcagggatcacaatatgagggatcataatatcgagcatctcaatattcaggacatgacattgaagatgaaggccaacgatctcaagatcaaggtgaaagagctgaaaatgactcataagtttatagtccatattatgactatcttagcggattaggaaatagtcttcattattgaattattgtatctcattttatctttgaaggttcatatcaatgttattacttttccgtttaatgtgtttggtgtgtttaattttaatttttatgctcaagtttgtaatatttttattatgtactattaattgtgctttaattttataatgtttggttgtgcaatataaagtatgtgtactcttgattaataagaatatgatgtctagtgtgtctaattttaattttaatatgtggtttgtggttaaatttgtattatttttgtgtgtaatttttttaaaaaataaaaaaatataataaatttttacttaaatcataattaaaaataaaaatatttatggttttcacatttaaatttacacaaaaaatattataaggtgtttttacaatgcaaccctctaaataaaagagacgcgataaaaagtttaaattttattttcggtgtgttaaattt

SEQ ID NO: 150746 - DNA, 897 bp, Cannabis sativa
ctgcggagaaacttttgatgataccatggctcgtacgaaaattggtaaaggattggttgtcaaactgtttgtcgttgtctgagactatcttgtacggcaatctgaaccgggaaattattgtttttcacaatgaagtcctgcacttttttggacgtgatggttgctaacggctcagcttctgtccatttggtgaagtaatcaaccgtgaccactgcatactacactccacctttgcccttgggcaattgtccgatcaggccgattccccaaatggcgaagggccaaggactttgcatctgagtaaactcgttgggcggtgctcaaggtatcttcgaaaatctttggcatttatcacattttttaacataggccttggaatcttcaatcattctcggccagaaataaccttgtcttagaattttcatagataaactctgctcagtagcgtggttgccgcaaaattcattatgtacttcagacaaaattcgtgtagcttcatcttgtgtaacacatctaagcaatggcatggagaatcctcgtctatacataactccctctagtatgatgtaccatgcagccttccttctcatttttcgagcttcatttctattatctgggagttccccattgtttaggtaggttgctattggcgtcatccagttcggggatgtatcaatcatttcaatctcttccatgccagtgatgctaggttcttcgagaaactgaataagaatcagatttgctttatcatttacattgctgctcgcaagtcgagctaatgcatcagcagtcgtgttttattcccttggcatttgcctgagagcatagcttttgaactgtgcgagcagatcgtgtattttgctcagatatactatcatcttttccccctcgagcctc

SEQ ID NO: 150747 - DNA, 513 bp, Cannabis sativa
tgagcatactgcttggctccagcatcatcctttaacttagcctcacacttaagttgaataagctccttctcttgctcaacaccctcagtcctggccagacctagacttcttcttcctctccttcataggctggggtataaagtctgtcggataaagcttgtacttcacaaagttgtcctctgaggtcaacaaagtgatatttcgagcagcatctggcaacaagagaattttctgagcctcgtccctaagttccaatgtgaaggacggacgacaatatacaaggatctattgaaaactgagtataggtggttcccatgctttccacgaagtaatactcatcaacaaaacccccaatcttgctaacctctatatccacggtgcccgtcatccacttgcagtccagctgagggaagtagaagtaccccgacctgctctgcttaggggtagacttcaaatcaaaatgccaattgatgtcgtgtggggacggcgcaccccatccttgaatggcgtaga

SEQ ID NO: 150748 - DNA, 557 bp, Cannabis sativa
  modified_base (429)..(460): a, c, t, g, unknown or other
  modified_base (526)..(527): a, c, t, g, unknown or other
ttggtcgctctgataccatgttgtaacgccctgaccctcagggacgccacgtgtgtgtgcttctacgaacttattcctagctattctattagtttatgaaaagtggggcttaatcaaaaactttttgattcaatcgaaataaaacttctgtatgaaataccattaaaatatagggatcccctgtttataaaatttctttataacaagttacaaaatcgttaatacaaaaaaaaaaagttacactttcacacataaaagaaaagaggttgatcctgcttctcagaagcgaagacaccacagctgatatgtacactgctgggagacttctgattcatggccgaacatagctttatgttaggttttatgcaataaataaaactctatttcaatgtaatacagattactcaatatcaataaagaaacagaagnnnnnnnnnnnnnnnnnnnnnnnnnnnnnnnnaccttatcaattatttgtctattttatttatcaatttatccaacccctttcacatacttgatcatnnttattgtgctgtcaacacagtggaaagtaa

SEQ ID NO: 150749 - DNA, 752 bp, Cannabis sativa
tttactattttaattatttatttaataaaaatatgataaattattttattatatatttatgatatatatttaattatgtatgatatattattttattttataatttaattatttttttcgctagggagattattcagttttatttaagaaaaaactggtatgaaataattttgagttttaaaatatggtccacacctataagattaaagcccacacgtgataatagggtgacatataaaagtgatattatttgttttgattattttattgaatatattaattaaaataaattacttatttaattatttaattaaatcttttatacgataagatatataagattaaaatgatgaaataaaataaaaataaattgaatatacgatgcaattttacacattttttacaattactatcaaaatattattaggattcattattttgggtatattttttttgaaaaaaaaaaactacttgtttggtctttagtatatacatattataattaatatatttatatatatatatataaaaaaaaagatattgataaaaaggggaggaatcaccccatatgccatttttaaacttttttttaatattttttttttctatttttacgattttttttatgtttatgatttgggttgctgcatgggttgcgatgtggatggcaatttgaattgggttacaatttaggttactctgttagttgatccgtgagttgcactatatattctgtaaaaatacaaaaaaaa

SEQ ID NO: 150750 - DNA, 640 bp, Cannabis sativa
tcatgattatatttaatatataaattctattaagtccagaatatatataaatatatatttgttcatgattatagtgtcgtcagcactataatcattcattaataggaattaagaattaagataattgactgcttcaactttatctgtgggattaatagtttaattggaaatttaaattacattcattaataggaattaagaatgattgtcaagggtggagaataatctttaacagtttcttatatcgtagtctcaattataatttgtttttattttctttttatgctatttagttacaactcaaaacccccctttaatatctgtttgatagtgaataataaattaatcatagtcctcgtgggatcgactcgtacttgcttttataatgaaataattgaaagtattggaattaaaaaaatagtaaatttgatacggcatacgacacacatcaatgttctctatgtatgggctgaattggtgaaagtggtaaaagccttcttctttgcaagttggacttatttcaagtcacaaaggaagtttatttcatgaggagttggaataggctagtttctcaaacggtaaaagataaagatggtagcaagtatctgttgggttttgtgccctaaataaaacccattac

SEQ ID NO: 150751 - DNA, 581 bp, Cannabis sativa
aggctttatagatttatatgatttagggttttctatattaaaacactttaggaatatgtttagatttgtgatttatatatttctttaatggtttaactttctattccactaacatagctttaattttacaaagaaaacagtatggaatatcttgttggagatttttccctttcaagaaagtagatagtaagtatatgtataccacattgtgtaaacatagcaatacttttacttgtaatgataaaagtaacatcaatatacctctatactgattggagatgagcacgcaaataccagttatagattgggattgatgagtaattataatcaacgaaatagacttaattaggccacaaagtgaatattagattattgtaagaagtgaatgaaatcacattggttattagtagattttcacaagctcaaaggctgtataaacgtaagaatatagagtattagagacattagttattaaacctggtttagtttagtcaatattggagaatattgtcccacgtggattaaatgtaaaagtattgagccatatataaaaacatgggctactccactcattgctaatt

SEQ ID NO: 150752 - DNA, 1786 bp, Cannabis sativa
tttatgagatcgaaaaagtgaattatttttttaagatagttttttaaaaaagctgcacacaacagccattacagcttattttatgttcactgttagtggtagaaaaagaaaaatgtttgcttctctaaatgtgtatattcggcctgaggagttttctagttcattgttgttatacccgaaatttagctagaggacaggtgtcaaggtaaagggaatgtgaatcggtaccatataattttatggaataactcattaattgcgtaagtatcagagtatattgtaacccgctgactataaggtgttaggtgaggaatcaatgtacgagctggtacttagtgcataacgagaaaccatatatcgctaaaggagaatagtgaggcaccagagaaaagtaaaacagaccctagctggcaataagcaaactaagtgtaaaaatcgaatcggctcgaagaacaagaatatgagatgaccatctcgctacgaggaagctccctatagttccatccaactaacaggagcgaggctcataaccctagcaagttagaagattcccatatacccgcaatcgccataaaacatatcaagttgacctcgaaataaagatgattccagctcgccattgggatcactacaatcaagtttatgtcgagacatctccagattcaacaattaaagacctatttaatacacgatatttctgacccagtaatcagagctaaatgttttcaaaatcatacaccgcatttacatttcataatatgtaatcagatcccacgatttaagggataattgctgtaattatattttggtcatccaaataattaactaccactatgcaattataaatagtggcaaacaatatcaaaaaagggacaaaaaaaactcttacgcaagaggccttgaaaaaatactcagaaatctgaataagattaactcgtggactatgcagaattttaactgcaaaaccacgtaaaaactctggtgttgatattttgtttttctataacttttatatttcttgtgctaaatcataatcctgaggcccaaatttggttaacaaaaatctacgttaacagtttggtgctttcattgagaacctctgtgaaaaagctcaaaaaaagccttcccttctgtttaaagaaaaaccttctcctttatggctgtaaatccagagactattaacaccccacatgaggaaactaaccattgttcccaaaaaaagcccatgggctctagaagatctaccaatctgcagtcttgaaggaccacacgttcccgaagaactcaacccgacgttggtcctagtacgcgaacaacgcgctcaaggagaactcagcgtgggaatggtcagaatcccaggactagggacgaagagctcaaccatggaggtgcccaatctgtgagagaaagaacttatgaaatggaaagctgccccctaagacgctatcttgaagaggtgtagcgtcgaaacgctgagttagaacgagaggtagcctcagcctagacgacgcaggggacgaacgctcaaaattaacctgaacctggagtgagaagaccacgaggcggacgtcgtggctcacaaaccatgataccgaaaaaggcacgggaagaacaacctacggaaaatgagacaccccctgagaatcaggatgaacagccagaaaggagacaactgaaaactgatgaacgagagatccctcatgaaaatgagaaggatcttggaactcagtcggatctagatttactaccatgtatgtttcattaaaatcctaatatgaattctaaa

SEQ ID NO: 150753 - DNA, 512 bp, Cannabis sativa
cagtacacacactcaccacgagtgtgctgtgtgttcgattcgagattggttggtatggtgtgatactttattttttctagaaatttatttaataaaataattattttaattatttaatttagttgagaaacttgtttagttcaaactgattacttattttattaatctatataatgcaattgaatcaacaggagaaacacatcttttcatatcgagaaaaaaaaaactctatttttattacaaaaaaaaatcatctacgatatctgttttcagggtgtattcgatggttcgctaatttccttaaatagatatcgcatatagaattttttggtagtgaaaactgaattatttttctcatcatgaaaagatgtgcactttattattttctagaaatttatttaataaaatcattatttttgctatttaatttatttgagaaacttgtttaattaaaactaattacttattctattaatctatataatgcgattgaatcaacaggagaaacacat

SEQ ID NO: 150754 - DNA, 544 bp, Cannabis sativa
  modified_base (45)..(59): a, c, t, g, unknown or other
  modified_base (292)..(294): a, c, t, g, unknown or other
tgtttttcacaatgaagtcctgcacttttttggacgtgatggttnnnnnnnnnnnnnnntctgtccacttggtaaagtaatcaactacaaccactacgtactccactctgcctttgcctttgggaaattgtttgattaggtcgattccccaaatcgcaaaaggccagggactttgcatttgagtcagtttgttgggcggtgcctgaggtatctttgaaaatctttggcattcatcacatttattaacgtaggccttgaaatcttcaatcattgtcggccagaaataaccttnnnttagaattttcttggataaactctacccgattgcttgtgttacacacctaagtaatggcatggagaatcctcttctatacataactccctctaccatgatgtaccgcgcagcctttctcctcattttccgtgcttcgtttctattgtttgggagttctccagtgttgaggtaggctgctattggcgtcatccagtttggggatgtatcaatcatttcaacctcttatgtgccggtgatactaggtttttt

SEQ ID NO: 150755 - DNA, 1038 bp, Cannabis sativa
aatggagtgctctccagttttggagacctttaccatggtagaagggcataggtcacccctcgcgaaccatggagggaaatgtgtttgaaaggattcccctaacatcaaggagcacggggcaagtgaggaaattcattttcgacctacgagtcgctttaggtgacctgtgccataaggaaatggcagtgctctccagttttgtagacctctgccatggtagaatggcaggtcactcctacaaactatgggaggaaaattgtcggagtgggttctcacgacatcaaggagtaagaaacaagtgaggaaagtcattttcggcttaggagtcgccttgggtgacctagtgccataagagaatggcaatgctgtccaaattggagacaaatgccatagtgaaatggcacaggtcggttaccacatcaggaagaggaatttattgaccaaattatattttcaacatccatgtaccaaatataagtgagagacacctgggtgacctgtgccatcatttggccccaactggtggcagtggtcaccttttaaggtctcagacgtcgaaatgaggttttttagtcacgagacctccaaaatatgattttccaataaaaaaattcaaaacactacctaaggggtcagagaacatgcatttccaacctctgccatttggtcatggcagtgctcgcaatttgtacaagatagaataaacttccttcagtaaaataggcataactctctcaatttttatccaaatgatatggttcaacttgcgttgaaaagataattttgatacggaccaaagtgtgtctcacaggtatgactcaattttgaagatatcgggtccaaaattagcttgcaaggaaatctaatgcattttactcgagaatgggaaaatgcggctaagcgagggttggtggagcacaccgccacagcctatgtggcatcgtgtgctagcatcggcagtccaaaacacatgtgttcagcactccatttcaaattggtgcatcctcaaccgaaaataaccaattgtccaatatttgt

SEQ ID NO: 150756 - DNA, 521 bp, Cannabis sativa
aagaaaagaagaagaaaaaaaagcatcgatttaaagaagaaggaaaaaaaacatgatggtaggcacatgaagtggaagttctcaatattttacaagtttctttgggataaaaatatggataattgtgggtgtttgtttgttatattttgcttatggtataacaaagcctaaatgaccttttacctacctttcacctaagccatgatgtttcaaccaagaaagatcttttgattccgagcaggggttgtcaacattaggggagagaggtaggtcatgcaagcatattgaacatcggttggcggaacgtgggtaagagtagaatgagtgtgatatgtttttccaattgaagtgttttgcatccatacataattttctctaacttatgcatccaagttaattcctatagtagttaaattgaaattctggtttggccaattgattgaagttgcacaagtggcagtgggagtttaattttttggaggctcagttatccgtcatgttgtttttgctttgtcttagtt

SEQ ID NO: 150757 - DNA, 713 bp, Cannabis sativa
aagaaggttacatcaaaagcgatagaaccaaacacattcctcctaaatttttctcatttgcacaaaaacttgagaaaagaaatgatctaaatatacaatacatcagatctaatgagaatctattagatcttttcacaaagtcatttcctactacaatcttaaaataattgagacatggtattggaatgcgtcatctacaaaatctatgagaagtaaccggtaatgttattgtgagggggagtttattcaactgtactgtttttccctcactatggtcttttccctattgagttttacctaataaggttttttttaacgagatagtattaattataaacaaattatagagtatattaagggggagtgctatgaatgactatatagtatagaataggtagtatactctaaatgataatactacaataatagcaataatagtcaactttgtagcagtagcaagtataatgattatgtacattatacatgcatgtattcacctatatatatgtataactttgataaagaatataaagcaaggtgaagagtagaaaagaatacaaaatttattatttatatttgtctaaatttataacaaaggtgtattgttaagaaagtaaaatgaaatttcacttaataaaatgactaattaggattttttcccccccgaattttgacatgtaccaaatcatgtcctttgaacttttttggccgtt

SEQ ID NO: 150758 - DNA, 560 bp, Cannabis sativa
tttttaacttttttctttcaattatattcttaaaaaatatacctatcaaacaaaattaaattacattttaaaaattatgacaaaaaaattaacataaaaaatcatatgaaatattaaatcataagtattaaaattaacataaaataatgtgaggaaaaaaatttaaaaatatattaagagtaatttttaaaaattattcaagtttatattttttttaataatggagtgtatttataattctgtgggatgcaaatataactacccaattatatttatagaggtgtaattataattttgtggttgtgggggtgtaaatataagtcctcaaataataatataaaagtttgaaactgaaaaccttatatgtataattatatatatacatgataaaattgtaaaaattatgaactcttaaattactattataacgttgtaaatatgagtaaaatgagaaataaattaattactaattaattactattaaaatacttataagtagattactaaattaattaagaaaattttgattttcaacactaattatttttaaaaaaaaaaaa

SEQ ID NO: 150759 - DNA, 597 bp, Cannabis sativa
tactggtttagtgccaaggtagccagtttcttgtaagagttgtagagtaaatggcctttgtgtgacagagatgcctttgttgcatcgggctatttctaggccaaggaaggaatgtaggctgcttaggtctttaagtttaaaatgagaatcaagtgtggaagtgaaatgttgcaattcttctaggctatttgttgcaacaatgatgtcatcgacatagattaacaaggcaaggaatatgcatgttttgtatctgatgagcagggaatgatcattcttagattggacgaatttttgttgtagtaatgtggtacttagtttggcgtaccattaccttgaggcctgtttaagtccatagaggcttttctttaatttacaaactgcattttttaggacagggcctttgggtgtgtaaccctgtggcaatttcatgtagacatcttcatggagatcaccatgaagaaaggcattattgatgtccatgtggtgaaggtgccaattttttagggcaacaagtgcaaataacaatttgagtgtattgaacttagctacaggagcataagtttcaaaatagtcgactccctattgcttagtgtaacc

SEQ ID NO: 150760 - DNA, 829 bp, Cannabis sativa
ctgcaaaaaatgtaatgaaaattcttctccattatattttaaaaagatggacaaaagatgcaaaatttggaggtgaattagataatgatgtgcaacatatatacaataaagatcctaattaaagtcaacatggaaaatcgttatcgagagatttgtagatttataactcatatagaaacaaaggcatctggggatgaaaaaaattaatattatgctatcagtagttttagaaatattttggaaggcttgaaaataattaaaattgggaatagtagttcaaatgaccaagtatgttcccaaaagaatgagaattaacttcctcgaagagatgaagagatcaacaatattaaaggagtgaaattaaacggaaaatttcgtgataaatctttatataagacctaaaagtgctcttgagaaagtacaatactagaagttacctacacataatgtaatttgttattttttgttttctttttattttctaagtagcatttttacaatatgtcattacataaataatttatgttttatgttcaggctaatcttattggaaataagtaatttatttttaaagaatcatttactcaagctttgccaaattcacaggaaattatttaagattgttttgtttttgtattttcacttgccattcctacttgctaagtgctaataatttctgaatgtgtatgattttgtattaaaccttatttgaattctatttattgatatgtgtagtacccaatatgactatgaacaaccccatggtgtcactgttgactgacaacaagctttctggagctaactttgtcaaatggaaagagaacattaa

SEQ ID NO: 150761 - DNA, 603 bp, Cannabis sativa
aagaaaattctaaggcaaggctacttctgggcgacgatgattgaagattcgaaagcttatgtcaagaagtgcgacaaatgcgagatattttcaaagatacgaatagctccgcccaacgagctgacacaaatgcaaagtccgtggccctttgccatctggggaattgacctaagaggacagttacctaaaagcaaaggcggagtgcagtacgcagtggtagcagtcgactactttaccaagtggactgaagccaaaccactcacaactatcacatcaaagaaagttcaagactttatagtgaagaacatcctatactggttcggactaccgtacaaaatagtttcgaacaacggcaagtagttcgacagtcaatcattcactgatttctgtacgaaccatggcatcatcaaaagcttcttcgcagtggcacatccccaaccaaacggtcaagttgaagcagtcaacaagaccttgaatgatacactaaagaagaatcttgaagatgccaaaggaaattggccagaagaactccccaaagttctatggtcataccgtacaacgaaaaaaacagcaaccggtcagacaccattcccaatggcgtac

SEQ ID NO: 150762 - DNA, 1284 bp, Cannabis sativa
  modified_base (1180)..(1184): a, c, t, g, unknown or other
gtgttcttgtaatataactaaggtcttagcaactccaaaatatcccataagccctcttccatgggattcccgaactaacaaatctcttaaagaagaattaggcacacacaacctatgctccctaaacaagaaaccctcatgcctataaaacttaccctcactggatttttcacaagcaccataaatctcctcaaaatcatggccaagaggattaagttccttaatgtgttcaaaaccaagtaatttagcatcaagagtagagattaaagcatacctgggagaaagggcaccaacaaccacattctccttaccttgtttatgccgatgacatatggaaatgtctcaatgtactcaacccattgtgcatgtctcttgttgagcttctgttgccccttcaaatgtttaaggtatttgtgatctatgtgaatcacaaattctttgggccacaaatagtgttgccatgtttctaaagctcgcaccagtgcgtacaactctttatcataggtagggtaattaagtgcagccccacatagcttttcgctaaagtatgtaaggggtctcccttcctgcataagaacaactctaatacctataccagatgcattacattcaatttcaaatgtatcagaaaaattaggtaaagcgagtactggagcgtgagtaagcttgtgtttaagcagttgaaatgcctcctcttgtgcttcaccccatttagatgcaacatcctttttgataacttctgtaatctgtgctatgatggtgctgaaatccttcacaaacctcttgtaaaaactagcaaggccatgaaaactacaaacatgacctatagttgagggggttggccactcttagatggctttgatattttcttcatcaacctcaatacctatagcactcacaacaaatcctaggaaaacaatcttatcggtgcaaaaagtgcatttactaagtttagctaaagtttcagttttcaaagaacatccaaaactgattgcaaatgtgaagcatcatcatatgcaaactcttactataaattagaatatcatcaaaataaacaacaacaaattttccaataaaagcacgcaaaacacaattcattaattgcatgaaagtgctaggtgcattagtttatccaaaaggcatgactacccattaatacaatccatgtttagttttaaannnnnttttccactcatctccttctttcatacgtatttgatgatacccactcttaagatcaatcttagaaaacacacaagaaccatgcaactcatctaacatatc

SEQ ID NO: 150763 - DNA, 503 bp, Cannabis sativa
actgggaatgaggaaactaatactaatactggctatgtacctaggaatgaggatgcttatgatcccactaggtatataccgttagttgaattggaaaatcgaaaactccggcaacgtctggccgagtccaaccaacaaaatgctgaattggaaagagaggcagatgcagccagggtgactcaaggaaacaatgcatataaccaacctgatcctagagtgagaagcccacgaggtagaccttaaggtttaagaatcaggagacaggaaacaaatcaagaaaatccctagaacacccaagaggagcaacctgaggaaactagggatgttccaaaagacgaacaaaagaataatcaagcacctcgttgaggagtacctcaaagaccccaaggatttacgaatcaggggaatgaaaataattacgtgccagaatcttctcgtagaaacgagacataaggcagcccagaactagggaacatgagatcccttgtaataacgagagaaat

SEQ ID NO: 150764 - DNA, 560 bp, Cannabis sativa
ttatttagggcataaaacccaagcttggctctttaatggtaatttttgattttgagcttggttagttgttttgttgcttggaaaatgtttgtttcggtataatatgcaggtctggaaggtttggtaaggattggattcaaattggttaggtattcgaattgtttgggttttctgttgcaaaccggttaaccggttttacaggtcctgtaaaacctgttaactggatcagtactggcttccccggatttttcgcgttgtcgattcgtgttagtttcagagttttggttggtttccctgttagtttaagatatttccatgttaactttcagtaggtaggtttttggtttaaaacctaagtccggggttgtgatttagcgtgtcacttatccatgttatgatcgatgtgaattaggagcctataattcgccgagcagttgttccactcatgttggacgatacagctgaatttggaaataagataagaatagtataatgatatgcatatgtgattacatgtttagcgtacatgttgtttatgcctgttagattacatcgatagc

SEQ ID NO: 150765 - DNA, 634 bp, Cannabis sativa
tttattttttgtagtgtgaatatgattaattagtttttataaatcaattataattattattttaaaacaaaattaaactatttattaattttgatagtttagcactgaacaaatatttctcaatttccattttcattctgcggactatatcagattattagagttattttttttttcaattaatattcataataattacagatatgtgtacccattattcatggtcaaaagacacaatattgtacgacattaattaaatttaggcatgcattttaggagaaataaattaacaaaacagtatcaagagccaaatcgtgtagaatcaaaaagctaaaaactcaatataatcattcgtactagagtgacccccgtgtccaaattaagattaagtaatttgtttatatatttgtattaagaaaatacaagtgtaataaattatttgcatcattttgtttttttttttttttttgtaatattgaaattatagctatttaagtggaacacaaaaaaaaatacacagtagctcaacagagagtacgaaagaagttttcctaaatattaatctaattttgagaattttgattcatttctaattaagcaactttaaataataataataaaaattatttatgat

SEQ ID NO: 150766 - DNA, 559 bp, Cannabis sativa
ggcaccttctaagtattagatcaataatttgacttttgcatcttcttcttcttcatcaaaaatggagatatatgtacttttggggaagaaacaacaccttttaggtgccaaaagcaaggcccaatgcccaggttgacattttgtcaatgtaggccaatttcgatgatgttttctgagaactctttcaagaatcttctctgttttaagaaaatgttaagattcaactatttctggggatcaaacggaacttccaaagggccaaaactaggacccaacacccaggttaacacttggcactaggccatttccagtcaagttcttgataaagtatcaaggcatattttccttcatcagaaataatgaagattcaagtaaactcgagcccttagaattagggcccagtgcccaggttgacttggtgttgggcccaagttgacaatcaacttggtgcgccgctttgattgctcaaatgataaatctaattcgtccaatgaatctaaaattgtcaaaaacagggtaagagaccttttcctctagttcaagaaccttagaagtatca

SEQ ID NO: 150767 - DNA, 958 bp, Cannabis sativa
ttcttatattgataactaatcaaattgtaaagagttttatttagggcataaaacccaacaggagctgcaccagggtgatttaaaaacgacaaccaacctaaccgtcgaggtgaaggagctttgcgacttcagggagcaggctcaaaagaaggcaaaaagagatgccctcctggccccagttacctgccagcactgcaataagcgcttcgacgacggtttctttatggcctggcagactaacgggcaaaaccttaagcttgacttctatcccaagcctgaggaggtccttgtccgcttctgggagaaaaagaagagacttgatgccctgctggaggagcgcaggggtcctcgccttccaccttgaattgattaagccagttgtttaccaccattatcattatcataattttcctctttcttttttttttctttttacatatttaatccttctcctctctctaagacaattggcttatttttttccttaaggggagacatttgaggcccgtccctaggcccttatcttttctaagcttttctttgggatccaaacactatatttacgtttgaatacatacttagcttttaactttgttaaatttggtttgtttacatttgtccgtgtgataagctttactaccccctgattgatatgaaaattaattttaggtcactcagttttacaaactttaatttagaggttgcacatacttgtccggtacaaatttactttacagaacataaacttttattttttcaactattggtaatactttcggaggtgatcagaattccaggccctaggcaccatggttccatccattctttttagtttgtaggtcccggagccaattttgtcctcaacttcgaacggtacttcccaatttggcccaagtacccccactccgggttcctgagtggctggaaagacccttcttaggactagatcaccaatagt

SEQ ID NO: 150768 - DNA, 590 bp, Cannabis sativa
ttttttttgaaacgatatatatttagtttcttaaatgagcgattttattaatttgggtaacttcataatataatattgtaaggaggagaagattgatgattttgttacgattttcctaaatatttgctataaatgggttaaaatattatttgtttattattttaaaactgttttaggattttgtttttatttttatttggagtagctggcagaggattacttgcaaagaaagtcgaaaacctatatattacttgtcctccaattaataaaggtaataaattttttaagggtcctccaattatagtaattattcacacacgaaatctaatggggtactgtttagggtttcagttgtaaatttagtacgaaatttaatgaggaaattacaccctataccttttttatattgtcctattttatttttacattatttttacctcttttttaaaattgtaccaattttactcttgtcacttcaagatactctttatgtgactctcttatgtgagagtattttttttttgaaagaattatgtgagagtattttgggtacaatacatataaaaagaggtatgtttcaaataaatata

SEQ ID NO: 150769 - DNA, 560 bp, Cannabis sativa
  modified_base (532)..(535): a, c, t, g, unknown or other
aggaggctgccagcagggtgtcccgcacgcgcatggcccctaattcagaaagatctgcccttctaaccgacaaaactcgaacaggagccttgtccaaagccgcacgcactcgagaaaaaagggatccgcgagcgcataggaggtgtctcacctccttacttttttcgattttcaaaaagtcataactaattcaaataaaattgaatttgagttctgaaaaaaggtgaattgcgtaattttttccatattatcccataaaaataattctggaacgaaaatccaattattttacgtaaaaatttcacaaacatcaatcaatcatcaataaacacatagatcaacatgactcacatccaaatcacacatacatcgttttaaatccatattactttaaagtaaatcaatccagacgaacttctaaaaatatataaaataaatacataaaaggtatgagaaaccttacattggttgtactagaatttaatgactccttccgcttagatctctaactcttgtatcctttctgtagcannnnatcaccaagatctgagcccgaaact

SEQ ID NO: 150770 - DNA, 727 bp, Cannabis sativa
  modified_base (30)..(37): a, c, t, g, unknown or other
attaattaaaattaatttttaactcaaatnnnnnnnnctataaatatatatagcaaaattcaaaatctaatgtatttaaaatagggcaatttttaattttatacgtaattttaaaattattaacaaatttagctttgaatatttaaatgatgaaatagatggtagttgtactggatataaacaattatatgcactttcctctcactgttagtatcaaacttaacgccatcttatctttggctttttttgttccttttagaacaataaatagatgatgaagtgaacgttaagaatttttatttattttgactttcttagttttttttacctacttttattttattttctacaactctaaaaaaaaaataacaactacattgttaatcattttaattaaaaaataataccattatgacctactcttcaagttgatcattttaatatgtgaaaatcatatatttttttgcatttaccaaaaaatgtaaccaaaatcaaaagcaactactcagtttcttttataatttattaataaaattgtaactaaattttaaattcaaataaaattcaatatatcaactaagttatgttactataagattgtttgatatctcatggtctattctattaaattattttcgtaggtaagaaaactaaatggtatctttttttttttttaataaagaaactaaatgatatcttaaacattataaaatttaaaattttcatt

SEQ ID NO: 150771 - DNA, 676 bp, Cannabis sativa
agactgaacctccagacatatgactagacattgtactaaaataatctgtcacaaaataacgacacttacattctcccccttcacagattatattcaatgactcaaaaaaaaaaaaaactaaagaccacaaaagaaacagcaatcacaaaattaatgcaccaaaaaaatgtctttagaaatataaacatagcaaccataaataaaacgaaatacaaatatctcccccttcattgaatatgagctgcttgatcttgttctttgccagactccccttgggaaggtggcccagtcgacaccaagggtgttgcaatggttactggagacgagtcagctggaggatgcagatccggttgggctagactggtgacaggggcaaatacagacagctccccctgcacatgtgcgttacttccagacgtatcagaggatgctctaaacaaatctcgatgaaactcaggcagagaaatgtgaggcagagaaaccctaggataatggtacaaaagagtagacttgatagtgcgaaccattttgtacatggaggcctcaaatgcaagctgacgcttttgatccttcttacatagtttggcaaaagattgaaactcagaaaacatttgtacctgccagctggaatccgaaagccctttgaacataggagacttgcctttactcactttgg

SEQ ID NO: 150772 - DNA, 593 bp, Cannabis sativa
aatatcaatttcaataaatcaaaagcagcaacaaattacttatacaacaccatgatacaacaaaaaaatataaaaaataaattaaaatatacattaaaataattgcacaacaacttaaaatcacctacaaaacaactagataactactcaaaaatatatctaaaaaactaaatatatactcattttgtttatcttttttggacaactcaagtacaattaaaaaacaactagacaacaacactgcaatatattttgttgacaacctaaaagaaacgtaagaacaacataaaatttatctcaataaaacaaaaacaactacaaatcacttataccatgacaaataaacatatactcaatttgatcttcgttgaataactaaatctccatgtacaaataatgaataataacctgaatttaatatggaatttaaataattaagcatcaatacattgagtcaactaaaaagaaaactaaaataacgcacaaataatttagaaaaaaaaaacacttaaaaacaactataatggagattctttgtgtcttagatcgtgacaagtgttttttttttcttttttttttcaagtgggggtggg

SEQ ID NO: 150773 - DNA, 503 bp, Cannabis sativa
  modified_base (467)..(472): a, c, t, g, unknown or other
ttgaaaagttaagtcaacaagaccaacctaccaccttattcaaacaagtaatatcaaagagaaacccagatgcccaacaacaaaaataaactcaaatataacactgaaaagtgaaaaaaagccataaggaacaaaattaagccaaacccaaaaagtaaacttgttttcacaccgcctcgttgcagtcgcgtggaagaaggagacgagtcttactccttcaccttgagatagcagacatcgaattgaccgaactcgaaacactaaagccagggcgagctagtgagggcgatcgtttgaagttcgattgaggtacaatctgcaccagagtggaggctgtttggattttctcgggaaaatgaggagaagaaaatgagatttggtaaaattggaatttaatttatggtagattcaaatttctttttttttttaaaaaaaaatatattaaaaagtaaaaaatatatatatannnnnntacagtagaacctctatctaagaatactcta

SEQ ID NO: 150774 - DNA, 565 bp, Cannabis sativa
aaatactatttggttacttaataagtttttttaaaaaatatattggaataactttattaactagatttgttctaaatatatcaattggtgtcttttaaatataaagtaacatctaccacgttggtttttgtattgaattttaagattctacataattttcttataaattattttaaaaatttatcaaaattgttttataaaataaactcaactagaatacaatctattattttttaaatgaaaaataataaaatattttttaaatgaaaaataataaaatattttttagtaacctatagtttttgttaagtttaaaaattgatttattaaatagaaaagaaattaaaaattatattttaattggatcatcttctccaacggccgaaaaaaaatatatacttcttatatataaaaatgatccttaaaaatagtaaatcgtaacagtgcaaaactcttgagactaaatgattacgaatgtaatttgaaaaactttttaaacttattaaatagaaagaggaaagaaaatagtttttaatattaaaaatatattatacatgtgtgaagt

SEQ ID NO: 150775 - DNA, 586 bp, Cannabis sativa
atatttgaaattcacataaaaaaaaaataaactaagaaaaataaaataaataaatgtaaatcaacaaaataactattatatagcaatgaggacttaatgtaaaatagaatgataaaattcttggattaactcaccaaaatttatatatttaaaaatcaatttgataaagaaaaaatttagtgattaacttactgaaatggttatagttgaagaacagtataaatatatatatttttttttcaaagcatttcaaagaaaatattagcttaagtactgatgtaattatgtaacgccctaatctatagagacgtcacgtgtgtgattttataaactagtttaatagtaatagaataattaattattaaaaactatgataatattaaaaacttgactaaaataaaacactaaaaaaatagacattataacggcataaaaagcgtgttctggggattcctattataaaatgttttgctaaaaaatacacaatagatacagccagcccaaaataactcctggcatctcagcacgtaggccagtgaggtgaatatgtacattgctggagaagactgtcacctcatggttgatc

SEQ ID NO: 150776 - DNA, 685 bp, Cannabis sativa
tggatttaggtttctggattttgggtttgaatggaagggctaattcttgaggacattcaatttttaggaaatttgtagttgaaatctcaaaactatataggaacatattgacaaaaagtaaaataataatcccaattcctggaaggagttcatttgacataaaccagaaacctaggaatttaataaacctaagttcactccttaaagccctgaaaattacccaaaaaaatcaaaaaccaaacacagtaaaagaagatacaattggaagcaaaaataaaagtatcagctcagcaaaaacggaataacaaagagtaagaaataaaccacttacaatatttcagaagatttctgggtagtgaatagcttcgtgattggaatcgtgatgaatgcaatgatgggctctgagaatttctaagattagagatgaaatctgaggaaatacacagaaaataggtcaaggacaaagagggcatggaaggtaatgaaaaacgacgatggttttctcaaaaaggttcaaagatttgaaaagcaaaaatggaagataagtgttttctcttgagtttacactttaagaatgaataccgtaaaattaaaagaataaagatcgaacggatgagaattagagagaattggaaaagatgggcatttaatgctaatgatttgcctcgaaattctgaatcgccaa

SEQ ID NO: 150777 - DNA, 500 bp, Cannabis sativa
  modified_base (394)..(412): a, c, t, g, unknown or other
agaatatgaacagccaactcgagcaatagaagtcgcatacgttgctgtatttagtgaatagaaactgttattcatttattaatgtttacgtttttacgttaattattatgaatcaatgtacaaacagattgacaatgaataacaatcctggtgtaattaactggacacctgctttgtatataaaggggtgatccaccacaaaatgagacctacgaaactcttgctacaatggactaagcagaccgtgatctgacttaaccactataattctttgtcttcttgttatttccagttttctgttaagtatttacgttcccagtgttgggttttatgccctaaataaaattttttacaatctgattaagttatcactataagaaatttgaagtgattnnnnnnnnnnnnnnnnnnncatgctaatggtttaatatgattattacttttatatacaaaatcagtgaaatccagatcatatctttattcacaattacagtatcgtc

SEQ ID NO: 150778 - DNA, 526 bp, Cannabis sativa
ttgataatgtactgagtaaaatagttatattgaaattcacactttatttctgtgacaaataatcttgttttgtaccttgttccttcaattccaggaatgccttctttttgtctaaaaattcatttacaagagatcagcttctacccatcttgtctcttgaccctgatctatgtcttgttctttaacaagaacactttctcttcttttattgcttgtaaccatgctgcatcattctttccacttattgcttgagctatcaatgtcttcagcagcaataagtacataggcaataaaaccagcatagccaaatcttatggagatctgatctcccttctttctctgtctctggctaactgatagttgttgaggatgtattataccttatcttttttagctgactcattttcatttaattctctaggcattgacacttctgcttgatccacctcaaactgaacattctctctccgatcatttcactatctctagatgtggctttggttttcataggcatctcatcttcctt

SEQ ID NO: 150779 - DNA, 756 bp, Cannabis sativa
  modified_base (133)..(149): a, c, t, g, unknown or other
ataggcccatggtccccacactaggtgagacaatactgcttgtaagagaagaggttttagggtttatttattaattaagattctttgtaaaacctaattaataaataagataaatgataattttatttaatannnnnnnnnnnnnnnnnaataaataattttgacatttataagattaaaattgaaaaatatgtcactagtgaaataaaagataaatggttcaaaaaatggcaaaattataactagtgggacccatctatatggccggccactatagtgtttaattttgttattagtttatcatttttttattctatataatttaaatgctaaccgtaggtgaaataatgtaaaaggaataggattctctcattctcatccaaccctcataacctagttttcattctatcaggcaactagagtttttgagggcctcctttccttctctattttgaaatcctctttctccctcttcataaatttcaaacctatagtaaaagagtacatgcccatccatatcaagtcaaatactcaatcatagtgtgtaagactgtgaagaatccaacacttgaaggagaatcgggctcaaatcttgataaaactctgtgacagaaaggaacaagggttggagatctgagtggggggagacctattattctgctgccaccaatgtaaggttacttaaactttatatgtgtttaattacattgttttagagaattcatatttagggtgttaattaacatacttgttagt

SEQ ID NO: 150780 - DNA, 840 bp, Cannabis sativa
  modified_base (624)..(626): a, c, t, g, unknown or other
aaagagcattgcaaagcggtaaccttgagaagtggaaaaattcttgagtcaaatgtggctacaacaggcagtaaggagccctcttcaatgcaaaaagagggggaaatgaacaaaaaccaacaatttcagctgttgaaattcccccagtagttacagcatccagtcagcattctgctgtagaaatgtctttgcaaaagccaccgccgccatttcctcaacggttcaagaagcaacaagacgatggtcaattctggagattccttgatgttctaaagcagctccacatcaatatacaattagtggaagctttggagcaaatcccaacctaggtgaagtttttgaaggatattttgacaaagaaaaggaggcttggcgagtttgaaactgtcgctttctcggagggatgtagtgctatgttgaaaagtaaaattccacccaaattgaaagatccaggcagctttataattccaatttctatagggggtggagatgttggaagagctctttgtgacttgggagctagtattaatctcatgcctatgtctatttttaggaagttgggaattggagaagaaaggccaaccaccatcactttgcaattagcggatcgttccatggctcatnnngaagggaaaattgaagatgtgttggtacaagtggataagttcatttttcctgccgatttcattattcttgacgatgaggaagatagggaagttccaatcattttaggtaggccatttcatgccacgggaagaactttgatagatgttgaaaagggagagcttaccatgagagctcaagatgagcaagccatgttcaaggttttccatcccatac

SEQ ID NO: 150781 - DNA, 694 bp, Cannabis sativa
attatttttttttttgtaataaattcctattcattctttcaacaaacttattctgttggggtgttaacctgatagtcctatgtctcagtaaaccattctttctgcaataggcatcaaataagtcattgcaaaattctaacccatattctttccttaggaccttaagttttctacctgtttggttttccatcaataattttcagtgaacaatcttctgaaaagtatcatttttctatttgagtaaatatacccaaactttcctagaataaccatccactatggataaaaaataagaacagcccccatgtgtgctaacctttttaggaccccaaagatcagatgtacatattctagtatgtgcctagacttgtgtgtcccagtcttaaatttcagcctatggtgctttttccaagaatacaatattcacaaaaatcaacctttgttaccttatcttttccaagtagattctgttcacttactatttgtaaccccttctcactaatgtgacccaacgtctatgccatagtgttgtatttttattttctgaagcctgtgctactgcattgttgcaactagccactggttcaccacataggtagtatagaccatcattctttactcctttcataatgaccatggagcctttgcatagcttgatatgtctagcttcactactagaaaattaggttttagt

SEQ ID NO: 150782 - DNA, 500 bp, Cannabis sativa
acacaatgccccaatctttctgaataatttcatgttccatacattcaagggtaggcctttgactccaatccaagagcctcggcattcaattttgatgtccctattttgctcctccattgaccatcttttaaagaagactctggtatctcctgttcctggaatattccagtttcctttcttcaagaaactctccacttcggtctcatcttcgcaccaaatgataattcgatcatcaaacatttggctcacttgcagtttcctacccaactctcttgagagattataaaagatgcagctccatgatagcctactgttatctcgaatcatgataatagccttcttccaatctttttcacattgttttgcttgcatgtactcatggaaattcttctgcttcattcgtttaatcgggaaatcattttttggtctgaagcttccatttgctttaggcagaaaatcccaggatcccagccccttgagcttccaattaggaaatttta

SEQ ID NO: 150783 - DNA, 652 bp, Cannabis sativa
aaaaacacagtatttttgaaaagattttcgtgtgacagtatttttgtaaaagttaacacaaatttcagtatttttgttagtttcccttaactttataggatatgcccgttacagcctgcaagtccggtatttcataccgtgcttagatttgtgtagtgatttattcaggccgactcgtttttctgaaatagacaaacatgccttttatatgagctcaaatttgtgcactatattttttttttttatttcaattgatgagctaaatactatatgtattttataattttagttacatttatatatatttttttatatcatataaaaaataattattattataatttgaatattattataattttaattgataaataaaaatttatcattgttattgttatcaaattattagacattttaatgtattatgctttcgagctaatttatttgtacttacgtgtcatgttttcggacttcgtatcgtgtcatgcctaagctcatatgttttcgtgtcgagtcaccctaagcccatatttcttgtattgtgtcatgcatgcctcagttcttattttttggtgtcgtcttatgtcatgcctaaacatatattttttttttttgggaattactctacatactatttttctaattttttttt

SEQ ID NO: 150784 - DNA, 545 bp, Cannabis sativa
tggagcatactttttgttaaataacctatattttagcttttcaccacttatttacaccttcattggagatgctcttatagtgctatttaacttaggggtgttcatagattagtttggtctgaatttttaattttttcaaaccaaaccagtattacgatttttaaaaaattcaaaactaaaccaaaccaattaaatgatcaaactaaactaaaccactcaaaaacagattagtttaattttgtagttgttttaattttttttacaataattttttattatttcagtatctttttagttttaataaatttataatacataaataacaataaaaaaaaattatcgtaacaatataaaataaatatcaatattctaattaaaattgttcccaaattttaatagggaaatttgaaatttcatgcttaataaatctaaaaatggttccctaaactaataccatgtatcatttgtaaagggaaatttcaatttttgaccctaataatacaacctatatcaaaatttatacccctttataatttgtacaaatt

SEQ ID NO: 150785 - DNA, 1128 bp, Cannabis sativa
  modified_base (606)..(626): a, c, t, g, unknown or other
  modified_base (743)..(748): a, c, t, g, unknown or other
  modified_base (926)..(938): a, c, t, g, unknown or other
agaaaaaatttgtgagcctccactcttatataccctagccaaaaccatctttctctctttcccacttcaaaaccaaagctacatagtgaaaagagtgagtgcccacagacatcaagtagtactcaatcattagttatgattttttgaaaatttgaaaataatctgaaatcgggtacacttcacgtgcgcgcgcggacacgggtgatcacccgtgtgcacacgcattaggacagattcctgttcgaaggaacacgcacacgcgtgtccgtagtctgcattccgcgcgcagaaatcctactgtgcaggatctatgtgtcgcaattctcggtcgtgcatcccaggcgcgtgcgcagatggtatgcattgcataccatccgcaccaactgcaatttttttcattttttcatgctttttcatggaattaattttgaattttttatgcagttttgtattttgatttttacttctcaaatttcaaatataattatcagaattaaattattaattttttaaaaaaattaatttaagatattagtgaaattttaatttaaaaataggtaaatatctatctttttgcttaatttgttatcttatttttaaaatttnnnnnnnnnnnnnnnnnnnnnaatttaaggtcagatatttaatatttatttttttttaattaattgaccttatttgaaatttaaaataagattattttaatcataatattttaaatagaaataggatattatgctaannnnnnaattttgttattttttatttaaacaaaattataaaatcagaacaatgatattaaattatcattttattttattgaatatttaattttttaaaataacatgaaatttaaaagtggttagcatttttttaaaaaagattcttaggttagttgaaacctaatttttcaaaattataggttnnnnnnnnnnnnnttttaatttatttatttattatatattatttcgaaaaaaatatttttttattatttatttatgtttccaattttttttaaattaaattaaattaatttaaaattaaataaactttatatccaactatccaacttcttgcaggtgtgtgtattttatattgtttgattgtaaaacaagttttataaaacct

SEQ ID NO: 150786 - DNA, 652 bp, Cannabis sativa
caacatgttgactttcttgtctcctttggtgaagtcctaagtgaccgtgatcatatttcagccattttcaaaggcattccaagtgcttatgacacctttgtcatatctaccaacacttgaattgaagggtacacagttggagagattgaagcattgattttttcttcaaaatcaagaatcagaaagactgatcaagaacctaaacttaatgcttgtcttactgtttctgatgctgaccagcagcttgaagcgaacgttgcttatcagaatcgattcgaaggtggttttcctcctagaaatctatttcaatttggtacttatgtaccaaattttcctaatccaagaggcacttcaccctctcgaggagctcaatactactatcccaatggctttgctctaagaggatatcactatcaaatgcctcagtacaactcttcctaacctccttaagctaatcgcagcaatactaacagaggaggcagagttactcttccctcaggccgcccacagtgccaactttgtcacaaaatatcgacatggttgttgattgcttttacaagtttgacaagagttttactagtgttcaaccaaacattgctgcccctgttgggttttatgccctaaataaaactcttttcaatataatcagatt

SEQ ID NO: 150787 - DNA, 583 bp, Cannabis sativa
attttcacgaattctggccgcggcgaggggacataccgccgcggccatttaaggcttacagagaggtttttttttttacggattttggccgcggcgaggctatatctcgccgcgacgaatatggtcagacaactttaaaaagaccaatttacatatcaattcaaaaacacttctcttatttcttaaacctaatcaccacgccgaacctcattctcccacaccatttttcttcttcaaatcccattcaaaaccctttttcttcaaatttcaccataaatctttatcccaaatccttaaaaaccattattcttctcatcaatcactcattcccactcaaaatcaaccccaaatccctaaaacctcacccaaaatttcaaaaacccttattcatcttcttctttctcaagaacttcaagctttctacaatggaggatgattaaaggaggattctcattgaggtattgataataagactccctagcaaatttttattgaagaatttgtgaattgttggatagttttggatagtttgttggatatttgggatttttgctatatacattgttcaaaattgtttgtgtga

SEQ ID NO: 150788 - DNA, 647 bp, Cannabis sativa
ttccaaaaaatagaaacgccacttcaaagaaatcctccaattgaagcacacaacttgtaggataataagagtttcttcttgccaagcaatgagtcaactgagtcaacttgagtcaacttgtttgcagatcgtttaacaaaacacaacacaactcaacgtaagataataataaaagcaaatttcgaatatcttgaacaagaagaccaaactgggaagacataaaagaactgtactctggatagcttggacacacgccaagctatccgtctccaacacgacacggtcccacgaatgacttgcaatccaacttaaggctttttcgatgctaattatctcagcaatttcgggttggacgcaatcaatctttccctttttgaaagcttctattacattaccatgatgatctcgagctacacaacccaacccaaaccgcccctcttgttcaaataaggccccatcaacattaactttgatcttattaaacacaggtgcaatccaacgctcattatgtcgcccccccatcgttcaaaggagacaaataaagactctttgttccttgagcaaattgatactgatcaagcatatttctagctgatgcaacaatatttgaagcagcccaactcttcttttgccaaacaaatttattt

SEQ ID NO: 150789 - DNA, 1336 bp, Cannabis sativa
agtaagtttaaaatcacgttagcacgcctatgctagttagggtgttacatcggaagtatgtctcagactcgtcccatattctgagttatgaagcattggaactttagccggatttatcttatgaggaaaaactggtacaaatacttgatagaagagagaaagtcttgagaaacaagacgattgcactgataaaagtattatcgaggaatagtaaggtggaagaagcaacctgggaactcgagacggatatgcaacataaatatccagagttgttccgataaaattttgagacaaaatttctataaggaaggggtaattgtaataccctaggattatgaaattggattagcaagaccctaactacataattatgtataattaaggaaattatattattatataatttaatatgtgagaatttatatgatttatgctatgttaacacgccattggtgagtcaggggcattttagtaattttgacccaagaatggtaaaacagtgaaattaacttattaacgtgcttatgggactataatattatatagtatgcatgtgttgtcttttttaggtgtatttttacacgttggcgcggtatagtcacaatcgggtatttcggaccgagctgggtttgggcccaaaatgcaatgttggcattttatttgatagtgagaaatctgagttttatttgaaaataagtgagcatgaattgacttaaatgcccttatgtttaataaaatgaattttggcaagataaagattgaatttttggctgtgtttttcccaaaacctgaacccctctctctctctctaaccctcttcattttcaactttaatttggagagaaattgcttaaatcttgctatctttggagcttggaatttaaagaagctcttgctatatttgagccagtgtttctattgattttaatctacaatccttactgaatttaaagttgaaaagcatgaaattaattgtagttgagcttatgttgtatgttgatgttcttggttgcatgagtgttaatcttaatagagtttgagtgtgattgcttggctttgttgttgtattcttagggttttggatgtgattcagggaatttaagagggtagaattcatgttttattgggtgttatgctgcttgaaaatgtttggggttgaaggatttaaagctcaagtctttgagcttgaagagttgtgtgtcgagcatgattttgatttcgtgcaatctcaattttcagagtttttgttaatgtttaatgcatgaaatggtgttttagactctttgtttaatgattgaaagcttatgtgatggttctaagttttggtttgggtttg

SEQ ID NO: 150790 - DNA, 564 bp, Cannabis sativa
  modified_base (270)..(273): a, c, t, g, unknown or other
ttagtataatttttattttaattaataaaaaaatcttttattatatataaaattatttattattataaatttatatatttcatttttctcttcatatacttttatatttgatctcatatataattttatctttttttaagagtaatttgcggcataaatcctaagtttaacttctagttgcaaataaatacctaagtttaagttttagcggtaataatacctaagttataattcttgaacttttgtaagtacctgactgttaagtgttannnnaattgtcacgtggcaattcttgattggtccaagtcattaaagtttaattttttaaaaaaaaattaattcaaatataccaataagaaaatatgacacgttgataatgacttaatatttaacggttagatacctacagagttccaaaaatataacttaggttattactgccaaaaattaaacttgggtatttatttacaactgagagtttaacttatttataccgcaaattacatattttttcaaataaaactaatatattttttttgattgtgtccttttcataaaaaaaaa

SEQ ID NO: 150791 - DNA, 640 bp, Cannabis sativa
  modified_base (26)..(26): a, c, t, g, unknown or other
  modified_base (54)..(54): a, c, t, g, unknown or other
  modified_base (80)..(80): a, c, t, g, unknown or other
  modified_base (106)..(106): a, c, t, g, unknown or other
  modified_base (511)..(523): a, c, t, g, unknown or other
ttgtatcctttctgtagaagagtatngtatcctttctgtagaagagtatcaccncctttctgtagaagagtatcaccaangaagagtatcaccaagatctgagtcngaatctccttctcttgaaactagattcttcaaagccttacatactatgattgataccacttgatgtgtgtgggtactcactattttcactatagggcttcgattttgaatagaaaaagagagagagagagaaggtttcgaatagggagagtgaaggtggctcaaaattttactgaaggaatgagttgcatcatctttttcctttgaagccatcactacctatttataggaaacaacttagggttaggttagatttatttgacattaaaataataaaaaaataaagtggcgaattgcttcccaagtggccggccatggatagtgggctccacttttctaatttttcattttattttctcaaaaatgtcatttttccaatttaatcacttaaatgccaaatctaatnnnnnnnnnnnnnaaattaattattaaataatattaacagttaatatattcattatttagacttaacaaagtctcttaattaacaaataaactctagaatatcttttcttcacaattaaaccctagctta

SEQ ID NO: 150792 - DNA, 560 bp, Cannabis sativa
acatacttgtgagtagatctaggatcctggtaaaatcaattccaacactttgtatccccactagtcttcatttttgatgtagacactatggacccatttaacccacaggttgtctttttttgttgcaattgaccagatgttcttgattaaaacagctttgttccaataagctatactcaagaaactgatccctcctgctgactttggcttacagatcttagcccaagcaatttttcctggccgaaccatttgacttgcacctttccataagtaacttctacatataccctctatttcatgaactacctttggttgaagaatcattatttggctccagtaagtatgtatggtcataagaacagaagtaatcaacacatttctccctgcgaaggacaaatttcgagaactccatgtttttattcttccagtcaccttttcaacaagtatcttgcactctactgttgaaattttcttggcacatataggaattccaagatacttgaaaggtacctcttgcttagtgaaacccaagacattaactactctttgaatctctttct

SEQ ID NO: 150793 - DNA, 1106 bp, Cannabis sativa
  modified_base (723)..(727): a, c, t, g, unknown or other
gatgctatagaaaaaatcaagactcaaatgcttgcttcctaaagtaggcagaaaagttatatagatccaaagtgcagagatatagaattttaggttgtagatcatgtcttcctacgagtctcacctatggaaggtgtgaagcgcttctgtaaggagggcaagttaagacctaggtttacaggaccattcaaagtactcgaaaaggttggtcaagtagcatatcgtttagccctacctccaacattatcagtagttcacaatattttccatgtgccaatgttgaggaagtacgtattagatccaattcatgtcctcagttatgaagtcttagagttacaactatacttatctatgaggaacaaccagttcatatcctcgatagaaagaataaagttctcaaaaataagaccataactttagttaagatactctagaaaaatagcaaggtggaggaagctacttgagagttagactttgatatgagggctcaattgttgggattttatgccctaaataaaacctatttcaatataattatattttttatcaataaaagattgtaagtcatttaagttaacatatgttgttcatgattatagtttaatatataatttctattaaatccaaaacatattgttattcacaattacagtgatatcatcatagtggaaggtaattgtgattatatgtttcaaagctaatgtcccatgattcatcagtgcnnnnnatttacactgatgtgataatcatcgattaagtttacttacaccttggataagtgctatgtcctttccaaggtattggtaaagtatgctgtatcagatgtatggagcatacattggactgaccgatattgaacttagtaaagatatcataaacttacagttatatctttctaagtaaatatcacatagttgatcttagatcaaaatattttaatcctgatatggttaggttcaatctcaactatgttatttatattcttagagttgttcgttaaagctaccaataagttcaggtcaatacttacatattgggaacatgatagtacaattgagtgggagtgctaatcatagatacaaaatctacagcttttatctagacat

SEQ ID NO: 150794 - DNA, 1037 bp, Cannabis sativa
ctctctctctctctctcgtgaaccctagaaaccagtaagagccaagggttttctttagtaattcagagattagatagcatcattgttgaggtttcaagcttgggtaagcttcctagttcatttttctatggtttctttagtttaagatagcttctcttgcatgatttttgagatgttgggttctgagtttttagagttgttggattttgtattttaatgatatattatggttgtttgaactgatttgaagttaatcgatggtttaatttggtgtttagacaaggtttgagtgttagaactcaaactttagtctttaatggtgaatcttgattctgtacatgttgaggtgttttgttgccttggatatattctttggggtatattaagaaggtctggaagattttgtatggtttggattcgaattgatttaggtttcaaattttttgggttacttggtgtaaaccggttaaccagttttacaggccctgtaaaacccgttaaccagatcagtagttgggttgtcgaatttttcgtgctagtttcagagccttgattggtagactcctttgttatttagggtattgccatgttgtttatcgatgggggaaatttttagttttaagtttaagtccccggaaagtgattaagcgtgtcactcactcgtgttacgaataatgtgatttaggggcctataattcgtcgagcagctgttccactcaggttggccagcacacctgaattcgtaaacgaggtaagattagtataatgttatgcatatgtgtttacatgtttagtgtacatgttatttatgcctgttagagtagattgatagcagtatcagtatacatagagttatactggatactgatagatgtatgtttggcttaaatactgatcgatgctatcacataaatataactagagtatgactataatattgagtataggctgatattatggtcgatagtattatcgtatgaacgttctggactcagcaccgtgtgggacacgggaataaggttatggttgggtgtatg

SEQ ID NO: 150795 - DNA, 612 bp, Cannabis sativa
caaaataagaaagagaattcagggctgggaaggacgaattttatctcgagcaggaaaggaagtgttgctgaaagcggttgcgcaatcaattcccagctatactataagtgtttttttgttacctttggatacttgtaaggaattggagcgtcttatggaaaaattttggtggcaaattgattctattcagaaagcaggtgttagttggatgagttgggaccggttgagccgtcataaatatgttggaggccttggcttcggaagctagcgggattttaacttgactcttcttggaaagcaatgttggcgatttctagtcaatgatcgctccttggtgagtaaaatcaaagcaagatattatgctcatggttcctttttttcggttgagttgggagataacccaagcttcatatggaggagtatttttgaagctaaggggctgttacaagcaggtgtcactcaaaccattggtacgggtgatcaaatctcaatattaggggacccttggcttcttcaccgcaccaatagttttgtctcttcaactcatcatgctcttcaaaaccagtatgttagcagcctttttaagacggacgaccgtgcttgggacgagga

SEQ ID NO: 150796 - DNA, 513 bp, Cannabis sativa
agaagtcagttaccaccaaataaaacgtgagttggaagagacactggggaaattgaaacttcttctagacaacaaagatcttggtttggaccgtgtgaaaaattataagaagccagagagggtatgtgaaaaattatggtaggatatgcgtctgtggtcgttaggaaactataaatgatggaagaattttcaacaccagactcaacctctgtagttgacttcgattttgatgaatctaaggtaacttgaatacatcaacaaatcattgaataagtgttaactgaaacttgcttacacttatagttcatgattttctttcctatgctagtgacattgtttacatttcatagattgttggcttacttggcactcgtatatgtataaggaggcgagatggggcaagaagtgtatttcctccccgtgagggtaccttttccaaggctttatgtatgcgcactgcgcagtggcggacccagaatttaaagtgagggggggcgtaaataaatttaaaaa

SEQ ID NO: 150797 - DNA, 564 bp, Cannabis sativa
tcagcccttagatcgggctcaacctgtcatacagcaatctggtgtatttcccacaccagatgcctctctcaataccacacatataagccacactacctctggaaatttcccacaaaccgtggctacaacagatgacattccctcatctgatataaaccagcacacattacctgatcctggtaataaaacaacagcaacaacaccctctgctgtgctcaaactcagcagtatcaacccttgtctcactttagagaccattgcaaaagataatatcccatcttctgctaccacttcacaagatacacaacctgtatcttcgactttagctgtcaaatctcccatccaaacacgggttggcagaccagtcacacaaccaaaacatctcgcagactatgtttgtcatgcaacctccacacctttcctattgaaaaattcatatcttatgccaaactaaatcctcactttagagctgctgtattggctgcttattcccaagttgaacctcgctcttattctgaagcttcacaattcacacattggcttaaagccatggattgtgaaact

SEQ ID NO: 150798 - DNA, 527 bp, Cannabis sativa
  modified_base (56)..(56): a, c, t, g, unknown or other
ataacaattatttaatgtaaggtttaattcctttcctttgggccttgtgtgagagntagggggccattagtagtgggtatgacatactggacccagtcctccctcatatgaacaactccaatgtgaattgtgaaggcctgtttgccttatttaaataattgtattagactaactatactagtttaatctaattaaaattaaattagcaacataattaattttaaaataaataaaattattttcattgcattttttgaaaattaatttagaaaaacagacagtttaatgaaatattctagatagtgatttctagtaactaattaatattttatttaatatttaattaagtaaaaaaatatatttaagttgaaaaattaattttaattatttttagatcaacttaaattagagtatttttcttacaacttaaatcgaattaataattaaaatgattttattcaagatacttaattatttgtttctattccatgaaatttaattaaattaaaaaatatatttaagttgaa

SEQ ID NO: 150799 - DNA, 801 bp, Cannabis sativa
caccttccaatttaatataaaatggtacgcattttaatttaataaaataggtaaatagcattataaatactcaaaattttatgtttgtaggtgacataaaccaaatatttatttttagcagtataaatacttattgtttgtaaaactgtaatttttttccagtttcatcagtagagactttgttttgaatttattaaaagaacatttcgaagtaactgatactacatattttctatctagacccaatgataaagaatttaggcattatatgtgacttgtttaagacaataagagagtttgacaaaattagagaaaaactacaattttacaaacattaggtacttataccgctaaaaataaacattgagtttatgccgcttacaaatataaaactttgagtacttatgctattatttaccctaatgaataatatagaaaaactactaataactacttatagactccgtttgacacaatttttgaaaaaactaaaagttgtgataaaaaagtatttgataaacagttcaaaaacagcttattaaagaatttatggagaaattatagttaaaggctaaaactgatgcaacctaacttttaaaaaatggttaaaaatgctctataataactttatttaaactaaaaatatatatttacttatttaatatatattaaaaattttaaaataaaaaaattataataaaataaagaatatttaaatatcttattttttttattgggcttttttcagttttagctaaaaaaaagtaacaatattataaaaatacttccagctggccaaat

SEQ ID NO: 150800 - DNA, 1261 bp, Cannabis sativa
gaatgcgaccaaggaaattaaggagaagttttagcgttggtagaatgctaacaataaagctcggtactttatgctgtctagcatggtcgacaccttgaagataaggttttctaacactctcatagttgtagatattatgaaccaattaactgaactgtttgggatggcatcaaatcaagctcgttttgaggcgaccatgaattttatcaatgaacggatgaagcctcattagaacatgcgtgatcacctgctctagatagcaagttacttctaggaagctgagaatcatggagctattatagatcaagaaactcaagtgagtttgatcttaaatagtttaactctagcttttttgcccttcacatcaaattatgtcatgaacaagttgacttttgacttccatgagtcaattaacaaccttcagacatttaaaaattttattggaggaccgtagagaggaggaaacaaagctcctatttctaatactgctcctaattgtataggcaagcctgaggcaaacattgcatctgcttcgaaacccagctgatttaggttcaaattggaacattttaagtctttaattatacatatataattaatataaattgaatattttgtaattttaatggtaaatttatttttattagaaatatttaatttactttaattttatgttatttttcaaatttagaaagaaaatgatatagatgaaattaaagcccaatgacataagcccattaaaagcaaatgaaacatcaggattagtatcctttggactcacgcgatatatgtcttcaatcaaagttggatacatatgcaatggatcctttatttcaagcaagagaaagttggcccataattgaattagttctatttccatcgggttcctcccttccatcacacactaacgcatgcataaagctagcaattgacgtgcaccacatgtccgcatgttcccactatttctaccatttcctcatttatatcacctttttatgccactaaatcaactaaagtggcacataaaaatgctagttttatgagcaatatctctctataaataggacccaaaattattgtaaaggcatcagatttttagagtagttaaattatactctctttattattttcttatttctctcttaggtttacttattttattttatgtgacaaaaatgagtgaactattttagaaatattggtgtggttagagtgtagacattgtactttttattcttaatattgatattgattcttttgt

SEQ ID NO: 150801 - DNA, 675 bp, Cannabis sativa
taacttagtaacaagttaaatatttatttctgatagatattcaattaaagcatttcttatttccactaactaatatatacttatctcaataccttgtaaatttttgtttattaacatatcactccctcttgataatctttggaaggactaccgattatgcatcctaatatgaatctttctagcgtactttgtcctcactcatacgctttctaagatgactctccaaaatatttcccatcttgagattaccccaaattaagtatgctcaactccaaagtaacatcatggtgggttatcagaaagtagatgcctctttgtcgttcctaattgtatttcttactttcattctttcgtagaaaagaagatcaagtcccaccactcccttcattcacctcttacaattccttataggattcattcacttaaacttgaggaattcccgtcttattatcaacttgaatcttggtcatttcttcttatcttaacttgtatcgatttctcttgaactgtcagaactgttgacctcgcttttagccaacaacagtgagtgtaattttgtaagcgataaatagtttaatatgattgaactataataaaacaaataaagacaaaacaattttacagaggttcagccccaagcagttcctaatcctcgttatttgtattgacttaaga

SEQ ID NO: 150802 - DNA, 742 bp, Cannabis sativa
  modified_base (707)..(716): a, c, t, g, unknown or other
gtaatctattacaatgtaatactttttacatcgagtattgcgatgatgattatataccaaaaccaatctccatttcaattacactccattataaaagaaaaataatattttaatgaaaatattgttataaaagtcaaatgtctatattaccctttttcttatatattttataaatataaataaaagaaagagttatttcggtgaatcaaaaatttattctatttcatactcataaaaaaccaaacacaataattttgattacaatttttattccaactacaaaccaaatattgtaatcaattcctattaccattcttatttaattaaattaccattactattcctattacctttccattacaccaaactaaatactttagatattatgatatataaattctcctgattacaccatcatataaaatgaatatgataatatttgacacattaaaaaatattaataccaaaataactttacaaagtttaaaattattagttatatgatatgaattctctacatgcatcactttaattcatattctaattttatatatataataaataaataatatccatgaatttagaaatttcagaaatttccatggacatggatatcaatgtctatggatattttcaaatatatgctaggtttgagttgtttccttcagtttgagtgtttcatggtaattttctgttgggttttatgnnnnnnnnnnaactccatttcaatgtaatctatttt

SEQ ID NO: 150803 - DNA, 884 bp, Cannabis sativa
tagacatgtagtaaatatgttgtgtataatttgattatacatgattggaccgatataaaataatatctttcattactatgttatataccatgaaagaataattcatatcacgatgataatcattagtagatcagtctgaatcctgagtatacatgaactcctatttatattaattaagttctttgaatcactccttaaagtttatgagagtagataattcttacaacttctgttttgggagcttaataacatgagtggttgagaatatattatacaataatagaatctaaacttttaggatcgaatattattttccttagagtgtttattctaggtgtgctaacagttggatccaagtctataatttgattattgttatactcgaaattcggctaacacatcagaggaaaacacgtgtcaagctaggaagagtatgtaccaaggcacgtaattataattacatttgagatagaataacttgttaaaagcataattgacaaagtacatttataactcggctgactgaatagtcttatgcgaggtaaagatatacaaactgttaccttgtgcatcaacgagaaaccatgtaacttcatgtgtataagacgaggcaccaacctcgattacatggatgagatataatgactgtgaaaacacttagtgtataaaatacagtatacaaacttagtataattgacggatgaaccaaagcaagtgatagcgaggcatccacctcgccataggaagacatgcacacgaaaaagatcacctcgtcaccaaaaactgcaagtgtcggatagggtgctatgtttccagagtaaaagcgacgagatttacattatcaaccttgaaaagaaataggaaaagctttagctcgctatcaa

SEQ ID NO: 150804 - DNA, 647 bp, Cannabis sativa
  modified_base (48)..(72): a, c, t, g, unknown or other
ctttattgataatttaatagaaaaatattacattgaaattgagttttnnnnnnnnnnnnnnnnnnnnnnnnntcccacttgcactaaaataaaactatcagtacatttcaaataattataaattcagtctgtgcttttcaaatgtagttacagtcaaaactttggtgaatggataagctaagttgtcttcagtatttactttctccaccagtatatcccctcttgccacatattcctagatgatatgatatttcatctctatatgtttgcttctcttgtagcttcgaggctctttactattgcctatagctccagtgttatcacaaagtaaaaccaatacttttgccattccaagaacaacaccaagtcctgagaagaactttttaagccagactagttccttagcagcctcagcggtagctatgtatttggcctccatggtagagtctgatgttgcggtttgcttagaaattctccaaacaactcccccaagagtaaataccatcgcagatatagacttattgtcatcaagacaaacctggatatcttagtcggtgtagcctacgcgatttaaagcaccacccttatagactaacacataatgtcttgtacttttcaagtacttcagaatatgcttaactgcagtc

SEQ ID NO: 150805 - DNA, 516 bp, Cannabis sativa
  modified_base (27)..(36): a, c, t, g, unknown or other
  modified_base (220)..(220): a, c, t, g, unknown or other
agaggcaagtacttactccatgaaccnnnnnnnnnnatgacacaggctcgcagtaaatcttcaagtatctgaattgttctttctgattgaccatcagtctgagggtgaaagattgtgctaaacttcagcttagtacccatagctttctgaaaactcacccaaaactttgatgtaaactttggatccctgtctgaaccaatagatttaggggctccatggngacgaactatctcctttacatactgttcagcgtactgatccactgaatatgtaactttcgatggcagaaagtgagctgattttgtgaatctgtccactatgacccataccgaatcatcgttctcgtggttctaggaaaaccagtaacaaaatccatttcaatgtcctcccacttccactcaggaaacactaaaggttggaataaccctgtcggcctttgatgttcaaccttgatttgctggcaggttaagcatttggacacatagtccaccacatctctttgttgggttttatgcc

SEQ ID NO: 150806 - DNA, 585 bp, Cannabis sativa
tggtaaatagacgtcactgccttcaggtcgttgggggccagtcagccaattatggcgttgaaagctgagggaacgtcgatcacgatgaactaagccatcagtgttcttatggtttgattttctctaactgtgaggggtaatctgatatacccaataagtgtgagccttggccaaaaaattcatacatcacttgattgcaacgttccaggtcagtgagttggagccccatcttttcatatgttaatttgaaaagaatgttggaggaggcttcgtcgtccaccatacatctagccacaatcatactcccaatttgtatagtaatgactaggggatcattctgtaggaaactcaccagtgctgcatcttcttcaataaaggagattgtgggctctatatgcttttactgcttagagctctagtcttcgacagctaggacttcgcctttgggctcatgatggagtgtccgagcatagcactccctagctttgctagtttcgccagtaatgtggggtctgcctattatgacccctagatgtcctgccacgagtggtggcatcaaatctccattttggcctccttgcgcct

SEQ ID NO: 150807 - DNA, 500 bp, Cannabis sativa
aaaaaataaaaaaaacttaaaaaaaaaaaaaaaaaaagaaattgataactattaatcagttactgctttttcggcatatcaatatgtgtttttagaacgtttggaacatttgtaattaagcaaataaaatcttaatactcattaagatccatgaaaactatataaacagtgaccacttgttcattcgagagatactaattgaaattactaattgtgtagttagaattttgtgaggatctcatctttcatttgacactagacttagcatgtatataaggcctataaatatttaaaagtatttctaaaattttcttaaatattcatgtgaaggaagaaataatttttaggacaaatgtctttgactttgtttaagctagcatttgagaattcttattctctttttgtgttgttatgtattattaatgttttcttcttcttatgtaattatacatctatatatatatatactagcaaaaaattacgtgcgagacacgtatact

SEQ ID NO: 150808 - DNA, 507 bp, Cannabis sativa
  modified_base (26)..(36): a, c, t, g, unknown or other
  modified_base (90)..(105): a, c, t, g, unknown or other
tatatgtatataatcatgaaataaannnnnnnnnnnatgcaacataaaatattatttctgatctttatgaataagtaaatctgattatannnnnnnnnnnnnnnnttagggcacaaaatccaacaaatattttgacccttcattgtatatatattatcgatatggttatagtttattttccacatttcatatcgtatatatatgctatatttcatattctatattatagtctaacatttttttagcaatttagttgttaaaatattttttaatttatgtgcatttttatagagcatttaaattatttttattacattgattttgtgcatttaattactcttttcttttaaggaaaaattctttcacagttggtctctttttggttgaggaaaattcttgtaagagaatgaattctgttatggaaagttgtctaattttttgaaaacttgactttattagaataaatcaaataaactttatttgacaggtttgaagtccaaattcgtg

SEQ ID NO: 150809 - DNA, 840 bp, Cannabis sativa
tccaatgttattctcattcacaataaatatatattacttagaatatatacaatacaattacaaattgtatttacataaaaaatatacacacaatatatgcatacatattcaataaaatacaaaaatacatatatatactatatattgtggtttaaattttaaccttataagcgcaattcgacgagcaattccgcaaaaaatctgggcactatgcacatacaacacaccaatattactaatatgaaaataatccacaaaataatttacaaaaaccaaaaataaaacaatgtgcattataaaactgaatagaaactatatttataccttaaaggatgttgagattcattgttttctcaacaaataatggtggtcggagttatacccactattttctattgggttcggatgacacttaaagagggtaaaaaattaaaactttttgggtgtatgggattaagtatcgaaaatggaagatttttttttaagaaatgggcttaaagttgagaaatgggggagaaaggggatggcagaggtggtggttggcaaagggttttgggttcgctgggctctgggttcgtgaggaagaagatgatgaagacgcgacagggttattttatataaccctatgccgttcgttcttatataagaaccgacgccatagggttatttcatataacccaatgtcgtttaatttctaaccgactttaaatggtataatgcaattctatacctacgttttttataaaaaaccgcctctaaaggccaattttcaataagcgggtattttcacaccctttagcttctatttttataaaatgggttgaaaaaaggaaagctaaa

SEQ ID NO: 150810 - DNA, 550 bp, Cannabis sativa
attttattaattgtgatacaaaatgttacagagcaaagcttgaaacagagtttatataacagcatgagtaaaccagactaattaacccaaacccacttaactaaacccaacttagactaggatataagaacaacactaattgtggtaaagaaaccgttaatacagttgaagagagtagataaaacagttagagaagtgaggataaactctaactgtaacttgtaaggttacaacagccaataaacctttaacagaacacttagggaaatttaaggaaataacaatactcttaatatattaaaatgtagagcataaaagattagaaatatggcccacccttctagtgataaaagattagaggtatatgaatcatatatgatgttcatttgtgcttgtattgtactgcaatgtggtactgcactgtggtactgcactgtggtagtataaatatatatatattatatattagatagatgttacgagtcacgtatgttaattttattttagtttttaattttttttaatatcataattttaaaattaataatat

SEQ ID NO: 150811 - DNA, 1097 bp, Cannabis sativa
ccaccgcgccccgatgttcttatgattacgttgaggaagcgctttcataaactctccataaggcttctcaatttgatcaatcggttgatgaaaaagacgtggacaaaacttatcggagtggccaatgataccacatatgaagcaaaaagtaggagatctttcatatttgaaattgatccaaaaccaattcccatcttcctttgtgatcttcattctccttcgaagtggcttctcgatgttcaaagtgattcgcatcctaagataatccctccatacaccaatgaaattcttaggatcggactccaagtatgttcccattgtgttccccactttgcgtatcgttgattccgacatacatcccggttcgacatcatgaagttgaacccaaatgtcaagcgtattcagagttagtagcttcgggtctcctccaacattcaacctttcaataatcaattgcattctacatatgtccaagggctaccattgatcacacgttggatatcgacttcgtgataaaattgaaatagaaatcgattagtatcaagttgtttaacaaacatccccatacctggctgccataaacaagctaacacattttgcattttttcaaaatcaataacccggtttgatagcaatctccccaccaagcaccatcgatcgtctatgccttcttctctttcccccgctgtcactatgactgcttccagatcctcttcttcaatattaaatcgtattgtatcttccatcgcctccgaatgacggctagaagaagccatttctgtccagagcccaatcagaaaaaaaagacaagagaccaaaaccagtatactccacacgatccactccaacagcaacaagacaacaccttacacacactatctcactgaaaacagaaagaacaaatctcaacaaacaccagacaagacaaaacaagaaaccatgtcaatgtctaacattatttctttaataattcaattctgcatatagagttactattaactaattaataataataataataataaatctaataacttttagtcacaacaaaatttgtgactaaaagtaaaatagttgtgactaaaaagtccgtaact

SEQ ID NO: 150812 - DNA, 1042 bp, Cannabis sativa
agtatggttcatgttgttagctccgggaaaagtgcaaaaggttgaccttctcctctgggagtcaagatataggaaggcacctccgggccagggggtctctacttgaacagtcactttgcatttaatgcaacatgggaaaaatgtctgggaacacccataagaggacgtgtcagacattgtaagcctaatttagggcgattacacgataatcaaaggggctagtgatgctccattatgaagaatctcatcaatcaaggaaggatgaaggctaatctcacctaacatctatgctgcctactacgtaggtaatgcatgcccttttttgtatgttttaggaacttatgcttatccataattggctcccaaagcaagttcccctttttttttcgactattcccaccaatctctataaatacccctgagaaaatgaagaagaggatcgaaaaaaaaaagagagagaaaaaatacacaaagaacattttctgtaagaaatactttcattaatacagagactcatggactacggctcattaatgcccaacctacgtaaaaataatttgcattaattaccataaagctctcattattatcttatttaattagttgctgaaaacatcggtcaacaaagaccataaaagaccatgatggttgcataatgtaagtttaaggtcatttatggtcacttagagcaaattcaagttctttaaaattagttgaataacataaaagaccatgatggtcgcatattatggtcgttcagagaaaattcaagttctttaaagttagttgaaaagcataaaagagcatgatcgtcgcatagtgtaaatttaaggtcgtttatggttattcagagcaaattcaaggtcttttatccataaattacaaaaatcaaaattgtaatccaaaagactgtaataaaatatatatgttacctgttcatgttcattaagtggtgtgggtattgtggttgatgcatcacttattgattctattataattctaaatgattaattattgtaaataagagattgagagaagaaaa

SEQ ID NO: 150813 - DNA, 909 bp, Cannabis sativa
tcgcagtatttcgaacatcgcttgtaaatggttgacatggtcttttgcatgttgagattttacgagcatatcgtcaacatacacttccatggtcccctattagatctgcgaacatcatatttaccagcctctgataagtcgcacctgcgtttatcaaaccaaaaggcactaccttgtaacaatataaacctcgacccgtaatgaacgaggtatgttcctgatctggttcatacatcgagatctgattatatcctgagtatgcgtccatgaaactgagaagttcatgacttgcagtagcatcgacaagttggtcaatgctaggaagtgggaaactgtcctttggacaagctttatttaaaatcagtgaaatcaacgcatgtgcggcatgattagttggggcacacgagtacgggatttgctaaccaatcggggtagaacgactcctgtatgaagccgcttgccaagaggcagttgacttcttccttcagcgcctggtacctcgtggggtccattttgcggcatttctgttggatacctcgcacttcggggtcaatgttcaatcgatgacacatgacctgcggagatattctgaccatatctgaaagtttcgaagtgaaaacatcaaggttttgtttgagaaatgtcgttagtttttctcgctgttgaaaagttagtttggaaccaattttcaaaacattattactatctcttggatcaataggtacctcaatggtgtcttctgccgcttgggcggttacatcataatcgaggatcttaggatcccaatccggtccgtcttcatgcgacacttcttctatcctgaagacttcttggcgagggggtggtgcctctaacagatatatgacattgactaacttcttttctgtgagcttaattgctgcgttgtag

SEQ ID NO: 150814 - DNA, 690 bp, Cannabis sativa
aaatactaaaaaataatatctagcatctagcatccatcatttctcatttctaactagtacatagctaatttaagccatcctgaccatccattcaagcttaaatataaaattagtttcataggaaagtttaataagtagaataaaactaaactaataacgaatttcttccttaacagtgccatccttatgtattagtatcaaacggagttcctgaaatgggaaaaaatagggggtgagcttataaagcccagtaggaaaacaactaatatcaaaggacccttggtttagtaaaaattcttccatggttagtttttaaaaatagaacatcccgtcactattatcaaaatatataaacaaagcagagagactaaaaataatcacaaaatcaagcgtcaaatgcatatcacaccatccactagacccctagctctcaatagcaatcatagaaaatgacatccaaaattgggtagtagcaccggataacaacctcaatatcgggactcatattcaattcactccatgtatagattttaggtctttcacctacaggtgagtgcacacttgatgtacctatgatgacacagatactaggtcgtgaaataactaaaaaaccgtgtttttgcaaaatgtcagttatatataagaaaatataaaattgtaagcgtttgcagaagcaaaaagtaattctgc

SEQ ID NO: 150815 - DNA, 630 bp, Cannabis sativa
atatatgtattataatttttatgttttttgttggtttatttttttgtttagatctgcaaattgtattttttttttcttgaatctgagtttgcattacttgtaataggtttattatgaaaatggaaaatttttattgtattgatgttataatgctggtataattacaacaaattattaaatttaaatttgaaattatattatttttattaatttaattaatattttgcatatatagaaattattaatttttaaaatacttacatttaatattaaaattatataaaaaatgtaattgtatttttaaaaaaaaaatcatttttttggtgtgagactacttttaaagtccggcttaattggacaagaaatattttttagtccagcatagttggactagaaatgtttttctagtccaacattattagactagaaatatacactttttatgtcccaagctataatgtccaacacaaaatagattactaaaatttatctagtccaatttgaatggacttaaaatgaggtttttgttttagtggagcctcgtattctccagatacgtgatttaccaccagttgtgaatcacggcagatttcaatgtgttcggctttcatctcccgggctaattttagg

SEQ ID NO: 150816 - DNA, 707 bp, Cannabis sativa
gcacaggccactctatcattgtcggtgatgcctatgaaattcaggattctagtaataatcgttagccactgcttggctttcatcacatcgggacctcccagaaagacttgaggtgcgtgcttgcggaacctttcatagagtggttccattcggttcactgcaataaccggtccatcctgcaccgtaggggtaggagctacccccatttctagagcatgcactgtagactttggtacaccatgtaattttactatctccttgacatataattcggcatattgatccactgttaaggttgcttttacttttagaaaatgtgcagacttcgtgaatcaatctaccacaaccaaaattaaattgtacatacccgtggttctaggcaacccaaccacaaagtccatggtgatatcctcccacttccacttaagaagtgtcaaaggctgtaacaaacctgccagtctttgctgttcagccttaatttgctaacaagttaggcaccgggatacaaattctaccacattcttcttcatcctgccccgccaaaagtagggtttaagaccttggtacatcttggtggtgctaggatgcaaggagtatggagtggtattagcttcttcaagaatttcgttattaagtttcgcactacttggaacacaaaccctggtcttaaacagtagtatcccactatctgacactgtaaaatctct

SEQ ID NO: 150817 - DNA, 987 bp, Cannabis sativa
  modified_base (392)..(423): a, c, t, g, unknown or other
gaaagtgtgggtataacgaacgaactttaagagaccacatgaccgaacgaaacatttgaaagtatcccacaaggccaaatatcaagaaatttgtgggtgtacaggtcgagaaatatatggcttttgaaacaggtcaaagaccttaacactgaaaattggcacacattagacgaaaggtcccaaatagaggttaaaggggagacaacggaagaatatgtttggaacggcagcactttggctcacaacaaatcacaaacggctttaaaaccggtggcactttgggctcacaacggatcgcaagtggctctgataccatattagaatttaggataagatgaatgagtttccatctcaaaatcaattggctatgggaggagtagctcattcatctnnnnnnnnnnnnnnnnnnnnnnnnnnnnnnnnatgtgggactaactcttaataaaactattgttattattgtatctcacttgttgtctcattgtatctcacccgttgtcatcactgtatctcatcccttgtcattactatagttcacttgtagtcgtcactattgtatttctcaaatctatattttaatcttaaatttcatctcgaattttaaatattttttttaattttaagacaataaaatttattagtttgttttgttattgttaattaatatgttttagaaaagtgattattattttttaaatatctaattaaaaaagaaaaatatattaaaaatgcgatattttagttatgcatgagaaatgctaaaaggcaacgctcgttggtatcatactactattggtgtaattatgtagcagattccataaaacataaaagaataaaatttagggaatatcgttaaccaatcgtagggtgccactactggtgcccaataggcatgctctttaattataattatgtgatacttgacattaaaattatcatttcaaaaaaagacgtaaagtagagttttgttaaaaattaactaatatt

SEQ ID NO: 150818 - DNA, 536 bp, Cannabis sativa
actaactgtattaggacacttacatttaggtatgagtgtaagaacagtagtgttgatctccttgagcatctgccctgaatgtaggaatgtaagtactgcttcactgatgtcatctcccagtaattcccaattgtcttgaaagaaacaactagaaaaaccatctggccccggagctttgattccaggaatatcaaatacagctttcttgacttcctccttagagaactcttttagtaagtattctgcttgtaaattggttactaaagggccaagcttcatgacttttgaattaaccttcttcctgaattccattttagaaccgagcaattggtgataaaatgaaataaaggcttcagatatcttcttttggtcatctgttctcatcccctgattatcttcaatggacagtatactgttcattttcctcctctccttgatactagcatgaaataaggctgagttttcatctccttccttaacccaactaatcttggatttttgacgaagaaaggagtgcaaacctttgagtaattgcc

SEQ ID NO: 150819 - DNA, 563 bp, Cannabis sativa
atatgataaacttaccgtaatatatattcaattcaatatcacgtagttgatcctagatcaaatgatctcaatcctgagatggttagtgttatccaaattttcgcactctaacgtcgcatctacccaaaggagatattccaaacagaacaccacatacacctgcacggtggcagtcctcctagccgagcagtggacaattggaacaatgtactaacacttagcaacttcaacacttgcatcttgaatccctgaagcaatccctataaactttggatcatatcacagagatatggcaagctgtccaaatccctcaatcagtatattctatatttaatgtgttatcttactaattatagacattgtaaacaaaagggaaaccttccctcaatcacatggccctataaatagtgatccattctcactgggcaaaggggtcgagaaaattatttaagagagtttacttagagatattagtgtaagagctctaagagaagaatcaatgtattctttgttcttaagtcaataaaaattaaggggagtaggctattagcgaacttctcggg

SEQ ID NO: 150820 - DNA, 1173 bp, Cannabis sativa
ttttttacagaactgaattccgatttaaattgaattagttataaattttcaaaattcggacaaaataagggtggggatcactcccctgcgcgcacgcacacccgagatcactcggtcagcatgcgcattcaaacacgttttgtccgaggaagctcagccagggttcttttctgaaacctcctctgtgcgtggaaatgctgcatgcaacatggatgtgcagccaacctcggtcaaatgcccccaaacacgtgcggggatggtatgcaatgcataccatccgagccaaatgcaatattttttttttcaaatttttcaatttttcatagtttttcttggaatttaatttcaaatgtttaggtaaaattttttgtagacttttatttttcaaatctcaaatctaattatctgtttaaaattaattattattttattaattaattttagatattagtagattttgaacctgaaaaaggataatttctacatttttttttgtttgcttaattggttattttatttatttctttaaaatgtgattattttatcttatttttaaatctaaggtcagatattttatattttgattatttaaataattttattattattttcatgattgtgtacgttatagttatttaagatcacatgtaaattttcaaaaaatttcgagtagtttttaatgctgaaaataatgtttaaatattttgttgcacttgtaactattttttttttataagatagttaaaatatgtagcatgccatatacttacattgaaatatatatattatgctaacaaaaatatatactcctagtatacataacaatataaaattaaatatcatctaagaatattatacaacaaaaaagaaatatattgttgtcgaaggaattcaaaacactaaattatgaagtattcaaaggtcatttgaacaaaaaaaaaataaataaacatactcacgtaaattagcgagttctcatataatataatacaaaaatatatgcaaatatttaaaaatataatagaaaagatacataatatttttatgagatttttacactatatattgaaaattttaacttttttttactgtgaggtagattttttttttcttcaaaaatactgtgtattttttttaaaatactatttactatgttaagttttcactgttgtt

SEQ ID NO: 150821 - DNA, 869 bp, Cannabis sativa
accgtctttttacattatacatttatacctaaattaaaatgtaaatctttgtgcgactactatttatactattacgtatttaaaggtatctactaaaaaatagtgctactaaaacatgcaagctatctatatatagattttacaaaaaaactaaagcaagtgcataaaaaaaggggacgtatagttcattctagtgtataagaaggccaattcattttttgtatggtcatgttacgtttacttaagatagtttgcaaaattttgagaaattaaaaaaaaataatacgccaaaaataaggttcaaacagtatgttgcatgtgttactcttttattttattgtgtgaatcatattgtttgaaccttattttttatattgtaaattattttgaaatttgtaaaattttgtaaaatatcttaaataattataacatgtaagaatgtgaaaaaagttggacaattttttttttctgaatttcgaaatagtggggtgcattagtgcactctttttttggggtgtacattatagaataatcttataattttattggattagtaaaaaaaaactatttacactctaaaaatttctaagaacatctttttttaataattttattttatataaaatttatatttttaattatactatgtttttttaacttttttctttcaatttaaattcttaaaaaaatatacctgacgaaaaaaaataaaataaaaaattatataatttttttttagaaaaaaaaaatataaggtgtttctacaatacaccctatcaaaatggatgtactgatgcaagcctaactgtttcggtatctataagaattttttagtttaaatttttttcatagtcgtgtacgttatagtt

SEQ ID NO: 150822 - DNA, 773 bp, Cannabis sativa
ttcattgcccactattggaacttcttctcgaagttgatgaaattttgacaaaatgagagagtgtcctagtgtgtgtgaaatggaaggaaaatttacatggtaaactaactgtcatttttttttacaaaaatactgctaggcggtattttttactttttcactgtgtttttttttcatactgcagtatactgtgttaagtttttactggtgttttgtaaaaacacagtattgctgaaaactttttcgtgtaacagtatttttgtaaaagttaacccaaattctaatatttttgtaagtttctcaaatggaatgaatcccaccacaagatatgagctattgtttacaagggtatataaagtgcaacttttgtacttagggataaaccacaaggagtatctagttttgagcgaacgggtgaggacacacacgcgcatgccttccattcgatcgattgtgccgagctagctggtgtgacattttattttttggagaaaatttatttattaaattattattttttatttaattaattaaaataattttaaacttgtttaattaattggtaaagagggacatgtttccctcctccttattttaagcatcgttcccatgatcccacctaatgttcccatgatcaacatatttcttctcgttagcaccttatgtgtatcccctatataatgtatcagaaccagtggaaaaaatatatctttctcacaaaaaaaaaaaaaaaaacatttacaatatatttatgattatattatataagtagt

SEQ ID NO: 150823 - DNA, 778 bp, Cannabis sativa
aaaaaacaaaagaagaagtatttaaatagctggaatcccaggctctcggttcagatcttctgggctggtagaagctagaggatctattgtttgaacgggaagtacatcagcattttggccggaggaagaagcagtcgcatcaggctcaccataagccacttcggaagcgcagaactcgagatacatgcctttggcttcacccaagtaatcaaagtttgcctgagagttagccttccgaaagtcataaaagagctcaaggccggctgtctctaaggcatggaccttttctcccagcctctccacctcgcctgtaagctcctcctccttagacttcttctcctcttccacccgatggaggacaactcgaagagacgtcctttcaccatgaaggctattcacctctgcagataaggtttcgatggtctcctcaagtcggttagaagcctcgagatccttagtcaactcggttatttcttctgagtagtaaaaagcttcttgttgacttcacccagctccatcggaatagctccaagttccaccctagcatcatcagcgtctttcctggccaagtccacctccgccctcatagtgttggacagagccacattcttggaagcagcagacttaacccggtagtatgcgtaagccaacttcagaccaacctatgcagagaaaaaactttataatctgatctaagtaaagaggattaaaggaaaccgtcaagaaaagcttaccctggtgaattccttcaagactcaggaaccaacccgttcatgta

SEQ ID NO: 150824 - DNA, 954 bp, Cannabis sativa
atctgattatattgaaatgagtatcctggctagccatagttctgcaaggacctagcaggataaggcctgtagggtttggcaagtcactatagcttcaccaagaggagaccaacctttgagtttggaggccatccttttttaagttgaggacatctttgtacattgtttccttgaagaggtcaggttctcttggtcgaacggagtctccttgggtccggaagtcacttcttggctggccagcttatgcacagaccttggccgccctataggctcaccctggccggcctataggctcctcttggccggccaaggatgttggtacaactccttgtgggcttgcttcaattccttcagtcgctacttgacggttttgttatatcttgcacggaggctctgttctgctattggcgtggttgtactccacatgtactctatctttggcttacatggacatgtcatgtcaggtggacaaaatggataacaataagtactttgtaaattttattagactcatccctatggtgactaagtagaattaaatttacaaatatgaaacaatggtagaagctcataaaataagaataatcttgactctcggctaccgggacaacattatatttttattttgatcgagtaaaagaatgctaaaatagtatccattttagatgagctgacaactctattaaactaatgatatctttgactctcgcctaccgagacactatatatcatctagttgaaaaccttcgaaattttgtagatgtgtttgttttatatttttacatgttcttgttatttactaaaagtttactaattttcaaatatgtgtatgaatttgtattaaacctatgttgatttctatttattgatatttgtagttttcaatatgactatgaacaacccaattgtgtcactgttgactgacaacaagctctctagagctaactttgtcaa

SEQ ID NO: 150825 - DNA, 726 bp, Cannabis sativa
ttttgttcaccttaagattcaaaattgcttctccaatcttgtaatcttttcacattttttttaaatccaccttgatttacttttattgattctaaaattgttcttccaattatatggcttatttcacaatttgggatctacttttgatccatttattttttctatgacaagacatttatcataagagtaactctcatagttcactttttttacttcataaaatgaaattattatcacttgtaattcgcaaagaatttaacttttcacaagtcacaatttcttttctcaaaatcactattagagaaagaaaattaaattctctttattcaccatatagattataataatctccacatcaatagtaataaataatattattatattactatcaatatcattatcatattatatagctcatatatgaatataaaaattaatatataactccctgacataaaattataactcccaaataataattttatgctaattaatatattatgcatgttactatcaacatctcatgtaaaacatacatataatatattaattattacacaactatataggttacttatctcacacatatataacatatatataaacttcaatatacatgcatgatatattatatacccataatatatattatatatgtatgacttatataaatacataaaaataattatttctacatatatatttaatctaactaatatatattat

SEQ ID NO: 150826 - DNA, 572 bp, Cannabis sativa
aataccaagagaaacaaaactctaactctaatgtcgaatgtcgatgccttagcaaaactggcctcgcagaattaactgtatgaattgaacttggttccagtggagatgttaaatgagccaagtatatgtgagaaagaagaatttgagattatagatagctcgcttacctggatgacacctacagtcaactatcttttcatcgggcaacttccaactgacaaaaatgaggcacaaaaactcttggatttggtgcctcgctatacaatagttgaaggcaaattatatagaaggggatattcaatgcttctcctacggtgtgttcttcccgcagaagcaaacgagaacttcaaagaaatccatgaaggcttttgtggggaccatggaggttggaaaagcttgtcaaagaagattatttgacaaggatattattggcctactataactaaggacacccacgaatttgttaagaaatgtgatgaatgtcagagattctcacatatacctcgcgtaccaccaacggaactaagaatgatgacctcgccttacctatttgcaatatgggggatcgattt

SEQ ID NO: 150827 - DNA, 1293 bp, Cannabis sativa
  modified_base (227)..(236): a, c, t, g, unknown or other
attaactaattataaataccaaaatagtatacttgtataaaaccgggatcccgttttacaaaataattacaaacgattcatagtaaatgttccaaaagtttgtcgcctaacgaccatacaaaataagccctactgtcccaaagactgtgcgcttcaggcctaactgccccgacatgtacaatctccatctgctcgctctcaaagttgctcaaccttagccttgcccnnnnnnnnnnatgcaaacaatatctgtgagtcgatagactcagtaagaaaagtataaataataacataacaataatttagattataatcaggcgcccatacacccaaccataatcctaactgagtaatgaacgttctcaacaaagtatgactaactgcgaatccaggctatatcgtactgatgtggtagcagataactcatactatctaatagcctagcatatatctgttggcatctcggtgcaactctatgtacaccttactgatgccctaatatgccaatctgatggctatagatttgcctagtctgatggcaactaaaatgtacgctaaacatgtatacctacatatatgcaaccattatactaatcttacctcatttttgaatttaggtgtgccggccaatctgagtggaacagctgctcgacgaattacaggctcctaagtaaatcacattattcgcaaaactagtaagtgacacgctaaatcacttttcagggacttaaacttgaaactagaagtttccctatcgatgtataacatggcaataccctcaatatcgtaaaaataggaaaaactagggttctcaaaaatgtctcaaccggaagactgattccccaaccagaattccggttctgtggggtttcctagggaccatccagaatttcgattccaacctgaacttgaattctggttcagtgcaggattcacacaaaaattcactacactctcaattcaaccccaaacttaaccaaaccttttagacctgcttaatatacccccaagaacatatttcaagcaacaaaacaacctaacatgcttagaataaaaaatcaccattaaagaccaaaatttgagttctaaaacttaaactttgtctaacaaccacaacaagttctaaaataacttcaacatatatgtccaaaacaaccaggcggtaaatattaattagtaaaggcctattatcatagaactctctatatgtaccatgatatagatacgttatgattatcactgttacaatcctaatagtcaaggatcctgtatagatgatctacactgaatagg

SEQ ID NO: 150828 - DNA, 599 bp, Cannabis sativa
  modified_base (56)..(63): a, c, t, g, unknown or other
atggatctaaaaattaaagtcagggacattagttttatgcaaattaaattggattnnnnnnnnaattttagtttggtagtagtttttctacactttttttatgaattcgaaacagttttcgttttgattgattctggttgtcttctcaggtgaagtcgccagaattaatggcggttctctttctgattgaatttttgtttcgattgcgttgggttgctgcgtagttgcacgatggttgcgtgatagttgcccaggaagcatagatcttggattaaaggtgtgtgtaagtggtatttgtgtaatttttttatttgggttgtacatttgtttatttgattagctagaagtatttttataatattgttactttttttggttaaaactgaaaaaattgtattatgtgttcaaatatcattagttaaaaaattaatctcacctatgtaaatggcacaatagttttaattgagaaaatgataatgtatatggaattcccaagggaaatttgaaattccatgctttaaataccctataatttttcccctaaatgtataatcattaaaattggtcatatatgaccactttaatgattttcctaaact

SEQ ID NO: 150829 - DNA, 889 bp, Cannabis sativa
  modified_base (43)..(62): a, c, t, g, unknown or other
  modified_base (88)..(107): a, c, t, g, unknown or other
acacgtaggtctacgcctcgtagatataaatagatgtgtgagnnnnnnnnnnnnnnnnnnnngatataaatagatgtgtgagcgcaannnnnnnnnnnnnnnnnnnnagacataaataggcatgtgagtgcgcaggtctgtgtcacacagacatacaagaatggcattactgcttaaatagcatgatgagcatattattattgttataatttatactgtcttgctgggcttggagcacgggtgctctactgtgtagaaaagggtaaggcttaagctgatcagccatgagttcaggagctgggcgaagattgtacatgtccgagccacatcagaccaagcgggttaaggatctacccgtgatatattttgaaattctattttgtcgtttaggccggctgtaagaaaaaaacttgtaataaagtttgtaaatatttttgggatcccaattgttgtaaagtttaaattattacaagttttattttcattccgtttaatacaaaagtttaaattctacaccttttttattagcaatcccgtttaggggattaggatttcgtaagtaacttgggcagcgtgcctaattatttagggcattacacacagtcgatcaactcgaggacgagagagtgctcgtcgcggtgatgaccgagaaagcatgggaaccagtaaatttgcaagtcactcaaggacaaggtccatgagtaggacgaagttcatgagcaagacgagatctgtaagtaggacacagtctgtgaatagaatgaggtctgctagtaatgttgggattttatgccctaaataaaacccattacaatacaatctgatttgttatcaatagaagattagaaatcatttatgtttacatgtagtttttgttggaaattatttt

SEQ ID NO: 150830 - DNA, 661 bp, Cannabis sativa
atatccctttttcttgctaaaaaaaatatccctttttcccttttgtagatcaataatctatttgttgataattatggggttctatctaagggatatgactctgataccatgttgagaattatggtgttttatctcaaaatcaattgtcaatgaatggagtagctcatattcttatatatggcttaatactttgtcattttcttccatgtaaaacaatgtccacaatactatttacaattataataaaaaaaaaatcacaattaagttgtacataattcttatacaaaataatatatatttaattttaacgatatgtaacttttaatttttattttttttattttttataaatgtttaaaattctatttttgtatagttaataatatagaatattaagttaagtggggatattgattacaatctattcaattactctttcaattttttttattaaattttttaattttgtagtacatagaaatttaagaaatttatacggagtttttaaattgctacagagggcctcgtttaaaaatacacaaaaataattaaaaaaaaattacaaaaacggttttatggaatttaaatatttttacgatttttttattttatttatagaaaatacggtctttttgtgttgtactcttattaatttattgtt

SEQ ID NO: 150831 - DNA, 828 bp, Cannabis sativa
tacgtccgggacgttaccttatggcataaatgacttaacaaatattgtgaattgcttgatccacgtgtccccgtctggttggtctacgtatattgggaaaaaattaggggcaacagtgtaaattttgtactaaatttagttcaaaaaatgagttaacgttatatttagtcaaaattttacaattgtgcttcaatgcactaggggtaaaattaggggtgttcattgagtcacatccaatatttttaagcctatctagatcccatccatttatatattaaatgttagattttaccatctgatacgatccaattaatttcagtcatctaatcgatccaacatccactggataatggattgggtcggttctatccattggatgtatttcatatatatttattagtttaatttaggtttatccgatattttagacctagtatttgttggatcgggtcagattcatctaatattttaagcttagtatgtattgaattggattggatccatccattcaaagaaaaaaagagtaaaattttaatattaatttttgtatgtacatatatattttatatataacaacataaaattaaattactcatcttaactaaattaaaatactaattaattcgattggatgttggatgtattggatttttggacatcccatccaacatccgatctaattcaatttgatattcaaaaataacattcaatctgatctgatcacaattggatatccaatatttggcagtcggttgtagttggatctgttggttgtcattagattagatcgattaatgcacacctctagataaaaaaaaaaaaaaaaaa

SEQ ID NO: 150832 - DNA, 1688 bp, Cannabis sativa
  modified_base (341)..(347): a, c, t, g, unknown or other
  modified_base (1340)..(1343): a, c, t, g, unknown or other
agttttattttaattctgtttatattaaagtttaatttctacgctaatcttattagtaatcccaattaggggattaggattttttaagtatcttgggtagcgtgcctaattatttagggcgttacaagaaacttaggagcctccttctatagaattcgaatctccctctctctttttcttcataaatttcgagtcctataatgaaagagtacatgcctacccatagcatttcaagtactcaatcatagtgcggaagattgtgaagaatccaacacttgaaggagaatcgggctcagattttgataatactatgcgatagaaaagaacaagggttagagatnnnnnnngaaggagacatattattccgcagccaccagtatatggttttctaaactttatatttgttaattctattattttagagaattcatatttagggtgttaaacaacatacatgttagtgttaggatatttttcgcctattatttatgttatttttagagttaattttcttcttcattatgattttttggaatggaatgatgcttgttttctttattttaagtttcgacacttggaatgtataaattgatcaaattttagaaaaagatgatctataaaatagagaaaattgtgcaaaaaaaaaaaagctaaaacttcaagcctaaattagactaaagaaaactcactgcccaaataaagggggggtcatgcctaggcatgaaaatcccatgccgcggcccgccccttctaatcctaaaaaaataggttttaagcgtcttttatcttttttttaatcattttttggctataaaagaagtggacttcaatagttttcaacaagcaatcaagggggacgaaaattggaaataaaaatcaatcgcgaaggctttttcaattgcattttaagcattcgtttcttctttattttcttcttctattctaaattaatatgtgaaatttttacgatgaacatgagtagctaaatagttcattagggcctggatggagattgtttgatattgatttttggttttaaaatgatttaatttttcctcaatttcttctatgtattctatttcatacgtgtacttaattacttttaatttcctgatcaccaattaaatgactataattttgatgcaagatctgagaagtgagtgtcgattatgctatagtgaaatagaaccgaatttcgatataggacaagagtaactatatggtttggatagcttatagggtttctgtgtttaatgcatgttacatgtttaatttattacgagagtagaaatttgtatgtaattgaggtttatacatttgagaagactataaattacctnnnnaaacctgctattgcatagaaattagtaataggaataaaatcatgtgaaatcataatcaatagatacacgaaagccctaacttttatttatttttaattcccttattaatttatcggcttcttactttccccatttttcttgttttttttttattttaattttctcttaaaattttatatagtcacatagaagtaagaatttaattttaacgtactttactacaatcttcgtgggatcaacctcgctctttgtgagtattacttgttaaaacgatacatatacttgcgtgttgcaaattaccacaacaagtttttggcggggattgttagttaatattattaaaaa

SEQ ID NO: 150833 - DNA, 600 bp, Cannabis sativa
ctggttgaaagatgtctgaaagatgtctataaaatcttctgaagggtttgagctcgagccttcatcttctatggtcaaactttcctcaaaagagaggtgattgacttgagcaaaattttcttcatcttcttgtgtttcatgcccctgaatagtaattctaaaaaatttcttctgttttagcacccactgcttttgttttttggttccctttgactgtggagcacttgggaaagcaagtctttcgaatgctgacactcgtggggtggatgtgcttgcttcaagtctatcaaataccgacacccgtggggaaggtgtaggaacatcgtcgctgcaaaacattttttgctcctcctctgttaactcatctggttcaaaagaagcttttaaacaaccactattttgatggattgtgactcctttttgcttcttgaaatgaaactttttcttctctgttttgaaggttttcggagttatagaagtggaggactttttattgagagtaacgacccttttagttttcttgatatctttagcaaaggaaattgaaatttgcattttaccctcaggtagtgactaatcgattttccttagtggtaaagt

SEQ ID NO: 150834 - DNA, 928 bp, Cannabis sativa
catgtcttagaagatgcttgatgctctgaagaagagaatcggcagaggctccagcgcatctcctccagccaagaagtctaaaggcggttagggaagctcttccaaggaaaagacacctgccggggaggtcatcgatctttctgaggagctaacggttgtaaaaccctccactccaaaagttgcccagtcaaaggagtctcgaggagggactttggataggtctgacgaactgagaggtgggtctgagctggtgcagacctctactccacctttaccggtgcttccggaggccaagaaaggcaaggagatgcttgcccactatatgaaccggttggttcttgaggttagtgagcagctggatggtgctcataatgactcttctctagagctgctggtgggaggagtcttgaaggagttcacaagggtaagtctttcttgacaattttctttaatcccctttacttggctcaaatactcaagtttttcctgtgtgcaggccggtctgaagttggcctacacctactcccgggctaagtctgcttcttccaagaacacaactttgtccaacaccatgagggtggaggtggacatggccaggaaggatgctgaagatgccagggtggaactcagagctcttcggatggagttgggtgaagccaacaagaagctttttaccacccagaagaaaatagctgagctgactaagaatcttgaggcttctgaccgacttgaggagaccatcgagactttatttgctgaagtgaacagtctgcaagatgagaggacatctcttcgagaagtccttcgtcgggtggaagaggacaagaaagctaaggaggaggagcttacggccgcggtgacaaagctgaaagagaaagttcatgccttggagacagccggtcttgagctcttctatgacttttggaag

SEQ ID NO: 150835 - DNA, 909 bp, Cannabis sativa
aaaataataagaataaaatcaatcattcaaattttttaaccaatttggagacttgttacgttaagtacaaaaactaagtcaaaaataacatttaaatttttctgttttggattttaacgtcgtacgcatgcatcagagcaagaatgagtcctataaaactaactagctatccgggcattggggaagacaatcttcggtttgtgggcaacgagcattttttgatgaaataattcgaatgtttccgaataacgagttggcatctttagcagtgaaattgactgtacatattcaacatcaactagaggaaaaagactattagataaataattgctctcctaattcactcgataaaattaatgttatatgattgcttatatatatctatatggagaatcaagaaacttcattattttgattaattttatgcttttatttcctagatttgcaactacttgctaggttaatttgatatcttctgctagtagctagctacaattttaagctatgggattttacctactgaacaaggtagctaccaaaaagatttggtggtatagcaaaaaatgtattagctactaaatgtacattatgctttcgaaattacttcaaacttttgttttataggcatttattcattccattaaaaaaaaaacaaaagcatttattcatttaatgaaaatggattcagcaatatattaagtattgtaattattagggtgatacagcttaataattacactatattttaaaataaatagtatatttaaatatgaggtggaaccttataattattttcaattatacaattactagggaactaagccgcgcttcgcgcggtattgtccaacttttataatttttatgtatatatattatattaaatgttataatttaaaatataacattttc

SEQ ID NO: 150836 - DNA, 736 bp, Cannabis sativa
  modified_base (358)..(361): a, c, t, g, unknown or other
aacagatttcaccacatatccactatgcgtcaaccagcaaaacaacaacacaacacctgctgcaacaccaaatttgatatccacgacaacactgtatgaagataatgtggcaatgatcgaaaacaacacaacaatgcttgaaaacaacataacaacaacagaatcatacacagcgggacaccaaacagaagaaggggaacaatcagaaacaagagaagatgagaacgacaaattcgacataattgactatgcgaatctggttgttgaagaaatggtagaaaaacttgaaaacaccattaaaaaacttgatccagaaatcgacatcaacaatgcaaagttaataacagacaagcatcannnngaagtggaaaaaggacaggcatacaaggacatggaaactctgaagaatgtccacagctactacgcaatcaaaaacaactttcagtacaaaatgtggaagtcctgctctcaagagtgcaatctgaaatgtgtttacgaaagctgcaattggtctctacgagcatcgagaaatggccaaacaaacacattcatactcaggaggttctcaaaaatccacacatgccccataaatattaggcatgaagaccaaaggcaagcaacatcaaaactgattggagaatgtataaaactgaagtttctgaacataaagacaaaggcgacaccggtggacataaaaggagagttgaaatataggtatggcatcaagatgaactac

SEQ ID NO: 150837 - DNA, 521 bp, Cannabis sativa
aaaaaaaaaaaaaaacaccccacattcattttcatggcactatttagttgaaaaagatgagattttttaatattactcaccatgtgattttctcacatacccacatgcctttttatttttttccatcactttattaacaaaaaataattaaaaattcaagcttttaatgaaaaaaaatagagtaatgatcaataatatcatatagggtgctttttcggtgcaattctgaaaaaaaaaaaaaagtgtatcaatacattccttaattttttatatgaatatttctaattttattcagttatttaaaatattttataaaattttgaacaatttaaaaattataaaaaacagaattcaaataatatattttacacatatataaaataaaatagatatatgtgtaataaattatttaaattttatttttagcgcattaatttttctttttagaatttatcaaaatttacaaaatattttaactaattacattgtataatgtgatataaaaaattaaaattaaaact

SEQ ID NO: 150838 - DNA, 815 bp, Cannabis sativa
  modified_base (392)..(397): a, c, t, g, unknown or other
gtgtgtgtttttataaaatttttatttaaatactatataattataccaaaagtgtgagtaattaaaatcaagcatataaaaaaacttctttatagtaaaaggtaagcagtgagaactacggggaccccctgttttcaaaatattacaaactagtttattagtgttttacaacataaactttgcaatcccaaaatactatcaaaacggagcatcctgctcactgggccgagtcactgcggctgatatgtacattgttgctacgacctcaaactcatggctgctcaacctttgctttccccttacctgcaccataaagtacctgtgagtcacagagactcagcaagaaaagtgaataaaaaataaccagtaatattcagcaattcaatctcaannnnnnttgcacacacatttacacaatattataaacacaattttggtactttataaagtgctcctttaccactcgttaatcacgagctgaatatgtcactatcgttgcccgataaagcaaatcataagtaagaaacctaacatcagtttcaagagtaattactcgtaacggtagtaaccgttcccaatctctaggtcataacctaggctcaacatacttttaatcaaaatcttgataataatcacgatataatcattaaaccgtcaacaattaaccacatatgatgcttaccacttttcttaccttagttcacaactcaaacgtacaggccgacctgagtggaaaacaagctaagcgatcccgggtcctatgtcacgacaaagaaattcgataaacaacttatccatattccaaacaaacccta

SEQ ID NO: 150839 - DNA, 643 bp, Cannabis sativa
taatccttagtcgtgatggtgtctgcaaatgaccaattatattagaatgtgatacaattgaataacaagtagtaaaattaagatatatatatgttacctatatctttttaagactaaatgttttgaccatgagagaaaagtgccaatcgcatctcctactttgataatctcatctgatattggctttagtaactttgcatcggcatcaataacttcagatatgcgaactcgtagagatttgataactttttgacaatgaattgtatctatagagttcgtactaataatgtatccttttgcaactacttcgtgtgatgattctatagttaatctgcaaggttgaccctgttcaataaagcaattatcatttgttagcttaatttgttttataatattatcaaacacaaatatgtcaacgataattgatagtctaaaagataacctatgagtttggagtatgaatatttccaaaggagtgaatatgatcatatcaactaaatcaagttgatgcttatttccatacccaggttggacgtcatttgcatactgaggttcattgtcatctacattctcagattgaggatcaactgcaatcttcgattgagcttgagacggttaagtgtcatctgcattctcagattga

SEQ ID NO: 150840 - DNA, 658 bp, Cannabis sativa
attaggaattattaagtgaccaagattaagggaaatctactaatttcagtaaacacataagtgacaagtttaattttgaatatagtggcaaactacaagtaggatacggcgatcataataagtgagattaggagtgagatacgacaatgacaacgagtgagatacagtgatgaccgagtgagatacaataatgataacgagtaagatacaatgatcgagatataaaaataattcattatagagaatactctaattttttaaactaccctatttatttattattataataataatttttatgaacaacccaatttaaaattcttattatatataattaaaagtataaatattaaacttcttaatattttttgatggaattttatttttgataaataaaattattaataataacatgtaattagataatataattttattattattacattttagaatgattttttcaattagtagtttcatatttaatatttcaatagtaactttttattaattaatatggtatttaaaaaatgaaattagtctcacaaagagcgactatattgtatctagtgtaaaaagtttcgaagttttagtaatgtaaaatgttatttgtaacaaaaaaaaaatgcagattgttagttaaatataagttaaaaaa

SEQ ID NO: 150841 - DNA, 921 bp, Cannabis sativa
  modified_base (121)..(122): a, c, t, g, unknown or other
tatcttaccttgttccgtgctcaagtgtgccggtcagcctgagtggaaacgcagctcgacgctttacagggccctaaaccgcaatttcaaaaattcggtgagagacacgctaaaacacttnncggggatttaaaatagaaactaagcttaaccctatcgataattagtatgccaataccctaaattacacaaaaccgggaaaaactaaggctcaggaaaaagccccaaccggcaaaccggttcccaaccggaagtccggttcctggcaccaaccggtcgaccggttgcagcaggcccccagaaaccggaattccggttctgagctgggaacccaaaaattcttccccttaattcaaatcaatcccaaattctcccaaaacttccagaatacctacaaacaatatacagaaccagacccaaacaacagaacccaacaattcactcaaaatcccaaaccaccattagagctccaacctaagctcttgaacttaaatttccaaccaaacaccaaaatagccaacaaactcagcttaaaacaacaaggtctactattatctaacctcagattaagaacccaagccaaacacatacacacagctcctaattcaagcctaaacccataaaatttacttcaaagattaagtaaaactcaaatagaaaagctagggaaatttaccttgattccaagaagtaggaaccttactagaatttgtaaattacagcaaagcacatccaccttcttgctgggtttggggattcgaaagaaagagagggagagatgaggaagagtctcaacttttctaggtttttcctttttatttttctattaattatctttaatcaaatgaagaaataccaccagcccccaaaatccactacaagacaaacatcatttaggtaaaaagtgttgggttttatgcc

SEQ ID NO: 150842 - DNA, 621 bp, Cannabis sativa
  modified_base (275)..(276): a, c, t, g, unknown or other
taggttctgcgatatattgtactacggtcagatgggtggaataatatgcatgttagatgagtttgaatatcttacatattcatccgtagtgaaataagttccgcaaatatactacggtcggatgggtgataaatttttgtattgctaaatgttgttgtgattgtttaatattattttagattgtgttttattgttattaatagctttaaatttttggagaacattcaatcatagtcgttatgctactgaaattttggtagaattaggactagttnntagttagtaatttagtatactataattagttactagttattaatttcgtaagtcttgaggagtttgacgcataagcctcacaaattatattgaaataatattttagaatacctaaggatggataaaatataacataaaatttaaaaataccaaagatgcatcataaaactcaaattaaagtaaagataattacgtttctagaactagaactctaaattctattattctggattctaatacttaacataagaattctattaatttatttcatgtaaaacaacaaattaaaatattacacattatttattattcaaaatactaattattatatataacataacttaa

SEQ ID NO: 150843 - DNA, 632 bp, Cannabis sativa
aaaaacaaaaaaaaaaaaatgaagcacaaacaacccaacccatatcccaaacttagcccgtacttatccatactcgacacactttaactcgagaaaacccagacccgtactcggcaaacccatacctaaaatagacaagtttaataactaatcttgtgacacctgaaactcaaaacccaaacctaaaaaacctgtgccaaaaaaatctacctaaatgttaagccctaagttaactatggaagggtaatttggaaaacaatgaaaacgttaacataaaattgtgatggtataatttggggattctttttatgagttgtgcacattgaagcatagaatctcaaattttccatttcaagagatttattgtaattacgagtgtacgtcggtcgatttggtcaagttatagcatattcttaccaactcaatataaaaattaggttgcaaatatgtaattgtaacccacccaattaaaaattagaaaaaaaagttcaacccgcttaataattttatcgatttagtcggattaacatgtccaaaccgttctttacctttttttttttttataattattattgtcagtttctaattcaaaaaattagatttaaaaaaaaaaaatatattatttatatttc

SEQ ID NO: 150844 - DNA, 690 bp, Cannabis sativa
cctcttctttttcgttgatctcgttgatgttgttcttcttcgccgatcactactgcgagccagtgctccaccctccttcgacgacatccattttgtattcagacatagtcatctctcctcaccaagaaaccaacaccgaagttctcagatccccaatctcgaaatcctaggtccatttttcctagttctttcatttctctgtttctctcactctctctctgtctctctctctctgatgtgcagggatcttggcctccgttgttcacgacatttaaagctccctatggctctcaactttcgtgttcgacggctgtggattttggcgttcgacatcgccatagatctgtgcaaggatttgattttcttttttgtgtaatttttttattgttcaaaatgtggtttattaatttctacattttgtatccatttcatagtttgaactgttttgaatattatgcttgtgtaatatatatcaaattttcagtttaatttttctttttgtatttgttgaaatcattgaaattctatataacattcaaatagtttgtatttacagatttgcttaaaaagcgttgaacacatattatataataataaagataattggtatgttattacagattaattttttttataataggtattatataattttttagttatagatttattggtataattgtaaaaaaa

SEQ ID NO: 150845 - DNA, 585 bp, Cannabis sativa
gacaaggtctcccaccaatctgctccaccaccctctaacttggacacaacaaaagtaacttgatattcctcaggtgttcctattgtgttgaaatttttctttatctgtctcaatcacctttcgcctaccatggtatcttgtccaccctcaaactcgggcacttggatccgatgaaagatttgaaaatgatgactctgtcgagcggcaggatccatctgttgagcggtaactgctcttaaggcttcgagaagggcattcatagggaattcagcttgtggaggttagacattagattgaggggcgtcttctccaaccgttctcattgtcttccttccttttggaggcatttttttaggtttgagaacaaaaatttaatcatttagcgaggattggaagccaataatataaatatgtctcatacatataaatacgaggatacttattactattattatttaaaataaatctaaactatttggtgacccactccgaggtcattaaacccggtgctctgataccatttttctgtcacgacccgagccctaggccgtggcagatatgtaatatccataacttgggtagtca

SEQ ID NO: 150846 - DNA, 1020 bp, Cannabis sativa
cataaaacccaacaattagttagatatattttttaataaataaattttaaattaaattaaaatttatatatttaaaaaatataatgaaataatattagatttaatttttattattattatttaattaataattaagtaataagaactctaatacaactctaaacaaacatgaatttcatattacttaactagtatatgtatggagaaagtttcaatgattacactaaatatataactatcatggttatatttttttagccattacattactattgaatagttgtgattaatttagaaattaaataataattaacttagaacttaatagtcacctaacaatttatttccttatataattttaatgaagattaattatattttaaaatttaattaattataattattaattaatttttcgtaatttattattaaataagaatctttcagtaatttttttgcccttaaattattaaaatctttatagcaaaactctttataatttaaaattatacacatataattcctaattaaaattttattatacctataactttaatttaaaattattacacttaatttaaatatttaaaaagtaaaggctaattatgattttcgtcccccgaattttgacatgtactaaattacgcccccttgaattttgaagaccgttaaaaattctccctgaactatgaagattgtttgatttaagaacttttgtctaatttcagtaggaaaagtctaacatagaagaaagtttaggggacatgatttgataaatgtcaaagttcgaggggcataatttggtagatatcaaagtccggggagatgatttagtacaaaattgaatgaaattggataaaaatcctaaaatctaacaatctcaattgttcagggaggatttttaacagctagaaaagttgagaggacatgatttggtatatgtcaaagttcagggggtaaaaatcctaatttgccaaaagtaaaaagtgtaataggttaaatatatttttttttaaaaaa

SEQ ID NO: 150847 - DNA, 728 bp, Cannabis sativa
ttttaggataatatttgtccccaagtcctcttaggaatgtatggtcgtatgtgaacttctcagctccttcgttaggcagccatatgaaaagtgttccagcccacgtgatttgagccctaggggttcgtacctgtctatagttgatctccccatgtattttcaaatatttagctgtcataattacttgtttggaaaatcgcgcgttgggaatgttgtggattattttaccaggatctagatttagtaccatgtatgttgtttaacattctaaatttgaatttctaaaacaatagaatttaaacctctaaaaagttcaagaaaccatacattgattgcaacggaattaaatgtctccttctactcagatctccaatccttgttcctttcagtcgcagagtattatcaagatctaagcctgattctccttctgttgtttgattcttcacagttttacacactataattgaatactaacttgctatgtgtgggcatgtactcaatcactaagaggcttgaaattttctgaagaacaatgaaggaggttcgaatatagaagaaggaagaagaagaagtctcaagaactctctagttgtctcacaaattgtaaactaagttgagagtcattaattggataatgagaccatcttattcctcttatactatttcacttagggttagatttaaattacatggcattaaaaaatgataaaaattgggcaaaaaacacc

SEQ ID NO: 150848 - DNA, 526 bp, Cannabis sativa
atataatctaataattatttttgctattatttatttaaatttattatggttttgaactaaaatttttaaacacattctaaataaactaaaaattacataatttttcaaatttacaattagaagtaaagtaaaggaagtgttgctaaaaaaaaaaaacaaagaattatgtatataaaaactaaaacataagggagtttcgtagctaaattaccttaataaaaaatttatatgtttccatcaaacaaagtaaatataattatattaaatacataattgaaaaagaattattgtaaaaatataattataagtacttttaatataataatttatcaaaaacaatctctcaaaatataaatcattttgaatatttgggacagggaatagaatgattttttttttattaaaaaaaaaaaaactaattaaatttattggtcatttctcaagatggtgaagtttgaaattatggtaaaaattgaagaaaaaatatttttttagggtaaattacggcataaatacttaatatttt

SEQ ID NO: 150849 - DNA, 618 bp, Cannabis sativa
aaaataatatatacatattttattgtacgtgtgactgatttttctatatgtatgataagtaattgtataaatatttattatcacggtaaattattcaaaaacattacaaataatactaaatagctacaacataaacaattaaaaaaaatatataagtatttttttaatatcaaaataaataaaaatttactaaaacgaccatttaaaggtctactatattttttttttaaaaaaaaatatatgtgacacttcaaattctctatatgaacgaatcacatatttaataaaaatatattgtatataaacagggttgcacctgagaacatatgagcctaaggcgaatttgattttggggcttctaaaatataaataaaaaaatattgaaaaaatttatttattgtttacaatacacttaattttacttaaataaaagcttaataatttttttattgtttatgttgggctctcgaaaagtgtgggtcctaagtacgggtctaacctaccaatgtctaaggtcggttctatatatgaagaatcccataatatgtgacatttcaaaaaaaaaaaaaaattacatgtgtaacaagtgcaagcaacatttattcaaaaaaaaaaaaa

SEQ ID NO: 150850 - DNA, 866 bp, Cannabis sativa
tcctcccttggatcgctaccagccgtatcgtaggaataacattcattgctgaatgaaaaaatgactatgcccatccaatgtgttttgtataaatacatattatgtcattatttactatttaaaaataaaaaattacaaatcaaaagatgttaacacagatttttgttaaccaaaattaattagctttttagtaataaatactttacagaaattaataaataataaataattaaatcacactaaggaccgaactccaatattggggtaaaaaaacattgagcgctcttgtaagtactgtggggaacctgataatgattgacaagcacactaaggaacgaactcgagttcaattcgctcgtgttcttgttgaaatggagattacagataaaccggagcgaatcttttggtttgttaatgaatatgggcaattggtagagcaggaaattgagtatgagtgctggcggtgaaatgcaaacattgtggtggatttggacacattatggctgaatgtaggaaggtagaaaagccgaaagaagtatctagagtaaaagaatcacggcaagcaaaagaaggagtaactgttgaagctgttacagtagttaataacacagctaaggagactacaaaagagactacagttaatgaaactcaagttgaagctgtccaaagcaataaagctatctctgaagggaaaaaaaagggtcagaaggccaggatcgtgaaacaacagggaagaaaattgatggggaatggaaagctccaaagaactgaacatccaagggcttgggctcaacaagaaaacacttggactctagcgagaaggttctcaggaactcttttgcgattctaacgggggaacaaattga

SEQ ID NO: 150851 - DNA, 552 bp, Cannabis sativa
gtatcagagcagccatggttttaaaggttctgaagactggtcgaatatgtacatttactgcgaggataggtcgactcacggtatagtaagtgtttatattatttgttattgaattacctgcctaggatattataaagtatgttggaagagtagcatagtgaaaatttttataagaatatgtgtatggtacattgatattgatattgatactcgtctgagttttaaatggttagaagatgtggactaaatttatgataagttatgctgtaagggcaatcaaatagtctgattagcgagctatttgggctcagggaaaacagtatggaagagaattaattattgccataatgctgggaatatgtaaattctgctatgcaggatatgattatacaacaaggggaaaatatatctgaaatctgaaagaataatacgctcaccttgtatctgttgttgtactatcgacacttcctattgtaccactagatgtggtggaatatatgaatccaacttattagtagatcaggaagcaaaaactaaatgaaccacaaatta

SEQ ID NO: 150852 - DNA, 646 bp, Cannabis sativa
aatgtgtacatttttaaaattgtatttttttgcacattttttgtaattatttaaaaaaatgtatacatttatgtaaaatgcccttagttttaattgatattttccttattgctatgtatatagcatatcttgtaattattttatggtgggaattaaagataaaattgtgatcttcactttatataaaaagtttagaagatcctatctaatctgttactacaaaatacaattctgtgacgttctcgcttcaagtttttattggacccttacactcacagaatgatggctcttattgcttcatgaagtgatgactgaccctacaaactaacacgagtgtttctagcttggagtgaggacaaagcacgctggaaatactcgtgttggtttgtatggtcagtcgttacttcaggaagcagtcagagtgacgtacccgtgtataagagctatcattctgtgagtgtaagggcccaatggagacttgaagcaggaatattataaatggtatcaaaaccttgacccagttgaaagtgttgtagatgaggacgtcagactccgtaagggggtgattgtgacagtcagtagtcctgtgatctgtaagggaaaataccgagtaagctgtgccatcccacatcacttggagaaggtc

SEQ ID NO: 150853 - DNA, 770 bp, Cannabis sativa
aaaattgtgacttgaggaggccataaggacaaccgaaggggataacaaaagggacagcaggatcagaatagaaaaaaaaaagggagataagtcaatggattagaagatcagggcttacagcataaactaacagggaaaacaaaaaacagagaaaactatgtcatcagacatcactggaatagtctaaacgtatttaagtcaactgtatttgtaattttttgagactttactaatattatttaattctaagggcgtggccccgtggactagaagtgtttgaaagaatactgataccacgtataattctcttgtgttaagttttttaaattctgcatttatttatttctagttttagtttgatgctggaaatctgtgttcagcagtgacaggattgcaatctattgctgcaaactattacagttgtgtttttactgaaatttagtaaaattattggcatttgcaaaaacacaatttttcaaaattaatgtagcccaagtgggagaatgttagatttttttatttgggcttacattaacttttattagtttttctaaaacttggatttgttggatagttctttgttgtgttagctcatattgttagtgatcaatagttaatgggcttagcatctatatgtgtaaattctaagtgaagtagaagtgtggacttttctagttataactaaagtttttgatgagcatgctcagtccaactagggttatgtaactaagtcccctccctaattctataaatacatattgtctcatcac

SEQ ID NO: 150854 - DNA, 619 bp, Cannabis sativa
aatagtatataggataatttcctttttttttctcttaatgaaatgaaattatatctctctctcactttttttatattttttttattattttaatttttataattaaactataaaaaattttatattcctcttaagttatagagagatttcaatatatttctaaaattatttatatgaatacgaaatagtagtgtaaacactataaaataagttttttttacttaaactataaataagttatatttcaaaaaataataaatacctatatattattatactaataactttaatgataacttgttatatatataaatattttattgaataataactttttatatttgattgctatttgctaatttattatatatagttaaaattaatatgaaaagttattaaaaagtaacataaacgtatcttaaataactagccaatttcataggttactaaatttttcttcaattttatttaaaaatgttaccacatagtattttattagtatactacattagggatgtacatcgatcggtttggacggtttatcctatatattttctaacccaatctaaagttcgagttgctaaaatttaagtgcaacccgcctaattttaaaaaaaaa

SEQ ID NO: 150855 - DNA, 923 bp, Cannabis sativa
  modified_base (772)..(772): a, c, t, g, unknown or other
ccaatattatggttacaagaattttttggggtctctcttgtcgcggcctcccctgatcgggggaggcttcttgaagaccccattcttctctttgatggcgtagatatggtctcccggtactgcgagctcactaaagttcacgaagcgcggtccacctttccttttcagtgaggattccttctttggaggggacttggccagtttcggacttcgctgcccccgtggactacgtcttcttgggcttcgtcctctagaattcttccctcggggactgcgggatcgtgatcgtggcactggtgacttacgcttatctttgcccttctccaactctactagggaattctcaatcctcttatgtggttttgccatggcaaagaactcgaccagcgactccagtcttcgagcctgcagctccttccaaaaatcgattcttggcaagacacctattattaacatacgtactagcgaagactcgggatccttctcaacttttgttacttcagcattaaaacgcttaaaatagtctcataaagactcaccaaattcttatttgatgttagccagagtggtatagggcggcgtatatgtcatcgtggcttggaaatgtgtgaggaacaggtcgacaaaggtctcccatgtcgagatagaagcctcgggcaattggctgaactaatcgtgggcattctcttccaatgttgtcgcaagaatgcgacattttgcgagttcaggtaactgatccacttccataatagtattgaatttctctaaatanttaatgggattagaggtacctttgtatgttagggattcggagaatcggaatcccttagggagtcgcgcttgtcgcacttctgcagtgaaaggagaggtcccatgcagcttgtatatgggctttctcggctgctcgagcattttcaaagcct

SEQ ID NO: 150856 - DNA, 509 bp, Cannabis sativa
aaaatttaaaagaccttcaaaataaataattaggtattattattctcttcttcttctcttagataattaggtattaccattttcccatttcatacatacatacataagctaccatttttataaataaatggattgaattatattttattttaattatttctatatatatattatttatcattaagatagaaaataacatctatatttaatgttttggcaaccatttctgatttatgttagtggttggtaaaatctagaaaaccagatatttttccaattgtgtataaagtgataactcttattcttatactttgctacagctaccacataacgatatttttcagttatgaatatagtgaagactacacactactacaacgttagcctttagaggcagttttttcgaccccatttataaaaagggaagctaaagggtgtgaaaatactcggtatgttcgaaactgacatttagaggcggttttttgataaaaaccgtaggtataaaattg

SEQ ID NO: 150857 - DNA, 529 bp, Cannabis sativa
  modified_base (424)..(430): a, c, t, g, unknown or other
atacataattatctagttagggttttgctaatccatttcttaatttcgggtattacacagaccctaacctaggaccctgacctaggacctgaacttggactcaaactcagacttggccgagactgggatccgaaaaacccgtacccaaactcagactaagactcagaccccaacctcaacctagacccatacccggacccaaaacaaaacccagacccaaaattggagctagaactgtgacgagaactgaacccaaaccataaccagaacctggaccgagaccttgagtaggactgggacctgagacctggaacccgaacttggaccgagacctagacttgatctggacctgacctgctcctaaaccctcgcgaggcctgaaacctgagacccagaccagaatcttgttgggttttatgccctnnnnnnnactccatttcaatgtaatccagtttattcaacatcaataaagaaacagaagtatgttttggttcatcttatcaattgattgtctatttgatttataaat

SEQ ID NO: 150858 - DNA, 829 bp, Cannabis sativa
  modified_base (41)..(66): a, c, t, g, unknown or other
tttccataaacctcgttgactagcaacgagctgcacagtannnnnnnnnnnnnnnnnnnnnnnnnnagatagttagggtgttacatttgagatttttggaattatttagggaaaactctataaatatatcgaaccctacttgaaattgcagtatgtctctctcctcacgtatccatgatttatccataacgaaaatcctaacaaaaaaaaaaaatagtatttagtaactaattataactagttactacttacataatgtaactaactaggtttctcacaattatttcatattaatttatataatactataattcttgttttagtttagttcatgttattaaattgtataagttgtaattaactaactaggatagtgttttgttgattgggatggatctgggaatagaatgacttttcttaaagtgaatccattcatttgtttggtttgacatttataattggaaagcttattcctttgaaattgtaattcattcggagataagatttattttttcaaaaccaaatgaggggaaaagtgattcctttctaattttatttagattatgtcaattgtactttttttctaatgagaaaattttactatgagttttactaattggagcttttacaattagacataaataattatatagaatatatatggtgattaaattatataaatgtgtatataattatttgtgttatgccacctagtttcttacaactagctagtaattaactaattatttgtgttatacactttcctttagggcgcgtttggaaagccacctgggaattggaattggatgtaattggaggtaattacaca

SEQ ID NO: 150859 - DNA, 729 bp, Cannabis sativa
  modified_base (266)..(273): a, c, t, g, unknown or other
tgcaccagatagttgatctgtaggtgacccgtctacgtgtagtttccaagtcggcttatcttcactattacttggctgaggttttagtatcgactcggggttgctttctggtacatttttttctttgcctgtgcattctaccacaaaatctgctaaggctttgcctttgattgctgttcgggatcagaaaatagtttcgtattgacccaactccaccacccacttgagtagccgtccagaggcgtctggcttttgcaatatttggnnnnnnnnttggtcagtgtacacccgaacaggatgagcttgaaaataaggtcttaactttcttgttgttagaataaggctgtaagcgactttctctatcaatgggtatcggcctttgacctcaatgactcttttactgatgtaatagaccgggtgttatatgttgttctcttctctgattagcacgacgctcacagcatgctccgtgacagctaagtatattccaagttcttctccgtccagaggttttgagagtacgggaagttttgcgagttgtgattttagctcttggaaggctttttcacattcctccgtccactcgaattgcttgtttcctcccaggatgttaaagaatggggcacacttgtctgttaatttcgaaacaaatctactgagtgcggcgacccaaccagtcaaactttgtacttccttggttttagttagcgacttcatatccaggagggc

SEQ ID NO: 150860 - DNA, 723 bp, Cannabis sativa
  modified_base (566)..(566): a, c, t, g, unknown or other
cgccacaggctgcccaagctactcaggaaacccggaattgcgaaaataggtttggagaaatgcaagccagaattgaagaacaagataacgaaattaagcggttaagacagcagggtgctcctgcagtgcctgtaccagaagtcccagtggcacctgccctaattgtctaggccgaaccagtggtagcggtaaatagaatggaacctctgtatgaaaggttccgcaagaaggcacctccagtttttctgggaggtcaggacgtcatgaaagtaaagcagtggctaactgtgatctccaagattttgaattttatgggtgtcatcgggaatgacagtgtggtgtgtgccacatttcagtttcaagaggacgcattggtatggtgggacatggtgacattgatacacgatgtcaccacaatgacctgggaaaagttccaagaacttttcaatgcgaagtactataatgaggccgtcagaagtgccaagaggaaagagtttactcacctaacccagaaagagaacatgagcgttacggagtacataatgcagtttgatcggttggcgagnttggcctcgggaattgtgccaatcgatttcagtaacaaggaaaaataccttgatgggctgaatgtgaagattaaacatgacctaatgattactacggatgacaaaaccacctatgctgagatggtggagaaatcactgcgagctgagggagcagttg

SEQ ID NO: 150861 - DNA, 804 bp, Cannabis sativa
aaaaaattacgccccccctcactttaaattatgggtctgccattggtacgaacatgtttgtgccgagcgacgtacaagagatgacgacttcatagactaatcttgttgtgtcaagacgcaaagaaaatccctataatcgtgagattgagtcagaagaaaatggcaacctatcctagttttctattgcctatattgtaattatagaatcattgtaatttcctattttgtgcattgtaagcaaaaaggaaaaccatccctcatccattaagtctctataaatagtgacctagcctcactatgttgggggtcgagagaattgctgctgaaatatattctagaaagaaaagagtgatctaagagaggaacatactcagagatcaattgtaagagttttcaagaggaagaacattttgttcctttctctcaagtaaatacaatacaaggggagtaggccaccattaccacactcacagggaacctctttaaaatctggtgttcactttattttactatttttgctttcatttcatcatcttatttaatcgctttatttttgactcattgtcgttgactctcattgtcgttgactagaagcgaggtcaactagaagcgaggtcaactagaagcgaggtcaacattttggtgctttcattgagagttgaactcaagtcttttgtcttagttttgacaggtaaaacatgatggttttccaaactcttaggggtggccttgctgatcagggcgatccgatggtgacagatcccaacgtgcaaactcctggaaacacgacaggaccactaggga

SEQ ID NO: 150862 - DNA, 550 bp, Cannabis sativa
ccctaccccaacaatactcatcccatcgaccgctgtcaatgacatctaaatcaaacctagaaacttccttatctggagtattggtaagaaggaacattcgatgaaatacaacacagagagttttaatcctagggattcatcctgtccccacctactgcccaagaaagcatcctctatagccttatgatcaatcatttttatgccagggaaacatacctcaattaaagggtttgattcttgggaaaacaacagtttattgcaatccccaaaacaatcaagaccagtgatcaagtaaaattctttggcattgaaccgtatacaacgaccagcaaccttagccccaaattctttgggattgggctggtaaacctccctcaaaagaaggctgtgaactacttgggggtgaaaaacaaagccaggaatatctaaaaaatgcccaaactgcgtatctcagaacattgttaacaaattaacagataaagtattcttaatgttagcaataacagagaaattgctcgtacatacgcactttgatctgtagaaatcattg

SEQ ID NO: 150863 - DNA, 530 bp, Cannabis sativa
actaaccaaatatttttagttattaaaatctaaaaaaaaaaatcaaaaaatctaattttacgtggctcggcacgtaacttttatatctagtatatatatatatatatatgagaatttagtaaagtaacggtactaaatttcctaaattctagaatatatttaattttaagtttttcatcaacattaaaaatcaaaattgtttatgagaattgagagaaaaaatattagatatattttgctatcatctatattctagttttcttcttttttaaaaaaaaaaataaaaaaaattggagaataatatcattcattagaattttttaaggcaaatttatcaacggttaatggaatgtatgtatttgatatttactctttgttcattatatatatctatattgtttattatttgtgttcgcggtgcgggtggtgcagtttttaaccattctttcaaaccaactcggacatgcggcttttccaattttccaaaccgcacccgcaccgcgatactaaaaaaccgcaaaaaccgcacc

SEQ ID NO: 150864 - DNA, 547 bp, Cannabis sativa
tcaaatggtgggtgtgtcgccgtattccaatgctcatgcgtgcgatcgcatgttccttgaggtactgcgatacacctacccatttgcgacatatgtcagcgttccctttttcccatacaaccgtatattttgactagtagggttgctcgaaacagtgaggtgtttccgttagcccaatggttatgcgaacaaggcatgccccttgagatataggagattcctcagctgtttcttgagatgtactgctaattggatatacatgatatactcgcaggttgtgattggttagatttctcgaaacggtgggtgtttcccggtaactctagggtcatgctcgaaaatgcatgccccttgggtcactgggtaactcccagccattttttgagatattcttctagtcgcgcacttacaattttatgccttggtcggctgattgggtttttgcgagaatccaaactagccttctaaggaaaccttgaatttttaatgcgggtgaggtcacttgtattgttttcgcacattaaccacactgaaaaggtcttctatc

SEQ ID NO: 150865 - DNA, 582 bp, Cannabis sativa
taacttaataaccaccattacaatgtaaaattcagccatggagtttgaatgctagagttagagaagagaaaagagaaaagaaagaaataacaaacaacaatgggggagaagtttttcgaaagggtagatgctgaattcttgttgtccttatcctcttttctcttcctttttcttcttttttcactctttcttgcattgtacaaaaaaacagaggatctatggcagaatttttcttttctttttgtgccctctttttctgaaaaatggaggttgccttctttttgagaacctcttaggttttgtaccatttgcccaacataaatcctacacatggcatgaatctagcctctccaagtatttgctccagccaccactcctagaacgctatgtcatctccacaattgccaccacatttaatgaagtgccatctcatcctttgtccaagcaattttacacagcctgctactaacctatttgttgcagcaaaaacttcactgaatttcagcaaagttaacaacttgactaacttgctattttctttgccaatttatacacaaaagttattgatttctaactaacaac

SEQ ID NO: 150866 - DNA, 566 bp, Cannabis sativa
aaaagaggtatgtttcaattaaatataaaattataggtaaatttaattaattgattaataaaagtggtattttcaacttaccccattcagaataggtccataactgtttttgaaataccatattttaaaatgggattatttcacaaatacaaaaaaaaaaaaaaaaaataacaaaaatatagtagtacagaattttaaacatttttacgatttttatgattctatttacagaaaatacgttcttttaatatatttttatattatactcttattaatttattattaattttttgttattgttttgatgttattttttgttattattttttctgtagtttttttttattattttggtgttgttttaatttatagaaaactgtaaaaatgtaaaaaaaatctttaaaagtaaaaatgtaaaaaaatttacaaaaaaatagaatattatgtaatgataccttttaaaatattactaatataaataggaaaattctacaatgcactcccttaaaatggatacattgatgcacccttatctattttagcacccgaaataattttttagtcaa

SEQ ID NO: 150867 - DNA, 645 bp, Cannabis sativa
  modified_base (506)..(509): a, c, t, g, unknown or other
tgaaaataatttatttggattccttgtgaaaagttaagcaattttggtttttacggaactcaattctgataaaaattgaaaaagatatgaagggttaaaaatctaataaacatgggtgtcaagatggtgccaattgcaccaagaagtcggacacagggggcatacacgcgcgcgggaggggaaaaattgtgtctgaagacacgatcaaccccaacattcagacacgacacactacattccatgcacgaggaccctgcacacgtcgtgaaatcccgcccatctgaccctgcatttctcagcttaagcgcacaaaagaggctaggtgaaatattttgtgaaatatttttatagatgtcctaaccataatatttttaaacttataaattttttattttgtgaaaatttttaattgtttataaatcataagttagaaaaatgatattttatatcatattacttatcacaaatttataaatggtatttttttaaatatttaaataacctannnntttttgtagaaatttgaaaaaggcttattttaagatattttcacatataatttacaaaattatcatttttattattattttattcttaaaataataattacctaaccatatttattttaaaattggcttattttgt

SEQ ID NO: 150868 - DNA, 557 bp, Cannabis sativa
gaaccaatccaccttcaagcatttaccgatgctgactggggtgcatgtttagacactcgacgctcaatatcgggctactgtgttttcttaggaaaatctctcatctcatggaaatctaagaagcaacacattgtctctcgctcttcggttgaagcagagtatagagccatggctcacgctgcttgtgaactaacatggcttcattcaattcttcacgaattcggcattcaaaactgacttccatccactttgttttgtgacaatagcaatccacatttcagagaaccctatctaccacgagcgcaccaaacacgtggaaatcgattgtcatctcatccgcgagaagatcaacaatggcaccatcaaaatgaatcacattgcttctaaatccaacctggccgacatcctgacaaagccactcttccccagccatttttatgacatagtttgcaagatgaacctcaacaaactctacagtccatcttgaaggggcctattagagacttaggcttagttagttaagttagttatggtttgttataactgttatactttcg

SEQ ID NO: 150869 - DNA, 617 bp, Cannabis sativa
ctttttcatgtcctcttcttctttggcaagaatagcagtcatctcctcaatggtccgctgctccttttgagcattgatctggtcgaatcaaatggagaaggaatggtttccatcacaaaccacaccaagtaatcctcaccaagatccaatcccatgcccttaagcttttggtaataaatccatgagcttgttgatgtgagctctaatatcacccgtatcagcataattagtgcggtggaacaaagttaagcactcatttttctcattctttgagaatttcttgtacttttccttaatggcagcaagaaaatcctttgcattttcaatctgaggaatactatcaggaatggattcatccatgtgatacctcataagcatcaaacaacaccgattggaatgctcccaatcctcataggatttcttatccttttcagtggcatcatcagcaagtttaggcagtgcacccattctcaaggccaaatccactctcataagagtcaaattcaacatgaaagattctacccactatttctggttggttctattcagtgtcaatatggcagaggttcttgaaatgcttaaagctgaatgagaaacaagagcaataaccattaaat

SEQ ID NO: 150870 - DNA, 696 bp, Cannabis sativa
aaaaaggggaagtacaatacttctcccacgccatgaaactaaaaagataaggaggagaggtacacctattcaccctcctaacggagaaaccttagaccatttatatggccaatcagggcactgcctcatacaagaagcccccttatatcagaagggagatgagcaagagggacatgtcaaagttctactaatatcacaatgacttcagccacgacaccaatgagtgttagaacttgaggagggagattgaattctttataaggaagaataatccccacttgcatcgttatgtgcagaatgaccaatctcagacacaagctgcccagaacggagaccctatgccatctcaagtggcgggtcacctaggggtcatcactggcggaccccacattacaggcaaaaccaacaaggctaaggagtgtaatgctctctgtcacgagcctaaaattgatatcctagccattgaagaaaggggatctaagcaactcaagcttggggagcttgccatctcctttacaaagggagatggtactcaagttaacttccagcacaatgatcccctagttattactacacaaatcagaaacatgacagttgcgacagttgcaagatgcatggtggaaaatgagcctcctcaaacattctttttagatcaacatatgaaaagatgggactctaactaactgacttggaacc

SEQ ID NO: 150871 - DNA, 603 bp, Cannabis sativa
tgttataaatttagacagatatgaatatgatacttgtattcttttctgctcttttcttacttttatttctcttcatcaaacttatacatatataggagaatacatgcacgtatatacatataattattcaactttactgctacaagttgaatactattctatagtattgtaggtttatcatgtagatgtagagtatactacatatctatctgtagtcattcataacagttaaataatttttttgcaagaaaatatttttttttaaaaaaaagttacatgattttagtgtaggcaaattttatatttataataatgttattttataattttgtttttttggacaaaagaggtatactaaaatcattgaatactaaaatttgacttttaaaggtataagatataggatatatttgtcattacaaataatacactattctttttttaaaaaaaagttacatgattttagtgtaggcaaaatgaattgagccaattggtggggataataagaaaaaaaataaattttatacttataataatgttattttataagtttgttttttttttttttggcaaaagagatatactaaaatcattaaatactaa

SEQ ID NO: 150872 - DNA, 685 bp, Cannabis sativa
tttttttttttctcacagatcttaattatttatagatttaacgtattttaaataaaaatttagatattttaaattttaaattgatttaaaaaaaaaaacaaaactaattgttttcaacgtaatttagtgaatctaattgagagaaataaaatttggaaaattttataatatatctcttaaaagcgatacactgatacatctctatctattttagtatccgaaatacgttcaaacagtatgttacacgagtgactattttattttatacgtgtgtaaaataaattgtttaaatattattttctatattgtaaatattttgaatttctcaaaattttataagatatcttaaacatatataatgtacatgaatatgcaaaaaattagactaaaaaattttttagatgtcgaaacaaggtacaacaatacatccctttgagggaatgtatagtagaatcacccataaaatctatatatttatatgaaggagaagtatgaggcggtaacgttcactttcaaattactctaaagctatttttttctaatctccttaattctctcatttttagtattttatttaagcataaatctataaattatattttattattattttaataaaccaattaaaaacttaaatatctaactttaaatcttctctaatttttaaaacacatataactctaaa

SEQ ID NO: 150873 - DNA, 615 bp, Cannabis sativa
ctttgtccaactttgtagcagggacagcaactggttctgcattaacaagttcagcttcaagcacttcactttcagactcaaaatcatcagcagagggttgttctttaggcacaaactcttcacttgaatcagagacaccctctaattcttgatcctcttcggtctcttcttcaggtttagaattcgatgatgaaacggaagggggattttctttgagacttttggcctttcaagatgaagacaccacctttttccctttagagacatctttgggcagaactacttcgggtttctttggtgtagacaccttagacctggttcgagaactcaccgtaggcaagggcacaattactttctcgacatttggagcaccattcgaagaggaagacttcgacaatgagtgattggaagaatgagattcatcatgatcaccaagctcaggagttggggtaacaatcagagaggcaatgatcggaggagaactgagattgtaagtcgactttcaagcttgggattttgaattcttatcagtttttgttggagcaaacgaagtgtaacaccctgttgggttttgtgcccttaataagatttactaattaataaaatatcagaaat

SEQ ID NO: 150874 - DNA, 864 bp, Cannabis sativa
gacctatcaccggctgcctcaggatgaggagacacccaaccataacatctgatgtccggggctatgctccctctccaagactattttattaatttccttatatttgttggccttgcgtcgtaccaactcattccccaagcctaccgcctgctgtcaggcttgtttattttttatgctacccggagctggggctcgcccagtccggcagaaattttgtatttttatgaactagtttccatccccaagaagggagacaaatttaaggacggtttttacggccttcgggcccatcctttgaatgaggtcccagtccctttcaaccagcagaagcacgtgaaggagtatcgtcaccgcttcttcttctcctccggtttccaggccatggaccgcccgaagcttctcacggagtgggttaggatccctccttatatgcgaatcgagcctacccaaatatttcttcaacgggccaagacctttgccacgtacgacaagaaggccctcgatgtcggggagttggtcacgacagagaactgtcagaagggcaagtagattttggggaaccagtcggtggatgacttcaatctctccaaagtcatctgcccgaacgtgagggctccggccgcagaaaaggtgttccgggatgacattattgccatggcggaggataagtaccagaagtacctcttcaagagggaacaggagctggcctatatcaaggcccaggcggccgctgggatgactctgcgcgtagaagctccgccagagcggaggacccgtaggcccaagcctgtggtcccggtcccaaataccggagctcccgatgccagcacttcgggttctggtaagtcccctttatcaatacat

SEQ ID NO: 150875 - DNA, 856 bp, Cannabis sativa
  modified_base (36)..(36): a, c, t, g, unknown or other
cttttgaattgtgcgagcagatcatgtattttgctnagatatgctatcatcttttcccccaagcctcgtactctcgagatacatgatttaccataactgtgagtcactacagatctcaatgtgttcggctttcatctcccgagcaagtcttaggccggcgataagagcttcatatttagcttcattattggatgccttaaatccaaatttgatcgcagtgtgcaggtgttgcccccaggtttgacaagggcgattcctgcgcctaacaactgattcatagttgacccgtccagatgtagcttccaagtcagcttgtcttcactattgttcggctgcggtacttatactggctctgggttactttctgaagtgctctcttcttttcccgtacattcaaccacaaaatctgctaaggcttgtcctttaatcgttgttcagggctgaaaaataatttcatactggcccaactccactgcccagttgaacaaccatccagaggcgtcaagtttttacaatacttggcgtaatggctggtcagtgtacacccgaacaggatgagcttgaaagtagggccttagctttctcgttgttaggattaggcaataagtgagcttttctatcaatgggtaccaaatttcagcttcaatgagtcttttgctgatgtagtagaccgggtgttggatattgttctcttctctgattagtatgacacttacagcatgttccgtgacagccacgtatattcctaactcttctgtgtccaaaggttgtgagagtacatgaggttttgcgagttgcatttttagctcttgaaaggctttttcgcattcctccgtccattcaaattgcttatttc

SEQ ID NO: 150876 - DNA, 681 bp, Cannabis sativa
ctctctctctctctctctcgatacgttcaaccagccctttcaacatcccaacacacggcaaactaccccgtagacccccactgacccacgatgcacccccaaccagatcgggcacaatgtcaaaggtgagttcgtgtttcgttttttagaatctcaaatctgtgatccgggcaaggtccgatgaggttaatgaatctgtaagtttgcgaggtaggagacgtaagtccgatggggggtccgatgggggagattgatgggtctgattgtgtctaatatggggtccaatgagggaggtccgattgtgtaaataggggtaaagcggacaatatcatactaatgtgggagtcaaggtgaggtagcggacaatatcatactaatgtgggagtcaaggtgaggtagcggctcgacaaggtggaagagcagggcccaacaagtggtatcagagccaaaggttcaagcgctaggatagtgggatgcatttgcgatttctgaaagataccctcgatgtgatgacctcgcgattgaagatctatatggtgccttgtaacgaaagtttatctgatatggaggtagtcaggtagcgtgtcccgttgatgattacggtggtacaatatggagagatcgatgttaggacctgtgtcgaaagtcttcctgacaaaggtgatggtcaggcggcgagtt

SEQ ID NO: 150877 - DNA, 515 bp, Cannabis sativa
  modified_base (314)..(314): a, c, t, g, unknown or other
gacccctcgatccacgactggtgacactcctttctcgctctcctatggatgcgaggccatgataccagtcgaggttggggcaggttccctacgaagagatgtttttaacgttgtacaaaatgaagagaaacaatcacttcacctcgaccttttagaagaaaagctcgatcagactcacctgaaaaatgcgacttatcagcagcgaaccgcgtggtatttcaactctaaggtcaaggagagaattctgcgagtaggaaatttggttctctgaaaagtaatgccaaacacgaaaaacccaacacatggggttttcngagacaattgggaaggaccatacctcatcgcagaaaaaattggtaacacaacatactgacttgcagaactcgatggaactgtaatttgaagagcttggaatggtgaaaggttaaacttttattatcaatagtactcgcattgtatcgtttgtactcgctatgtatttatacttagtcaatttatctacataaatattctaa

SEQ ID NO: 150878 - DNA, 605 bp, Cannabis sativa
  modified_base (51)..(63): a, c, t, g, unknown or other
aatttattaaaagaacatttgatggtaactgatactacatatttctatttnnnnnnnnnnnnnaagaatttaggccttatatgtgccttgtttaagacaacaacagagtttgtatactgacaaaattagaaaaaaaaaattacagttttacaaatattagatacttatgccgctaaaaataaacattaggtttatgccgcttacaaatataaaactttgggtatttatgtcgctatttaccttttttttaataaaaagtaactaattgatatattatttacatcaaaaacaactaaaatgttaactttataactttcaaaagactgaaatttttggaagcgagatttttcaaggttttttttttattattttcaataattattttaaatgtcagtatttatgctaacatgacataatttagtatttgtgtttataattttattgaaagtatttttataaataaactcaattttaggtataatattgaaaaaaaattaaaaaaatattcttttcatgtccataaatataatatccagtagggctgttcataaaataaccgatccaatccaatccgcacgattcaatccgcacttgtgcggattgga

SEQ ID NO: 150879 - DNA, 623 bp, Cannabis sativa
cctacaaattcatctaaagttgatactaagataggtttgaagcgcattgcgaagaaaggaatgggtgatgttgtagagccatctggttctaaaagaagacctattccaaataagattaagtctcgtaaggaaaagagagcaaaatcttcaaaatctgccaaggatgtaagttaggttatgttgtttttcatttttttttttattttttttccttgttgttgtattttttcgtatgatgttttgtgttttaaaatttttccccttcttgttttaggttatatccgattttgattttgaggatgaagtccatgatttaaaagtgaagcctaaagttaaatccaaggtattattaccttgaattttttcattttcttaagtttaaattttttaatcaccctttgttttctttttgtcaatgttttacctgtttataatgacatttttatgttttgtctcattttttgttgatgttgtttttgtgttgttttttagttggtttttggttttttttatgctattaaacaatttatagcattattggtttttcagtgatttattgccttgttatcaacagttgtttaactgtttgttttcagttattttcaggttgtttaatttaattt

SEQ ID NO: 150880 - DNA, 796 bp, Cannabis sativa
taaaatatgtaacccttaaaccttatagcttttcaaatgaaatatgctcatttatggtttagggcccagatattttctttgacaattgtacactacaacaaaattcactattcacgtcggtcaacgcgactgttcatcgcgtcgaccgacgtgaatagtaccatattcaatatattcgtcatttgtaaaatgtcacaaaaaataaataaattgcgtcggttttaatccctcactaattacccaaccgacggtaaaagtcaaaaaactaaaaaaaatcgttcattattagcgtcgttttaaaagcctcacgaatgctttgtgtggcgttttaaaaccgacggtaaagattttacgaatgtgagaaaacgacgcaaattctcttattgttcacttaccccaaatgacaaacaggcggtctcccaacttttttccctctctatcattttcattttcgaacagtagcggctctctttccctctctttctctgaaggtctgaaggtctcccaacagggatgcgatttccctctcctcctcagctctgaaggtctcccacctccgtaagtctctctcgtcctcagctagctctaaaggtctcaaacagggatgtgatttccatctcgtcctcagctttgaaggtctcgtccggtgtcgtccacctctgtaagtctctctctttcattctctttctctcttgtgatctctcttgtgttataacagttggtatatacgctctattttcatcatgaatggataatttctcattaacagttagtatgttaattttttcgaaatggg

SEQ ID NO: 150881 - DNA, 569 bp, Cannabis sativa
aattaattacaaccattcaatagtgatttaatgactaaaataaatgtaaccatgatgattacatatttaatttaaccattgaaacctcctccataactctaaatagtaataattagtaatatgaaattagataatataattttattattatatattaaaattattgttttaaataactatttattatattaataaatagttatatttctttataatactaataaatttaaatcagtcgcgagaagagcggctatattgcctagttataagattatgttagtaaatattttcatttcaaaacttgtagagaaatgacttttttagactatttattatttatattatctttttccatattaaaaaaatcaatattttttttatatttttttttttagaattagaagtaaattacttaaagattatagtatatctaaattagttttgttaaaaaaaattatttaaaagttctcgattttgtaaattttttattagttgttgtgggttgttggtatatagattttattgtacaatatatttctattttgttgtatggtatattattattctta

SEQ ID NO: 150882 - DNA, 611 bp, Cannabis sativa
aatgggctggggcagtaaaaaagttgtttttgtcgtgtcccagtatttttgtaaagttttggtccaaaaacagtatatatgtaaatttcccccaaatatccaatataaaaaatctatttcaccgatcttgtatcaaagtctttacaaactctaaattttaatcaaatctactatcaaaattctaaactctctacataaattataattcctaaaataaagtagaacaagtatcaatttataaatttatataaaacaaaatcaaaactaattataaatttacataatattgatataattaaaagaaacatgacaaactaaaatatcttcaaactaatttatttatttattttttctataattattttcttattctattaaactcaatttttgaatatgaatttattatttaactaaaaattctttatatacgattaactacaaacatctgatatattttgttttactacattcaaaatctaaatattatatttagttaggagtgtcaatgtgtcgggtcggatctgatccgactatgatacgacataattcagatcatgtaaggatctgccccgtctcgacctgctagatcagatactcggatcggatcagat

SEQ ID NO: 150883 - DNA, 641 bp, Cannabis sativa
  modified_base (283)..(285): a, c, t, g, unknown or other
gctccggccgcggagaaggtattccgggatgacatcatcgccacggcggaaaggcccaggagcaggcttactctaagacccaggtgactgtcgggaggccccttcgtattgggagcccggtggagaggagggccccatgaccaaggcctactgtgcaggtgccgaatacgggggctcccgatgccagcacttctggtcctggtaagtcccctctaaaaatacattacgtccctcctgctcgtgaatatgctagccttaggcctatagggttcgatgaacgtcnnnttaggtttaggatgccctctacccagtgcggggatcatgcaaaggagtattacttctccaacttaggtgattatttaggccggttctggatgggttcggggcctccggtgcccgttcccttggatccttatgacgtagccagtgttaagattcaggactttgctagggccagattagagagtcagggtaggactagcttgattgctttttaagtgttcgctgctttcacaaacaatctaacacctgacttttttctcttgttgcagcagctgaccccatggaggcgatcttggccaccgttgctgaagcccacagtcttgatgtttcccttcctcctacttcttcccagatggtca

SEQ ID NO: 150884 - DNA, 566 bp, Cannabis sativa
gattattcattaataaggtttgcaaaatcaattttattcagtagtcaatagaatcaaaaaacccaaatttaatttcataaagaaaatacataaacactaaaagtttaatcttaaaattctcttaatttattcaacgattttagtcatttaagatatcaatataaagagaattttatgatgaataaaacccctaaacttttaagattaaacaacaaaaaatttaacagaaaataataacgaaattaatatgtaattgtaaaaaattaacatatacatagaatacaataataatatataataatgataggttctaaatcatatacaattggcaatctgataccacatgttagataaattaacaataaacccaagatctatttgtatataacatagaatacaataataatatataataattaggtatgcgtgtctgattgatccatagcaattaccacaatttgatagtgcaatactatcaactgagtcttcctccctagatttataaatcagaagcaatttatttatctgattatcaaaagtatacaattgtgatgagacaatatgta

SEQ ID NO: 150885 - DNA, 734 bp, Cannabis sativa
  modified_base (39)..(39): a, c, t, g, unknown or other
atttgatcgataccattgtggaaaagaaaaagttgatanaagatcctttagaattgagcttaaccgaagatgagttgactgagcaagaagaaatggaggcgatggagtatgccaaatggctcgactcttatgggccattgaataggaagtattatgaagagttggggttgtgccaaaggagcttgtgccatcaacagagaaaccaccagagttagaactgaaggtgcttcctaatcatctacgatatgagttcttaggagaagacaagaagcttccagtgatagtgtcagcttcactttctgatgtggagactgacaagttacttagagtactctgggcacataataaagccattgggtaaacattggctgacattaagggaatcagtccctctacaattatgcatcgaattttaatggaggagggtgctaaacctactattgatgcacaacgaagacttaatctaccaatgaaagaagttgtcaaaaaagatgtggtaaagtggttagatgttggagtggcttacccaatttcagatagcaagtgggttaacccagtacaagtggtaccaaagaaaggagggatgacagcgataaagaataagaagaacgaattaatccctactagaacggtaactggttggagaatctgcattgactacaggaagctcaacaaggcaaccaggaaagaccattttccttttcccttcattgatcagatgttagaccggttgg

SEQ ID NO: 150886 - DNA, 602 bp, Cannabis sativa
  modified_base (302)..(305): a, c, t, g, unknown or other
  modified_base (427)..(427): a, c, t, g, unknown or other
gtaattaagtacgaatgaaatagaatacatagaaattgaggaaaaaataaatcatattgaaactaaaaatcaatgtcagacaatatccatctagacccaaatgaactatttagctactcatgttcatcgtagcaaattcacacatattaatttaagaataaagaagaaaatataaaagaaaaaatgctgaaaactctattgagaaagcctccaatattgattttgctctcttaaattcgtaccccttgattgcttttgatttcctactaaattcccccttgaaaactattgaagtccacttnnnntatagccaaaaaatgataaaaaataaaaaataaaaaaacgttgaaaaaacctattttgcttaggattagaaggggcggtgagttttttactacattaactgataatattttggccataactntctcgatattgcttggaattggacgattcaagatgttcccaaaagataaacgagagatctagaatatttatgttttgacttcctccaaaatctgatcagataatagttgaatttagacttgaagttttagctttatttttgcacaattttctctattttatagttcatctttttg

SEQ ID NO: 150887 - DNA, 614 bp, Cannabis sativa
attaattttaaaatttggtaattaagtttaaatattaaaaattatattttatttagatatttagaattcaaaattcaaaaaatttgaaattggtggaaaaatcccctaaaaatcgaattttagatgcataacacctagctatcgagagacaggctgctggcagcctctacgtgcgcgcatgagaaggatcagcaggatccttggccgagatttctcagcccctgtagcctcttggtgcgcatcatcgtgtctgaatggggtgtgtaccctgtctttagacatggtttgtccgagggatccgcgcgcgtgcatctgtcttgtccgagttgctggtatgcgagcaccatgctcgacaccacttggacccaaaacttcaaactttcatatctccttcaatttttatcgaaatcgagtttcgtaaaaactaaagtttcttaatttttcacaaggaatctaaataaattattttcagaataaaaataaaattaattacggaaaaaatttgtaattcactaacattcatcaaattacacataaaccaatatgaacacatccaaatcaacaaatcattgttttaatccatatttcaggaaagtaaataattaccatggctc

SEQ ID NO: 150888 - DNA, 570 bp, Cannabis sativa
agcatcaatcgtccaagccttcgtgaatcaccgccatcaaccgttctatccactgtcgatgtattggtaacaattcagttttttgattgtattgcttcttatcttcaaactgtaaaaaaaagtaaaaatttatattagtttatatatattattatttgttattataataaatactataatcaataattaaaacttacagctttttaatcttgtatgtaatggttgtggtttgcacgtgcgacgatgtcagtcatgtattacaaaacataaaaccacattcttgatttttaggttgtcttggacaatttgctagcaaaattcctggcacgggccaagatacgcttttgatgcccctatatattcgtatgctatgtttgaaaaattatgtggtcacgtataaggtctaaatggataattttcctttgagcaacaacctctagcatccaatgcgcgctagaaaattatattcggatataagtaagatagtataaaaataatttcaagttataatatagaaatgaacaattagcactaaaaaattaaatagtgtttacccgatattccaaggaa

SEQ ID NO: 150889 - DNA, 642 bp, Cannabis sativa
  modified_base (167)..(170): a, c, t, g, unknown or other
aataaatatcctttacctaggatcgaagatctttttgatcaactttaggggacggcggtcttttcaaggcggtcttttcaaagattgatctccgatcgggctatcactagttgagaatctgagaggacgacattgcaaaaatggctttccgtactaggtatggacannnngaattcctggttatgtcgtttggactaaccaatgctcctgcgacaatggttgtaacaaatcaaacacttagaaacaaagtccactatattattcttcattcttggccattaatacatggtcttaaggtcctagcacatcttggtcgtactggatgaatagagtggtatgggattcatctagaatctcttgtttaatatcagcatccatcaaaacacatacacagttccaagattgtgacatactactaccatcaacagtaaaatcttcagctttgcgagctaaaaatttgtcccaaatctagatcttcatactgagcttttctaattctctctagttacgtgaattgtagagtaatattagctagtagtcccactattggaatttattttacaaggacatagattaactaacaagtatgtttttaacatcctaaatatgaacttctagaacgatgaaaataaacacataaaa

SEQ ID NO: 150890 - DNA, 519 bp, Cannabis sativa
agcagcatcaacatttaatttgagaccagtaggtgatggtggcagccatggagaatgtcgtgtaatatcttgatgcagcctagctactggtgcaatttctggtgtgtgagaacttgtagaaacagtcactggaggtataatgcctgctgatccttgatgttgttttgttttgctactaagaaacctctccaagtgtgtaacagcaaaagaagcaatggcatggctggggcgtgagacacctccatgtgtgactttgtttcgattatgccaaattgcccacattgtgcaaacaagtaattcaaagtcttgttttgagtgcaaggttgataaatggattaaataatcaccattatccatattgtgtgcatttgaatgatctatggtgaactttgtttccctccaaactttcttagctgtagtacaatgatattttgaagattaaaaagtttgtaatttgtaatgggaaatttgattttctatacttaaaaatgttcacaattttttttttttaaaccaata

SEQ ID NO: 150891 - DNA, 831 bp, Cannabis sativa
gtgcccaattaattttttagataaaactttaaattttataaatatatatacatacaaccgggatcttgtatttaaacttttacaattacttttaaaataatttattaataaatatcgcacaacgaagacaaaatacatctcaagttatcccgagaccaaaaactccaggtcgcaccatctcgacatgtacaatcatcccccgagctcagaactcactcttgttcaacctttgcctctcccttacctacacacaaaagtatatctatgagtcaacaaactcagtaagaaaagcatataacatataatatatttgacttgtatctaggcacgcatacacctatccacaagatttaacaaataagtaagaacgttctttatagtagggtacaaccactataccacatgcactacatactgctactgtacgagtgttagtaggatttgcaccgtacctcaagtactcctaaatgttgtaccacatacattgtaccaacacactcagtaccgctactatactagtgttggtaatgcacgaatcacaattagcatgcatatacactacaagaaaaatgtgtattaatgaggacaaatttcgttggtaaaaactcctgttttcgtcagtattcttcattaataaggatatttcgttggtgaaaagtcattcaaaatagttcgtcggtaaaaacgattatcaacaacgacttgtaaagttgttggcaattaaaaatatcaacgacgacattgtcgttgggaataatagtctatttattttttaaaaaaatttgggtgcatcaacaatgacaatgtcgtcattgaagagtgtcgaaaaaa

SEQ ID NO: 150892 - DNA, 663 bp, Cannabis sativa
ttaaaataaattaattagattaaaataaataattattaaatttcttatttttttaaaaaataatttatattttattttaataattccaaacaacatcaacctagaatttttcttatatacgtgagtttctattatttttacatttgataaaacataatataaaaatactataaattatttttatcaagtgcatgtaaatttatatttgaaaaaaaaattaaaaatatataaaaaataaatttttatatatttgtgattataataaattagattataacaatttcatattattataataataaatcttaacaactcacggtactttgaaatttataatttaccaaacacacagttctgctgtagttactttttctcacagcacagatacagttgcttttccttacagcacaactacttttaatttaatacattaaaaaaatcactaacaattgttaaataaccatacatcttattataacatttaacacccctataatttaataaaaacgctctattattaggatgagtgaaccatgtggagccattatataatatccacagcccaatcacaacacctattaagatcatcatcatgtcacaaatggaaacattaattgcagccccaaattatatcccattaccgaattgggccatgattaaagc

SEQ ID NO: 150893 - DNA, 861 bp, Cannabis sativa
  modified_base (282)..(282): a, c, t, g, unknown or other
aaatgggttttatgtagggcacaaaacccaacacttcgtacctcactgtacgagtgttggtagggtttatttcataccctgagtaccactgagtgatgtaccacacgcacccaataccttcctgtacttgtgttggtatcactgttctgcactcctgaccaatattcactataccaatgcactctgtaccatactgtacaagtgttggtagtgcaaataacactttaagcatgcatatacacgtaacatatacatagactcagatattgatatcacacattntattcagttcttaccttctttccagattcaagtgtgctggtcgacctgaacgaaaagtctcatgctagatggatgccctaatcacattatgaaaccgggtaagttacatgatcaaaaccctaatcacgggaaactcaaaaccataaccctaggttctgttatactccctagaggttacccaaactcaggaattagggaaacacccaaccacggcactgaaatggaggaaaattgcgaaaatgaagtgtttgggaatcctgccaaaaccggctaggttttagaggtctggcaaaactggctagccggtttgcaccagttctccccaaacctttcacctcttgctcaattttccaacaaatgctaccaaactttccagagtacctaaccaatgcatatacaacatattccagccagtatttcacagaaaaaactaagtgtaaacaaatatgccattagagatcaaagctttgaactcaaagctcaaacttgcacaacacctaatacaaccattaataccagctgctaggacctaaaaccaactcaaattaagcttagaattcgaaccctaagcattcccaa

SEQ ID NO: 150894 - DNA, 658 bp, Cannabis sativa
taggtgagttgagacatatgcattgtgtcggaaagttccacatcattatcaccattgaattgagatacccgaacaccttttgacgatcgaattccacatcaattgcctcaattctaacaggcggattgagagctttagccacatccttcacagtaaaggaataccagtcatgtcccctgacaaagactttgccgaacataaaagagtcctcatcgaggcactcatcagtgatgttatcataaaactccttcacaatttaatccacatagccatcgaaaccgatcaaagtatccacccattgtgtatctttcaacatattataaaccccaaatggcttatgagcaatgacattaaaatttttctcaacagtaaaattctgattgtcgtaaaatttcatgtctctagtattatcattctaacaaaaataatgagaatggggcttgaagttttcaagagtaataccagagggccactttcttttccgaggaagaatagggcttgcagaaataatgggtcgttttcctttgtccttctttggaactgcagtagggacatcaactggttctgcactaacaggttcaacttcaggcacttcactttcagacccagaatcatcatcggaggattgttctttgggcacaaactcttcacttgaatc

SEQ ID NO: 150895 - DNA, 553 bp, Cannabis sativa
  modified_base (46)..(64): a, c, t, g, unknown or other
  modified_base (484)..(526): a, c, t, g, unknown or other
tcgttttagaagttcatatttggggtgttaatcaacatacttgtgnnnnnnnnnnnnnnnnnnntaaaataatttccaacagtttcccccacaacgatcctttagtaatcgacgcatgaattgccaacaagagagtttctaggatactagttgacagtggaagctccattaatatcttgttcaagtttgcattccaagcgattggactcatggaagcagatctaactccatgccatgtccaagtacaaggcttcaatggtgatgccttaatgcccatgggaaaatccaactacaaatcaccctcaagggagacaacgaggctagtgcatttaaacactcaacttttgtagtagttgactgtcccacagcctacaatgccatattgggtcggccaactctagtggactttggtgccgtgagctccatccgacacctatgtctaaagttcccatgcgataattgtttggaatattttaccaggatnnnnnnnnnnnnnnnnnnnnnnnnnnnnnnnnnnnnnnnnnnnaattctctaaaacaatgaaataaatac

SEQ ID NO: 150896 - DNA, 619 bp, Cannabis sativa
tctttgattttttccaattttgaaacataaaagatgaaatggtttttcactaagtaaataagccaaaataacataacatacatcacataatcaccaaataaaatgcgttccatgttaccgggcaccgaaaatgtctaaataaactgcccctataaactaacatactaatttgtgattctactgagccatacaccgcgttccatgttaccgggcaccgaaaatgaaaaattataaaatttcactatatgacataaaatgcattcagaattcaaatatagccacataaataattatatataaaatatctataaataatttccataattaaatctttattaattgctaattttccaaattaaactaggtagtctttacatcaattctaggtcattggcaaagtttaccactatcagatgtacgaagtatacattggaagggaacgatattgatcttagataagataacataaacttaccgttatatctttctaagttaatatcaaaggttgatcttgggtctatggattttaatcctgatatggttaggttaagtttagttgtattattatgtttttcaagttgttcatgggcagatatttacatcttgggaacatggtaat

SEQ ID NO: 150897 - DNA, 521 bp, Cannabis sativa
atggtttatggtatccaagaatggaaatatttgttgtttcatagcattctcggatactttccatgattagtgctttcaattcctgatgaggtattgaatttgatggtgtaggttcttttgaacaaagttgcgttggcaaagttattgacacttgccctagttctgcttgctcctgtatacttgattgttcctttgaaaaaggttgtgtttgcaaagttgttgacacttgcccctgttccacttgtttttgcttacttaaactagcttgtttagctaattgtgctgtaagatattcaacttcagcgtctttctctgtcaactttctttgcaactcttcaatttgttcttccaaactcatcgttccaataacaaacactgacatactgttagattcaatgttgttaaattttattgaattccttgggaaagtcttctcattatttgtagatggaacgttgcgatatgagtcactggaacatttcatgaagcttttggaatgaactgctaagaaactggggcac

SEQ ID NO: 150898 - DNA, 554 bp, Cannabis sativa
  modified_base (172)..(174): a, c, t, g, unknown or other
attattcttaactttttccacccccatcagatcaaaagatctttctattaagcaaattcttaataattgttttagatcttacaattactcataaacatagaaatgaaaatctaagtgtttatgtagcattaactctttgcagagttgaagatactatagaatttgtatcaannntaaaaacacatacacatacaatcaataaacatataaatataattggtactagcatacacaagataaagtaaataaagatcaattcataaatgcaattcaatttcaaaatagaaaactttcttttaaaattctcaaaaatagaaggaattgtctgcaacaatatgaaaaatagggaataaaaatcccaaactaataattgaaatccaaatttttctgaaactaaaacaattaattcaaaaataaaagaagatttcgagcttcatcttcatcttggattatcttcacctatctgtccaaccatccgattcaactcgctaagatagcatccgagttcaagcagttggacctactcatttctcccattcaacagcaggtgtctg

SEQ ID NO: 150899 - DNA, 568 bp, Cannabis sativa
ttgacaaggcattgaacctttttcgttcgacatatcatgtcttgaaggtggttgagctagtggaccctatacaaaataccatataatatatcaaatttaattctaattctatcaaacttttggcagcataacagtagtaattgaacgcctccaaaaattttaaacatgcctaataataaacaaaacagataaaataattgattattcatctattcgatcgcagcacacatttaatatttaaaatattcaaactccactaatgattgataattaatttgtaacaaaaattcaaggccacccttattgagacaggtagtctgaaatataataatgagatcactacactgatcctatcttatataatacactataaaaaattttacttttaatcacaacaaaacttgtaactaaatatagattattaatatttttatgttgtgactaaaagatccgtggctaaatatatcagcgacaaataatttgttgtgattaaatgtatttttagttatatgactaaaactaaattagtgataatttgtgtctaaatgctatattttagtcacaaata

SEQ ID NO: 150900 - DNA, 709 bp, Cannabis sativa
cccagtggctgcggcaggcacaaccccagccgcggccataaagtcaactaccgggggctaattttcgaaggtcatctcgccgcggcgagcatcaccatcgtcgcggccataaagtgcattaccgaatgcctatttttcacctttatctcgccgcagcgagaccactcatggccgcggcgagagtggtcagacacaaataaaaagggggaaacgatttaatttcaaaatcacacccctttctcaaccctaaaaccaccacctccaaaaactcttcccgataaccaaatttcttcatctcatctcatcccaaccctttttcttccaatcttttcataatctttcatccccaatcactcttaaacactcttcctctcatcaaacactcttttcctctcaaaaaccatatccaaatccctaaacctcacctaaattcaaaaatttcactattcatcatctgatacctcaagaactttaagctttcttcaatggaggtagagtgaaggagattttcattgaggtaacaatttcttagattatttatgcaattattaatagataatttttgatttttggagaatcttgtgaatttagtatgatttttgggatattgttcattgcatcattgtggagagttgtttgtgaattaaaattgtgatatttgtgattgggttttcacccagaaagtggaattttaaggggaagtgctgcc

SEQ ID NO: 150901 - DNA, 573 bp, Cannabis sativa
  modified_base (279)..(284): a, c, t, g, unknown or other
  modified_base (450)..(463): a, c, t, g, unknown or other
tgttagagaatatttgaaaaatatttaagatctaacaaatatcttaaattctaacttaaattcaaatatctaaccaatttccaaattttaagtttatttaaataatttaaattaattaaatatctaatgagataatataatataatatcttgaatttaaaatttagatgtttctaatattatattcttaatcttataatttaataaattaaatacaacaaagtaaaacaatttgaaaaataagatattttgattgttaggatattatcaattttatttnnnnnnttaataaaacaaaatatcctaagtttaaaagttttatggttagcaaaccctaaaatttctattcaaacctaaattaacaaacttttcaaaaatttcatgttattttgccaaaattaaatttaatgagataaaatgttacaaaaatatttttctaatcttataattnnnnnnnnnnnnnnatatttcaaaaataacaaattttgaaaaactaatatggttagcattttttgaaatttaaactagattatttctaaattttattaacattttaatatcaaaataagataat

SEQ ID NO: 150902 - DNA, 612 bp, Cannabis sativa
aaatgtaaaaaaaaaaaaatcattaaacgtaaaaatatattttttttacaaaaaatagtgttttatgtaattattctaatatatattatgttttatgggatgcattagaccgaaatttgcttgaaaaataattgagactatcttgaagctctcttttaactttttgccactttcttgctctaaccctaatatttaacacaaaattaaaataaatttaatattccaattaaaataattttacaattaagattatgaaaatattcactttaaattaattttatgtgtacaattaaaggtttaaaatgtacaatattgagccttaatcacctatagtactatacccgaaaaaattgcattttattaaaaaaaacgtcgcctattttatttactacgattttaaatcgtcgagaatactaaatttttctcgacagttttaaatagttacttaatttttttagcgacggtcccaaaaaaaaattgtttttaggaccgtcgcgaattttaatatttgtagtagtggatggtggctatcgcttattcttgttcgcagctaagagtaccattttgctcgcttgcggctggctaactctttgataggtgtggatcgaaagc

SEQ ID NO: 150903 - DNA, 568 bp, Cannabis sativa
tctcatttctaaaaacaattttttgaaaataaaacagaaaacaataccaaacatgctcttagattttaaagttttttttttcttttttaattttgaatttatttatctatgtaataaaaataaaaaataaaaaaaaataaaaagtgaccgagtttacgggcgaattcaagttcaacctaaaacccggtaaccttaaaaattaacatgccaacccgtcaaaaagtgtacttggttagacccgagccgcccgaacagaacgaatttttttaattttacgggttgaccaggtcgggtccgggcgagttggtcgggtccgggtcaaacttggtcaaaatattcagtcctaatccctctaatgctaaatacccaaaatgccctttgacttctaaattaatagcaattataagcctaggggtaaaatggtccaaaactataacctcacttaaattcggcattctaaatatttcttaagtttatcccactaagatataggttctaaactataatacccagtaaaaatatacatatattttaaattttatttgttatacaatttgtgtgagaataa

SEQ ID NO: 150904 - DNA, 521 bp, Cannabis sativa
  modified_base (54)..(57): a, c, t, g, unknown or other
  modified_base (331)..(341): a, c, t, g, unknown or other
ttttcatggaaaaattttgtaaaacacattcaatcatcaaataacacataaacnnnnatgaacacatccaaatcaacaaaaaaaaacaataatcatcgttttaaatccatatttcatgaacgtaaatcattaccatggctctaaatatgagttctttaaaagaatgaagataaacacataagggtttaagaaaaccttacattgatagcaataaaatataatgactccttccattcaagatctctagcccttgattcctttctatagtagagcattatcaagatctgaacttggacctctttctcaccatcgggttcggttaccaccgtcnnnnnnnnnnngattgagtacttgacttgctatttatgggcacgtcactcattcactatgggttggaatatggaagaacaatgaaagacttgaaatcactaaggaaggaactttctcatctaggtaggttgaatagtcaagttgacaattgttggatgagtgagagtatcatgttccttttaaagtgtttc

SEQ ID NO: 150905 - DNA, 552 bp, Cannabis sativa
tataatagagattatatatgaaatcaattgatatataattaagttgtctttattaaatatgtcatttaccataaagacctaatccatattataaggatgatcaatagtagatcggcctgaatcctgagtaatcatgaactcctattcatattattagtttctttgattcactcgttaaattttctcaaagaggatgattcttacaacttttgttttgggaatctaataatgcggttggctggaaacattatctacaattatgtaatcctgacttttgttaggttatatttagcctatgttttgggtttgaaaagtaagcattttctcgtctattggcgtcttttggagcggttttacgcttgattttaattgtttcaggttcctggggtatcaaagttcaaattcaatcaattgaggaaaagacaggacaaactagcaaaatatcggaaaaatctgctcaagaggtgtcagtagtcgcgaccaccaatgagccaggtcgcgacccttttctgtggtcgcgactttgacgaattggcagaaactcggtttttc

SEQ ID NO: 150906 - DNA, 532 bp, Cannabis sativa
gccctgcttctcggttactgagtcacacggtgatggtgacgggtcgtagctcgcttggagaagggcaggctcgaaataggttgtgggttcccaaagctcgccctgcctcgcgcatgccaggaattcccattaggggtaatacggctcctggtcgtactctgcttgatgaaaagttgactgaaaacttgcctattattaattcaaattctgctgacctaaagaagatgtgtgggaaagagaaagactttctagatggggttgttgggccgactcactcttctattgggccggtttcaaaaatggatcaatttagagatggagcttcttctggtgggccttttaataggtgcaatgaatccaatttagctcttaatggagtcgagcccactttggagaaccaaaaaacatttctgcctttgcaaaaggttaatgggccgtgtgatacctttgggccgggtgggcttcctgggtttaaaaataataatattgctagttgtgaaaggccaaccaagaccatttccattgagagttc

SEQ ID NO: 150907 - DNA, 565 bp, Cannabis sativa
  modified_base (471)..(484): a, c, t, g, unknown or other
gccttagtgtcttcttcttcaacgtaattacaactagctactagaacttctccgtcctcagagatatccttgttgaaacctccaaagggttgtaaccaaacttccccctcctcttcttttgcttctcgctcggccgcaggaggggtgacaggacaaacattgccctggtcctccactgcttggacctcaacgtccctaacatttgtaattttttcctcattcaaagacctagcttgttcttctctagctgcagcaaacatccaagcaaaatgagggtcagttgctgaagccttccttatggtcttctttgtccgtgccatcattccatgtttggggagggcctttgattcattggtatgtcttacaatagtcacaaaaaaatcatctacaacagctcccttagtagatagagatggtcgggcttcaggcactatctcagcaaccccaggttatgttggaaatattttaccnnnnnnnnnnnnnnctaccatgtatgtttcattaacattctaatgtgaattctaaaacaatgaaataaacacataagggttcaagaaaaccttac

SEQ ID NO: 150908 - DNA, 1255 bp, Cannabis sativa
acttgctttgtatataaaggggtgatccgccgtgaagtgaacacctacgaaatccttgcaacagtggactaagcagattgtgatctgactgaaccactatattcccttattttcttaatatttcgagtttttattaagcatttacgtttccagttcgagtactttccgttctaggtcgaatactggcacttgttcatcatattgttcttcttcttattattattattattcatttttggcattgtgaaatttgctcgacaacatttggcgccatctgtggtaacgaagaagtactttcttgctaatttagagagaaaatcataatggctggaaaccaagaaaacggaggtcttaacaacgaatccatcaacatcggaatgatgaacgttccactgtcaggaggcagagcacctcccgtagatgtcatcaatggcggagtaggtcggggtaatgtgagacctctcaacctattccctgaaactactggccctcatgccggggaaacatctacaccagcagccacaacggggcactttccaccctttactccggtagcagtgtccgagggtattgtccaactgaccaccgatcagtacaccgcaatccaagaccaactacgcgccctgcaggccaaggtggatggacagaacagggcccgacgtcctcctcgagaacccactgctcgcacgaaaaatcctcaggtaactaactctagacgtcgtaataaccgtactcgcagggaacgaagggccaaccaagaaggactcgatttgaatcaaccaacatcgagggaccaatccgcgagatatgccaaccaggaggcacagactgaggaagaccctgaacgacgcaatcctcgcagcagaccccagttgcgagacaatgacgttgaatccgcctcctcatcctcgcatggtcgcacacctagcaggtacactaggtcgggttctgtggagcagggaggacgatatcaggttcataggggtgatctacgcgatcaccttaacgctgttttcagggcacgctcccaggcacctcgtgaggttgaagagccccgtgatccccgaaagggcaatcagagcataaataatcccaccaatccacctatcgcaccagccgcgactactggggttaatatcccagcaaacctcactgcagtagtaacagcacctgcagcagcaccagtcactgctcccttagctgggaatattgatcaaagcatgcttctgcaggctttaaaaatgctcgagcagca

SEQ ID NO: 150909 - DNA, 730 bp, Cannabis sativa
atctatgtaaccaagctcctaataagaaattctcactactacaaaaagcgctttctactttgatttttaagtgacatataaagaatttgtttcggttagtgtacctgacgctatagttgtaaacacaaataatgatattttttgcttcacttatgaaccgatgctaattgattatttgtttcgattatgaaccgaagcaaaaaaaaaaaattagtgcaccaacgctaattgttttttgcttcggctataaactgaagcaaaacttttttttaaaaaaataaaaaaatctagtaattataatcaaatcaatgccacacaaatttttttagtttcacataattttttcagttccacataaacaaatctaagatctcaaatttacaacaatctcaaaattttttagagacaagaaagcacaccaccgcatgccacgaccaccaccaccctaccaccgcaaccctaaaaaaacgcaatatcagattcaaaatatagagatcgaaagagggaaagagattgagagagagagagagagagaaggagggagggagagagtactgtgactcatggggtggttgtgtggtggctctcgtctaggcggttgacgatgggcatctcggcagtctccgataggcacttccgctaggcaaatatggtggtgcggctaccatggtgtgactgggtgagatagatagatagatagatagatagatagatagatagatagagagag

SEQ ID NO: 150910 - DNA, 631 bp, Cannabis sativa
taaccaagtttggatctttttaactcaaaaactatgatttctatggaaaattgataagttttgttgctgtgcttgttggggttgatttttattatttgcagaagttttgatatgcatatttgagtagatttaaacacgttgtgatgcatgtaagtgagttttagccaagcttgagttttgaactgaaagcttggagctcacatggtgattttcgttttagtgcatgaagctttgttttaatgctttgaaaatgttctttagggtatttagaataggtctggaaggtttgatatggtttgggtttaaattgattgagatatgaatttttgattgttttctgcactgtaccggaattttggttcagtatggcttgtagggaccggaattccggttggtgttctgggttcggccatggactagaaaaggaacgcatccactgcaaccggtggctcttgttagaacaagaggttccgggggaaccagaaccgaggcagtcgtcagggtagttctgacactcgtttttcttacccagagtgccccatttataaaaggcaccatctgggtgaatgtagagggcagaggtgcttccagtgcggcatgccaggaaactacaagagggattgccctcaac

SEQ ID NO: 150911 - DNA, 591 bp, Cannabis sativa
tcggccattctttctggcaacttacttggattacgtcagcatctttctgagtgaagatttgagtacgggctctgggctgcacgattgtagtaacattctgatcgtttgctcccctccttctatttagatcattccttaggtcatgggttgtccgtaacctttcaaacacagaagcgcgtggttgccttagcaattgattcgctcggttgacgagtggaatggcaccatggatctggttggagccatcaggtatgactcctccagatgaattaccagacaaggtctgctcacctaccgctgggcccatgagtggaactcgtgaccggagattgggttgctgatcatttgtagtctgggaagtgttcatcgttggatcctcatccgtttctcccaggggaacgactttcggcgattgctgacctatagtttggtaggtccttcgtatcagtacggtagcttgccgactacgatcttcgatctctgcatggtgagaatttaattcctccatctctctatccctccattcggcgaatatacacttttgttcgtcgaacacgagatttactgcagcgcgtagttcgtcttgatcat

SEQ ID NO: 150912 - DNA, 580 bp, Cannabis sativa
gaagtatagaggatggataagaagacgcaaaatatgcactgtaggggctttcaatgtccgaatggacatggaagtttctctaagaattcgctggccctactagctaatggaagaaacctatctttaacacccactggttttggatataaatatcgtttaggtgttgatagttgttgagcattacataaggtgttcatgcttaccttgacaaagcatggatgattgatcacaatatgcgaaagtactagattgacaggttacgagatcaccataaccattgatgcaacaacttggttatatagaacaatggaagaatttcagcagaacatggagcagcttgagaataatgggagtgttcgtagttcgtaaatacacaaaatgataacgatcattatttctaaggaaatagactcgaaggaatggaagagttttgttaactgtttgtttggattagtggattaaaaattacaatgcgaaaatcaggttgaaaaaggatggaggattcacaaacttaagcaaacttggtgaaaaaatcattgaaaccacaaaaggaaaaaaaaaggattgcaattaaagttat

SEQ ID NO: 150913 - DNA, 581 bp, Cannabis sativa
gtgttttataaaagatcaactgctagtatcattttgttagtggtgtatgttgatgacatcgttattactggaaatgatattgaagacatgtcatcccttaagtctttcattcataccaagtttgacacgaaagatttaggggagctcaagtattttttgggtattgaagttactcagagttaacaaggtatttttctttctgaaagaaagtatgtacttgatttgttaacagagacaggaaagttgggagcaaaatcttgtaatgctccaatgaatccaattgtgcatgttacacgtgatggagaaccatttgaagatcctgagaaatatcgcagattggttggaaagtttaattatctaattgtgactcgtctagatattacattcctgattagtgtcattagtcaattcatgtcttctccaataattcatcattgggcaacactagagcaaatttaatgttacttgaaaggagcaccaggacgaggtataatttacaaggatcatgaacatatccagattaagtgtttctctgacgcagattgggcaggctccaaggtagatagacgatccacttcaag

SEQ ID NO: 150914 - DNA, 676 bp, Cannabis sativa
gaattagggccgtgtataataaatgcggaaatatatgtaattactaacttggttgttccttaatatatgtaattactaagtttcctttttttaattttttttttttaaaaaaaaagtaactttccttatatattaatatcacaaaattattaaaaaaataatataaaaagaattaattaaattttgctattgaatatgaggtgacacataatcaaaaaaaaaatgtctgtatgtagagatattttttgtgactctacctaagcattattattagttatttaattcatttaagtttttttaaataagctagatttttataaattatttggatacttaaatttaaattgagatattttagatttgttagatttaatattttttaaatattttttaactacctaatttaaattcaaattttgatattttttaataatattttatatattaaaaataaaaatatcttagccaactttccgtatcttgttacttgtttgtttattaattcaaaaaaaaattgataaacatattatttatttgatttaaattgctatgattaactcgttgaaagatccaatgatctaaattagctatagttcaattgtcaataaatcaaataaacaatatgtaattttataattttctttcatctgtgttaaacctagtaacatgatagggc

SEQ ID NO: 150915 - DNA, 944 bp, Cannabis sativa
  modified_base (534)..(554): a, c, t, g, unknown or other
  modified_base (660)..(670): a, c, t, g, unknown or other
agctaaaaaagtattaaagaatttcacaatgtaccctttaaaaaaggtctatatatatcgatgcacctttatttattttagtatttgagagaattttttagttatcttttttcatagttgtctacgttgtattatttaagacattttgggctcgtttggtacgtcgtataagggtcgtattgtattaaatagtaaataacactatgtttggataaaacaatgtattgtattaattattacgaccaatttttttaatacaatgtatgttgtattatttaatacataataaatggtctgtattagcttgtattataatatttacaaaggatttagggtcaacaccaatttccgacctggacccggacccggacccggacccggacctggacctaaaaaacaatgttgaccccaattgttattgggagctactaatatagaaaacaatgtgtccaatgaattaaattattagtttatttttttgatattcatgtacgttatgattatttaacataccctacaaaattttaagaaatnnnnnnnnnnnnnnnnnnnnnaaaacaatgttcaaatagtctattttacaagcgtataaaataaaatagtcacgcgtgcaacatattacttgaacgcaattgtcggtgtgttaaacttttctaaatnnnnnnnnnnnttgcaggatgtcttaaataagtataatttgcatgaccatgagaaaaaatttgactaaaaattattttggatacttaaatagattaagataacagataaagatgtatcggtgtatcccttttaaaggggtgtattatatctataactacaataaaaaccataaaactttagtcctccaataataatttactaaaaaaccctcttgattagtatactatgtttctctcatcatatataatattgacttctatatgtacattacacaaacattataa

SEQ ID NO: 150916 - DNA, 606 bp, Cannabis sativa
  modified_base (571)..(580): a, c, t, g, unknown or other
tcaatgccaaggtatccccatataagtttcacaaatccctcgaacacaacaaatggaggattggcccccattaccatacacactacagttgagttccattctaatgcttgctcagcaacctcgtctagatccggtttagcaactttaaaaccagcttgaacatctggttctgcataatgaagctttgctgcaaaattcattttctaccattccttaagcttcgcccagtgttgctgagcagaagattggaaatcgacttcctctgcccaattcaccttctcatccctaactgaaacttcaccctccgcaacctttgaaaagtcattcaaatccaaattcatctcaacgatgtgcgagttcgaactgcccaattccttgagttcctcctctccactcatcacatgtatctgcttatcaccctgatgttcctgaatcgttggaatttcctcaattcgagatcctataactggctttcaagtgaccttcttattcctcatggaaagagaaaggttcctatgcacgcctttacataataattattagtggtgaaactgttggaaatttattttannnnnnnnnnagatttactcacaagtatgttgttta

SEQ ID NO: 150917 - DNA, 544 bp, Cannabis sativa
ataatgcatatttttaagacctttttaatttaattttactctaagattaattttatttatctcatataaattttagttacatttctctattagttaaattatatttgttcttattatttattatacttttatgttacatttttttagtaacatttatgctatttttaaacatatttaataaactaaaataaactaataagttacaataaataagtgcttgctagttaaatattatattatagtatttgttttagtaactagttatttcaaaattatattttagtatttttctttgcaaattatattatagtatcttaatattattaagatacatttttagtaacctttagttttattgtagaaactaattacaaaatagagaattacctcatataatatttttaaactttttctgttctttcaaatttatagcttaggtttttccggtagttgctccagtaatttctatatgggttgctatgtagattttggttgcaatttaagttgattcgttgattgctatgagagttgctatgtgaatttc

SEQ ID NO: 150918 - DNA, 590 bp, Cannabis sativa
gtggcatgacatactggtaacacgtggacctgattccccatatctgcccgagagagatgcaccgagcatggcatagcatacacctgcacggacagtgtctttccagccaagtcgtggataagccgagcagtgaatcgatactgagaaattctagaattttcatcgtgaagcacaagagcaatccctataaatctgggatcgtatcacatagatatggcaagctatccaaattccaaaatttgtgtattctaaatatgtaatatatgttcttacctattatagacattgtaagcaaaggtgaaaccttccctcaggcatgtagccctagaaatagtgatccattctcacaaataaaggggtcgagagaataacttttagagagatctaagagagcatactcagagattttactgtaagagctttaagagaggaaacattgtgttctttgttcttaagttaatacaaatcaaagagagtacgctataaccgaactaaacggggccgaacctctttaaacaccttgtgttctttatttatcttctaatattatatctaaatcatatcctttatcgcttattattagactcatt

SEQ ID NO: 150919 - DNA, 526 bp, Cannabis sativa
acaaggccaaacaagccaaattgtttttaaaaacaattttctgtttttaaaatcaaaaaatagttttttagttatgatgccaaacatgaacttagggtctcaccgtataatgttttagttttttttttttttttttgaacttttataatgttttagttatatatttataaattgttacgtttgagaatggtattctaattttattataaaaaatatgatgtacaatttaattcacacactttttttttgatttaatttaagggatctttttcagttttaacgaaaaaaagtaataatattacaaaaatacttttagctggccaaataaacaaatatacatcccaactaaaaaaaattacacaaataccacttacacacacctttaactcaggatctatgtttcctgggcaactatcacgcaaccatcgcgcaactatcgtgcaacaatgcagtgataactctaagatttagagttattttcatatctttaagcttgaatttaatgtgaattgtggagcaattaatg

SEQ ID NO: 150920 - DNA, 543 bp, Cannabis sativa
ttgtgaattttatgcatgaagtatgtgttttaaactccctttatgatgattaaaaacctattttatggtttgggagttttggttgtgaattggggtgatttaattgtgtattggagctgattttcgtgttcttgctgctgtttttctggattttgaacccaggtgccgcggtatggtatttagcatgccgcagcgcgctcagttctttctgggcagatccttttgcaaacttcaaatagccataactttgcgatctggactccgatttgggagttctatataccgttggaaagctattttcgagctctatctgaatatatgaatttttaatgtcatgtgaatattttatgaatgtgaaatcaggggttaaccctatttgtgaactcccggatttgtgtgactaggattaccgacacctgatcagaagcacccgggtattcagaatctttaatattgcaggacaacaggtaagacagtgattagcacgtagagtatacgtagtggtgcttatattgaaaatgatatgtatgattgtttagtaac

SEQ ID NO: 150921 - DNA, 935 bp, Cannabis sativa
  modified_base (875)..(876): a, c, t, g, unknown or other
ggcataaaacccaacattatcttcctggtgggttctcactacgtgttccctaaccctaacatcattcaattttaatttggaggtgggttttgaggggttgggtttatacgggatggctaattctgtaggaaactcaaattctaaatcttctggacgataactccttgaaccagagtgggacattgctgcaaacagaaagtagtcccaatccttggagagaattttatcaaatcgaaggtggtgagtcgaatattctgagaaaacctacatagtgcctgaaccccagtatcgacctaaatacattttaatcctaaaaaactaccaaaaccaaatgagatggcaacgatacaaacaaactaagaagtaattaaacacaatgtaacaagcatgtaaaggaggaaagcaacttactgtttgaagttagggcttggggcaatgaatggttgttcggtctgcaaatctttgaatgtagtaaggatcgctttgagaagatgaagtcggagaaaactcgtagaaaaaatgtcaaggacagggatggcatgcaaatcctcaagaaaactcgacgatgattcttagcgaagaagcttaagaatttttcaaactttctaaaatggaagaaataatgtaaaggtggttccttttttcttactttatattcatagtatcggcttcgtcagatcaggaaaatgtttgatcctacagatagaatttaaagtggaagtgaaaaagatggtcatttaatgctgatgtacctcgaaaccgcacaaccaccaaaatcagaggacatgcgtcttttcaaaagggaacatgacaaaaataccctttgtaatcattacaaaggactttttattaaaaaaaaactttttaaggggcanntgttatacccgaaattcggctagcacaccagaggaagacacatgtcaagctgggaagaa

SEQ ID NO: 150922 - DNA, 959 bp, Cannabis sativa
taaaggtcgaaattgaccttggttaaaagtgattatttaatgttggtgtagaacaaattggtaaaagcactaattcctacaatggtatcagagcttggttaagctggaagaatcaacattctaaataatcaagaaggaagaacactcaagcaagaaatcaagaacacaaacaagaatttcaagaactcaaccttgatctaaagaaatctttaacaaaggatttctgggaacatttctcaaattaatctttatatataaattgcttattatttatctttatctgattttattaaacatgagcaatttaaaggtagacattgacaaatttgatggttctggtgattacaagatttggaggagaaagataaaatcactcctggctcaacagaaacttttaagagtacataatgaccctatagaatggccagaagggatagccaagattcaacaagaagaatacttggaaacagcaactggtatcatgatattcaatctatcagatgccattattagattgattgacaaagaagatacccctaccgagatctggaagaaactggaagaacagtttcaacaaaaatccttaaccaacaagatattcttgaaggaaaggatttttggttttaagatgagttcatctaaaactcttgatcagaatttggatgagttcttaaggatgcacattgaacttgcaaattttggggagaatgaggctctaagtgatgaaaatcaagctattattattctaaactcattgcctgaatcctatagggagtttaaaactgctatttaatatggaaggacatcaataaccccggaggaagtgatctttgccctaaaatctaaagatttagagatgagaacagagaaaggaggaaactcaaatggggaagttaatttgagtagaggcagaccagggccaagaaaaccttggaataacagagagatcggaagagcgt

SEQ ID NO: 150923 - DNA, 846 bp, Cannabis sativa
  modified_base (337)..(339): a, c, t, g, unknown or other
tttataaaatcacacacgtggcatccctatagattagggcgttacacaaacatataggctcacacatgttaaatgatttggatgaccctatcaagtttctaggtttacctgttacaaattatttacaagatctattcacaattgaactatgattggaattcagattattggatctgtcaataatttaatcatagaagtatagataaaataaataataggtttgtttattatttttttaaaataaacaaacaaacaaacaaaatatatggaaaataggttaagatatttgtattttaaaataaaaatattaacaaaatatatcttaactagaatttannnttaggttgttagaaaatatttaaagaaaaattaaaatctaataaatctcctaaaatctaaaattcaaatatccaactaattttcaaatttttaatttattaaataatttaaattaattaaatatttaataagataatatgatataatatcttaatttgaaaattgagatatttctgatattatatttctaatcttattgcaaagatcgcttaactttaattaggaaattagcatataattagggtttaattatgaaacattcttattagttatgaatcatcagtttacggagatttaattgaattcagaatgcatgttatatgtcatatatggaatttcatatttttgcatattttgtgctcgtcaatattagaacgcagcgtttgactattagaatcatcttttagtatttttagtgtaacaccctaactagcataagcgtattacgtgattttaaacatactgtgcagctcgttgctaatacacgaggtttatggaaaaacgtga

SEQ ID NO: 150924 - DNA, 1775 bp, Cannabis sativa
gggattgtggtaatgttttgcttgattggggaaaagattacactggtaattttggcaaaagaatcaaggcttgcaaggctgaaattaaacaatggaagatagggcgcgattctgagtctgttgagcgctacaaagccgctgaaagtaacttgaataatctttatttgcaacgagaaatattctggaagcagaggagtaagcagctctggctgcgtgaaggtgatcgtaactccaagtatttccatgccaaagcaacatcacgaagacgttcgaatgttattcacaagctccagaactctgctggtgaatgggtcggctgggaagatggtctccccaccgtgattgtgaattacttccagcatctatttatgcgttcagatggtaattattcctcggttgtcaactgtatctcccaatcggttactgaagcccaaaataattcgttacttgaggaagtaactcgtgacgaaattaaaaaggcgctgttccaaatgcatcctgataaggcccccggacctgatggtatgactcctggattttatcaaaaattttggagtttagttggtgatgatgtggtacggttggttcagagtttctttgctactggtgagtttccatctgctttgaatgaaactaatattgtccttgttcctaagaagaagaatcctgaacaaatgggtgatcttcggcctatatcactctgtaatgttctctacaaagttgtgtctaaggtgatcgcaaatagactcaaagctgttttgccaaatgttatatcttccaatcaaagtgcattcttgccaggacggttaatttctgataatattatggtttcttatgaggttatgcattatatgaaacggaagcgaacgggtaaagatgggtttatggcaataaagcttgatatgagcaaggcctacgatcgagttggttgggcgtttcttgaagctgtgcttattcggatgggatttagtcctagatttgtggctctgattatgttctgtgtgtctacggtgtcttaccatgttacttatggaggaaggaaactaggaccgattgttcctggttgtggaatccgccaaggggatcctatatctccgtatttgttcttggtttgtgctgaaggcctctcttctctcttatctttgtacgagcaacggagatggttgactgggtgtaaagtggctcggagtgcgcctagagtctctcacatgctatttgctgatgatagctatgtgtattgcaaagctaatgagggtgaagcttcacatgtgttgcatcttctccatatctatgaacaagcatcgggtcaacaagtgaattactccaagtcctcgatctttttcagtaagaattgcttggttgatacacgtacaaggctgtgtggtcttatgggaatgatggaggctggggacaatagcttctacctcggcttaccatgcatcttgggtcgtaataagaaggctatcctgggttttttacaagagaagatgaaaaagaaaatttttaattgggagagccgtttcttgtcaaaagcgggaaaggaggttcttttgaagtccgttgcccaagcattgccttgttatgccatgagtgttttcctgttaactaaggagatttgttctaatcttgaaggtatgatggcgaagttctggtggaagtcccaatctagttcgggctcaaagggtgtgaattggataagttggaagcggctgagtagacataaaactgatggcgggatgggattcagggatcttcgagattataatctttcgttt

SEQ ID NO: 150925 - DNA, 1013 bp, Cannabis sativa
  modified_base (32)..(36): a, c, t, g, unknown or other
  modified_base (238)..(242): a, c, t, g, unknown or other
tgtaagtatactttatcgctgactatcacatnnnnntaaatccagtgcactgatgattgaagcatataatcacagttaccttccactgtattgacatccctgtaattgtgaacaactatatgttctggacttaacagattttgtacacattaaaccgcaaacataaaaactacatgtaaacataaatgatttctaatcttctattaataacaaatcagattatattgaaatgagtttnnnnnagggcataaaatcccaacacttccaatattgtttcatactctgtaagtttatttctaagtagtcaccgtaggggagagtctaatagaaacaaaaacttacaaaatacttatcttacgagatcttatggtgttaagtgctttcaacgaataaccatctataagggggacgaagtctagcgtctggaggttatattgaaaattattaaccattataagacaaacaatgaaatcgaatatctctttgattaaagctcattatttaaaataatgtgtttttaattaatcatttattttaatctatatatttaataatgaaaacttcttaatttaagttggttcaaaattaattaaaattaattttcaaacaataatttcaaaaatctatttacaaataaatatgaaattttgaaattttattaaaatataataaaataaattcctgaaaaatatctaatttaagttattttaaaataacaaaaattttaacttaaataattttccataatttaattaaacaacaaattaagtatcttgaactaatcaccttaatttgaaaaatacccttatttaagttgattaaaattaacaaattaaaaattaaaatattttaaagaatatctgaataactaattttctaaaaaattctacttaattattaatttcaaaatattgtaatttaagtttatccaaaattagttaggataactgattttcaacttaaatatattttctatgaaaattcaaataattaagtatctagaaaaatctaat

SEQ ID NO: 150926 - DNA, 689 bp, Cannabis sativa
tggaaaaacaaatttgttgaagaacagaaagtctatttattcgaatccaagaccaatagacccaatgatccatgggatctattatgtaaattatgggccagattgcccactttacatgagtattaattttgtaaaatcccaattataaatgggttgaattgaatatcacttggaatttaaataaagtattgtcgggtactataaaactaaacataaagtgttggcatggtttcatatactacatgagcaatattctaattatttctagctagtatagtttcaaattacttagttattcaacatcattttttaagtagaggtaaaattcaataataataataataataataataataatgaaatttaacaagagaaaattatataaattgccatttttagtaaaatatttatacttttatgatcaaagttttttttttttttttccaaacatttttatggtattctataaaaatataagaaatatacaatataaaagtatttgaaaaacaacatcaaaataacataaaaaaatattatacagataataaaaaaatcaacaacaaattgtgctacatcaaaatatcgtattttatgtaaataaaatcttaaaaactgtaaaaatatttaaaattccatacaacaacatttttgtaattattttttgttatttttgaggttttttttttttt

SEQ ID NO: 150927 - DNA, 709 bp, Cannabis sativa
gatttctgattgtgttttttttttgggcctctctcgtctgagatttttcgtccccttttttgatcttgtctgccactatttatagttacatagttataacaagttgactgtaatcgttacaacaattatttcctcaaatcttgggatttgattacaaatcacgctaagtaaatgaggtttctatttataattcacacagctgtaagtatcctgcttttatggggccgagatgaactcacatataaggatatatggtaagcttatctcgtggggatgcctcgctaggagccgggttaactttgatggcgagcagttgcttgttatcagacttcccgagattaatattgttttaactctgataattatattttttggtgtcgagataatcttcctcacatgtatgccatcttacagcgagatagacgcttcgctatctgtcatcttgattcaccatactgtttatacttagtttgtgtaccatgtaatacacactaagtatttttattgttatcatttctctttcacgcagcaaggttgaagcctcgtcatgcacacttgcactcacatggtttctcgtcgatacataagttagcagttcatacgtttgcgtcttgcagaaaaccattcagccagccgagttataaacatactctacaaattatgtttataacgagttgttccatgccaagtgtacttacaattgcgtgtt

SEQ ID NO: 150928 - DNA, 615 bp, Cannabis sativa
  modified_base (51)..(59): a, c, t, g, unknown or other
  modified_base (546)..(547): a, c, t, g, unknown or other
atttcccccaacaaatacacaatatcctgaagtggatcgtctatctacctnnnnnnnnncccaatctgcatcagagaaacacttaatctgggtatttccgtgatccttataaattatacctcatcccagtgctcctttcaagtaacataaaatttgctctagtgctgcccaataatgaattgttggagaagacatgaattgactaatgacactaaccaggaacgttatatctggacgagtcataattagataatataactttccaaccaatttgtgttatttcttaggatcttcaaatggtttcccatcacgtgtaagatgcacagctagattcattggaacattacaaggttttgctcccaactttcctgtctcagttaacaaatcaagtacatactttctttgagacaaaaaaatatctcgttttctccgagtaactttaatacccaagaaatacttgagctcccctaaatctttcgtgtgaaactgggtatgaataagagaattaagggatgagatgccttcagtatcatttccagtaataannatgttatcaacatacaccactaacaaaatgataccagcagttgacttttataaaacacaaaatgatct

SEQ ID NO: 150929 - DNA, 554 bp, Cannabis sativa
ttcaccttgcctttattatatattttttagaaattaaccaagttattttttccacgcagccatatcttttagactaaatgttgtcttaaagaggaagtctagcaagaaagcctgactaaaattcaaaagaaagacctaagtgttgttagtttttatggtccatatcatagttagaaaagtataagcggattttattaaaaaataatttaatccaatatgaatcataattccatgaatctcaacataatatatatagattaaatctaaactacatgaaattgaaataatacctcttgtagcctatcaagggatcatcaattcttctcgtaataaatatggatgatctaatcttttagtatgaacaacgatgaagacttcacaccacaatcttctagactagcctcaacgatcaggataagagtggacttatatataggtatgatcaaaagaaaaatttctatcacagtgtgtactcaactcatgagacactgtgaacatgagatgatgataaaaatctctatcacaaggagagagagagagagagagagagagag

SEQ ID NO: 150930 - DNA, 1035 bp, Cannabis sativa
  modified_base (594)..(595): a, c, t, g, unknown or other
cagcagggtgctcctgcagtgcctgctccagaaattccagtggtaactgcccctgctctccaggccaaaccattggtggcagtgaatcggatggatcccctgtatgaaaggttccgcaagcaagcacctccagtttttttgtgaggttcgtatgtcatgaaagccgagcaatggctaacattgattattagaatcttgaattttatgggggtgaccggtaatgatagggtggtctgtgccaccttctaatttcaagaagacgctatggtttgtgggacatggtgtccatgattcatgatgtgacaactatgacctaggaaaagttctaggaactgttcaacgctaaatattacaatgaagcagtcaaaagtgctaagagaaaagaattcactcaactaactaagaaagaaaatatgagtgttactgagtacacaacggaatttgaccgtttggcaaggttgacctcgggaattgtggcaactgacttcagtaagaaaagaaaatcctggatggttaaatgagaagattagacacgatttgatgatcactactgacgatggaaccacatatgctgaaatggtggataaggcactnngagctgagggcgcagtgggatgtatggttgagtctggtgggactccggttgttggcggggctcttacctctcctgcactaggttttagcaggggaggtagtggttcggccatagatcagaaaagaaagacatccactgcaacctgtggcttgggtcagaacaagaggttccaggggaaccagggtttaggcaatcgccaaagtggcaccgaaacccaatacgcttacccagattgccccagttgtaaaaagcaccatctaggggagtgtaaagggcaagggtgctttcagtgtggcatgccagggcattacaaaagggattgtccccagctcagaattgaggcaccgaagactgtaccgaaacccactccagccagggtgttcgcgagaacccaggttgatgcagaagccagcccctctgtggtaacaggtcagctctcg

SEQ ID NO: 150931 - DNA, 734 bp, Cannabis sativa
aagctccgttcattaagctcgtcaggaaggcaacataccactattggactactatcggaccatattattaggctaccatcggaccttcgtcttcaacctttattcattttaacaataggaaggcatcaaattaccatcagaccaccatggggcctaacaaaaaaactaattttttgcccaaaacttagatctggtcattttcgaccctaaatctaacatctactcacagataacaaacattaatcatacaatttattcctttgactatattgccaatggtgaagctgtggttgatgaagtcgttgggtctacggtggtcattgggtccgtgagtccttgggtttgtggtcgtggagagaaggaaccaaggttgtgggtggtgggttgtgagtctgagtccttggagtgagttcagaaagtaagagagataagggaagaagagagagagttaggtgtttgaaatgagaggagtagaattgggttttataaaatgttagcctattctaccaatatgagttaacttaagtttagggaaataattttaatctaataaatgcataaaaattcaaatttcttttataaaatatgtttattgagaatatcatcttgcatttttttttaatgatatcataaaatatttactatataatatgaagttagtatttattgaattttatttaaattttaaattttggtaattatttgtgtagaaattataaaataaattgaaatgt

SEQ ID NO: 150932 - DNA, 560 bp, Cannabis sativa
actaacataaagcagcagtcgggcgagacgcttaaggcctacttaagtcgttttagcacagctgctgggagggttagaaacttggacgatagtatccagccaattgctcttcaagcagggatcacgactgatcttaccactgctggaggcgagctatgggatgacctgcagggtcgcctagtgaaaaacatcagcaagttcaatgaaagagctcaagtgtttgttcaaaaggaggaagcaagaaaagagatgaagttattaacgaatggctcaggaagtaaacccagcattgtctcgacaagcaccgtctcgaccaaggctcacaatccaggggtctctagttcaaagaggaaagataactctaaggagtcagccaaggacaagaaaaagtagaagaagcacgacaaatacgtgccaatatacaccgcttacaccgagcttaatgaaactcgagaaaacatctatctcgcacatgagcacagggtcgcattccataaaccttagcccacgaggcatgtgagacataagagagatgcaactaaattttgtaagtatcacaa

SEQ ID NO: 150933 - DNA, 522 bp, Cannabis sativa
  modified_base (269)..(272): a, c, t, g, unknown or other
ttgggaccaccgtccttgattcttcttggtcatctttcggtcatttccttttcctctgcttgtgttcttcttctcatttctacatgagccttagttcgcaagactgctgtcagacactcagtcaggttgttaaaggtcaaaggggatattgggccacgtatcgtaggccttaaacgacgcatgaactgttcaatcaccaaaggttggtcaacaacaataggatatgcataagaggatagctctacaaacttcatgtaaaattcattcannnncatatccccttgtcttaaaccatccaatactccaataagaaccctcctgtgagatggactaaaatattgttccctgaaaacttcgtcaaaattttgcaaggtcatcccatcagtttccattgtcctgggcaaggtctcccaccaatttgctacaccaccctctaacttggacacaacaaaagtaacttcatattcctcaggtgttcctattgtgttgaaatttttctttatctgcctcaaccacctttca

SEQ ID NO: 150934 - DNA, 686 bp, Cannabis sativa
aagggaggtcaaggaggggcgacgcggtggttgggatgaggcgtgaaggctggtcgacgtccttcacagtggttgggctggtgcaagttggctggtcggatctcttcaaggggtgtagagggcagagctagaaagaagggaggagggctttatttatttttattttttgaaaaaatggggaggagccattaatggagatgagaacggggaggagttgtatcatggttgatggggattaacacaatggtatttcatttattttttttaggttttgaaaaaaataataataaggatattttggataaaatgtgaagttaataaaattgtattgtataaaataattaagaaggtgtttttttttttgaaatagggattttttttaagtatattaaatgaaatttctctttaaaaattaaaaataaataaataataattaacttaacttaatactttaatatttctttataaaattttaattattaataatttttaattaactttttgtaatttgttatcaagtaaggatcttttaacaattgttatttttttctttttgcacttaattattgaaatatttacactcaatcttaattttaatattttaagtatcaaatcagtatgtcaacttcagattagttcaagtcatttagtttttttagtttaaaaattaaataaaaaatagttta

SEQ ID NO: 150935 - DNA, 1022 bp, Cannabis sativa
atattaaagataagagaattaagcggagaagagaaaaataaattacaaaaataatagtaaaatatcaatttgtaaatttatgctttaataaaatattaaaaatgaaagaattaaggtgagaagagaaaaataattttaaaaaaattataatataatagtatatattcatttttataatatacaaaagtactcgtaaaataaaataaattatacaatagtagaaatctttttttatataatttaaaagaaaattaaattaatatatattctttttataaaataattaaaaaattaaacatgacactaaagataattaactaaagaatgaaaaataaatatataaaaaaaattatttaaccgtggaaacttaatattgtcaaccacaacgaattaagagcttagaaatcaatttagtaaaaaagaaatcttgggcataaatttgtcaaaacttatatgattagagactaattgtcaaattaaaaaaaaaattaccaacaatacaaataaaaaaatagaactcttaaatcttcgccaacacaggaaactagtagagttgcatgtgatcctatccctaatatttaaatttgattaaggaaaaaaaaacctgaccagcaatattgccaagcaatgacaacaaatcttgccttctttggcaaaaaagctaggtgagaatttatgtaggagtaggctaatccattttaatagacaatgttgtgaattcttctattagtgatgctcttatataccaaagttttagaagaagttctttattgttgtcaattttttcaagttttttcattatatatatcataaaagttaatttgttcatttttttttggttgtttcaaacaaaattcatcaaaatatatatatatatatatatatttatatatataataattaatatgtttatagtagagacattaattttgtctaataatgagtatatgtataataatagtttacatttaggtgcattaaattattttttattatttaataatatttttgaaatacataca

SEQ ID NO: 150936 - DNA, 587 bp, Cannabis sativa
attgacatcgtaaacaactaaaaatattttgtttattaataaaaaaaatacatattaataaaagaatgaatcattttttatgttgtgtagaaaagtaatttcagagttacttctaaattttactttcggtattataagcaactaaatagttaattttaattatggtgacaatgagaaaatacacatttttcttacatgtcaaaatgaccacattgaaaagtagtttcttttttcatttagttaaccaaaaagtaaccagatttctgaaactattttctaactatatcgttgctcacttaagttaaaaatgaacatatagtttttaaataactaatctaaaaattgaagattatctacgggagatatttttatctaaagttgatcattttgtgaaaagtaaccaattggtatattatcgaaatgataattaatttaaatattactataaagtacactacataaaattatttcatatatatgcttatttgttatacaatatgaaaactaattagtttctactgtaaacataaaaggtaactaaaaaatataactttaaaataaataattagcaatataaatatttacta

SEQ ID NO: 150937 - DNA, 743 bp, Cannabis sativa
ctctctctctctctctctcccctacccgccgcccctcctccttcttcttcttgcgactttgaaatgtaattaaattagagtgaattcctattgcctaatatcccaacctaagattcagacttcttctccttcttccgaaatccccttccaccctcgcaagattcggaagctttcgccagacgatttcgactcgaatccactcaaaccgttgctgtgtttgaaggccccaaaccctcggttacaacagtcgtggcctctgcaaaacccacaaagtcaaatgtcgtacagtcgatggttcctagagtcgtcgtgagatcgctttcctgcaatggtgaggtggtaatcgctcttcgtcatctccaagccgccgatccaatcttggctcccttgatcgacatgcaccaacctcttacattcgataactttcatacgccatcccttgctctaactcggagcattctttaccaacaacttgctttcaaggctgggacctcgatctacactcggagcattctcttcatacaaaacagttcggtagggcaattgctcttgacatgtgtgctgtctctctgtgattgagagttttgatatgtttgtgaggatctgattttgttggcctttttgtttctgagtgtttgtgtctcctattaggctgttgttgtttattgaccaccatggcttcaagcagggggcggcaggtagagagagagagagtggtgagatcggaagagcggttcagcagg

SEQ ID NO: 150938 - DNA, 695 bp, Cannabis sativa
  modified_base (407)..(410): a, c, t, g, unknown or other
aaacctatccttaacacccacttgttttggatataaaaatcgtttaggtgttgatagttgttgagcgcaacataaggtgttcatgctcacctgaacaaagcatggatgattgatcacaatatgcgagataataaattgatcgactatgagatcgccataaccattgatgcaacctctttgttatatggaacaatggaatggaaacagaagtatggatgatggatcagaatacgaaaaagtatgaactgtaagggctttcaatgtccgaatggacatggaatgttctctaagaattcgctggccctactaactaggggaagaaacctatccttaacacccattagttcttgatataaaaatcgtttacgtgtagatggttgttgagcgcaacataaggtgttcatgcnnnncttaacaaagcatggatgattgattacaatatgcgaggtaatagattgatcggcgacgaaattaccataaacattgattaaactacttagtaatatggaacaatggaatggtaacggaagtatggaggacggatgagaatacgcaaaattatgcaatgtaggttctttcaatgtccgaatggacatggaaggttctctaagaatttgctggccctactagctagtggaagaaacctatccttaacacccattggttttggtcataaaaatcgtttaggtgttgat

SEQ ID NO: 150939 - DNA, 1012 bp, Cannabis sativa
ttagacatattttcttaaatatgtgattaagtggatattagagtaggattataatcctacttaaactaaatacgagttgattagggaaataagaataaataaaccgtaattattacttatggagattatattggactatgcgagaatcgcagatactataatttgaataaaatattttttggcttaacaactgcggaacttgacgggtggtcagaaatgtcacgacattaaaagaggaaatattttggaagtattctagtttagttttgaattttaaaagaatggagtttaatgaatttattctacttgattatgtgacttggagtaagttgaagaattcatatgaattgaaaccttgaatatattgtgtatgtgagaataaactgttctggaacttctaggttgttttggtgatgctagggtcgaatttttggaggaggaaagaacttttggttgctgccctactagaactggtcgaccggttggttctggtgtaccagaaccggtcgaccggttgcctacaggggagagtttttaagtttttcctccaggctggttctagggctcagggtggttttcagtattcagtgtggaatgtttagaagttgtaaagcctaaccaagaactattggaagttaatgattgtccggttttgggaattaaagattattccacagattttaatgaatgtattaattgagtgttgttgtcgtgacataggtcctaggatcgtcaagctttgattccacttagacgggatgcacgctaaacttctggactgaggtaagaaaagtattaaatattgtataaggttaatgttatgattcttacagttttgattaagatcgaaatcttgttatacgttgttgtgacttaatcctaatcgaggttaacgatatgtattggatgtgactcgattgttgatcgaagaaaataataggaaacgattatcatcgtttgactcgattatgatcgagggaaataataggaaatgattatcatcgtttgactc

SEQ ID NO: 150940 - DNA, 747 bp, Cannabis sativa
  modified_base (37)..(60): a, c, t, g, unknown or other
aacaatcttaatagttcaaggggaatttttaacggcnnnnnnnnnnnnnnnnnnnnnnnntagtacatgttaaagttcgggagggggggtggaaattgctaattagccttaaaaataataataataataacaaggctaaatagaattttagtcctttgaactttgacaagtatcaaatcatgcccctgaacttttaagattgttaaaaatgccctctcaactattgaaattgttagatttaaagacgtttgtttaattttattcaattttactatttcagttattctttgtgtactaaatcatgctccccaaacattgatatctactaaatcatgcccctcaaactttgacatgtattaaattatgctccctgaactttcatctatattagacttttttactaaaattaaaaaaaaaatcattaaatccaactatctcaatagttcatgaagtatttttaacgaccttaaaaattcagggggcatgatttgttacatgtcaaagttcagagggggcaaaaatcatatttagcctaataataataaatagataattacataaaacactattttttttaaaaaaaaaaatacatttttacgtttaaataattttttttacaattttacggtttcccataaaaaaatacaaaaagaaaaagaaaactacgtaaaagtaacataaaaataacatttaaatagcatcaaaacaacaacaaaaaataacatacagataaaaaaaaatcaacaa

SEQ ID NO: 150941 - DNA, 835 bp, Cannabis sativa
attttgaaaaaaaaatgagagaaacccatgaaaaagaaaaaaagatgatgaacatggagagaaagaaaaggaaatatgatcaaaaagtgaaacgagaacacgtttgggtctcatctttatcatcaataattttaagtaaaaaaataaaaataaataagtcaaaaatttgtcacaacatcaatcaaatcaaaactttatatatattttcatcttttatcattattaattttaagtaaaataatatttaaaaaaaattgaaatacattaaaagtgacagctcatgtcactatcaaaaatttatatataaaaatatttaaaaaagacagtatcgtataaaactcaaacactctacagtaaaaataaaaaaattaacgcctagcagtattaatgtaataagatgggaaaattcagtatatcatgtaaattttcctaaaaaaatttgcctataacccatttcaacttaagtcctaagtccgacctagtaaataagagagggattatttgatgaggttataatgtaattagtggctgttgccttttgctttaattgaaattacacaaaatatgaaaaaaatttaagagtttatttttttatggcataaacaaataaagctaaggggttatggatttttttttgttttttttacatttatatgggtttttcttatgccatatttttgtgaaaaaagatgcataataagttttgctggaaaagtcactggaaaaactatcggcgctagaaaagtcaccgccgccggaaagtcaccgaaaaagtcatcgtcctcgaaaaagtcaccgtcgccgaaaaaagttactgaaaaagtcactagaagta

SEQ ID NO: 150942 - DNA, 610 bp, Cannabis sativa
aaataataataataataattggtggttcaccatacaaaatttttccataattttttttttacaaatactgaaatttttatttttttttattgtgggacgaattttttttcaaaaataatgtgtaagtttatactgtgtactgtgttaagttttcattgttattctacggttgttgtttagttgtttcacagttgttttataaaaatacagtatttttgtaaaaaattctgtgtgataataaaatctctaaaaataacctctaaaaaaaactacttaaaatatttaaatacaatagacataataacatcattctctgaattttgtataaggtaaatagcgacataattacccaaacttttatgtttgtaagcggcataaattcaatgtttatttttagtgacataagtacccaatgtttgtaaaactgtaattttcttccgtaagcggcataaattcaatgtttatttttagtgacataagtacccaatgtttgtaaactgtaattttcttccagttttgttagtacaaactctactttgaatttattaaaagaatatttggaagtaactgatactatatatttctatctagacccaatgatcaaaaattt

SEQ ID NO: 150943 - DNA, 559 bp, Cannabis sativa
tctcttccactgtaaatatcggtccaatccgatgtatggccaatacatccaatgctaatttactttactaatgtcttggaaaagataatccacttatctaagagtaagtaaaccctatcgctgactatcacgtcagtgtaaatctagtacactaataaatcatgggactaaataaattgaagcatacaatcacaattattttttactgtgataacatcactataattgtggataactatatgtttgggatttaataaaatttttattaaacctataatcatgcatcaaacatgtgaacaaagattatgactgagtcatgatatgatttatgatctttattgaaagtaaataagattacaataaaattggatttcatttatggcacaaaatcccaacatactcccacttgcaccattataaaactaaagtgcattttaatttaatcttttatacttgatattttgatcatatgtagtgtttggcataaactgtgtaataggatatgataggttgtatttgttggatttattttactaggatctagatttaagaacaagta

SEQ ID NO: 150944 - DNA, 550 bp, Cannabis sativa
aatgagatctcatgcttagttatttttcattaaataagtcttttattgtctttatcttaaatggttttaaacggactagctagtgtgacgtgcaaagcttgaccgggaaggtagttatcctgagtcgcttcatctctcgctccaccgataagtgcatcccattcttcaacatcttgaaaaaatgctaaaagtttgagtggacgaaagactgtgaggaagcgtttaagaagttaaaagagcacatggccaagccaccggtattgtccaacccgttcacggggaagacctgtacctatacctatacctatacctagtcatctccgataatacagtcagtgcaacattggttaggaaagaggaaaaggttcaacattcagtatattacgtcagcaaacgtatgataggggcagaagtccgatatcctatgattgaaaagttagccttctgtctccttgataactctaggaattagagttattttcacatttttttaaactaaaattggtttagttcttaagttttttttattaatttagtaagcttttaatta

SEQ ID NO: 150945 - DNA, 569 bp, Cannabis sativa
cactaccacaaacttaccttttagtgacatcatttagtgacatgcacaaaaagtgtgggtcactaaaaggttaggggtaagttctagtgacatagataaaaagactcaaaatttagtattaatgtcctagaacctgtgtcactaaagatatgaagtgtcactgtagggtaaatcattcaatttctataaaaaattttaaaaaaaatattaacttatagtgacgcgccaagcgcgactggctaaatgtttaccgacactcctagcgcgtcactatatcataattatttttttttaaaaaaataacaaataaagctctatatatgtgtataaattaaatatattttgtttttttttttttttttgaaaaaggcagctacacctcttcattaattataaaaaagctacgtattttttgaaggaaaaaaacttcttatattttgtttcttaaatttaaaattattgattaattataattgattattataaaattttataataaataataaaatataataaatgaatataagaagaaaggggaaaaaaaaccctaatcaaaatcacttttcctc

SEQ ID NO: 150946 - DNA, 644 bp, Cannabis sativa
  modified_base (358)..(358): a, c, t, g, unknown or other
agagagagagagagagagaaggttgaagaaggaataattttttttttttattttctttctttttgaataaaatgagataaacaagactactccactcaattaataaatacatatcagattaatttactaacttaaggtcactagaagacaaaactttacttagggcaaaagacaattttgcccccaccttaatcaaaaagtcttaaatcctcctatgagtaatttggtcaattctaaaatcccaactaatcccaacattctcaatatctaaaatattctctcgttactaacaaaatatatctaaacactaatcccagcatgtgtgcggctgtggttgcaagggatcacgttggcaagntgatctgggtggttacttctaagctggatttctcaaatgctctctgtggggaagcgatggcgtgctgtctggcccttcaagaagctaaagctcgcggtgtcaagtttcttattttggagagtgattcgagggtggtgatcaatgctcttaacggaaaagattcccggtgggagattgataactacgtctctttttgtaaaatcacctctcctttctttattggatgtacttttgaatttgttagtagacaatgtaattttatggcccataatgtggccaagtgggc

SEQ ID NO: 150947 - DNA, 572 bp, Cannabis sativa
tttttattgtaaccttgatggttatatttttattgacctataatagtaggttactaacgtgcaaaaaattcttttttagaattaaattaacaataattattttcttaaaataattaatttttaatttgaatattgaataagatcttttttagtaatttatattaataattttaatataattttttaatagttaaccctcttaattataatatttacaataaaattctattactttataaaacttaaatttccaccctttctaaaattaattttttaattaattaaatattaaaagttctagaatactgtgaaatactagaatataggaattcgttgtttatacatcatatccaaactcccatttcatctatatatcttcaaattacaagttttacagacaacttgaaaataaccaacaacttcatacatgtatatttcatcagtaataaaaaagtttgagatcaataagcagtaaatgatgtactaactttttgacgatatatagtcaaaataaaaaattaatagtaatctgtaatgaccccgcttcaagcctccattggatccttacaccc

SEQ ID NO: 150948 - DNA, 531 bp, Cannabis sativa
acaactacccaagctcagaattgaaaaacaccattaaagctccaagtttgagttgtaaaactcaaaacttgtttaaatctactaacagccattacaactagctcaaatcaacataatctcacataattaaacctttgaaaataataacaaataacctcagcaagaacaggaactaaaatctcaaatcatgcgaaatttcactttcacaaaaatcaagaaacttaagaggaggttgctagagactttaccttgccttgggaaacacttagagctgctggaaatcactaaattgaagaagaaaatcaagaaccctagttggtctaagggggttcgaaggagagagagataagtgtttatgtccaattttctatttttgtaaaaatgaagaataaaataggttttatttaataaatatcaacttaacatttatttaaaaatctgatttaaaacttaattaaaatccatatcaaaaaattctaataggcaaaaagaccattttgcccttcacacactataagccattaaaggtca

SEQ ID NO: 150949 - DNA, 1177 bp, Cannabis sativa
tgaattaaatgggaaagatagaatatgtggttcgatagttaaaatatatctagtttacaagtagttttattctttgtgtacaaattttgacaaaggtttaggtatacaaaatttgtcattgatttcactactatttgtagaagtaggatagtggcgttaaggtttatgcctaaaaaacttataaagatatttttgaatataaatagtagttgaacaattcgatatatgtttaaacgttaaattgtttattaataatttatgcttgtaaatcaaaaaaatctttattcgtatatgaagttatgactagtattgtacagagaattaagatataacactctattaaattaggcgtgttatcgtgatttcttaatgatgtgcactcctttgctaattaaaagatttatgaaaaaacatgaataatttaaaattttcttgtttaacctctaaacttaaataaataaaaactttacataatttgggattccgtttctaaaatttacatctataatacaaaatatttaactacaaaagttgtcgcctgacgactaccaaaattgttcaccttttcccttactcttacttacacatgtaaataataggggtgtacatcggtcaatttggtcaggttatagtgtatttttaccaacccaatataaatgtcaggttgtgaatatctaattgtaacccacctaataaaaaaataaaaataaaaatgtaaccccctcaatgattttcgtcgttttggtcgggttaacctgtttaaaccaatctttattttttatttttttcattattgtaaaataaatgtatagtatacacctttcaaaattaaaagggttatagtttaaattaatgttaaaaaataaatataaattgaataaatattaaagtattaaacaactttttttaaaaaatagaataaaaaaaatatgctcttatgtaaattttaaattttaatttcaatattcaaatataatcaaaattatcaactataaattttaaattttaacttttaaactaaacactataaatacaaaactttaaatgtaaaatactttaactattaaacgcaattatatattgtactataaataattttagtaaaaatcatgtgaatcggtttattcgggttatttggcgggttagaataatattcaacctgtccaatatattcatt

SEQ ID NO: 150950 - DNA, 1128 bp, Cannabis sativa
  modified_base (671)..(677): a, c, t, g, unknown or other
attaatatttattaatcaaaatttcaaaaaatggctcaactgagagcagttgagctcgactatatgtggttgagattagtaaaaattataattatatgacttggttgtaattagtagagctcgactatcatagttgggattcataattattaatcaaattaatttttatattgatcaaattttctaaaggttagaagtgacaatagatattataccattttgtaaatagattaaaattatcaagattattatgaaatataaagaacatagcaatagaaattataacatttacaacatatatagttttgtctaaagtaaatatgaaatgtcacaatatattctagaaacacaattttttttaaatagattaaatcatcaagattataattaattttattattagtagagaatgtggcaataaaaattataacatttacaacatatatagttttgtctaaagtaaatatgtaatgttacaataatattctagaaacacaatttttttctttaaaagattaaatcatcgagattattattaattttatttattagtagagaatgtggcaatagaaattataaaatttacaaaatatatagttttgtctaaagtaaatatgaaatgtcacaataatattctagaaatataatttttttcttaaatagattaaatnnnnnnnattattattaattttatttattagtagagaatttggcaatagaaattataatatttacaaaatatatagttttgtctaaagtaaatatgaaatgtcacgtcacaataatattctagaaataaatttttttttcttaaatagattaaatcatagagattattattaattttctttattagtagagaatttagtaataaaaattataatatttataaaatatataattttgtctaaagtaaatatgaaagcttgaccatacttaatcatatagctcgactataatgtgtagagctcaaccattataaataatatagctcaactgtatgagtaaagctcgactgtatatggtcaagatttctaaagagttcaattgtcattagtaaagtctgacttttaatggtcgagatttgtaaacactaaacaaaatattagtaaattgttcaattatcat

SEQ ID NO: 150951 - DNA, 593 bp, Cannabis sativa
  modified_base (63)..(72): a, c, t, g, unknown or other
ttgcaagaatctaaaggtgcttggtgccgtgatgccaatactaatttttggaagcgtctttgnnnnnnnnnnatacctcctaagatcagtaacttcttgtagagggctgcgtcaggtgtgctcccaacttgttttcagttccaaaaatgtcatgttcccatcaatgatgactgtccgttgtgtaacgctcatgcagaaactgttcaacatgcgttggtagagtctgagttctctaaagctacttggaatcacagcatggtcgacgtcagggtaggggctgcaacattcagcagctagctgttagggatctttggcagagggcacgaaggtgaaatggaggaagtggctgtggtgagttgggctatttggcacgcgcaaaatgaatttgtttggcaaaagaagagttggtctgcatcaaatattgttgcatcagctagaaacatgcttgatcagtataaatttgctcaaggaaggacggatctttatttgtctctactgcatgatggggggcgaaaccttgagcgttggattgcacctgagttatacaagatcaaagttaatgttgatggggccttatttgaacaagaggggcg

SEQ ID NO: 150952 - DNA, 881 bp, Cannabis sativa
ccagcgatgctccttcaccagattcccgaggggcaatgctttgaaggtactttgcttgggccaagcgatcccaggcctagtccttgggtggaacaattatctcctgccaagaagaattcttaagaaccttgtaatcacaagtatattctttatcagcgagaaggcccaccgattgcaagttaacttcgctcaaaaggaaattgcatgatcagagaccgtaaggaagagttatcaggcgcctgtgcctactaaccatctcgggggtaggggtaggtctcgttagaagagctgtcagaaacaaataaaacattagtcaaaaacttgaaaaaggaagattgatgtaaataagtaagaagagaacaatcacttacaaagtttgcaaaacgtggttgtgccaatgggggaaagaccaaacgtctagaagaagctgtccttgaaagacactttatttagcaagtctacaataatttttggctcgctagcatgagtaccaagatagaaaaagcccactggagcgttcttcctcgatggaacagccttaactgagtaaagatactcaatctctatgggtgcggaacacccccaattcataattttgtctaagactttcaaactagcgagaaccctgcaagagatgggagtcagctggaatggggcaaccccaatgtgatttatatagtctttgaagtagtcacgaagagggaggatggcccttgcactaatatgctcaaggctccaggggcccatgctagttgaacaactagtactagtctcaccactggttcttgagttactgctgacaaagcgtgcagggggtagcaactgaattcaccctctcgtactgacctaacttggcatgattgcccaagttcaattccaca

SEQ ID NO: 150953 - DNA, 674 bp, Cannabis sativa
ggattaatctggtacttactcattactcccactcaatagcaggtgtctggtctaatgcatactaaagcatatttgagacctctcactgttgatcttaaggaattattttcctggcctttatcactcaacaacttgggatcggacactgttgttcctacacctctgcttactttgtcatcagtcttacatttacctaatttgtcctttaatttgctttctgttagtcaactcactcttaatctaaattattgcatctcatttttttcctgatcattgtttttttcctgatcattgtttgtttcctgatcattgtttgtttcctgatcattgtttgtttcagatcattgtttgtttcaggaattgtttgtttcaggatcttatgacgaagaagattattggtaaagaacatgaactggtggcttgtatgtcttgacccacttccgccaacctctattgcttgttcgagtgttgcttccgctattgaggctcattaccatttgggtcatccatcccttcctttgcttaagaaactttgtccccgatatagtaagctgtctttattagactgtgagtcatgtcggttagccaaacatcatcatgtcagtttgagtccttgagtcaataagcgtgctagtgttcattttgagttagttcattctgatgtttggggtcct

SEQ ID NO: 150954 - DNA, 681 bp, Cannabis sativa
ctggtaaaataatttcctacattaggcctcctatataaagaccttaaccatagcctagaaatctaagcctgaaaccttcctccaagctctaagtctaagtctgacaaattctctcttcctcacttcctctcacacgcctacactagcatcatctcaacacttaagtttttccattattgattcataccttgtattcctaagggtgctatagcagatcccaccgatctagatagcattaaaactcggtattaatataaataaaagggaagtaggtcattacctgctaacacaagggggttgaacctctacaacaaatttgttgtttattgctgttcattcttatttgtgtaaatacgtggcaagcaatagatctatacgaccccgctgtcggttgatcactttttgaggtcaatagtttggttctctcattaagagcgtgaatatcataatctgatcaaatgccatggtgaacacaagaagaactcttgttgcaccatttgcatctttaggtctccctcaagacccacaaattgcagatccaagcactcaggttccagtcataactggaatctgttaaccaaaagtcattcactcatttattttgatgataaacaaatatttgattattatttgttactaatcttttcttgatcattttgcaagcaagttcacagagtatct

SEQ ID NO: 150955 - DNA, 728 bp, Cannabis sativa
ttctgcgtctagatctgtttttgggtcaacgtccaattcctattccaaggtcttcattccggttcttgttccaatttcgggttgcgagtccgagtctaggtttgggttctagtctagaaattactccaggtttgggtcttggtacgattccaagatctagacactgactacgagtttgttccaggccccggtcgtgagtcatgatctatatcccaatcttggatcccggcctcattttgattcggatcctaggtcctggtctgtgttcgtgtccgggtctgggtctaggactaaaaccgggctcgggtcttggattccagtcccagttgggtcccgattctggttctaattttgagtttgggcccccaatctttgtcgggctcctaggtccaggtcttagtaaccaatctcactccgggtcttgggtttgggactagttccaagtccgtgtctgagttcgggtttgtgtcccgagtcgttatctaagttttgattcgggtctgcatcccgggccaagggtctgggtcctagtcagattccggctccttgactgaaacctagacttggactcagacccaggtctggggtacgggtctgggtctggtttagagtcttggtccgagtccgggtttgggtttgagtttgggtatgggtcccatatccaaacactgactacaggttaggtccaagccccgggtccagatcaggatcacggtctcgagtcctag

SEQ ID NO: 150956 - DNA, 558 bp, Cannabis sativa
  modified_base (339)..(339): a, c, t, g, unknown or other
gtaaggaaaaaattttaaaaaaattattaagagtaatttttaaaaattatttaagtttatattttttaataatgaggtgtatttatcattttatagggtttaaatagaatttcccttattttattactacatgtagagctttttacatttatttaacaaacaaagtaaagtgttatatatacatccaattgtttaattactaatctatctatctatctatatatataaaggagaaatatgaagcggtgatgtgacggtataaaatctttttaaaattatttttcttttttctccttaattttctcaattttttaatattttattagagtataaatttanaaattaatactttactattattttaataaattttctataaaaatatctatcttaaattaattattttttcaataattatttagttatttatgtatatatatatgtattcaaaactatatatatgcgtgaagttttttttttattttgcagaatataggaaaaatatttttttataaaaaaaatttattatgaatcaaacattatgaattgaacaaaaaa

SEQ ID NO: 150957 - DNA, 580 bp, Cannabis sativa
  modified_base (544)..(548): a, c, t, g, unknown or other
agagaaaaataacttctcgtgcatgggatcatttcacacggcaaaaaattgatggaaaattaaagcagtttgcaagtattgcgagcgtaagctggtgggagacagttggcatttaaattctcacgtagataggtgtccagtaagaaaggcccaacttgccgctaatcctagtgcaagtgcaagcccttcagtttcttttaatattgatcctgatttaggaaggatcaaattggctcaaatgatcgttaagcacgaatatcccttgtctatggttgagcatagcgagtttatagaatatttaagcactttatgtcccatgtttcaaatggtgtcaaggaatacagttacgtcggacattatgaaaatgtataaaactgagaaagaaaagtgcaggcaaactttggaaaaaagtaggagcaggaatagccataactagtgacatgtggactgcaaatcattagaaatgggaatatatggctataacagctcattttattgatgattcttggaacttacacagtcagatattgagttttaagtatgnnnnntgtcctcacgatgctccagcactacttgaggc

SEQ ID NO: 150958 - DNA, 575 bp, Cannabis sativa
  modified_base (466)..(472): a, c, t, g, unknown or other
  modified_base (537)..(540): a, c, t, g, unknown or other
taattatgttatatgtgaaattttatattttttctaatttatgcccggtaacaatagaatgcgatatatggcctatagagtcactctatcttgggctagaactttagaaatagcagagtaatttagttagatatttggaatgtcgagagttattgggtttatggtatatgaccattttacctctaattatgttagttgcttcctagttaagaaagggtaagttagtcttttttaccctagattagtactattttatttagtgggaatttgcttattatttttgtatgcctatctttagttataagctgaatatagtgagtttattaagttaattattcttaaaactataattgactaaattaggaaaaatccaacaaaaaatagaagtctctctctcttgaagtccctctctcgacctttcttggaaccagcagaaaactagggtgttgaccgagattttcggcannnnnnnaaatatgattataataaagagctgtaagaaagtgagatgaaggttttttacgtggttggggcgtnnnngagccttagtccacgagtctctgttatttatggat

SEQ ID NO: 150959 - DNA, 757 bp, Cannabis sativa
aaagatcgttgaactacatatattattcttaacttcttccacccctatcagatcaaaagatctttttattaaacaaaatcttaataattgcttcagacttaacaattattcataaactgtgaatttgaaattgaagtgtttatgtgttattatctctttgtagagtttagtataccatagaatttgtatcaataatgaaacacaaacacatacaaacattgtaaacatttcaatataattggtattagcatacagaagataaagaaatatgaagctcaattcataaatgcaattcattacaaaaagagaaaacttaattataatattctacaaaaaaaaatgaactgtctgcaataatatgaaaaataaggaaaaaaaatcccaaaccaataattcaaatcaaattgttcataaagtaaaacaattaattcaaaaatcataataagaagattgtgagttcatctacaatcttgggcaatctccacccatctgtccaaccatctgactcaactcgctaggatagcaatccaagtttaagcagctggagctgaaataagaagaaaaataaacatggttagtaggtccagaattaacaactcaagggaataataattctctaaaacacatgagtttatagcatagaaagaaaataccttgtgttatcccaaaattggcactatgacgtggcataacaagaatggtggcacgtggcatctacttaaagcacctggtcagatcaacatgccgagcaggatgc

SEQ ID NO: 150960 - DNA, 617 bp, Cannabis sativa
cttctagttactagttacaatttacaattgaaattgatataataagtagaaagattgcatagtaaatacagaatactctaatcgtgggatttggatagcttgtcgtatgtctgtaatctaatcccaaagttataggaatttctttgatgactcacgatgggaaagctgaatatgttaagtgttggcatgttgtacggattgctcactccacagctaagaggacttcgtctgagcaaatgtatgtggtgtcctgtttggcatatttcttgcgagtaggtacctagagtctagagttgattccacgtgtcaccttcgtgtgtcgtgtgatgtgtgatgggtgatggcacatggcacgtcagagtgcaaaaattgggataacactcttgttggtgagttgaactgtaatgataagaggatcaacatgtggatacctcacgtgttttgtatcttcttccaagaatacaattggaggttcttctgttttagctttatttagtggtgtcgaagcaaacaccgattgcccattcttaatttcattaacatatctcttttgggcattactactttttccagcgagatgcgaccctcccgagataactaatatatcctcaccctca

SEQ ID NO: 150961 - DNA, 664 bp, Cannabis sativa
tcttaagtcgcatggtgcacaacagtcctacaatatagcatgaatttatccctttagctctatgggcctatcgcacttcaaaacggggatctacagggttcataccattttctttggtttatggttcagaagcagtattacctgtcgaaatagctgatgtgttggaaggtagtgtgaactgtttagttttcataaaaggttatgaaataggtagcttagttttcgtagaaggttatgaaataagcagcttgattttcatggaaggttatgaaataagcagcctattttttttatagaaggttacgaaataagcagcttagtttttatagaaggttacgaaataagcagcctgatttttataggatcttgctaaataagcatcctagtttttataggagcttgctaaataggcagcctggtttttataggagcttgctaaataggcagcctagtttttataggagcttgttaaataggtagcctgatttttataggagcttgctaaataggcagcctggttaatggtaaaagtgtgattaattacagagagttattaagaactagatggatgtgtatgaaagagtttttatgagatgggatggttgtgtgtaagaagagaattgatgagacgggacagttgtgtgtaagggaagagaatagggag

SEQ ID NO: 150962 - DNA, 585 bp, Cannabis sativa
tctttagttcagggacatacattacttcttgtatgagtttgacttgaccatcattcattctgatcaacacacttcccattcctgagatttttcaagctttattgtctcctagcataactgatccaccctcaatcttcttgaagtcactaaacagttctctccttggtttcatatggaataaaacccaaagtcaagaatccattcacatcctgattcttgacttgtcacaactaaagctttagtagactcataaccatcaacaacaatgcctgcaacacctctttcttgtcccttttctctgtccagttttgccttgagtgccctacattcatctctgaaatgtccttccttcttgcagtagtaacactgctttctttacttggatttttctttaggtttgtacccttgattgtgccccttattctgattattcttgtagtttttcttgttgtatccactcctggaatcttttgagttatttttggttttcacaaatagactgtctgcaataccatcagtcctctcatcatttttcttctaaatttccttggaattgagtgttgccttgacctctgtcatggtcaa

SEQ ID NO: 150963 - DNA, 597 bp, Cannabis sativa
  modified_base (563)..(571): a, c, t, g, unknown or other
acatggtagtaaatctagatcttactaaaattatccccaacaggtacattgatacttgttggcctatatgttttgtacatcatattatttctaggtctaaaatgcttctcggcactagttcctgcaggttagtgcgacatgcaccaacctaacaggttggaatgctgcaggcactaacttggcaggttagtgatgagatgttctccaagtgtcttctgattttaaccattactattaaaaaatttatttttagtcacaacaaaagttgtgacttattataaattatcattcttatgttgtgactaaaaagtcgtggctaaaggtatagtcacaaaaattaaaatttattttgactaaatgtatttttcgtcacaaaacttcttgttactaacactaaattagtgacaacttgtatctaaatactatgttatagtcacaagtaactttttattgtgactaaaactcacatttagtcacaaaaaatttatgatgtgactaaaagttgtcactaaaagaagaagttttttgtagtacatatatatattcctgttgggttttatgcnnnnnnnnnaactccatttcaatgtaatctatttt

SEQ ID NO: 150964 - DNA, 575 bp, Cannabis sativa
  modified_base (182)..(189): a, c, t, g, unknown or other
tcaatcgaccattttattaatcttccagaagcatctggttttgataaaatttgtctcaagggctgatcggttaacacttttatggggtgagcctggaaggatggctgtagtttgcgagatgtctggactaggcataacgtgagttttttctagaggaggatacttggattctgcccctagtnnnnnnnnacttacgtagtaaataggttgttggtgcttgccctcttctcaaactatagcttcactaattgcatcttccaagatggctaaatgaagaaataacatcactccgactattggtttcaccaaaactaaaggtgttgaagaacgacacacatttatcagttgacttcgaaatgaatctattaagtggcgccattcttcctgtcaaggcttgtactttcttagactttgtcggggatgtcatgttttttaatcccttgatttttttaggatttgcctcaatactcctatcgttaactatgaatcccaaaaactttctcgaggagactccaaaggaacattttttcgggtttagcttcatgttatacttttttttaatattttaaagcatt

SEQ ID NO: 150965 - DNA, 606 bp, Cannabis sativa
taatttcaccattccaaattattaatattaaagtgtctcaatagaagatatgcatttcatattagcaagatcataaaatcattgtgtattggactttttgctcattacacattatcattagcatcatcttgcatgatgagcaaaaggtttatgcttttgttttaaattgtagaattctttattgacattattgataaaattgagaaaattaattacgtataccattttttaaagttgcttcttgtttttggtgtgaaaagatatttctaaaatcataatatttgtaaggacctaatttatcttactcttagatatagctgattatattgaactgttagttagttagttttattgtcggatacagttagttttgtaactaactctgttacttgatattttgagtcttgtaatacacaggtgtgtatatgaacctctgagattgcattaataaagtttagaactgtttttcctaatatggtatctgacgataaaatctccttcatctctttttctcttgggcttttttcataaatgtacaacaaaaacaaaataattacaaaaaatgtacaaaaaaaaattattttaaaaatttatacattttgaaaa

SEQ ID NO: 150966 - DNA, 952 bp, Cannabis sativa
  modified_base (869)..(870): a, c, t, g, unknown or other
taggccctgagttggtccaaaagacaaatgaggcaataaacaagattaaagctcgaatgcttgcttctcaaagcaagcagaaaagttatgcagaccccaagcgctgagatgttgcattccagccaggtgatcatgtcttcctgcatgtgtcaccaatgaaaggaatccgacgctttgggaagaaaggtaagctaagtcctagatttataggaccttttggaattcttgagaaggttggacaggttgcttaccgcttagccttacctccatcattgtcagctgtgcataatgtattccatgtctccatgttgaggaagtacgtttctaatccaatgcatatcatgagttatgaggcattggagttacaagcggacctgccttatgatgaacaaccaatacaaattctggataggaaagagaaggtccttcaaagcaaaaccatagcgttggttaaaatgctttggaggaatagtaaagtagaagatgccacttgggaattggagtctgacataaggattcaatatccagagttatccaggttagatttcgagtacgaaatcctattaacgagggttaattataaagaccgcttatgcttaacactttggattaataaataactagggtttatttatgagattaaatattatttataatatgcatatcgtggacagttatttgagtttgatataattaattatgctattttgtatgaatttcccgttgctctgtaatgtgtttggaagcagtggaaagagacgttgggccagtagagagtcacgttttctttatggtatagaattattttaatgttggggtgttgtagttagactttggaagtgtcgagatgtaaagaccgcttagtttannttggaaattagcagttaatcacgtttaattttgaaattattcatagctatttaaataatttattatactgttattattgaat

SEQ ID NO: 150967 - DNA, 864 bp, Cannabis sativa
  modified_base (225)..(225): a, c, t, g, unknown or other
  modified_base (712)..(717): a, c, t, g, unknown or other
tcgcagcctcccgagactcagagaaacaacgatgatgacattacccgcctatagaactttactttttttattatctgattcgaacatcgatcttttaataatttgtttatatactgattttagtaaaacataatataattaatgtttgtttatcttttaatgtaaattatgttggttttttttaatataatattataattaaacaattatatttttttaaaaaanttaattaattatatttaattaatataattaattaattttttttaaaaaaaaaataagtacttttgccgacgcagtaaggtgcccaaaaatgtatgcgccaatgctcagattggcgcaaataattttgccggcgcatctatagtgctggcaaaactattggcgccaatctgaggactggcaccaacagttttgccggtgcactattgcgccggcaaaaggttatcaaagcaggttcatagcggataaggagatcttttaacaccggggtttcccttttaccggtgtgatttctcgctagtaaaatacagatttaccggtgcatttagtctacgcgccggtaaaaagtcttttaccgacaaagattcacagacatgctttgtcggtgcagtattgtgccggcaaagctttaacggcgcattcagtgtacttttgccggcgcataaagtacagtttcttgtagtgcttgttaaatattcaattaattatnnnnnnaaaataattaattataattaattgattttaaaaaaggaagttttacctattggtaacctgctattataggtaaaagaaaagtgtaatcatgatggttacaataaaaatgtaaccattaagtagtcatcatatctttatatattaaaa

SEQ ID NO: 150968 - DNA, 1249 bp, Cannabis sativa
gaaagagggtttggaaccctaatggctagcggagagttggttatctccaataggcgcattaggcctatgccagttaggatcgcggatagggagttgagtgctgaccttatagaactggaattaacagagtttgacaccatacttgggatggattttctgtccaagtattcggccagtatagactgtaagcgaaaaatggtgacttttcaaccagaaggtgaagatctttttgtttatgttggattagttcaggggtctcggatcccggttatttcagtgctaagggctaggggtctactacacagtggatgtgtatgatttttagcagtgttcatagactccagcagacctgaaacatttgggcctgaggtagtcacaatggtaaaagattttctcgatgtatttctcgaggagttgccgggattgccgccgcaacgagaaatagattttgtgattgatctggcacctggagccaaacctgtttctaaagctccatatagaatagcttcagcagaactcaaggatcttaaactacagcttcaggggatgcttgatattgggtttacccaacccagtgtatcaccctggggagcaccggttctgtttgtgaaaaagaaagacggttccctcagaatgtgtattgattatcaggagctaatcaagttgacgatcaagaataattacccgttacccagaattaataatatgtttgatcagcttcagggaaagacagtgttttcaaagattgacctacgatccggttatcatcaactcagaattcgggaagaggacataacaaagactgcgtttcgaactagatatgggcactatgagtttttggtaatgtcattcggattgactaatgctcccgcaacctttatggacctcatgaatagggtattcaaggatttcctcgataattgcgtcatattatttatcgatgacatccttgtatactctcagtcaaaagaggagcacgagcatcatcttcgaatggtattacagcaacttagggatcacaagttatatgcaaagttcaaaagtgtgaattcttgttgtcagaggtgtcttttctaggacatattgtcggaaggaatgggattatggttgatccaagcaagattgaatctgtgaaaaattggccaaggctgaaatcagtgacagaagtttgaagttttctcaatttagcagggtattatcgacgttttgtagagggattttctaaaatctctatgcccctgaccgagtt

SEQ ID NO: 150969 - DNA, 549 bp, Cannabis sativa
aatttgttatttttttttttaaaagaagtctttcaataatttctcataaaccaagaatttttttatataaccacattttatatacaatagatttattataattactaaaaaactttttgtgttaaatattttttgattctattaaatattaattattatataatataatttctttatatatataattactaattattttactaaacaatacaataaaaatccatatgtcattatcattttcacatataaatacaccatttatttaaaatataatataattattagaccgtctaattataaaattaatatcatagtaattatacaattatatctaaacatgtccttattaataatttttgtgatgtgcaattctataaaaataatttcttcaaaatacaaatttttaataattggcccccctaagtgtttcgttctcgctccgtccatagtcagaaataattttttgtgtaactaaaaatcacatttaattacaaaaaaatatatatatatattataacaaaaaaattatcactaaaaataatttttttt

SEQ ID NO: 150970 - DNA, 541 bp, Cannabis sativa
aaatactaccaataaagtactcaagtcgagtagaccacttcaaagtactcaggtcgggtagaccacttcaaagtactcaggtcgggtagaccacttcgaaggactcaggtcggctagaccactccaaagtactcaggttgggtagaccacattaaagtactaaatgaacattcgcttctaagtgaatggccttttgggcagactacgcgcaaaggtttcagaaacaaagtactcaggtcggcaagaccattttaaagtacaatttcttatttgttttatgtcatgttaagctaaaagattagattagatcactagctctgatgtaagttactacagtaacaaatacattttcgatcaataaatgaagatagtatttccaattctattgagtcaaaacaatcagcatgattataatttacctaaagtgcgtacaaaaggtttagtcgaacccaaaacaccaaacagataaacaatatattttggaaaaacaagtgaccaagagtcatacgtctgctcggtcacttggggggaacctatacct

SEQ ID NO: 150971 - DNA, 516 bp, Cannabis sativa
gtcttcccatacagaatattggtaatactattcttcatacctctaaatctcataaacctcttgttcttaatcgtatgcttcatgtccctcatattactaagaatttaatctctgtttctaaattcacacatgacaacaatgcattctttgagtttcatcctaaccattgtgctgtcaaagatcaggtttcgcaggaaactctgcttgaaggacatcttaagcatcgtctttatgtccttcactcctcacagtttcatatgccctctttcagctttggacacaatcttgcttcttcatctagtacacatactgttaatgtgcactctttcaatagcaattcttgtaataatttttctttgtggcacaagaaattggctcatccttctgccaagattgtacaagccatcatggctaaatgtaatatttcagatagaaataaaagtgcttcagatttctgtgatgcgtgttgtttaggcaaaattcataaatttccttttcccaactccacaactacct

SEQ ID NO: 150972 - DNA, 1581 bp, Cannabis sativa
  modified_base (884)..(887): a, c, t, g, unknown or other
  modified_base (1189)..(1191): a, c, t, g, unknown or other
ttttattttattatttatatttagtttttagtatttttaattttttttagaagaataaatcattagaattttttttttttttaaaaaaaatcagaataaatgatagatatttagaaaaaaaaattattagagaaaaaaaattagatttttttttttagattttagaaaaaaaactagaaaaaaaattgttttattattcatatttaatttttgttactagttcttctagttgtggttttaattttcagatcttcctttagaaacatggcgatgtacaatcaacaatgctatgatccatattatacctcaccacaagtgtaacaatatgatccctactacgatacttacacatataatcaacaatgggggagattattctagcacttcctacttatggaattaatcaatatgttcaaccaacttcttactatcttcttataccaccataagatctagatcgttctcttattgatatgatccactctttgcaggctgctactgtgcagatggaacaaaatatggtgtagtgtcaacaaaactttcagaaaaatatgcagagccttcaataatctttgcaaaagttagagaatcttgcggagccaatggaaacatatacaagtgaatatgaaattcaattttcaaactctatgccttcatatgtggagagtaatctaatagtaaatcagtggcatcaatatccaaaggggtacacagcttgagtcactaccacaccaagaagttaatgatttgattccaagtcatgaagtcaaaaattcatcccttgaagagtcatctccaccaaatgttgaatctcctactttagttggtccaccatcactgaaaaagctgtacaaaccaattgtaccaacttatgtccctcctcnnnnttttccaagtagattgaaaaaatccaagaaagaggagcccatcaaggagattcctgaaactctttcgaaagttgagataaaaatttcatgtcttgaggagatcaaagaagagaatcattgtgctaacattcttaaggagttgtgtccaaatgagaaaattttgaatggtggtgagaaagtaagtgtgggggagaaggttaatgtagttctccaaagaaagttgttgcctgagacaagtacaattccatgcacaataagtaaaaccatgtttgatcattgcatgatagatttaggagaaattnnnaataataagtcttattctaatttttcctatttaaatcttggtccattaagagaaactcaggttctaattcaatagactaatcagactaacgcttatccattagggatagttgaagatatttttgtgcaggctaatagacttttcatttcaggtgattcctacataattgagaaggaagttgatggtggaacactcaaattcaatgtgttaaattccattgataggtacataaagattgagcctttattagaagacctgacatgaagatcacatgagcacaacatacagtcgatctagcgacgttaaataaagcaaacttacgggagtttttcttacctttttatttttattttgcattgattttacttaattgagccttgaggacaatgc

SEQ ID NO: 150973 - DNA, 578 bp, Cannabis sativa
tcagcgcctcccggtgcctcgcctccatctcagcctccctccgcttggcctcctctcggagcttcgcctccgcttgggcttccctctgttcagcttcctccttgaactttgcctccgcaagggcctcccttcgttcagcttcctcctggatcgcctgccttgcggcaaacaagtcccggaggatcctcacggccttgtctatgcccccaaattcagacatgatgaagccctggttaattatggtcttggaaaggtggctggtctccgcagcaatctgaaaaaggagacgagagtgagatcggatgccttagataaaatatcaagggaaggaataaatcacaagtacctaccgtagccatggcagagctgatgtcttgaacctggtagacggagtttagggaggcgcaagaggcatatctcttaggcgggaactgagtcagatgggagacgaactcgctagtaatcttcgaggcaaagggagccgaagtgggctcgatgaagtgattgaaccagtccatcagcgaatccatgttcaagtcccacggattctggaaggcgtcctcatttagagtgttctg

SEQ ID NO: 150974 - DNA, 705 bp, Cannabis sativa
gcataaaacccaacagggtggtgccggccaaaggcactccgacgttcaagtcagtaaacttatagtgtgaagtaagaaaataagaaatgtaaataaatacttcctatgttaatggttatgtgatgatcgacaatcaaatcttgctcgctggaatgagaaagagtacgtcagatcgtacaaaaatgataagtttagtcgtaaaactatagaagagtgtgaatattcgtatatcattcgatcgatcccccctccgtccccgtgagggtctatttattatcttaagaaaatagctacctcttgaaacgtggtccatccctagagaaactctcctcctccacttttctagggatgagcgtcatcttttaggttagttgccagatgaacgtcttcacatcaacgtatcacttggacggttgatcttcttcctccgctatgctatggaagatcgctatttttgtggattagttgggaaacttaacatccttcttcctccacatgtcgaccttaacattacactttggggtcaaactttattgtgggctggacattcgaatatgggtatgacccaaaaggcatggattgggcgtggcccatgtgagccattaggcttacaggttcttgtttctgacttatgcgtaggttttgtaaatacttcggtcgctgggcctttatgttgggcttagagtaatttttggccactacagt

SEQ ID NO: 150975 - DNA, 888 bp, Cannabis sativa
  modified_base (355)..(357): a, c, t, g, unknown or other
tatttttcaaaaattcaaaattggtttcctttttgcttcattctttcatgtttatttaaaccaatttccttgtcatttattctcaccacctacccaattctctttctttattttcttgccttcttgttgttcattctctctttcaaaaatccatggctaagactaagaatctagggcatccaagatcaatggtggaatccgaacaagccccctcgaatgctcctcctgctgctccaatcttactgcctgctgctgcaactgcgtcgaacccaggagattcatcgcttcctcagcgtgaatctcagtccgtgaagcccaaaccaaagagaattcctaaacaagtggttcgaaaatnnntgcgaccctacaaatgttggacttcatcgtcttcatcttcgaagggatctcctccacctcctactgtatctcctcttgctgcaacagagaatggagttcctgcatcaactccaacaggtccttccactcgaactcgtgcccaacaagcatctatcgagaaggaactttgcacgaaacgaagccatgacaaaccagctcctccagccaagaagcttaagatgaatcccccttcggtttcttcaagttctgaagaagaagaacccatggaggatccctctgttgattcctcgaataaatccgtgtctctccattctgaaaaaggagattcatgaagacattggagtttccttggacagtgaggaaactgaactcgaaccagatcctcctctgaccaaatctactctagcgccttctcgtacatcttcagcagccaaggcttctgctattgccaaaggcaagcagcccatgaaggaatcatctcctggtaatatccctacatctctctcatattgttctcgtttctactatcgt

SEQ ID NO: 150976 - DNA, 510 bp, Cannabis sativa
aggtttcggctccggtctaggtctgacttcggattcccaagtctacgtcaagtccttggctgggttcgagtcttggatttagatttgggtctgggttccagggcttaggtccctgttctaggtcccctatccaagtctggttcttaggttctagtccagttccaagttcgggtttgggtcctgagtcttggttttagtgtaagtctcagtctggattcgggtctagctctcggtctcagtcgtggtccgggttcatgtttaggtccttgtcagggtctggatactagtctgggttgcgggtctcaggtcctgacaagggtttaggaccaggtcaggtctaggtcccagtctgggtcccggtccaagtttgggtcctaggtctcgggtcccagtacttgtcaaggtctcagtctaagttcgggttattgtttgggttcggttcttgtcttagctttgggtcctagtcatagttctagttctgattccgtgtctgggttcggttccaggttc

SEQ ID NO: 150977 - DNA, 582 bp, Cannabis sativa
  modified_base (39)..(49): a, c, t, g, unknown or other
tttatttttcaaaaacaaaatttttaaaaacaaaaattnnnnnnnnnnnttgtgattaaaaaattagaaaataaaagtgttaccaaacgacaccttagttaagtatgctcctgagaacataactctagcatctttgagtccaaataataaaattcaaagtacatgtaactccattactatcacgagtgaactactataaatcttggtattcttgtttctttatggtttattttgaaatcaaatatcttagtccaatcctctatattttttacgatcttcttacgtcagttaacaaaaaactacatgaacaaattatattttattttattattattattgaaaaagaaaggaaattgcttgcagaaacgcttgtaattagagcaaaaataaaaaaataaaaaaaaagatgaaaacctaagtccattagtgagcaagtaaattattatgtctattctatataaatgtagttatgtaacgtttttagtttaacgatattttttagttttctccgttaactttaaccgaatatcccaattatttaacgtaatattttttattaattttataatattattgtatata

SEQ ID NO: 150978 - DNA, 585 bp, Cannabis sativa
  modified_base (516)..(543): a, c, t, g, unknown or other
ccctatcatatatgagtggctccaagcaaactgatcctggtttgccctcaaaaaacttattagctgccattttagtttttcatccaggttttgcccaatgaatacacactttgtgggattcgctggatctaaaacaacaacctctaattcttcaattgatttcaacaaattttgctcattttaaattcgacgatcaagatcttcatcctacttctcgccttatttagtcattactgccattagctggtgaccagcccttctatttcgtaactctatgcgatagcaatcgcgagccagcatttgatcacttcgcaccactcctacaccggtagctgtttggaacttcgaggataggtacttaattgaacttactgcacctagtccaattaaggctagtcggcctagaagtatgttgtaagctgatggcagatcgacgacaagaaattcttgcattatggtggtggataaaggcgcttcgcctacagttaatgggattatattgaaatgggttttatnnnnnnnnnnnnnnnnnnnnnnnnnnnncttgcactaatataaaataaaaaagtgcatttcaaataatct

SEQ ID NO: 150979 - DNA, 777 bp, Cannabis sativa
tgttactattaattaaatatcataattatttttttctcactcatctaaccctaacttttaagattctcacttgtcattataaaagtatgatatattttaaacgatagttttttattacaaaaatatgatatattttaaaccataaaaatgtaaatatttgtaaaaaaccataacaaattgaatttaaaaaaatatgtcacaaaaaactaaactctttaagtttttccataatttgtataatttctatttatttttattttatttttgaaataacttttcacataaaaattaccaaaatatcaattttaattttttaaaaatgtgtgacacatagagcttcaagttaatttcacatacactacaaaaaaaatgttatttttggtgacaattttttggtcatcgcataatttattttttgactaaatgtgagttttggtcacaacaaaatcttacttgtgactaaaatatagtatttcgatacaagttgtcactaatttaattttagtcacaacaagtattatgactaattagtcacaataaattataatttttgtgactaatacttttaaccatggacctttcagtcacaacatacgaatgataatttataattagtcataatatttttacttttagtcacaaattttgctgcgactaaaagtaaattttttcatagatataagtgaatgttgattgtaacgtccccgtttcaagcctccattgggtccttccacccacggaataatggctcttatacacaagtacgccactctggct

SEQ ID NO: 150980 - DNA, 503 bp, Cannabis sativa
cataagccaagggctttttcttcaactgcaactactctaagtacttcatctccaagactgaggagaattgcagagtgtgccttggcttcgatctccgtctttttcttctcatcttcaattgctttgagtgcatcaacattaatagcctctgaaattccttgatgcgctaacaaggctctcatcttgattctccaaaggctgaagtcattggtacctgtgaacttgttaacttcatactttgctgctgccatttctggatcgatttcttggagcagagttcttcaaataaataattcttgatcactccaattctgatcttgctctgatatcatttgttgtgattaataatcacacaaaggaggattaagaacataagataccaagcataaacaacacaactatgacaagaactagttcaaatttaaaccagaaaactaaaagttaaaaagagatgaaaagagagatggagaagaatggccgcctttatttcacttcttgatcaa

SEQ ID NO: 150981 - DNA, 1519 bp, Cannabis sativa
  modified_base (190)..(190): a, c, t, g, unknown or other
  modified_base (229)..(232): a, c, t, g, unknown or other
  modified_base (920)..(921): a, c, t, g, unknown or other
actcgaactcagaatcgcaaatggatctagaacccaactaggactaggactaggaccgggacctaaacccaaactagaacccagatcaaaacccaaacagagacctaaacccgaaccgatactaggactaaaacccgaacctagaccgggacctaaacccacacaatatccgggacctggacccagaatnaggatagggacctgggaaactgaactaggaacgggaccnnnnacccgacccagaccttaacttgaacctaggacccagcttgtgacctagcaccagaaatggaaccagactgggacccgagattgggatacggatctgaaccagacttggacttggaatcataactgaaattggacctacatccagaaccgtaaccggaccaggacccggactccaaatcagatgtagacccgaattgggagccggacccggatcccctcccaaacctggactcgggaccccaactcgaacctgaactagacccaaacatggaaccagactagggaccttaacaagaactagaccccagtctcgatcccaaacccaaactcagaaatgggacgtgggacctgaacaacaactagaccgagacgcgtgacagtgatctagatcttgactcgggattagggtcacggggcttggaacagaccagtagtcagtgtctaaatatgggaaccaaacccgaaccgagacctagaccttggacacaaaattagaacctgaacaagaatcgccgaaccaggaccctagaacaagactaggatcttgaacaggacacagacccagaccttgaactaaacacagacctagcctcatacccaaactgagactagaacttgagcccggacacggccgtgtacccagaccggaactgagacccggacttggacctaaatctgggacctgatcnnaaacacagacttggaaatagatagggatcgaaatgctggccctaggtctagaccgagatcctgacctagacccaaacttggacccgcactcgagacccgaacttgtacctggacctagactcagattggggtccagacgtagacacaaacccgtacacaaaatcggacccgaactcaaaaacccacacctagaatcagacccaaagcaagacctggacccggacccaaactcgaacccagaccaagatcataacaagggacttagacacagaactgaatccagactcagatcaggattggaacttgggactcgtacccaccctagacaaagatccaggacgcgaacctgcattcggagcctgatctagaccttcactgaaatccaaacccgaacccaaactcagaccatgactcgaacttcgacccgaactcaaacccaaactcgaacttagaattgaaaatggaactagaactgaactaggacttggaccaggttcaggaactaaacccaaaccaaaacccagataaaaaccaagacagagacctaaacgcgaaccgagactaggactcaaactcgaacctagaccgggacccaaac

SEQ ID NO: 150982 - DNA, 1273 bp, Cannabis sativa
  modified_base (182)..(184): a, c, t, g, unknown or other
  modified_base (705)..(709): a, c, t, g, unknown or other
  modified_base (981)..(981): a, c, t, g, unknown or other
  modified_base (1202)..(1237): a, c, t, g, unknown or other
aatagtgcaagtggattctagtcacagaatactaaattcaaattccacgcattaacatacagtttgaatacattggtagaaaatggatattaaaacttgtgaaagtcatactgtattgtccaatatattctaggaaatagaaatttaaaatttctatttagaatctaaaatttaaagtcaannncttaaatttataccaaatattcatgagtaattattatttcttggaccaccactactatttataccaaatattcatgagtaattattatttcttggaccaccactactatttataccaaatattcatgagtaattattcgtaagtagattatttataaaccatctatccaatgatatactatcgaagcaaattatatatgaaaaagataagaggaaactaataaaggataatttcgaataaaataagaatccaacgatgtcccgtttaggcgagagtcgaagttattcttattttataaatctcttcattgttacatattgtaaacactagtctaagttgtcatctttggaggtacaactagatatatttataaatacttatctatcgagatctaacactattatatttgtctaacggatgacaatcttttgggatttgtcccattaaaaatagcaagctaagttagaccaacaataaagacttgaaattatactacaacattaataacaaaaaacaacatnnnnnaatataaattcatacacattcagaaattatcatagatttagcaaataacaaagacatgtgaaaatacaaaacaagcacatcttaaataatttctaaggcttccaacaaactgatacagtgtcccagtaggcgagagttaaggatatcattcattgaatagagtagtcagttcatctaaaatggagaccattctagtaacttttggtttgatcaaaataagaatcgaaggttgtcctggtaggcgtgagttaaggttattcttattttatgancttccaccattgtttcatacttgtaaatttatttctaagtagtcaccgaggggagagtctaatagagatgaaaacttacaaaatacttatctttcgagatctttacagtgttaaatgtttcaacgaataaccatccataaaggggacgacgtctagcgtctcgaggttatattgaaaacaattaacgatgtaggacatgttggaatatcttttaccaggannnnnnnnnnnnnnnnnnnnnnnnnnnnnnnnnnnnaatatgaatttttaaaacgatgaaaataaacacata

SEQ ID NO: 150983 - DNA, 635 bp, Cannabis sativa
aaaaaaaataatagtaatagtaattgtttttttttaaaaaatttaacaattagtgagaatgtttattttttcaaaataatccatgatttagttttttttttttgtataattactttatagtattacatgcattgataaaatataaatatatataaatgaaagcaataacaaattattgtattctattttttaaaaataaaatctatttgttttttttttttgaaagtttcatggtttcttccaaaaaaaaaaatgtgatcgtaaaaaaattgaagactattatattaatgtaatattattgttgtcttgatttcttttactaattacatgagaaataaaaaaattatagtatgtataggatctcattatttaacaaataaaaaaatataaaaagatggaaaaaaattattttgatgtgatttaatacaaatgtggattatcttgttattaaaaaaataataattatatataattatttaatatataatttttaattattttaaaccgcgcgaagggagactttgtttactagttataaataaggaaaatttacaaaaatattagaatttgagttaagttttacaaaaatactgtcacacggaaatcttttccaaaatactatgtttttataaaac

SEQ ID NO: 150984 - DNA, 1321 bp, Cannabis sativa
  modified_base (1074)..(1074): a, c, t, g, unknown or other
ttttaaaaaattaaatgtaaattttttaatttaataattataggccaaaatagtagaaaaaccctccacaaacttagataaatttagtaagagtgattataatgtagctataaatatttttttatgataaataagcccccacaaagtaaaaatcttgggtccgtcactggtgacagaccctgctgtgcaaatccttgggaataaaagggtcccaccaagaaccactcccgagcagcctaacacacagccactactgtgggcaaaggtgtgacttcccctctagctaagatcacaccaggtgtgcaagagactaggaataccagttctgcagctgatcaaagcactcccaacactggaatcccatccacaaccattgcttagaggacggtgggggatgacactgagatttgaaacctccgtgacccccttggactcatggaaggtcatactaatgccttatatcatgaaaagatcatcaattaaaagaaactttgctatagtttatttttcgtaaacattagtaaaaaaaatcttcatttatttctttatttttggctctaggtactgtaataaaatctcgaaagttaacttgtcatttaaatttcaaaataattttggttagctatctatgagtcattaattgtttacattgtcgtcctaaaaatctttatccattcgagcatcaagttatatatctttccaactccaagagtgacaaacctttctcttttcaaatatttcaatacctttgaggatttggagttgagattttttactttaaagatttatttcaatattatatgtgttatgaattaaagcaaagaatatgatttaaaaatacacacacacgaaatctagaattatatctattgtaaatttttatatagtgttttctagattttacactattattttattttgtttcaattaggcagaatttgttttgatttgttcatcatgttaatgttttgttatccacttgaattgctaaggacaagcaataagctagttgaaggttgtgttaaatgccaaaatattacatattttatagtgtaaaaatacaaaataaaattnattctttataatattttcaagaaattaatgcactatattattaagttgaaaatattttatttatatttaattttaaatttttttaaaataataatggtatttatggcataatggaaaaaaaaattaaattaaaagaaaatgcattgttttattaaaagaaatacaaattaattagattttaaataaatattttcattaaaatttttgtaatatattttatgttgaaaatattttgtttggatttaat

SEQ ID NO: 150985 - DNA, 672 bp, Cannabis sativa
ttgtaattttatcatcaaatttttaactgaatgaacattttttttaatttttttttataaaaagggacatttattaacttaagtgttagatttaggccattttgcatcttggccctagtttaattaaaagaggaattacctcatataccattttttaacttttttttttctttttcaaatttacagtttgggctgcttcggtgatttttatataggttgctatgtgattttttatgtggattttcgtaaaaatgctaaaaaattttattttgaagtgtaaaaatgaaaaaaaaaattacctaattaaaatttgtgatttaaatgaactttattaaaataaactttataaaccgattctatttttagttatatctgagacatgtatttttggtgacttttacagtaacttttccgacgatgatgactttttcggcgaaattttcagcaaaagtgacaataacttttccagatccttattattgttttacaaatatggaatttctaatttttttttacaaaaatatggcataaaaaaagttaatataaatgtaaaaacataagaaaatccttaactccatgatattatttatttatgtcataaaaaaagtaaactatactatatttttccatatttatgaaaaaatcccattctataaaaataatacgaaaaca

SEQ ID NO: 150986 - DNA, 821 bp, Cannabis sativa
cactttgatatgttattcaagggatgttacgtacatacatagtcaaaatttacctaaaatataatggattaatttatagcctaaaataaaactaatcatacgtgacttggcacgtaacattcaccttccattgaataaaaccaaaaggaaatagtatcaaccaattataatagcacaaatattaatttgataaaacaaaccattcctatgattataccttcacatacaatctaaataagaagaaataaaaaaaaaaaattaaactttacctaaaactaatatttacgtgccttggcacgtaactcctacctagtatataaataagagcttctgctacgatgcataataactaaatatatataatataatattttttagcaaaaaaatattttataaatataatataatatgtacgtattattatttttatacgcttaattcttttatttttataaatatatatttttagatatgcatatgggaagattataataaatattgtaagcatttttaaatattagaattattttttaaaatatagaatttttattaatttatcaaatcaattaaaaaataaaattgtacctaaataggatcatcacttttattaaacactcgatttgaaaaagaacaagatactctagtaagactatgagtaaccatgttagcaggtcatttaataaaaaaaacaaagaaatattgtttaaagatgtaaggagcttacagcaatcttctataataaccctaaaagaagaaagcatagataatgaatttcgaatagcttgtactactaccaagcaatctgactccagctccacttt

SEQ ID NO: 150987 - DNA, 1288 bp, Cannabis sativa
atttataattacatagtcaggcagttaattacagagttgactgatatctttacaacaattatcccctaaaattgtggggtttgattacatattgcgtaaaataagtgcagttgatattttagtatcacatagttgtgattagtccgcttttactaggtcaaagtaaacgtgtattaaacacagtataaatcataacattttggaatgtcttggtaggaactcagtatcaataaccttgatagcgagctggagcttttcccatatctttctcaggttgataatgttaatctcgtcacttctgctctgaagacaaaacgctccatctgacaatcacagttcttggtgacgaggtgaacttcaacatccaatatcatttgaatgtcagcttctaagatgcatggagttgactattgaaggtaccgcgagcatgtcttcctatcgcgagatggacgcctcactatcacttgctttggtttacccgtctgttatacttagtttgcatactgtatattatacgctgagtgccttcacagtcattatatctcatccacataacgaggttagtgccttgtcttgtacacctgaagttacatggtttctcgttgatgcacaaggcaacaacttgtatatctttatctcgcataagactattcagtcaaccgagttgtaaatatactctgtcaattatgcttttaacgagttattccacctcaaaatgtaattaattataattatgtgcgtgcctgggttcgtatttttttttcccatcttgacacgtgtcttcctcttatgtgttagccgaattttgggtataacacatttattacttagaattatcaatatgatgaataaaataaaaatatagctctaagtttttttttggaacaagagaaaagaattttatttcaacaatcaccaaacaagtacaaaaataagggaactccccaacaaaataaatcataagctgtcaatcatttggactatatcactttccctatcgttaaacttggaaaagttacagtaaaagactctagccttgagactatgtttgatcttcaagctaattactttggctaagtcacatttcccctcaaaagtacagatatttatattacaccaaatgtaatagattgcagctgctatgacagctgatttggccaaatctagcagattggtttggttctctctcatccaaatcttccaatctttaaagtttctaggccaatcaataaggcccaaccagttgatagcttcacaaatgaccaccgcatacttggctcctcctcgc

SEQ ID NO: 150988 - DNA, 735 bp, Cannabis sativa
tgacataggaccgggattgcctagcttgttttccactcaggtcggcccgtacgcttgagttctgaactaaggtaagaaaagtgctaagtaccgtatgtggctaaatattagtggttgaatggttatggccttgattattatcaagacttttattaaatatttgttaagcctaggttatgacctagggttggaaacagttaataccgttacgagtaattactcttgaaactgcatttaggtatcttacttatcgtttgctttatcgggcaacgatagtgacatattcagctcgtgattaacgagtggtaaagggttactttttaaagtaccagaattgtgtataatattgagtaaatgtgtatgcaagttaatttgagattgaattgctgaatataactggttattatttgattcacttttcttgctgagtctctgtgactcacaggtgctttatggtgcaggtaggggaaaagcaaagattgagtagccatgagtttgaggttgtagcagcaatgtacatattagctgcagtggctcggcccagtgaacaggatgctccattttgatagtattttgggattgcaaagttcatgttgtaaaagcactaataatctactttgtaacattttgaaaacagggggtccccgtagttctcattacttatcttttactataaagaagtttttatatgcttggcttttaatgacccatacttttggtataattgtatagtat

SEQ ID NO: 150989 - DNA, 534 bp, Cannabis sativa
tttagtaccttagaaattggggtaatatagttagacatttaaaatgtcggaaatttttgggcttatggtttatgaccatttcacctttaagtgattaagaaagggtaagaaggtcattttaccctagtttagtattaatgttttttgagtgggattttaataaactctaagcttatttaagttgaataaaacaagtagtttaattgattacacttagcaaaaaattaagaaaaagcctaaactttctctctctacttccttgttcggccaccaccaataagcaagaaaccaaaattttactttcaatttcaatctagaaagtcaaggatttcagctagggtttctatagattaagagagggatagctcaagttaagcttctctccctttctctctttgaatttcaagaagaaaaatatgattttatgtatgttttagggtttaggttgctatttagtgtcgtgatgtttagaatttctttctcgtgttaagtttaggggtgtacgtcggtcggtttggtcgggttatagcatat

SEQ ID NO: 150990 - DNA, 633 bp, Cannabis sativa
  modified_base (144)..(159): a, c, t, g, unknown or other
gttgatcttagatcaatagatcttaatcctgagatggttaggttctagcttaactgtgttatttgtgctcttcgacttgttcgttaaagctaaccaaatgcatgggcccaatacttacatattgggaacatggtagtgcaattnnnnnnnnnnnnnnnncatagatatagaatctataacttttataactatatagaagtgaaataataatttcctttgagcttgacttaatagatataaatggaagagctcttatttcagtaattatattagttaatttaaatatcatttataagaagctaagtattttaaggataaaatacattgaagggtagaactgtaaatttgtcattactcgatgtagatcatttatagaggatctttgattatttagattgaaactatggataattcatagtgtatctctatttggaacatatagagctttctatataatcatgagtgcaattccgaatctatagtggagtcaggagaaattaataagttagaaaatttacttggtaaatttcgaatctacttattgagagcttggttacataggcttatgggccccacattgtctgggataatattgtcttgtagactcaattaatttgtttttattaatcaatt

SEQ ID NO: 150991 - DNA, 581 bp, Cannabis sativa
tcattgaacttcacttgagcacttatcttcacattcttcaatcttcactgatgtcttctttcttcaaataacttttaactgaaattggagtcttcttcatcttgtcacagtccttcgcactaactaaattccttttgtgacttgactccaccttcacagctccacctaaaatagtctttctgactaatttatataaattttgctctttcttacccttcacaattatcgagccacctttcttgatagttatttcaccatcttttgcggaatagacacaacctcgagtatctaaagctcccaaagagattaagctcctccttaatgttagaacatgtctcacatcagtcagtgttctcacaacaccatcaagcatcttcaccttaacagttcctattccaacagctttagagctagaatcattacccatcaaaacagtacatccatcatatgccttataagtgtcaaagcactccttatacgggtacatatggaacaaacaaccataatccaaaatccaagagtcagaaaagttttcatcaactatgacagagagaacatcagagtcactttcaaagccttca

SEQ ID NO: 150992 - DNA, 569 bp, Cannabis sativa
tgcctgagaaaaaagacaaacatatgaataaaatttcttagctttgacaaatctcacataactgcacaaaagttccacaaagttcatacatcaaaagaagaaacaaaacttaattgttatgattcttaactcatgcaactaatttcttttcatcacaactcaaattcatagaaacaactaatttctccgttcttggttccaattgcaaacccttcgatttcatctctcagtaatagcgcaaggcgtcgtctcttctccctttatcacaataaccatgaatcataaatatataagacctttgatcaggccccaaaccatgtctttccatctcattccaagtatgttcaactctttcttgacaatcccaatccatatacaactttcaacaacaaattacaagtatcaccaatcaagctataatcattcctctccattctctccaaaagatcaggaacctcttctgctcctttcaaagacttaagcaagaagctataagtaacatggttaggcaaacaattgccttgtttcccttccatttcatcgacaaactcataaaccttctccattcg

SEQ ID NO: 150993 - DNA, 500 bp, Cannabis sativa
cacaataatcatcaaatacagcagcaagaacttaaaatcaactcaatttaagcttagaaattgaatcataagacaacctaaccttaacagccctacatctcaaaatcacatactcaaccagaactaaagcttcaaaaacacaagtctatggattctatggttaccttagcttcaagaacacttgaatccttgctgaattttctagaaaaaaaaagatgaagtagttgatttctctctagttttgggttggccgaacaaggagagagagaaagggatgagttctctatttttgtttttaattttcttttaattttctatttttcaaaaatgcataacataagtcaatattcagcataaataaagggcagttgtcatgctctaataaaagccacctaattcactatttaaaatgactaaaatacccttttaagcttaaacttaagcaatgtaaagtctaggggtaaaatgttcaaaaaccataaccccgctcaaactcgata

SEQ ID NO: 150994 - DNA, 859 bp, Cannabis sativa
catggaactcggtgtttggctcagtagaatcacaacttagcatgttggtatattgagatagtttattagacattgggaatgtcgggattagtcgagaatttagaatttcccaaaataccctttagtactcttttatgttattttagtgtggaggggcaaaatggtcattttgcaccaatgatattttgtcctttagtggacttagtgtaatgtgaatatgtgatttatttgatattgttggctgaattaagtggaaacaaaaatcctttctttatctcatttattcaaaaattagaaaacagaagaaaaatcaaagaaaagcaaaatttccttttctctcaaactctctctccctctttcggcctccttgagcagcaaggaatcttgggatttctctttgtgtttctagcatattttgtgttcaatccaagctctaggttagcccttactctttctctctttaatttcttgaaaattaagaaaagatgatagttgcatgtttagtttttgggttgtgcttgctgcaatttattgttgttgttttcaaaagttttgaagtgtttatttgagtgaattcatgcttgttatgttgttatgtcttgcgttttaaccttgtgtagagattttagctcaaaactatgattttcaaggtaatatgataattttcgttgctgtagttgttgttattgtttaatgttgttttctggggttactttatggtgaaacatggtgaatggagcaagttttgatgcatgttagaggggtttagccaagcttgagttttgaactcaaagcttgaagctttaatggcattttttcatatttgtgagttctgggttgttttgatgctttggaaatg

SEQ ID NO: 150995 - DNA, 759 bp, Cannabis sativa
actctgactacctcatgcccaaatgttttaggtctgctggagtctatcaccactgctaaaaatcctacacatccactgtgtagtagatccctagcccttagcagaaaaataaccaggatccgagacctctgaactgatccaacataaacaaatagatcttcaccttctggctgaaaagtcaccattttccgcttacaatctatactggccaaatacttggatagaaaatccatcccaagtatgatgtcaaacttcgttaattccaattctataaggtcagcactcaactccctatcatcgatcctaactggcatagacctaatacgcctaatagagataaccaactccccgctacgcaatagggttccaaaacctctttcaagaaaatcacaaggcctacccaaaagatccattacctgcgtagccacatatgaacgtgtagctcccgaatcaaataacacagtatataatgagttgttgactagaagctgacctgtcaccaccgaaggacaggctgcagcatcagcttgggtgatagcaaacactcgagcaggtacaagttttgcctctgacttcgactcttctttctttgcctaagggcaatctttcttgaaatgccccaccatgccgcactgaaagcatgtcttacggttggactctcccggatgatgtttcttacaacgtgaacactcagggtaagagtaaccctggcgtccacctctgccttggttcccgcagaaccgcttgctctgccccgaa

SEQ ID NO: 150996 - DNA, 975 bp, Cannabis sativa
tatttgttcacggacaaagtgtaaatcaatctctatatgtttgcatctggcatgaaaaattggattggctgcaagagcagctgcaccaggattatcaacccagataattggaacatctggagatgtaatgtgcagctcagaaagtagagaacaaatccattttatttctgctgtaggattggttagagctctgaactcagattttgtggatgatcgagcaaccacctgctttttttagcagaccaagagatcaaattttgtccaagaaatattgcataaccaccagtagagcgcctgtcatcaagtgaacttgcctaatctgcatcggagtaaacttgcagagagagtctagatgctggtttgagtaataacccttcattgattgtgccttttaagtacctgagtaaacgcttacatgcttcctagtgcacacttgttggggcatgaataaattgtgatagtttgttgatgatgaatgccacatcaggcgtggtaagagtcaaatattgtaatgcgcctgaggtacttctatacaaggtttgatcttcaaaagatgttccttcatataaagagagtttatgggcactactggtagaatttgaacaaggtttagctccatcaagatgaactttcacaagcaaatttgagatatatttgctttgagacaaatagattccttctttagttctgttaacttcaacactaagaaaataatgaatagcaccaagatcttttagttcaaagcattgattaagatcaaaaattaacttgttgatgagagtagtattgggggcagtaattagtatatcgtccacatatactagaaagatgattaagctttgtcctgaaccataaacaaacaaggatgaatctgctcttgatgcaatgaatccctagtcaatgagagtagtctttagtttttcattccaagcccgaggggcttgtttaaggccatagatggctttgtgtaaatga

SEQ ID NO: 150997 - DNA, 705 bp, Cannabis sativa
  modified_base (664)..(664): a, c, t, g, unknown or other
atcatttataggtagctaagggttttaaggataaaatacattgaagggtagaacggtccaaaagcgtctggtttttacaatagttggcgtaatggctggtcggtgtacacccgaacaagatgagcctggaaataaggccttaacttccttgttgctaaaattagatagtaagtaagcttctctatcaaaggataccatccctcagcttcaacgagtcttttgttgatatagtagactggatgttggacgttgttctcttctcttatcagcaaggcatttacagcgtattctataatagccaagtatattcataattcttccctgtctaggggtttggagagtatgagacgccttgcaagttgtctttttaattcttgataggcgttctcacattccttcatccattaaaatttcttgctacctcgaaagatgttgaagaaaggaacacacttgtctattgacttcgaaacaaatctactgagtgcagctatccgacaagttaagctttggacttccttagtttttttttttttttggcaatttcatatccaagagggcttgtattttctctggattggcttcgatacttcgagcattaataattaaaccaagaaacttacctgagctgactccaaaggagcactttaagggattgagtttcatnttgtattttttgaggattttgaagcattcttccaggtcgtc

SEQ ID NO: 150998 - DNA, 716 bp, Cannabis sativa
  modified_base (650)..(653): a, c, t, g, unknown or other
tttaataagttgtgcaggaaagaactagaactggataagttagatgcattacatgaacatgtagtcaaaacattgtgcaaccttgaatatttttttccgcaatctttttttgacatcgtgatacatttaatggttcatctagtgagagaaacaaggttgtgtgggccggttttggcgagatggatgtatatatttgaaagaaatatgaaggtacttaaaagttatgtgcataaccactatcggctagaagcatctattgttgaatgctacatatttgaagaggatgtggaattttgtttagagtacatggccgaagttgaggcaatagtaattagtaaaccaagaactgacccagatgaggttgatagaggattaagggggaaagggacaatggtgacagtccaagtttgaactagatcaagctcaagtagtcctgatgaacaataatgcaaaggttcaactatatataacgtaagtagcttttcctttgattaacatttcttaagtcatgatgaacaacaacttgatttaccttacatgttttatagtgaccatatggagatgttacaatcaatggttctaagaaatcataaaaatgaacaaaaataggttgcaaaccagcattgttaaactttcattgggtggttaannnntaccattatagcaaagttgaacgaaccaaatcatggagtatctgatgtgttgagtcgtattgc

SEQ ID NO: 150999 - DNA, 526 bp, Cannabis sativa
  modified_base (474)..(484): a, c, t, g, unknown or other
ccggttgcacaccattgtttgatagaagttaaaagatggctggggtggcatgcccaaaccagcaattttcagcaacttctgaggtggataggaagatctagattgtctaaattcaagaggggagttttggctgctgttttaatcgggctggtgtatagcatttggagatgctgaaatgctgtagtatggaaagaacaagctgtcaacctggttcgaattgttgaagaagtgcagtggacctcaaaggttcggattgagagaatcatgcccaaaaaaattaagaacattgacaaagaatggctttttgctttatagagattaattacatgtgattaggggaagattataccattgtatatagaggtatacagtttgtggcccttattgggtgcgtatagtttgtacaaaaatttcgtattttgcaatacaattcattgatttatcaaaaaaaaaataaataaattaaataaagannnnnnnnnnnaatacaactcactttaaataatgaacttgattattattaaga

SEQ ID NO: 151000 - DNA, 1026 bp, Cannabis sativa
agaggcctttgtcttagactgaccccttccccgttatatatagataacctcacatgtggcggaggaataccgtgattacaattactataacacaaaaatttaaaacaaaaccaatccaacaagacttaaacaaatcagatactcttaaacaacattacacaacaatctccaatctctattcaaatctaagaacgaaaattgctcaaatctcttagtcttgtaaacccaaacagctgtccaaaatttgactttttcccacaaatcttcaactgagacttcaatcccttcaaaaattttgttattcctttcgagccaaataacccaaaggattgctaggatagctgtcctccataggtatgatctacccttactccccccaccttgctcacaatcattagagggactgaacctggcagtacccattgggtctcaaagacgttcaacagctttatccaaagtctttgggccatacaacaccccaaaaacaaatatgccacttcttcactacttttcttacaacaaacacaccatcccggggacaagcagataaatggacgccttttttgcatcataaaatgcacattaatttttcctagtgccaccaaccatccaaagactttgactttagaaggacacctgcttttccataaggtcttcgtccagaacaactcgccagaattgtggtttgaagtaaaccagctaaatgctgacttacaagagaaaatcccaccaggatctggtttccataatctgatatcctctgatatgttgagcaatcgaatgtgttccaatagttgcagtaaaacaataagattagacatttccctctccatcaagttccttctaaacttaaaattccagcttgcaacacaatttcctacctctccttcaatggccaccagatcttttatactcatatttttcgcctttgataccactgccaggtccggaaatcgactctttaatgttgtttctccaatccagatatcttcccaaaaccgtatagttgcaccattgcccacttta

SEQ ID NO: 151001 - DNA, 879 bp, Cannabis sativa
  modified_base (396)..(401): a, c, t, g, unknown or other
  modified_base (451)..(455): a, c, t, g, unknown or other
  modified_base (517)..(523): a, c, t, g, unknown or other
atgtcccagtaggcaagagtcaaaattattcttattttataaatctcttcattatttcatattgtaaacactagtctaagttgtaatttttggatgtacaactagatgttgtatttataaatatttatctttcgagatctaacactattttgtttgtctaacggatgacaattctttgaatttgtcccattcaaaacaacaagctaagctagaccaacaatgaagattagaaattatactacaattattaataatagaaaacaaacacatcttaaataatttccaaagttttcaacaaactgatacagtgtcttggtaggcgagagtcaaagataccattcatcgaaaagagtagtcagctcatctaaaataaacaccattctagcaaccttttannnnnncaaaataagaatccaacattgtctacgtaggcgagagtcaaggttattcnnnnnttatgagcttccaccattgttccatacttcgtaaatttatctttaagtagtcaccgtagggnnnnnnntaatagagacaaaaacttataaaatacttatctttctagatctttgcagtgttaaatgcttcaacgaataaccatccataagggagacgaagtctagcgtctcgaggttatattgaaaataattaaccatgtaggaccaacaatagagatcgaatatccttataactaaaagctcattattttaaagagttgtattttcatttgataattattttaatctatttatttaattaaaattactaatttagatgaatctaaatataaatttgaatttaatatttataaaattataccctcaaaagatctgaaaaatttattttccatccttagtaaaattttccaataaatattatgaa

SEQ ID NO: 151002 - DNA, 521 bp, Cannabis sativa
ttgaattttcataagtggtactatgaggcagcatgatttttttttttttaagtaactgtacaatattaatttctatataatattctattttattaacgataaaagatacataatgttataaagttacacccacatataagatggatatagcgtacttaggcaggcatgcatggatattcatgcacatgtacaattacaaatataacattattattattcattacacttacttatacgattgactttattaataatattttatatatatatatacttatatatataaatgtcaatcgatacataattaaattacgtaaacttattttggagggccaacgcaagctccagtattatactttccaacacagtaacatccagtttggcaaggactccaaggcgcacaaaatttaccccagcattgatttttttccggtgaagataacatttccatcaatattgcttctgaaatagaagcaggttcgataatagtcaccatctttccattatgatcgtagacctca

SEQ ID NO: 151003 - DNA, 1041 bp, Cannabis sativa
ttttaaaattttagagtgtgtttggaaagttattgcgtaattattagggtgcagtaatagtctagtaattacacaatatttaaaatatcagagtgtttagacatgagatgataattattatatataaattgataatatcttatttgataaaatagttagttattacacataaaaataatatttgttagtggttaatacttaaaattgaaagtttttagtaattacgtagtgtaattagaggtgtacataaatcgatccaatccaataataactgaccaatctaattacaatcgatcgtcaaacattgaatttccaattatgatcggatcaatttggatgttatctttgaatattcaattggataggatcagatgttggatggggtgtcctaaaatccaatacatctatcatccaatcaaattaattaatattttcatttaatttgaatgagtaattagattttgttgttatacataaaaaaatatatatgtatatatggaaattaacattaaaatttacatttttttttttgggattggataaatccaattgaatccaatagatactggatttaaaagattagatgaatttgatccgatccgataaatattaggtccaaaatattggagaagcccaaattaaactaataaatatacatgaaatacatccaatgaacagaatcaattcaatccaacaaccactgaatgttggatcgattgaatgactgaaattaattggatctgatcgaatattgaaatctaacatctaatataatatataattaaatcgcatctagataggcctaaaaacattgcatgtggtccaatgaacaccctaaggtggcatttggttggaggtaataaaatagaatggagttaaaataaaacaattttcattccattcatttgtttggttgcattttaaagtattggaatatattcattctaatggaatgtcatttctactattttggtaaaataactattttattttgaaatggaatgaaaggtcattccaataacatgagaaaaaatttaatga

SEQ ID NO: 151004 - DNA, 553 bp, Cannabis sativa
atctctaccttttagcagtatttggctggaaagtgtttctgtattttaaacataaagaataatactgataaggagctctatcatttgacatagtatcttgtttgttgttagtacactttagtataaactcccacatatcctaattaatttaacataaaaaatataaaatcttaaattattttacacatatcttaattgtaaataaatatataaattaagaccgatcagtaaaatattattagactaaataactaagagtgttgtgcactataggtgttgcatatatagtatgcttttatattatcattttttggtaatttataactacaataaaaaatgtaaaattttcgtcctccaataatgatttattaaaaaaccctcttatattttgaaagagtataagtatttttttctcatgatattgatttctacatgtgcattacacaaatattatagtctgagcacaaggccgttttaaacattttagaggccctgttctaatcttaaattttaggcccctaataaaaaaaaactattttattataataattgt

SEQ ID NO: 151005 - DNA, 669 bp, Cannabis sativa
  modified_base (520)..(520): a, c, t, g, unknown or other
gagtaataacaagatctaaacttgaatctccttcaggtgatagaattcttcacaatcttctacactatgattgagtacttacttgatatgagtgggaaaggtactcctcactatatgcactttgaaacttgaagagagaagagagagagagagagaattagaaatagcgaagagtctctcttttcaattatctgacagaatagtccaatgaaagttatgaaaataggagcctgtcatatctatttataggattccttctacggttaggatttaatttatatggaattaaagaaaagataaaaataaaatagattaaaatttacttaagtggttggccatgtagtggatcccactggatttaattttgtcatttatttaacaacttattattttctttcacaaatgtcatatttaattttaaacctttaaatgtcgaatctatttatttaataattataattaaaaattaaataaaatttccatttaatttatttgtaaattagaccttacaaagtctctnaattaacaaataaatcctaaaaccacttctctactcaattaagtcctagcttagttaaaattcataaataagacatagcctaatttagaattctaattagttaattaaaaccaattaactaagtgtaaaagccaatattatctcaacta

SEQ ID NO: 151006 - DNA, 552 bp, Cannabis sativa
  modified_base (27)..(32): a, c, t, g, unknown or other
taatcgtaatttgttaattacggagannnnnntagcatgtgtgaatgtaatatgagttatttgtgaaataaaaatatttcaggtttggcaatcgaggagacctgattggtggccaaaaatgtcacaacagttttagttagaattattgatgaaattattatgataagttgattttagaaataccaaagtattttggggtactcggaatcaaccaattaccttagaaatatagattttttaacggctaagaaataataagataactactaataataaagtttttattaatattattattaataatattatattattattatatatataaacaaaacgttgtcattttgattattatatatatattaagttttatatataatttaacagtaaaaaaacgaacgacgaacgaaaccctcgttcttcctcattcgataaaactttcttcccctatatctattttttttttcaacccgaaacctagtgatctaaacttcggtagtagcaggatagcaaatctttgaaaaagagaaacttaagatatggtttaatttc

SEQ ID NO: 151007 - DNA, 1003 bp, Cannabis sativa
aagccatgccgcggcacctaggacgaaacccaggttccaccaacaagaggcgggccgcggcatgctcagagcatgccgtggcacctgggttccgaacccagaaactaggaagcatgaacacgattttcagtaagaaattccaatcttttcacctcaaattcacaaccaaactttcaagttaataaataggattactagcaattaatagaagctcaaataacatattttatgcatcaaaatcccataataaatcaaaaatttagattgctcaaaagcatagaaagtcaagcttccaacttaacaaaactcaagttcatgaacaaaagcttatcttcaacaacccaaacaatttccagcaataaaaacaattcaaggctacatgattctaagcttgaaaataccttataatcataatccatgcacaacaacttaaatcatgcaattcttacaaaagatcaccaagattaacattcaaagctataaacatgcaacttcacaaactcaacaattcaaaacaattcaaaaactcaacagtaggaagacaagattaaaaatctgtaaaagctacctcaaacaaagcttgaactcccttcatctccaagctcaaatatctcccaattccaagcttcaaattaatcaattaccaaaaccaaaaatgaaattttaagagagggtttgagagagaggggggttcgggggagagggagaagcaactagaaaaataatctatttccctcaaaaatcaattttcattaagtgtaaatcaaatatggtcaaaagaccattttgcccctggggcctaaatacacacatacaccctcacaagggtaatttagccatttcatactcaattatttctaaataaatttcagatttcatattatcaaataaaatgccaaataattcaacccaatttacattttcggcccgaacccggttcggccagaaatgcccggttgtgactataccgcgccaacctatcagaacacacctgaaaagacaa

SEQ ID NO: 151008 - DNA, 1010 bp, Cannabis sativa
acccttaaagtagtccatgaactctctccctatggcttcccggccggagatccagacattatctttgtttataatactcttaatggcatttcgtctccccttaatggtcgccgaaaggacgaaaaaatttagagcatttatccccatctttgagccaagagattctggccctttgtttccaatagatcgcctttctttctaaagactcattcaactctcgacgaatatcacgttcttgcttccagtctcgggacccagccggcagactctgcagagagttgagcttattcttaagatcttttataaccacatcaagctttccaaattgggttctactccaattcaggagggccaccctagtggccccaacctttttgaagactattgcaggggcccagttgtgactaactgaattctaggcattgttcagtaccagattgcttctagcatcacgggtccacccttcctcaaatttgaagcatcttttatacttggcgacctgaccatccgacattaaacacaaaggcctatggtcggagttgcaagtctgggacgagcataggatggccctaggaaataaattgagccaagcgccattcactaatcctttatccaacgcagatttcacatgatgcctcccagacctatggttatcccaagtcaagttgtccccttggataggcaaattgatgagacctctggcgtccaacaggttagatatgatcgggatgaaaggatccctacccgaggaaccttccctttcagaggcactaagaacaaagttagtatcacccaagatcagctagggccccccaaatctatctcccaggttcagaaattcagactagaactttttcttcgcatgcaggtagggggaccataaacacacgataagagccacggatgagaggagggatctgaatacactatccccgagatatgattgcacgagcaagagatacattcaaaactaaacccctctttccaagccagaataatacctcccgcat

SEQ ID NO: 151009 - DNA, 547 bp, Cannabis sativa
ttatgcaaatttctctttaattgttcctgttctttcgtttgatgttattattcacataaaacttaaagctacaatttcattattatagtttcgtggttgttgctctagcaatgataaatactagttcaatgacgtaggaaaataatcacttgtgccctttaaaattccttctatataattttaataatccattaagccaccaatcagtattggatataactcatttactagtatgctcatcgtacttgtctttatttcccagatagcatagactttgattcctattgtagtcttttgattttttaccacttcagtttatcttatttgctaatcactcttctggttcctgttcctccaatactcatttcaatcaagtttacttaattatgagattagctagttttacataataactctttttctacttttgtgagacattgctatagtggtgaagtttgaatctgtaatgccattagattctgatagttatgttcaatgattgcttcttctaatatactagccctctgaggtatcacataacttcata

SEQ ID NO: 151010 - DNA, 530 bp, Cannabis sativa
taagggaagtacgacccctgtaccgaatgcactaaagtaccagccctgtactcgtgttggtagagccattattgtactcctgggaattactaagtgttgtaccacatgcacgacgtaccccctggtactcgtgttggtaacaccgtaaccacaccaatatcctacactaaactaacactcttaaaattgcataaacaattagtgttagtagtgtaaatagttaaaacaagcataaattcatatatacattattatgctatcttacctcgttccgggctcaagcgtgccggtcagcctaagtggaaaagcaacgtgacgttttacagggccctaaaccaagatattcaaaactcaataagagacacactaaaacacttattggggatttaaaattaaaattaaggataaccctattgataaataggatgcaaataccctaaacaactcaaaaatagataaaattagggttcgagaaaaagccccatccggcagaccggttcccaactggaagcccggttcctgggtaccaa

SEQ ID NO: 151011 - DNA, 675 bp, Cannabis sativa
ttacctactccatgaagcacccgtgagtcacaatgactcagcaaaaaaagctactagctcgaaaacattgaaagtgcaagtgttcccatcacaacatagtatacatactcgtggtttattacatattcagcatgcatatataatttaacgtctattcgaacacatttattacacatttaaaaaaatcatagcaactcacaatcatcaatttcatcttttcactaaatagacattcattcaatacataatcacatattatcaatgcttcataaagcatcctaatcacacatccctataatcacataattacagtacttcataaagcacccttaccactcgctatccatgagttgtgtatgtcactatcgttgcccgataaagcgaacgataagtaagaaacctatctacgatttcaacgactaattatttataacagtaatgaccgtatcttttcctcgatcataatcgagccataaatgataataattatttctcatcattacctcgatcataatcgagtcacaaacgataataatcattcttcatcatcacttcgatcacagtcgagtcacaacaaatacataacattgatctcgatcttaattgaggcactaacgattataatcgcttcttatttaaccacttaccggtgcataaaacttttcttacctcagt

SEQ ID NO: 151012 - DNA, 631 bp, Cannabis sativa
cccttgttttgattgattctggttgccttctcaggtgaagtcaccggaattaatggtggttctctttctgattgaattttcgtttcggttgcgttgagttactacgtggttgcatgatagttgcctaggaagcatgaatcttgggttgaaggtgtatgtaagaggtatttgtgtaatttttttttatttggactgtatattagtatttttgtaatattgttactttttctggttgaaactaaaaaagtccttaatttactttattttacaaaacaatgatcctaattttcaattacaataaactgtcagtagcgaaattagccacaaatattagtggggattatttttttttttggcaaaattggacattaataatgtttttttaattggagaaaaagaaatataaactttatagcgacaaaaataaatatatgatataatcaaataaatataaaattatgtgaagataaaaatgagaaatataaatttataagaaaaaaaaatgtaatgacaaaactgaaaaataaaattatagtctagagacaaaaaacaaaagtaaataaaaaatttcatacaaaagtaaatttttaaaaccacttgaggctagctcaagtggccatagggggtgcgt

SEQ ID NO: 151013 - DNA, 563 bp, Cannabis sativa
agtagacgtagctctattaccgtcacaacatagggagtcaactactataaatttcgtgtctctctatttactctatttatctcttattttatctcgccaatctagcaagcaaattttgactactttttagcgtcaacacataaatatatataaactaggcaactaaactgcgcgaataaatttttatttttattattattgtgattacaaaatattagtactgaatgagtggtatattatacaatatactattattattttctcaaaatcatgtattttttgaataaaataatttacaagaacgaagatattatacaatatgcatatactattattatatacatatatatatatattagatttctatgttttaaatttattttgcatcaatatataaatatttttcatgtatgtaggttaaaaattagtcttgtagcttttgaagatattattatatagcaatatataaataaagaagatatatatttatataaatatttttctatgttgtaaatttattttgtatcaatatataaattaggaagatatatatttatatatat

SEQ ID NO: 151014 - DNA, 579 bp, Cannabis sativa
  modified_base (38)..(48): a, c, t, g, unknown or other
tccgcattttatatacacatacatatatttcagtttannnnnnnnnnngtctaacagtttgtatcaaagcggattatatatctctgctttgattttttttaagtttcatatatatatacatacggggattttcatttataatataaattatatatatatatattatatatataccttcatattatataatcccgattatatatattcgtactcaatttatttttatatatactcgttcatattcaagttcatatatatatatactttcatatatacatacatatatttatatacataaaagttatttatatatttatgtatggttatatatattatatattggattgataattttatgtgatatatattgtatacgtatatatagacataaaattttaagtttcgttattcataaaatatatatatgtatatattttttgtgtgtattttgaatcttcattgcaatattaaattcatataaaattatagagtgatttcgtgcatgaaaaagatttgaataaatatcaaaatctggaaaaaaatttgaagaacacatttggacccaactcattttcattg

SEQ ID NO: 151015 - DNA, 1168 bp, Cannabis sativa
gctaggataataacccaagtctaagtagctgaagctaaaataagaagaacataaacatggttagtagatctagaattaataacccaaagggacaataattctctaaaatacacgaattcacaacaaaattagaaataccttgattttttgccaaaaacttaggatattgggatttccagtggccattttcgttgtaataaaagcatttcccttttccttttacctttcgatttacagtctttttacccttattagttgtgttaacaactttaagaggctttttgttgttgttccacttctttttctttgcgggtttcaaagtgtaggcaatatttgtctcaggttttgccgtacttaccgtagcattactagaacttagaactttgttaccttctttctgtggacctccaataaaattctcgaacgtctaaagattgttgatcaactcgtgaaagttaaaagtcaacttgttcatgacgtagtttgaagtaaagggcagaaaagctagagttaaactattcaagatcaaactcacttgagtttcttaatcaatgatagctccatggatcttagcttcctggaaataactagccatcgggagtaggtggtcacacacattctgatgaggtttcgtccgtgtattgatgaagttcttggtcgcatcaaaacgagcttgatctgatgccttcccaaataattcagtcaactggttcataatcttagaagccgtgagagtgttggcaaaccttattttcaaggtatcaaccatgctagacagcataaagtaacgagccttattgttaacattctgccaacacttaaacttttcctttaccattttaacaaccttctattcgatcaaaataagaatccgacgttatcccgtttaggcgagagtcaaggtcattcttctgccattgtttcatactttgtaaaccctactcttagcagtcattattagggtgatcgttactaagaataaaagatttacaacaatacttatcttttgagattctacggtgttaaattgctaatgaatgaaaatctattagggatgagtcacattaaaacaagaaccatgtagaaccaacaatagagatcaaatatccttaaactaaagctcagtatttaaaaaaattgtatttttatttgatacctattttaatat

SEQ ID NO: 151016 - DNA, 905 bp, Cannabis sativa
  modified_base (253)..(254): a, c, t, g, unknown or other
aaaaagaaaaaaaaaaacacctaaattctaatgggaaatttgttaaaatatacttaaaaatttagattattcttttaatataccacctttaaataaacactctaaatattctctaaacatcctaaaactccaaaattacccttacaattcaaaagctctcttctcccactctctctgtctaacttcccccctctctctctgttattcctatccagccccgacgtcacgagctccgaccgaccaagacgacccnngaccgagaagacccatgacgactcgcgacgacccacgagaagcacccaagacaacccacgacgaccgtatttttttttctggtttctgacccatctagcacttgttttctgcattttttttctggtttttgacaatgtcgcgaaacatcgctagatgtcgcgaaacatcacgaaattttgaaacatctctaaatgtctccaattcacaacaatgcttgttttctgcattttttttctaatttttgacgatgtcgcgaaacatcatcgctagatgtcgcgaaacatcgcgaaatcacgaaaacatttttaaatgtctccaattcacaacatcacgaaacacatcgcgaacattgcgaaatcacgaaaacatctttaaatgtctccaattcacaacatcgcgaacatcatcgcgaaacatcgctaaatatcacaaatcatcactaaacttcatccctgacctcagatttgttctatcattgcaaatacatcgttaaatatcgcaaaaaactggtaaaccataaggaaaaaaatgcaaaaaacgagaaatttttttttgaaatgtaaggcggccgaacaacactagctccggtgatgggtcgtctggctggtagagtgtgtgcgtgtgtgtggtgtgagtatcctagagagaga

SEQ ID NO: 151017 - DNA, 533 bp, Cannabis sativa
aacatacaaaaattaactcttaattttttttataacacaatttatgcttgtattttttactaagatttttgaatcacgccatattaatggcacatccgtactgcatcaataaatagttttcaaaataaacgaaatgtaataaaaagacatattttctataattgctatagttcaagggaatttttatcctacaaaaaaaaaattaatagaatgtgattctacaaattttataattcaagggaaatatttagtattttaaatttagtgaacgcattttactacctgtactataaaatttgtatttcacgtgcgtagcacgtggaacgataactagtataaatataaagtaaaaaaaacccgaaaccacatatcgcatccctctcatccttgtgctcgcctaggatgctgccagaggttcgcaggtacgtttctgttggcttgccggtatgccgcttgcacgggatgtggcctaaacctccaaaagacgttgtggtgtgccttggccacgagtcattcgtgagctagtttgcata

SEQ ID NO: 151018 - DNA, 946 bp, Cannabis sativa
ccaagttgacaaacaacctggtacactgcttttgattgctcaatgtcaaatataattcgaccaatgaatcctgaatggtcaaaaatagggtacaagacctcatccttaagttcaaaaaccttagaagtatcaaaacgagatcccgggagctcaggaatgagtactcagcgcccaggttgataaatgacctggtgcgctgggttttgcctatctgattctgattaggtttcgatcgtccatctagtctttcataatgactaagatccatgaagtcaaaaaatacaaattcacaactttgcatttctcatttccaacatgagaaattcactcgaaaatgaaaagttttaagtctctcatttttgtagaacaacaacatctctgagtgctggtgaccagctttgccagaatacagattcagactaagtgatgtcaaaatattaattaggcatctaaaagtacattccttagacgtttttacacttaccaagcatccaggttaacgttatatgtcaacatgggcgttgggatgtcaacttgagcactcgatgtcaatatcggcactggatcatgaactatctacagtaaaacagccataactcacacaatattcatatgattgacgcgatttaactagcatttcaaagctaatacaatgctctatcaagtcatgtataacacttcaatcacaattttgaagctatcaacctcaaattctacccccaagaaagttacaaaaataagctctaagttacccgcagcgggtactgctgggcttcaaaaaatgactatcaccatcataagctaattttcacaattggatcatcatttacggttaaaaaaatctattttgtatttttttttcccaatttttgtgggcctccttcccctatgaaaggagagctcccttagctcatttttcacattcagaaaactaccaacaaggtca

SEQ ID NO: 151019 - DNA, 630 bp, Cannabis sativa
  modified_base (29)..(36): a, c, t, g, unknown or other
taaaagtgaatgaaattagacaaaagtcnnnnnnnntaacaatctcaatagttcggggagaatttttaacgaccgaaaaagttcgggggtacgatttggtacatgtcaaagtttaaggaaaaaaattactaattagccttttatttattttgatcaaagttcgaggagtgagttggtaaaataggaacttttgttagtaaaatgatttttcaaatattttaattaacaaaatagttttcttttaaacgtttgtgggcgagcgtgtgtgtattagaagtcttgggttcgagtcccaaattatgcattgtgtaatatataaatgcttaaataaaaaaaagacataataattaatataataaatacaattaatattaatttttctttatcattaaaaaaataaagttagttggactcccatgacttctcttcatcttcatcttcaattgagtttttcattactatctgagtttttatcttcatcttcatactactactcaagtatttcatctttaatggtaatcattcacatttgacctaaaaaaattcaagaaacccttaaagaagaagtgaaaattccatccaacaattgtaaatttatcccatctcgatataaatcatctatatagagga

SEQ ID NO: 151020 - DNA, 571 bp, Cannabis sativa
aggaaatttttcatctaaaatgattgcatcttgtgcgatcacatcttgatacaaatgttgtcgctttctaatcccaaacagagcatcatcaacatgctgtaaaaaagtaataacattgtacacgtataagcaaatgtaagtcttaaatatataagagatcataaaatcatatgtcatatacctcactaaaaaagtaagaacgttgtacacgtataagcaaatgtaaggccttgatagtgcaccaatccactttttcactttgtctcgcttctggtccatacattgtggatggggttgacatatggatgtgagaataacctggggtgaccactgaaagatcatctcttgtggcttcactcataggttgaacatgaattgtgttaccaacttctgtagcttgactagagggatgttcttcatttgtaataacgtgttgttcttcaattctaacatcgacattaccacaattctcatgtctatcagtatcatcgatccaattaattgtgcctccagactccaacacagatgttaatatatcaatcaagttgtttgactttgattcagagatatg

SEQ ID NO: 151021 - DNA, 574 bp, Cannabis sativa
taattagtaatcccggttaggggattagggtttcataatcatttttgggtagcgtgcctaattatttagggcgttacaagtacccttttcaatcatttggcctacactaagtaggttttgatcgatgttgggtatgtatctcttgcctttattagtttcaatgacaatggtgcctttgtcgactgcttccatgaagtcaccattactaattttgactttagtcttggatttgtcaagactacaaaagatacttttattttttgtcatgtggttactgcaaccactatcaagatgccaagtatcttttccttcttctgatgcagcttcacagacagaaaagattacttttatcatttttctcttcaaaaaaattagcttgatgggatttctttaaacgacaagttttttcaatgtgcccaaattttttacaatttggacactgtggttttcctttaaaccaataatatttctccaagtgactttttcttttacaaatgccacatggaggatacttgtcgttattttctttttgtttttcttgtgtctttttcccatcagcttttggtttttgaga

SEQ ID NO: 151022 - DNA, 816 bp, Cannabis sativa
tatgctgcccgtagaactcaaaccgctgtcccacagaagattaacatatagccaagaggccaatcatgtactccttgcagaatcacttgatgaagttgaagaaaagcgaaccgcagccaacttaaaactgatagcccatcagcaaaaagtagcttggtattttaacaaacaagtgaaagcacgaaatttatttgtgggagatatggtcctaagaagagtatttttgaacacaaaagacagtacgacaggtgtgctcagaccaaattgggaaggaccatatcaagtggtcaaagttttagaattaggggcatacgaattgggtaagtatgatgaaaagatgcaactcgttctggtaccaaggtattggaacggggagcatttaagaaaatactacaaataaaagtactaggtcggatgaccatatcaagtacgaaataaaagaacatttgctcttaagtgaatggccttctgggtggaccacgcccaaagttacagataaaattttcaagtattcaagtcggatgaccatctttgaaagtacaatttttattttttgcaattttttttgttcatgttaagctaaagatcagatcatatcagcataatagctttgatgtaagttactacggtaagagacatatttatgaccaataaatgaataaagatgtttatttaaattcaaattaagtcgagttcattagcatgctatgaatttaccatccagtgcatacaaaaggtttggtcgtacccaaaaccccaaacaaaaaaaaaagtgaccaagagtcataagttttctcggtcacttgggggccacct

SEQ ID NO: 151023 - DNA, 694 bp, Cannabis sativa
  modified_base (282)..(282): a, c, t, g, unknown or other
tcccaagtggcctatggcgaaactaaggcggctgcttcaacctccggtcagactactgatgtacctcttgctcaagcaatagatcctcttgctctgattggcccagaagaaccgaaccaagagcttgggactcgagctgcctaaacacttctctttttatctctttactttatgtatcttattcggcctcaaggccttttctaagacatcataaacaaccaagcggtctttaaacttagaattatttttcatttttcggacaacaggctgaccgggcagctnttaatcccggtattacgtgctttttttatccttaatgaattttattctctgtttataattgtcgtgcaattgtgattgttttatttttaccaaatactttgtacaggtatactgccccccaagtgatcgagcagacgtatgactcttggtcacttgtcttttacaaatatattgtttatctgtttggtgttttgggtttgaccaaaccttttgtatgcattgtatggtaaattagaaacataatgataatttccactcaatctaaattttgatatatctttattcatttattgatcgaaaagtgtatttgttactgtagtaacttacatcagagtcgtttgatctaatcggatcttttagcttaacatgaaataaaacaaattgcagacataagaaactgtactttaaagtg

SEQ ID NO: 151024 - DNA, 1319 bp, Cannabis sativa
  modified_base (605)..(614): a, c, t, g, unknown or other
  modified_base (1212)..(1235): a, c, t, g, unknown or other
aagaataaggaggagaagtacacctacttcacactcgtgacaaagaaacttgaggccatctcatggccactcagggaacagtcccatactgaaagcccttccctatcaaaagggagaggacaaaaagggacatgtcaatgttttgttattatcacaacaactttgaacatgacacaaatgagtgtcaaaatctgagaagagagattgaatacctcataaggagtaacaatcctcacctgcatcgttatgtgcaagacgaccaaactcagccacaaggtgcccaaaatggagatccaatgccaccacgagttgcaggacatctaggagtcatcatttgcagatcccacattacaggcgagactagaaaatctagggagcgctacgcttagacactctgtcatgagctgaaaagttatatcctagttgtcgaagacaggagctctaagcaacaaaatcctatggagcccatgatctccttcacaaaagaagacgttgcttagatcagtttcccgcacaatgactccctggtcattactgtatagattaggaaattgaccgtagcaagatgcatggtggacgacggagcctcctccaacattcttttnnnnnnnnnntatgaaaagatggggctccagctcaccgacctggcaccgtacaattaagtgatctatgacttctttggctagggcattgcacttattgggtatatgagattacccctcgtagttggagaaaatcaaaccgccagaactctgatggcacagtttgtcatgatcgacgatgccttggccttcaacgcaatgataggttgaccaatcctcaatgacctgaaggcggtaacatccatctaccccctacgccttaaatttccaacaaggcatggggtggcgtgtgtgaggggaaaccaacagtctgctcctcactgttacaacttggctctatccaaagccaagaaagagaagatgctcgccaagggcgtagaagacacggttagcaaagggcaatgaagtccgccgcaaagcagggacacagacatagatcatcactttggggatcatacaggaagctttaggcctatagaagagttggaggaagtggaggtcgatcacacttttccaacaagaagactgaagattgggaaaggtttagcgcaataaattaaatcaataccgataacatttctaagggaaaactgttggaatttattttacnnnnnnnnnnnnnnnnnnnnnnnntatgttgattaacatcctaaataagaactttctaaaacgataaattaaacacatataaaggttaagaaaccttacattgggtgc

SEQ ID NO: 151025 - DNA, 630 bp, Cannabis sativa
tggtcaaaaaagagtatatttttttaactttagtaatggaagagtttgcccttacgacataatctcgatgtaatgcacattaacgaaaatgtgtgtgacagcttactaggtactcttctaagtatcaatggaagtcaaaagataccgagaaagtaagaatgggtttgcaagaattacaaatacgatatgagttgtggttgtatgatgaccgaaatgggaaatggaaaaagtctagctagttacacacttagtgttcaagaacggattgaatttgcagaatttataaagactgtacgatttcttgatggttttgctacaaacttagataaaaatgtaaacttggataccagaaagatttttcagacccaaatcccatgactgtcatgtgttgttacaacgtttaatacatgccgctatgcgtaagtacttgaaaaaaaaaatgtgggacacaatcattgagttatgtgtgtaattcaaacaattatgtttaagaacactttttgatgtggaaaacaccgaaataaatgttctaactaatttgtgcaagtttgaaactattctcccaccagttttctttgacataatggttcatgtagttatgcatctccctaaagaaaccatactaggtgg

SEQ ID NO: 151026 - DNA, 572 bp, Cannabis sativa
  modified_base (507)..(508): a, c, t, g, unknown or other
  modified_base (534)..(539): a, c, t, g, unknown or other
aggtcaacagtttagtgctttcattgagagcgagttgatatcatacctagtcaaacaccatggttaacacaaggagaactccagttgcaccatctacatcatcgggtcttcctcaagaccctttgactacagatcctgatgtctatgttccaaccacgattggaattcccatgaacactatagatgtggcaattctgccacctcggtaggcacctcgaatttggccactacaaccagccacagtgacacaaacatctcagtggatccaaacaatcaaccattgcctccgagggaggactctccacttgcgtctcccactgaaggaaggacccttggggaacatcccctaagaacaacaactagaccttgtccccgatactatgctggagagacatgaccaggaattggtgagcctactattagcgagccccatgtggacttgggagaagatctcgagttagccagacaacgctggactctgatcgtgatcgaataaaaggttgctannatgtttatcattttagatgagttgannnnnntattcaatggatggtaactttgactctcgccta

SEQ ID NO: 151027 - DNA, 508 bp, Cannabis sativa
ccgacctgcacaagtacttccgggatgtggcagagttcttctgtctctgcccagcgcagattactcccaagggcattaagtatttatccgctctttttgtcctctacgcttcttacggatgggatgctccttctccccacgaggtcgctcggttcttcgacctgaagtctacccccaagcaaggcaggtcggggtatttttacttctctcagctatgcttcaagtggttgagcaagacggaccacaagtccatcactcagactcggtttcagcagatttcgacatatcaccgtcctcccctcactcttactcttagggatagggctcaaaaacttgcccagttgcccgcagaagatagggatatcatccagttgacctccgatgaaaatctggtgcagtacgggctttacccagaagacttctcttctaagtccgtgatggggaagaaggggaaatctgctgctgcgcggcctgaacgagctcatccggagaatgagttgattcaact

SEQ ID NO: 151028 - DNA, 545 bp, Cannabis sativa
ggttacggtctagtcggtttgatgttcggttttggtttatcagtttttatgaacacccctaattatggcttctagcagtaggacgatggaggatttgggtgataggtgggaaaatctgaatgtgaatgatgaagaagaggtgggattcaggttcgaccaggtggaagggttggcagatgactttgatgctcggtggtgtttggtgggccgaatactgtctaataaaccggcatatttcgattcacttagaaacgtaatggcgtcactgtggcgtcccagtaagggcatgtatgtaaaggaattagagaccaataaatacttgtgtcagttctttcatgaagttgatatcagtagggctcttgagggcacaccatggacattcaacaagatacctttgagcattgaaaggcttaaggaatgtgataatcccagactaggtgtattgaatactatggaaatatgggtccaaatttatgatttacaagtacggttcaagagtgaacatgttttaagagctgtcagggcttacgtcggaaagttcgtgt

SEQ ID NO: 151029 - DNA, 1067 bp, Cannabis sativa
  modified_base (41)..(55): a, c, t, g, unknown or other
ttagaattcatattacgatgttaatgaaacatacttggtannnnnnnnnnnnnnnggtaaaatatttccaacagttagcagcttgttggagccattggggcaaatctgttgtctctagtaattcaaaaataagcaatgtgtggaggctcaactgaacatctttatcaacaaattcacttgccaagttgagttgatcacaatcacctattaagagagaacgtaatgcagtgcaattcatcaagtcatgcggcaaggatctcaaatttttacattcaccaataaccaataaacaaagagacttcaagcatccaattccaccctctgccaaaaagctctgttttgtggttaaccaaagagtcctcaggcttaccaaattccctatatccttgggtatttcctcaagctccacacatccatcaagaatcaaaatttgcaaactttgcagcttacaaacggaatcaggtagtctcttcatatttatattatctctcaattcaagatatctcaactgcttcatggtcccaattgaattaggcaacaccttaaaagataaatctgacaaattaaacactcgtaagtgcttgaatgttgagatgcatgtagaaaggaataactgcacaacttcatccttctcatctccagtacgcttaacatgaatactctttagtttctttagcttactcaacttttttaagttattctcattgataacaactcttaaatatcttaccgtatcaaaaatctctctatcgtcgttggaatttacaattgagcactcattttgagttattgagcatgcaaggttgtgaattaaatcatgccctctaaactcttgccacatttcaaaataattttcatcaggatcaacttgaaataaagatcagttgcacaactctgcaaagcatgagtcaccaataacttcgaggtcctctttgtttttaggtgaaggaaggattccaagtgccatccaaatactaatcaaatcaatgctcaacgtcaaactatcctcttcaaaagttgagcaataagcaaaacactgtctcaaagatggagacattgcattgtaa

SEQ ID NO: 151030 - DNA, 585 bp, Cannabis sativa
cctccagccaagaaatctaggggcggtgaggcgaccccttccaaggaaaaggcaccagtcgaggaggttattgacctttctgaggagctaactgttgtagatccttctactccaaaagttgctaagtccaaagattctcgaggaggaagctcggacaggcctgagtaatcaaatggtggatccgagatggccaagagcagatctaagcagatgcaggctcctactccacctttgccaatgcttccagaggctaagaaaggcaaatagatgctcgctcattacatgaactgattggttcctgaggtaagtgagcagttggccggtgctgacaacgagtcttccctggagctgttgatgggaggagtcttgaggaaattcatcagggtaagtctttgttgacagtttcctttaatccttttttacttggttcactctttaaagttttttctctatgtaggctggtctaaagtttgcttacacctattcacgagctaaatctgctgcctccaaaaatgctaccatgtccaacaccatgagggcggaggtggacttggctaggaaggatgctgatgacgccagggtgga

SEQ ID NO: 151031 - DNA, 502 bp, Cannabis sativa
ttgaaaacctaatttatatatatatggcatatcaaatactataaaatatctaaaaaaaaatgtcatataaattagtcaaacttaaaagtagcatatttaagtaaataactttgaaaattctgaatgtaattttctcttttattatatgatagtgtatattattattattggaatattatatgaatttttgaaaatttacaaataatttataatattaaaaatttgaatgaattacttttattaaaatattaaaaaaaattaaaagacccgtacaaatagagtcacccaccgtggtttctttgataaagtaatttttattatttttttttcttaaagaaaaaattggctataaatgaatacattaatattaggtgtaccatttttttcttaatttttactggcccatttagtttccctatgccatgaggtaaaatgaaaggtgcctacactagacttcccctattactaataggtagacattttttttttagaattaattaat

SEQ ID NO: 151032 - DNA, 547 bp, Cannabis sativa
ccgaacacagacctagcctcagacccaaacttagactggcactcgggcccagacacggtcgtgtaccgagatcagaactgatacccggacctgtacctaaatttaggacccgattccaaacacagactttgaccttgatagggatccggatacgaacctggactcggacgaagacccagactaggatcgaaatgatggacctagatctggaccgagatcccgacccagacccaaacttagacccgcactcgggacctgaacttggacctgcacccgaaaactagacacaaatcggggtccagacctggacacaaaaccggacacagactcggactcgaactcaaatacccacacctagaatcagacccaaagatagacccagaccaagacccaaacaaaagcccagaccaggatcaaaaccaaggactcagatcgggattggaacttgggacttagactcaacctagtccaagaccgaggacgcaaacccacacccggagcctgatctagagatagaatgaaatccggacccgaacccaaactcaga

SEQ ID NO: 151033 - DNA, 608 bp, Cannabis sativa
aacatgtaaatacatatgcatatcattatattaatcttacctcatttccaaattcaggtgtgctggccaacctgagtggtacaactactcggcgaattataggcccctatatcacatcattcaaaacattgataagtgacacgctaaatcactttccagggacgtaaacttgaaactaaatgtttccctatcgataaataacatgtcaataccccaaatatcacaaaaacaggaaaaactagggttcccaaaactgccccaaccggtagaccagttctccaacggaattccaattctttggggtttcctggggaccaactgaaattccagttctatggggtttcctagagaccaaccggaattctggttcctataggtcccactgaactggtcaaccggttcagtgcgggaaaacttcaaaaattcctaactcactcaaatcaaccttaaatcaaaccaaaccttccagacctactatttagaccccaatagacatatcccaagcaatagaacaacatagcatgctctaaaacaaaaatctccattaaagagccaagctcgagttctaaaactcaaagcttgctcaaacctaataacaacccataaaa

SEQ ID NO: 151034 - DNA, 1245 bp, Cannabis sativa
ttacttgattactggtcttgattgctttggcgattgcaacaaactattgttttcccaagaatcaaaccagttaattaaggtttgtttccgtggcataaaaatcattgatcatagagctatagaggatgctttcttgggaagtaggtggggacaggatgcgtccctaggtttgaaactatttgttttgtatttcatccaatgtttccttcttagcaatactccagataaggaagtttctaggtttgatctagatgtcgttgacagcggtcgatgggatgagtattgttggggtaggagtcgtttgaattgactattgattcttttaaaggaagaatagagcatgagattaaaatgaaaaataaaaaagaggagaagggaggtcagtcctatgatggttggtatagagcgttggggtgtccttgggtgttcatagtttggttttatgaatgttgtcctgcgatggtaaacacctttggcataagagtttcatccaggattctaagaattctgaattggaccaatgatgttgggaccaaaaatccaacttttagagacttgaaaggcaagatttttgatttgtcgttgaacaaggtgattttcagtttctttactgttttattattgtttggtgcaagtttattaatctttgttttttttttaattttttttgtttcatgttttgtttttttgtttctgtttttcagttgaagattaagaacattcgtccaactgataaggagaggcagaagttgcaattggaaggcttatttttagatgaatctattgatgatcgtggtaccactaagaaaacattcaagagtggttcatcttctagaaagtctgatttagaggacatataaatgttgaaatctaagttggagttggtcatttccaatcaagaatccttggccgacgactttatttctttgaggtgttttgttgaccttaatttcaagtctgtcatgactgcaattaaggatattcaagaaaaagttaatgtcattcatcgtcgaccttctgatgaggtatttatttacaaagttcttgtttcatattttttctgctgttattatttatttttttcctgttttatttcagttccaatactgtttttgatccaggttaagtcatttgatgactttctcacccaagattctgatgatgatgatgatgctgatgaggatgatgacaagggattacctgatccagagaatattgattctgattccgatgatggtgatgagt

SEQ ID NO: 151035 - DNA, 555 bp, Cannabis sativa
tataaatcatgattaatcaaaactgcaaagataaatcacgattcatccattatcatctagcgtaatactttcttaatacaagacattcttgcaatttctcctaaaactaccatacaaatatttcaagagaataaatcactttgattaaatacaactacagaatccaattataagaagtatcaagtaagattcaaagttgtaagtcaacaacagtgatccaaataaatataaggtgatcaagggaaactgagaaatggttgccatggaatcaaagcaaactaacttctaatgcagcccacagcacttgacagcttattttatctccttgaagtggttcttgatggactccttattctgcaatttcaaattgaactccacagacttcttccctatgccccttcatcctggtttactgcggttgtaccatcaggggccgcaacatttttcgacgtagaaggtaataatttaagggagctacacccaggagatttcatcattcctagaacctgcatgcttcttcttactgaaaaagcttcctcatatctccctgcatct

SEQ ID NO: 151036 - DNA, 770 bp, Cannabis sativa
  modified_base (497)..(498): a, c, t, g, unknown or other
  modified_base (736)..(736): a, c, t, g, unknown or other
ataaaattaccatttaacttatttattaattagacctttcaaagtctcttaactaataaacaaaccctaaatcctctccttcttctcaattaatcccttgcttagtgaaaattcacaaacaagacatagtcttatttagaattttaattgattaattaaaaccaattaattgagcctacaagataatattattccagacaatgtgaggacgtgggcctatgtaatcagctcccaataagtaaatctgaaatttaccaagtaaatttcctaacttattaattcctcctgactccactatagatttagaattgcactcctcattatatagaacgctttatatattctaaatatagatacactatgaatttgttttaatctaaataattaaagatcctctatagacgatttacatcgagtagggataaatttactattttacccctcaatgtattatatccttaaaatacttagcttcctataaatgatattttagtaanntaatataattattgaaataagagctcttccatttatgtctgttactccaagctcaatgaaaatcatcattttacttctatataattatagaagctatagatttcatatatatgattagcgctcctactcaattatactaccatgctcccaagatgtaagtattagtcaaatccaattggtcaactttaacgaacaagtcaaataacacaaaatgtacagttaagctagaacctaaccntctcaagattaagatctattgatctaagatcaac

SEQ ID NO: 151037 - DNA, 700 bp, Cannabis sativa
tttgtggtatagatcttccaaataaaaaaattctccgatagttgttttggttatagaaagttagatgacatccagaagggcattcccggaagactaacttgtccatctggaagaagtctcgtggaatgatagatgtcatcgaaaaggacgttcctaaaagtctatcatgtccacttagaaggagtcttcaggaaaactagtcttcctctaggaaagagtttcagatggctagttgttctcttcttgaagggagtcccgaatagtcaactctagttgacaccttaatttcctatccaagaagtcccttcaaggtttgctttagtctttcttccaagaagcgtatatttctactcaaagctctttatcttatgctaacgtgaagatattgttacgaggagttcgttaagtcgtaactaacttaacaacttaacatttgcagccactaactttgagatccgtatccctaatctacaataccacctacacttataattttaagatagaatgagatcaaacgagtttcgagaggtgatcttgagagagaaagattgagaggtagagagagaggtattcagaaaagagagagattgggtgattttgtatgaagaatcttctatagataaaaaaagaattttgagtaagagtgtgagagataaacactttgagagaatctaacagagaatcaatctcgattgtattg

SEQ ID NO: 151038 - DNA, 546 bp, Cannabis sativa
aatagaatattcaattgttgaccatgatatgaatttgatgatcaatgcataaaatatatatagggtaggttaattagttgtagaatagggattgggaaacaacaaatactatgaattattgaatacaaaaaaaaattaatcagaccatatatgaaaaaaaaataattaaaaaaaaaactaattaggaagttttttcacgagatgtactaaattctatttcttgaactttttagactgtcaaaaattaatttaagttattaatattgttggatttaatttttttttatctaattacataaatagaataattagtgttttttatcattctatatggaagattaaaaatatctctttacataatcatagtctgtatgttaaattttacttatttttactattaaaatattgaataattagcattttatcttgatcttcaactattatcatatatttttttatataaatatttagttttatgtaattcttaatttttttttattgaaaatgcaataaatcttaagaaaaaaagatttaaaattcttcctc

SEQ ID NO: 151039 - DNA, 781 bp, Cannabis sativa
ttgattcgcttggttgacgggtggaatggcaccattagtctggttggagccgtcaagtatgacttctcctgatgaattaccggacgaggtctgctcgcctacggctgggcccacaagcggaactcgtgaccgaggattgggcggctgaccattagtagtcttggaagtattcatcgttgggtcctcttctgtttctcccaggggaatgatgttcggcgattgctgaccgacagttttgtaggctcttcgtatcagcgcggtggcttgccgactacgatcttcaatctctgcatggtgagcccttaatgcctccatctctttatctctccattcagcaaacatacacctttgttcgtcgaacgcgagacttactgcagcacgcagttcatcctgatcatgatgcaaagtgttgttatgaccctgcatgagtccgagtgcgtcacagagattttgtagttcggtggcatctccgatggttgtttgggcgttggttccagggggaacagtcgtattatggataccatggttgggtgcaaaactgttattcccagtctcttgcacatcaggcgcaactccattaatagaaattgtttcaccattccccacgcttcccgtctgtccgagattaacagcaggcggaacccttgaacttccttggttctgtgatgtagggtccagcatctgtgaacttgtcggatcagatagacctctacaagtttgcaccatcgtattggcggttggatgtcgaataaagagcaatttgtgatccttctctcaatga

SEQ ID NO: 151040 - DNA, 613 bp, Cannabis sativa
gcattttagtcatttattattaagttgattaggtggctacctaatttgatggcacatggcaattagtttttttttcagcaaagggattaattattcaattccttttcttttgaaactaagttaaggaaattgaaggaaaaaccaaacatagaactctctctctcttcctctttttcggctggggcaaaaaccagaggagatcacctcttttcatcatcaattttctggaattaagctaaagattaagtgctcttgaagtggaggtaaccctagaactcttgtttatgtgttgataagcttattacttagtttgaacttgtgattttgagaaattgtggctgttaggttaaggtatgcttagggttcaaattctaagtctattttgagttaattttgaactctggttattagctttgagctgtggtgagggtattgagcaagcttgagctttgaagctcaaggtttgggctttaatggcatcctttgattcattggtttgttctgtgactttctggttgaattaggttgtaaatgcattgtacaggtatactggaaattttggtagagtttggttggattttgaggtcatggggagaattttttgggttcccag

SEQ ID NO: 151041 - DNA, 1017 bp, Cannabis sativa
tagaataagcaagatgaaagactggcattatgcagttcaaaaagcaagcattacggacagtgaaatcgcatgagccatgacaaaggaaaattgcagagtttctataattagggatttctacatatcttctacaacaaagtcgaaggtgtattcaaaaagtaaatgtgcaaagtaaacataaaggaaatcaagagcttactcaaagatgagatgtctggattcaggttacgccaagcaaatgagtaggtttgatgaaggcacttcagtaaactcgaagccaaaaatctctcttttcgctctaaacttacttagaaaagaaggatgatgaaaataagtttgtttacaaatgctcattggtatttataggcaaacaacgaaaaagggtaatcattcaaaagaacctcagaggcctcagttccccccttaaaagcgaatgtgggaaatcaaaaataatcaagtatagctgtcaaccgtggtgagagaaaatcggatttcgaaatatttattgtcagagcatttattagccaaaaactgaggggacgcccagtcagcctcacatcgagtcacaaacagacgtgcttgacacgtgtcacccatccaaatgcaaaagaaactcgaatgaagtctacacgcaactttagaagtcccatacagacttgggggcaaatgttatccaaatttttgcactctgatgtggcatcacatgatggtgacacatggaatcgacttcgagtatctgctcatagaatatagtccaaacaagatacctcatatgcatgctcgaagcaaagcaatcagcaatccgcacaatgtgaccaacactttgcgaattcatctttcgcattgtgagtcatcaaagaaatccctataacttggagatctgattgcagagatatggcaagctgtccagatcccacgatcagtgtattctgtattttttatgcaatctttctgcttaaatccattgtaacgagaagggaaatacttcctctctaagctcatagccctataaatagt

SEQ ID NO: 151042 - DNA, 545 bp, Cannabis sativa
tcaaaattttggagcgtcacaaagttcttttggtgaagtcctctcaaatgccttgcctacccggtccattcttgctaggcgaatacatgttgaggatgtttcgtgttctatttgtggggagggagagaaaacaatggagcatcttttcctctattgtaactttgcctttcacctatggagctcttccccatggggtgtgatgccagttatggactctggggcccgtgtgtgggattgggttaaatttttatgaagtctaaagtctagaggagtggaggtcaaagagttgttcctgtatgcttcgattgtggtggacaccatctgaaaaacccacaatgacaatgttcataataattatatttgtaacattaagcattgtattgactctatttctgtattacgcagattatggttcttgtccttttcttgcgacagtgacggttgagtcacctgtttagtctccgcctggaagattggctcaaaatcaactatgatgttaaagttggttgtgattcaatgtgtgtggttgttgggttttatgccct

SEQ ID NO: 151043 - DNA, 703 bp, Cannabis sativa
ttgtcatttaacaaaacacagggtccagttggtaacttttacaaaacagagggtccaaaatggtatttatcctatttaaatatatttatacatggagaaggtttgaatgattacattagatatgtaaccatcatggttacattttttttagccattacattactattgaatagttatgattaatttaaaaataaatattaattaacttataacctaataattacttaatattttattttcttatcagaatttaaaattaaattaattacaattattgatttttggtaatttattattaaataaagaccttttagcactttttttgcccttaaattattaaaatttttatatcaaaactctttataatttaaaattatacatatataatttcataattaaaattttattatacctataactttaattaaaattacaacagttaattatttagttttttttaattaaatatttaaaaggtaaaaagtaaaatatataggttgaatgtattttcaaaaaaaaaatggatgaactcctccatcctttttttttataaggagttatttactcaaaaaaccaaactagagtcaaaaaacaaagctgagctctccaagaaaacgaaacaacctcaaactcgaatagaaaaactcatatttagttcttctagttgtaagaaaataatttaatatcatttaaaaataattaa

SEQ ID NO: 151044 - DNA, 745 bp, Cannabis sativa
ttgtcttttcaggtgtgttctgacaggttagcgcagtatagtcacaaccgggcattatttgacattggattgcattatttgacattttatttgataatatggaatctgaaatttatttggaattaattgagtattaaatgactaaactacccttgtgagggtgtatgtgtgagttttggccctaagggcattttggttatttgacctctaattgttatgtttggaaaatggaattttgagaaaacaaaatagaaaattttggctgtgaacttctctcttggccgaccctctccctctctcaaaccctctcttaaaaatttcatttttggctttggtatttagttgatttgaagcttggaattgggggatttttggagcttggagttaagggagttcaagctttgtttgaggtagcttttgcaggtttttaatcttgtcttcctattgaatttatggtggtaaaagcatcgaaaagtatgttttgaattgttgagtttgtggaattgcatgttcatagctttgaatattaatcttggtgaattttggtatgaattgcatgatttgagttgttgtgcatggattatattacaaagtattttctagcttgaatccatgtgttgttatattttagttgctggaaaataaggttgattcatgcctagagatttaaggttgcaagtatgaagttttgttgaattatgttcttgaatgaagcatgatctttatggatttgtaatctgaaatt

SEQ ID NO: 151045 - DNA, 523 bp, Cannabis sativa
  modified_base (464)..(487): a, c, t, g, unknown or other
taagatattttgttttatttaattattttattaaataaattgataatatcctaaccatcgaatatcttattttcaaattgtttattttaataatgcttaatatattaaattataagatgaagaatataatataaagaatatctaatttcaaaaattcaagatattatattatattatcttattagatatttaattaatttaattttttttaaaaaaagaaacttgaaaatttgaaaattggttagatatttgaatttaagttagaatttaggttttttaagagatttgttaaattttaaatatttttaaaatattctctaacaacctaaattttaaattctagttaagatatattttaaattttaaactttaaaataaaaatatcttaacctactttccagttatctactacatgttgggttgtaatatttgattattaatttatttatttattcaattttttnnnnnnnnnnnnnnnnnnnnnnnntctaaattgctatgattaacttattgacagatccaa

SEQ ID NO: 151046 - DNA, 681 bp, Cannabis sativa
tgttaatttattttgtagagatttgtattattttttagaaaaatttgtttttattttagttattaatattaaatttatagtttaatatatatatatttgtgtttcaggttaatttttgttttttagattagaaaaataaatattttatttattagttaaattattttattctacgttaactttttgatactaatcttacccaaaaataattattgaaaatttattctaaatatttatacatgaagatctttatttgaattaattattactactacaattaaaactaaaagtaccaagttactctctgaagcaaaaataatatgtaaaatttaacaaccaggttactttttcgaattaacacgttactttgtgcaaccatagcacaacacacactacggataccatgttactttttaaagaaaaattgaagctaaaaatttaactactaggttacttttcaaattacaaggttattcattaaaaaaaataaagtcacaattcaacacactcaactatatttagtgatacatgtctcaggttacttacaaactaacatgtaattactttgcgcaaaaatataatcaaaattaacaaactatacaaaaagcataggtaaaagtgccaggttacaatttgaagcaaaaataaaatctaaaattcaacaactatgttacttttttt

SEQ ID NO: 151047 - DNA, 513 bp, Cannabis sativa
  modified_base (195)..(215): a, c, t, g, unknown or other
ttgatttactttcaagaaatttggtcttaaaacgatgtatgtatgatttggatgtgattcatgttgatctatgtgtttttaatgattgtttgatgattacaaattttttacgaaaaataattataactttattctagaattatttttgttggatagtatggaaaaaattaagtaatttacttttttacagaactnnnnnnnnnnnnnnnnnnnnntagttatgaatttttgaaatttgaaataatcttaggggtggtgtcactcatgtgagcgcgcggaaccgagtgacactcggtcacacatgcattcggacaaggtgttgtccgaaggaacacggtcagggtcgcgtctaaagccctgtccgctcgcgtacaaggctgcacgcagcctccttggtcgagatttctcagcaagacacctccacctgcgcgcgcgcggatggtatgaaataccaaatgcaaattttttcaattttttcatttttttcatggaattaattttgaattttttatg

SEQ ID NO: 151048 - DNA, 581 bp, Cannabis sativa
ctgccattgattttgtgccttgagttgaggggtacttcatttgttttctgtttttcttgttttgattggaacgctctataaattttaggctcaaaaataaatcagtaatctgtttccaatgatctcttgttacatagtactcaggcttagcattgatagccacctctagattatcagggtttccttcttaatatttttaaaaataagtatgcctaatgttttttctttctgaatatcttttgccatctcatgataaagagtcctcgtcactttttccaattctgggtgaccatcgatatcataataatactacatttaaagaaataaattattagttagttgttttattatttatgaagaaaaattattatgtccatcaattgattatcttcattctctggacaacttgttccttaaaatgttgaggtatatcactaaaatctaagtagttccccggcaataatgtactcactctgacacccaactggcggatgaaagcttggttctccaagccaacaacttttcgtgttgcaggatcaagcgtaagcggcaatggcccctgatttgcccgcctacgagtc

SEQ ID NO: 151049 - DNA, 722 bp, Cannabis sativa
attcaaagcttcaccaaaacgattgcaaaccttaccaaaccttccagacctgcatattataccccaatagacatattccaagcaataaaacaactacccaagctcaattgaaaaacaccattaaagactaaagtttgagttgtacaactcaaaacttgattaaacctaccaacaacaatcaaaacatgcttaaatcaacctatctaaacatattttaactacagaaacatacttcaaacaacaacagcaacaacaacaactaattcacaaatcatacaaaatctcttcacttaaagcatagaaaaacaaagaagattaaatccaagaaccttaccttggattagatcactaacacttgatcttatttttagattgtagcaagaaaaacactcccaaagctactggtccttagggtttcgaacaagagaaagagagaaaatgggtttctctcaaattttcactttcttctattttcttaattttccaataaatcaaggttacacttagattaattaacatattgtggcgagctgccactctaaaattcagccagcaaaacatagggtaaatgactaaaataccctttcccacatggataatcaacaaaatggtctaagggtaaaatgatcatttataaactctcgactattcctgacattctcaatgtctaactatattgccctgctatactaaaaatattaggatgtgattctaatagccaa

SEQ ID NO: 151050 - DNA, 719 bp, Cannabis sativa
agatttagtttgatgagagaattgtttatttatttttgacaatgatctatttttagaagtaacctgtatccgcttttcatacataaccttgtaagactaagccagtgactcacagatttcaaattcatcagaatcagaattttctttttcaatggtattattcaaacataccaatctttctttcacctgtgaatcacaaacaaacttagaagaaactgaggttagtgcaacatttttagagatatcttcatcactatcagtttcatcgtcacttcatgtgacattaaaacttttcttattctttttcagtgtatttgcacatttagattgaatatgtccaaaaccttcacattctctgtattgaattctcttttggttgttagtcattgaatgttttgaaaagtattacctttggagaattttggaaaattctttttgttacttatctttttcatgtatttctgaaagtttttagttaaaacatccatctcatcatcttcatcatcatctgaaatttctttttcagcaacattaaaagcaatacttttacctttatcagcaatggacctaggtttgtccttctacttgatttgttgattcatttcaaaagtacgcaaagaacccattaattcttccaccttcattgtgctaaaatctttagcttcttccattggcaaaagtttagtatcaaacctatctggaagaactctaacaatttt

SEQ ID NO: 151051 - DNA, 514 bp, Cannabis sativa
  modified_base (449)..(474): a, c, t, g, unknown or other
atcttaccataaaaaggaaaaattattttgtcacctaacttgccaaaaaaggactttacagaagataaaagcgacgcatataaactgtgaaaatacttagcgtataatgtacaaactaagtatatctgttgggtgaactcaagacctaataggcgaggcgcccatctcgctataggaaggagcactccagttatattcaccactcaacttcaaacatctttcagcaagacttagagtcttgacgagttagaagctgacattcaatggactgctgaggtattctttgtaaataagaactgcgattgtcacaacgaagcgttaagattttaaacaaagaagcaatgaggcatacattgtcgaccttggaaagatagaagaaaaagctccagctcgctatcaaggtcattggaaccgagttcccgtcgagatgttggaatttattttaccannnnnnnnnnnnnnnnnnnnnnnnnnttgtttaacaccctaaatatgaacgttctaaaacgataaa

SEQ ID NO: 151052 - DNA, 583 bp, Cannabis sativa
  modified_base (42)..(49): a, c, t, g, unknown or other
  modified_base (221)..(231): a, c, t, g, unknown or other
ttaatagaatttatccattaaacatataatcatgaaataaannnnnnnnaccatgcaacatagaatgatttctgatcttttattaatttgtaaatctatctatattgaaatggattttacgtagggcacaaaacccaataaactccaacttgcactaatataaaactaaaagtgcatttcaattaatctcaacacctcgatatccaaatcaagtgtagtannnnnnnnnnnctccgtaataggatctgacaagttttattcaatacaaattttctcgaccattacatatccttaatcaaaaaatccttgatattatgaaattcctctttatatgtaaactcctctagggatacttgattatttactttttttcaactacatttgtgttagtcaggaagtaacactagtagttaatttattattggtacaatgccgaaaactgtatagaactttccatagactgaataaatatccttcttgcaactttaacattcagtctcactggtagagttagagactgcgaattggtatttacacttctccaaaatcactgctccaccccaaagtaatcaccatctcatca

SEQ ID NO: 151053 - DNA, 832 bp, Cannabis sativa
cttgatgagaattctcgactttatcgaaaagtgtatgttagaggacattggttttccttttctaaaaaagacatatctcaagccttgcaactgccagagaatgtcccgaatgccagaatgtctatggatagccaattgatgctcactgaactcactggtgcacgggctgaactaaaatcgggggagagtcttcgcattactcatctcacctttgctcatgcatctctcatgagattttctcttagcaattgggtttccaaactccaaaaagactgtggtgtctcaagatgtggcctcattcctctaccgtatcacctctggagcatctattgacttcgcctctcacattttgaaccaaattgtctcatttcgaagaggtaaaaagccaacctttaagcttgtgtttccaaatttaatctttaaggttttgtcctcttaaaaaaatgtggcccaatctcatgaaactcttgagccttcattgactggaacaacattccaaccctcgaagtattttgatggagtgtttcaaaagaggtctaaggttggtgctgctgctgctgcaagctcgagttctgcttctgcagaaatccaggaggtcaagaatgatgttcagctgttgaacaatcgtcttgctaccatggaggaagttcaacaagagatgtcaaagcagctgtccaccttggtcaagctttactgagactaagtttttttttttccttctttgcttttgattggacatattactatattttcttatttgttatctttggcccttagataaacaaaaaggaggagtaatattttgatttttaactgtttattttgaccaact

SEQ ID NO: 151054 - DNA, 574 bp, Cannabis sativa
  modified_base (292)..(296): a, c, t, g, unknown or other
  modified_base (471)..(474): a, c, t, g, unknown or other
atctctttctctccttcgggtttggttaccaccgtcttactcattatgattgagtattttacttgctatgtgttggcatggcactctttctctatagggttcaaatatgaagaacaatgaaggaggcttgaaaaactgtatagaagatgtctctcatccactagttgtctcacagagttagaaactagattttgaaaggttgaaaaaaaaaagtcaagttgacaagtgaatgagatgagagcatcatgttccttatatagtgtttccactagggcttaggtttgaattatannnnntaaaaaagaataaaatattgggaagaaattcactctaaggacggccattaaaaggaccagtttctagttacaatattgtcactttatttcaaccagatattcttctttcaataagaccatattttcaaattcaatcctataattgccaggattatttatttaataattataattnnnnatcaaataaaatttccatttatattatttattaattagaccatattaagtctcttaattaataaattaatcccaaaacctcttttgttcacaattaagtc

SEQ ID NO: 151055 - DNA, 557 bp, Cannabis sativa
  modified_base (192)..(198): a, c, t, g, unknown or other
  modified_base (509)..(509): a, c, t, g, unknown or other
agtcattaattattcttagtcactcaagctcctataaatataacgaaattaaataccaatgttacctgttttatatttctatctaaaattttcaaaaaatatataaagaaaatttgttgctctctatagcttttggctatggcaaaatttgaaatgagagttttattaaaaaagtaaaatatcgtgtttttnnnnnnnataatttatttctttacaccaatttaggcgatcatttcatagaaatattttaaaaaaccataatatttggaggaaaaaaaataacatatttgtattaaaaagtaactatagtgtcgaataaattcaggttacaactataattgatgtttatatacgtacctacttaaataaaagtagagatgatttgttttttatatatgataatagtaattataaatgactccttatttaaccccttctctaaagttttccttgattattgaactactttattagtctctcttcctttttcaaccaatctttctcaattntgataagattcatttctttaaatattttgaacgtaacgtctacttttc

SEQ ID NO: 151056 - DNA, 1140 bp, Cannabis sativa
tatggactgtaaaatcgcatgaagacatgacaaagaagaatcgcagaagtttctggacctagggtttcctagacattttctacagcaaagtcgaagcagcattcgaaatgtaaacatgaaaagataagcatagaggaaatcagaaacttactcaagagtcagatgtctgggttcgagcaacctcaatccaacaagcagctttgatgaaggcacttcaacaactttgaagctaagaacttctcttttcgctctgaagcttacttagcaaagaagggtgatgaaaatgagtttatgtgccaatgttgttttatacttataggcaagtcacgaaaagaggtaatcatctcaaaggaacctcagacgcctcagtttccctccttaaaagcgaatatgggaaatataaaataatcaagtgcagccgtcagccgtggagagagaaaattggatttcgaaatattaattgttagagcatttatgagccgaaaactgaagggacgcccagtaagcctcacatcgagtctcggacggtcgcgcttgacacgtgtccccatccaaaggcaaaagaagctcggatgaagtctacacgcaactttggaagtcccgttcagacttgaggggaaaatgttatcccaatttttgcactctgacgtggcgtcgtatgaatggtgacacgtcgaatccacttggagcatctgctcgggaagcatagtctgagcaggatgcctcgctggcatgcccagggcaaagcaatcagccacccgcgcggagaagccaacacttagcgaattcagctttcacattgtgagtcatcaacgaaatccctatatctcagggatcagattacagggatatggcatacacacgatctcactattagtgtatccagtatcaatcccacgatccttgtattcagcattgatcccacgatctttctgtttatacgcattgtgacgagagaggaaactcatcctctctaagcttactagccctataaatagtgatgcatgttcactgggcaagcagtcgaaaactgcttagctgagactataccctaaatatattatctaagaattatacattcagagatactgttgtaagggctataagaaaaggaacatttctccttgatcttaagtcaat

SEQ ID NO: 151057 - DNA, 649 bp, Cannabis sativa
tttagccataaaagagaaggttttattctaaaagaaacgaaggctttttctgagtttttttactaaggctctcaatgaaagcacctaactgttaacgcagattttcattaaccaaatttgagcctcacgattatgattcaacacagaaattataaaactatagaaaaatagaatatgaacaccaggtttttacgtggttttgcagttaaaattctacatagtccacaagtcaatcttattcagatttctaagtcgttttcttttagggcctcttgtattagagttttttcgtcccccttttgatattatttgccactatttatatttgcatagtgacagttaattacaaggcaggccaaaatgtaattacagttatcatcccttaaatcgtgggatctgattacatattacaaaatgtaaacgcggtgcatgattttgaaaatcatacaactgtgattttctcacttttactgggtcagaaatattgtgtattaaacacgtctttaattgttgtctggagatgtctcgtcagaaacttgattgtagtgatcccaatggtgagctgaaaccgttcttctatctgagatagacaacatacggcgatcgcggataaaaggaaatctactgacttgccagggttgcgagtctc

SEQ ID NO: 151058 - DNA, 1047 bp, Cannabis sativa
ctatgcaaagcttggataaaatagcccgatttacataaaaatcgatacaatagtttattattattgttatacccaaaatttggctaacacatcagaggaaaacacgtatcaagttgggaagaatacaaaccaaggcacgtaattataattatacttgaggtggaataactcgttaaaagcataattgacggagtatatttacaactcggctgactgaatagtcttatgtgagataaagatatacaaattgttgccttgcgcatcaacgagaaaccatgtaactttaggtgtataagacgaggcactaacctcgattatgtggatgagatatactgaatgtgaagacacttagtgtataatatgtagtatacaaactcagtataacagacgggtgaaccaaggcaagtgatagcgagacgtccacctcgccataggaagacatacacacaaaaaagatcaccttgtcaccaaaaaatgcgatggtcagatagggtgttatgtttccagagtaaaagcgatgagatttacattatcaaccttaaaaagaaataaaaaaagctccagctcgctatcaaggttaccgctgctctattcccaacgagatattccaaaacgatatggtttgcaacgtatttaatacacgtttattttgacccagtaaaagtgggctaaccacagctgtgctatattcaaattattaccacatttattttatgtgatctgtaattagaccccacgatttcaaggaataatcattgtaaaaatataagtcgactcagtaattaactgcctactatgtgattataaatagagacaagatagactgagaaagggggaaaaattcataagaaaaaaggccctgaaaaaccgtcagaaatctaataagattgactcattgactatgcagaattttaactgcaaaaccacgttaaaaacctttatgttcattttcttttctttattgtttttatttttctgtgcaaattatcattcaggctcaaatttagttaacgaaaatctgcattaataattatatttgaattgtta

SEQ ID NO: 151059 - DNA, 618 bp, Cannabis sativa
agtcttcttagaaaatagctatccgcatatttcataaactaattattaatttttttaattaaaatataatatattttagtctattgattttaataaattattattgaatattacttgatttaagttaatctgaaattaaagaattaatttttaacattaatctaaatttcaaaatttcaaaatatctccaattaaaaattaaatgatctcgaaaattacataagtaaaaattattaaaacaaaataaaatatgctctaaaaattattctaatttaagttgatatgaaattaaaaataaatttctaacataaatataattttctatttaaataattttcttaaaatataagcaaataattaagtatcttgaataaaatcagcttatttataaattctaatttatatccaaaaataatattctaaattaagctattctaaaattaagtaaaattaatttttaacttaaatatatttttctacttaattaattagaaaaataaattagttactaaaaatcactatctagaatttatttcatttaaacaaagtatgtttttctaaattaattttaaaataatctaatgaaaaaataatttttcatttattttaaaattaatt

SEQ ID NO: 151060 - DNA, 719 bp, Cannabis sativa
gaaggacagatatttgggtccctttgaatcatatctggcacttgtgcaggacccatacacttttcttctttaagatcagtctttcttaactacgggtaggttcttttaaaatgacccactacccaacaataaaacaagaactggctctacattggttcaaatggcgcctttttgcatcttaaacactcaagagaaggtcaccatttcttattctcaccttgacctctatcctgaccaccctggaacctttttatcctatcccataattggtggttcatttagttttcacttcctgatctactagtaagttggcttcatatattccacaacttctagtggtacaaaaataagtctcggtagtacaacaacagacacaagatgagcctattattctttcagatctcggatctgttttctcttgctgtctaatcatatcctgcataacagaatttacatgttcccagcattatggcaataaagaattctctttcataccgttttccccgagcatagataactcgctaatcagactattcgattgcccttacagcataacttctcacacatttagtctatatcttctaacaatttaaaacttagacgtatatcatatcaatatgaatataccatacacatattgttatcaaaattaacactatgctacttttcccaacatactttataatagcttagggagataatccaatagcaaataatat

SEQ ID NO: 151061 - DNA, 634 bp, Cannabis sativa
atctcaggaagccaagtgagaggagccaaaacttaaagtggcactgatgttgaagtcgacattatctatgttggcacatttattctagaattacagtgtagggttaagatttttttgaatagtactttcttgattcctacttttaaaagtaatttagttttggttccgcttttagttcaataatgattttctttttcgtttttccaatcataattttaacattatgtttgatttcgaataattagaaattgtttgtactctgatggtcttttcaaattgtcattggctcccttaacttcccctcttattttaaggaaacatccttattattatggcacaaaagattgggtccaattttcgaagcaaagtttgaacgattaattagagctgaaattcttcctcttcttgatgattctggttgggatacttgtgctgattgcacttgtggaaaattgactaaaacaagaaagatgactgctaactgtagtcaatcattattagacataatccacactgacatcagtggacattatgttggaatatattttaccaggacctagatttactaacaagtatgttcttaacatcctaaccatgaacttttaaaacgatataaaataaacacatacaaggt

SEQ ID NO: 151062 - DNA, 776 bp, Cannabis sativa
attttaagaagcgaaaatcataagcatatattgtactgagaatcaaaataaaaataaatacttaattaaatacactagctttcattctcctttttaataacaagggaacttagaaacccataagaaaattaactaagaaaagcggtaaactaacaccgagcgcttagagcgttttctttggatatttctgtctgaaactctgaaactgtaactgaattctaaaatcctaagcttctatttataaaagggtaaatgaactaatgtgcaattaaacttattacaaattgcgtgtgggtaaaaatgcaattacacaaactttataaccgaagtgacacgtggcacccgctgattggttgctttgggtgaggcggtgccacgtgtcattgcttgattggatgaaagaatgagcaggttgactttttaggagctggagggatcggaccgaaaaaagcacatttgcggggcacaacatgaagcgcacgaaataccagggtgaggtcgtgcgcctcacgcgcgcctggaagggagagagtgggacaagcccctgttggtgctagcggtggcagatgcggacgaatgggaggaggccacgtggtgtggttgtcggttgtagagggaaaatgggcctaatttgggccttgttcttgggttgtttcagcttcgaaaatgctgttttttaatactttggacctcatttctatcatctttttatttcttttccactcgtttcacaaatgctattttcttactcaaacacaaacaaaattaaatccaaa

SEQ ID NO: 151063 - DNA, 601 bp, Cannabis sativa
ttcggacataatggctttccctttcccgagtacgggaggaggtggccgagtaagagaaatgggctccctgatgcgaattgcatgtttgataggcctgggctgggctagaatctctttcctccttttgagcggagtcacctactcttcctcagcttcatcttcaggattattcaagggctcctgagcatactgcttagcccttgcacctcccctaaacttagcttcgtgctcaagttgaatgagttcattctcctgatgagctcgttcagcccgtccagcaccagatttcctcttcctctccctcactggcttaggaatgaaatcctttggatacagcccgtacttcacaaaattatcctcggaagtcaaccagatgatgttccggtcttcccccggcagtcgagctagcttttgagctctatccctaagagcgagagtgatgggagggcggtcatatgttggaatctgctggaaccgagtctgggtgatgcccgtgccatcctccaagaaatactcatcaacaaaatgccctattttgctgatggctgagtcatcggtgtccgtcaacaacttgaagtctggttgagagaaatagaagtac

SEQ ID NO: 151064 - DNA, 551 bp, Cannabis sativa
taatggtcttatacttcactacagatgagaacacctcggtgtaatctatcccttccacctgagtgaaacctttggcaactaatcttgccttgaatcttactggctcatcctctgtcgtaccttctttaatctttagaatccatttgtacgagaccaccgtattgtcatcaagtcttagaaccaatacccatgtcttgttctttctaagcgagcttaattcatcatccacagcccgagaccactccttcttgtattttccatttaaagcctcttctaactcaattgttctggtatgtcacatgaatgatccattgacaaagcataggaaatcagatcaacttctacaaaccttggcggtatatggatttcgcttctggtaatatctctagcaagctggtagtcagacaaatctggttgttcttcagtctcatttggagctgtgtatgtgttgttattcttctcacttggttcaaatcctttaagctcgatttaaaactctgccaaatcttccctcttgccagatgaatttgcatcaggtaacacactgcctt

SEQ ID NO: 151065 - DNA, 852 bp, Cannabis sativa
tatcataaaatgtagttaatttccaaatcttctggacagagtggcaaccaaacaaagcatgtgctaaggtttcctcgtgattattgcatcgacagcaagtaggggatctcactacatgatggcggtagaggttcacactagtaggaagagcatcatggtaagctcgccaggtgaagtattttatttttaggggtatcttcatgttccaagtcatcttccactatttttcttggtgagttgtgatacagggagagggctcaagttggtgtataatgtcatgggtgaggtgatatcccgaattgacagtgtatgttccatggggggtacgggaccagtataagcggtcttggccaggaggctgtaggagtgggatggattggatagcttgagagatatcagtcgggaagagttgttgaagttgctgagaatcccaatctccaaaacacaatataaaatctattaaaagaataataatattattaaatcgtttttttttttatttatgattattaataaaataatagtaataaattagaaaaataatacagaaaaaaagtaggactcattcaaaaaaaaaaggaaaaaaaaaatatattattatattttaatatttttccacttttctctccagtaactcataaccacccaccactcacctctccactctcatatcaacatatcgtaaaaaaaaaatagcttatatggaggaaaaaaaatcggacggggaggagaaaaggaaagaaaagaaaaaaactctgccaaaatttgcagagaaaatactaacatattctcatcttcaaagaagttctgtagtaagtattagggttatccctattttcttttcatctttct

SEQ ID NO: 151066 - DNA, 1233 bp, Cannabis sativa
cctacaatcatgggattgtatcaacgggatatggtaagttgtctcaatcccccattttatgtattttaaatatgtaatatatgttttaccaattttagatattgtaagcaaaagagaaaccttccctcatgcatttagccatataaataatgatctagcttcactaaaaaagggatcaaagaattgctttagagagagatctaagaaaaaacagtcagagatttcattgtcagagctttgagagagggaatacagtgttctttgttctcaagtcaatacaatctaaggggagtaggctattacagaactaaatgggccgaacctctttaaaaccttgtgttctttattgtatactaattttctctctgttttatttcatttcttatcgcttattaattgactcattgtcgtttgccaaaagcgaggtcagcaactaccaacctagtttgtcttaattgccaaactctattgtaacaccctattgcatagagacgccacttgtgtgattttataaactagtttaataataatattattaattaattattaaaaactatgagaatattaaaaacttcactaaaataaaacactaaaaacagacattataaggatagtaaaaaggtgttctaagaaaccctgttataaaaagttttacaaaaggactgtatacatcaacacctcaaaaacttaaaaccaaaacatacaatagatacagcccaaaacaactcatggcagcatggcacgcaggccagtgaggtcaatatgtacattgctggagaagattgtcatctcattgttattctaactattccttacccttacctgcaccatagagcacccgtgagtcacatagactaagcaagaaaagtgataagaaaagatgcattcaataactaatcatacatttcattattataaaataattacaccataacattaaatagaaggtaatataaccgtccatacacatagaaatatatatgctcatacatttgcattgcctaatcaggcaagcctgtgtcataatgcaatatgatatataataccattgcaccacctaatcaaatgagctcgtaccacgacctggcaccaatatatcacatcgcctaatcagatgagcacatacctacgatcatatgtcactgacgtccgtacctatgcccaatatgtcactaggaggaaaccctacaacggtttcattctatgcaataacctggcaatttcatattattg

SEQ ID NO: 151067 - DNA, 592 bp, Cannabis sativa
cacgttaaccaaaccaatcaatcataaggcaggcaggcatatctgtattcgaaaggttgggaacgactcatgatctcaaaaacaatctgaacagaaggagaggagtagagaatcagctaggcacgctgatcgtgcagcccagaagccgtgctcaaattcccgcttagaaagattctaccgtgactcagatcggcaacatgccaaacaggtcagtctagctgtgcaggcacaactagacgaactaaagaatatgttccaaggcatggccagacagagaaacaataatcttgagttggaccgagcacgtggaacccctttctctctcgagattaatctcttggcgttaccccacaagtttaaaatgccaacctgaaagatgtacactggaagagaagatcctctttcccacctcaagtatttcgagatgcaaatggatctgcagggggtgcaaggtgacgtatgttgcagaatttttcctgctaccctctcggaagctgcccagtaatgttatttcaagctggaaagctttctcctcaaaattccatgcacaattctcctcctctcgccaacttccgttgcatttaggagacct

SEQ ID NO: 151068 - DNA, 640 bp, Cannabis sativa
  modified_base (596)..(606): a, c, t, g, unknown or other
tggaatcggaatctgaaaaacattggatgtggtccaatgaacacccctagtgcaggtggagtgatggtggtgaattatattgtgtggttcaggtggagtgatggtggtgagttatattgtgtgttatatttttcaagtggtaactgtgatagtggtagttgtggtggtggtgtttgtcatggtggtgtaggtggttatgaagaacatggaagggaaggaagaaagtagaaaagaaaaggaaatgaaatgaaaaaagaaatgtcttatttattttttaacatttttatttatgttttaatttttaaattatgtttataatatttaaataattaaaattatgtagacaactaaaaatttactacttgtacatttgtgtacacttgggtaatctacttggcacttaataaatttttttagatgaaaatgtaagtagcaaaacaaaatggtagtttggagggtttaccaccaaaaaatagttagtaaagttaagtgtcacaaatcatgtaatttaggtagttttgtcgccaatatcccttaattaatcctaaagcacgacacattaacgaatcctacaatttaataataataataataannnnnnnnnnnataataataataaaacttttatttatcaattaca

SEQ ID NO: 151069 - DNA, 627 bp, Cannabis sativa
actgggttttatttagggcataaaacccaacagttactacttacacaatgtaactgactaggtttcttacaattaattcatattaatttagatatcactaaaattcttgttttagtttggttcatgttattaagttgtataagttgtaaaagtggtaaaagttgtaattaactaactagggtagtgtttagttgattggaatgtcgttagaattggaatgacttttcctaaagtgaatccattcatttgtttggtttgtcatttataatagaaaagtttatataaatgtgttatgtcacctaatttcttacaactagtgagtaattaactagttatttgtgttatgtacttttcctttaatatttatgtttttttagtaaatttcattctaattctacaaaaatttcggcagcataacgactgtaattggacgttcctaaaaattttaaaaatacataaagtaacaaacaaaacaaatatagcaaacaaaataacataaacaatacaaaattcattcacccatccgtccgcaatacatgtattcgcagaacctacttcactataattttaagatattcaaactccactaaccatgagatcggaagagcgtcgtgtagggaaagagtg

SEQ ID NO: 151070 - DNA, 869 bp, Cannabis sativa
  modified_base (395)..(404): a, c, t, g, unknown or other
gaaaccagctggaagataaatgggctgaatggtccaggggaataggcgccagaggtctagagcccatccgggaccgacccaaaaaatggcccaagtgggaatagtaatattctttggcgtgatttccccaccgggtggaaggcattctaaacctacaaaggcgctcatcgaactctataggtctaagttgggtatactctcggtcaggaggaacatgatgtattattaaaggagacttaccagaacctgaaatactggcgtcgggagcaccagtattgggaaccgggaccacgggcttgggcctggagggcctccgctccggaggagcttccagacgaagggtcctcccggctgctgcctgggccttaatataggccagctcttgttccctcttnnnnnnnnnnttctggtaccggtcctccgccgaggcgattatctccacccggagtgctccacccggagcgccctttctgcagccggagtcctcacattcgggcagatgaccttggaaaggttgaagtcatccaccgactgattctcagatatcaacttggcctttcgacagttctccgtcgtgaccaagtccccaacgtcgaggaccttcttgtcataagtggagaaagtcttggcccgctggaggaatactcgagtaggcgcggtccgcatgtaaggtgggatcctgacccagtctgtaagaagctccaggcgatccatggcctggaagccggaggaaaagaagaagcggtgacggctgtccttcacgtgcttttggtggttgaaagggactgggccctcattcaaagagtgggcccggaggccataaaatccgtctttaaatttgtccaccttcttggggatagaaacaagtt

SEQ ID NO: 151071 - DNA, 572 bp, Cannabis sativa
  modified_base (369)..(378): a, c, t, g, unknown or other
  modified_base (435)..(435): a, c, t, g, unknown or other
tttttttgtgttttttcgttaaaaaaatggtattctctgatataatacattagttaaaagaaatatatatgtataatatgtacttcagatatatgtataaagtttattttaaaaaaataatacataattatttttaatttatttttcctaaattaattataattttctcccacactactataaaaaattgctatttttggtgacaagtatttagtcacaacatattttttttgtgactaaaggtgacttttagtcacaacaaaatgttacttttgactaaaacaaagtatttagatacaagttgtcactaatttagtttagtcataacaagtattgtctctaaattatatttagtcacaacaaattgtnnnnnnnnnnactaatacttttagccacagactttttagtcacaacataagaatgatgatttataantagtcacaactttttcacttttagtcacaagttttgttagtaaatttttttgtagtgccagtatttaagtggcatttggtaacacttttttaatcagttttctgttttaaaagtaaaaaagtgaaaatatttttcaa

SEQ ID NO: 151072 - DNA, 925 bp, Cannabis sativa
catgtttaggatgttataaacataattgttagtaaatctagatcctggtaaaataattactacaactggcctcagagccatggtaattaatttacttcaaagaaatttggacttaaaactatatatgtgtgatttggatgtgattcatgttgatctatgtgtttttgctcattgtttgatgtttgtaaattttttatgaaaaataatttgaatctttttcaggaattatttttttttggatagcttggaaaaaattaagcaattcactttttgacagaacttaattttgatttaatttgaattagttatgcatttttcaatattggaaaaatcaagagtggtgtcaccaaacgtacgtgcgcggatccccttgatttcaagggtgcatgcgcattcggacaagccctgtctgagatttctcagtcaggacgggctgatttgtctgaaatttgttccctgcaccgtgttttctcggccaaggtccccatcgtgctcgcgcgaatggtatgcaatgcataccatccgcacccgaatacaaattttttccatttttcatttttttatgttttttcagggaattaattttgaatttttttgtgtaattttctatttagatttttatttttcatatttcaaatcaaattattagaatttaattaattagtattttttaaattaattgaagatattagtgaaatttgaagcttgaaaataggtaaaaatctatctttttgcttaattagttatcttatttataaaatttgattattttatcttaattttaattttaaggtcagatatttaatattttaaattatttaaattttttattaatttaaatgacattatttgaaatttaaaataagattattttaatcatgaaattttaaattaaaataaagtattttgctaacttttaaatttt

SEQ ID NO: 151073 - DNA, 1075 bp, Cannabis sativa
taaggtaaaatctagagtgattgcctgaagaatataacgataactcatatccacccctaaatgtacatacatatgttcaaatactgatgatcctactttcaagtggatatagacatgctttctctttacagaggatgacttgtcaaaatcactatgaacaagatgcaaatgtcatagatgtattatgtggttgtggttttgatgacttaggtctagttacaacaaagagttcttagaatagtccaagtggaatctggtcacaaaatacaaaactcataatcccttcattaacatacagtttggatccattgacagaaaatggatataaacaacttgtgaaagttatactgtattgtccaatgtattatgaaaactgaaattaaaaatgtctatttagaatctaaaatttaaagttaaagacttaaatttataccaaatttattttgagtaataattctagcttggatcatcactactaatctaactctaagcttaagttggctttgagtaagcatatacaagtaagagattctaagatcgataatttatatcgttttcggttagaatgtctgaaatataaaatagaatgacatcataagcatatgatttataaaccatctatctaatgatatactatctaagcaatttcttaataaaaaaactaagaggaaaattaaaggataattttgattaaaataagaatccaacgatgttccatttaggcgatagtcaaagttattcttattttataaaatatcttcattattttatattgtaaacactagtctaagttgtcatctttggatgtaaaacttgatgttgcaattacaaatactaatctgtcgagatctaacactattatgtttgtctaacagatgacaatcctttcagatttgtcccattaaaataacaaattaagttagaccaacaatgaaaattcaaaattatactacaataattagcaacagaaaataacatgattcaatattaattcatacatattcagaaattatcatacatttagcaattaataaagacatgtaaaaatacaaaacaaacacatcttaaataattt

SEQ ID NO: 151074 - DNA, 645 bp, Cannabis sativa
  modified_base (39)..(46): a, c, t, g, unknown or other
atttgcaaaaaaaaattttgggggcattttttgaaaaannnnnnnnaaaaggggggcatattttttcgattctttgttaatattttttcttttattttttcatttgcagaaacatgttttaattgtattttttatattgtgtttcctttatgtttggagatttggtcttattttggtgtttttaggaaacttgtccttaaataattaattattttttgtgtcctttttggaggcaatttcggatttggttgggatatttaatacttagattttgtggggatatttggtttcctttttccaattaaggaaacattgaccattttttgaaaaaccttttttggtttcctttttcctctccacacgtggttccaaggtaaggaagttactttccttttcaattttttctgattttgggaaagtaaaatcatgtgtatatattctcaactacccactcacccacgatcaccactctctcttatctttctattttttttctcaaaggtctaattttttcaaagtgtgggagtgtttgtgttctagggtttcaaagagatatggccaaaactaagaatgcccaaccgtccaagaagccctctcgtggctctgcctctgcatctccgatcacccctcctgcgccgcctgcac

SEQ ID NO: 151075 - DNA, 704 bp, Cannabis sativa
ttttgaaatagaaaaaaaaactattctaataataattgtttttttttttttttttctataaatttaaaattttgttccattttatttcgatttctattctaaacctcatttatttttatatttttattaatcctattacatcaaaacaaacataaccaatgaccaaaattatgggaggattgaaatcctacatctacattattaaatattcaaatatgtaatatatattgcaaagaaatatatttttttcttcaataaaagtatgagatttcacatcttaaaatacattttaattttaaaaaataatgtatcctaaaatattttcaaaattagtgatattttctacttattttgtaataaacttatataccgtatatctgaaacagttcaaacaagagagaagataatgaagaaatctctaaaagaatgctataaagcttaacattcaatgagagtactctattgtaataccagcggaaataacattaaggattcaatcttaaaacaagaatcagagcaatcacagccctgttggtactcgacacacaccagagaaaacagtcacagttttctctctatcaacccgagtacaccccttgttcttgaccttcttcaagagcagaactaactaacataacagaaagttagttaagttagttggtttaggtgagttggataaagagttggtttagaggatcaatttc

SEQ ID NO: 151076 - DNA, 781 bp, Cannabis sativa
cctggtaaaataaatattctaacagtaatcacatgtgcagagaaagaagaatgtttgtggagctcaatcaatggtaaaagagaatgtctcttttggagatgaatcaaaaatactcgtggaaggcaaagggaagattcttatacacttgaaaaatggaggccatcaattcatcctaaatgtttactatgtacccaacataaaaaattatattaagagtttgggtcaattactagagaaaggttatgatgttcacttaaaagaaaataacattttcttaagagatgataaaagtaatttgatcacccaagttcccatgacaaagaatagaatatttctcttgaatattcaacgtgatgttctgaagtgtttaaaggcctactacaatgagtcatcgtggctttggcatctacgctttggacatctcaatttaggcaggcttaaactcttagagaagaaggagatggtgagaggccttccatgtatcaactaaccagatcaactttatgaaggatgtttgcttggaaagcaatcttgaagaagttttccaaaggagtcactatcaaaagccacaaaggcgcttgagctcgtacacactgatgtatgtggcccaattaaaccaaactcatttggtagagtaaatacttcctcctctttatggatgatttttcaagaaaagcatgggcttatttcttgaaggagaaataagaagtgttcgagaactttaagaaattcaaagctctagttgaaaaggaaagcggtcttcctattaaggccatgagat

SEQ ID NO: 151077 - DNA, 918 bp, Cannabis sativa
taggagtgggaaactaccaataacaaaaaaggaaactactaaatacaagttaccctaattcttttacagctaatatctaacaatagaaaatacgatcttcttatgttgtactcttgttaatttgttgttaattttttgttatttgtgttatcccaattttcgcactttgacgtggcatcacatgctggtgacacgtggaagtgattccccacatctgctcgtaggagatgtttcgagccgagcaccgtgtatacctgtacagacgaggtcctcccagccgagcagtggacaatccgaacaacataccaacacttagcaatttcagcatttgcatcgatcgtgaagcataagaacaatccctataaatcttggatcgtatcacagagatatggcaagttgtccaaatccctcaatctttgtactttatatatgtaatgtataatcttaccaattatagagattgtaaacaaaagggaaaccttccctcaagcacacaaccctataaatagtgatctattctcactggaaatggggtcgaaagaattatctaagacagtatactcagagatgtcattgtaagagctttaagagaagaatcaatatattctttgttctaaagtcaatacaaactaaggggagtaggctattactgaactgctcggggccaaacctctttaaaaactgtgttttctttatttatattttcatattatatctatattatatcacttatcgcttacaattaagacttattgtcgttgggtaaaagcgaggtcaatattttggggctttcattgagagtaaagatcacaaacgctctttacttcagatttaatcacagtaaaacaaaatggaacatacaatcaagatcaaggatttatgttgataatagctaagtcattatattacttccatgtt

SEQ ID NO: 151078 - DNA, 821 bp, Cannabis sativa
ttaaatttaaacgtcaaaatatcagaaattaataataatctattaaaattaaatattatgaaaaaatctgatcttcgtcaacgacttggtccaaagcagagggatttattccatctgcgaatagacgagttggagaataagatcagaaggcatcaagtcaggaaacctgaaaggcaattggggtatgattatgttgaagaatttgagtcgaaagcttcaggatcaaagagggcagacgattccaaaaggttgcctaaggataagaaatagaagaaacacaataaatatatacccctttatgctgaatataccgagcttaatgaaactcgggaaaatatctacctcgcacatgtacaagaagtcatttttagctagcaataacctatgagacacgcgagacataaaagggacccaacaaaacggtgtgaataccatggagatattggacataccacgaaagagtgtcgtcagttgaaggatgagatagaaggtctcatagcgcgaggacaccttcaacaatatgtaaaggggcagcacgaagcccatgatcagtctgatctgctcagtaactcaagagaccagggatcataaccttcttttgtaggaggaagggatacctcggttatctcaaaagggaacgtgtcgcaagaagacaatggacagttaatctggtaaagcaattatgtaaaagtattgcgaagtgagtaaatatcggctcgctatggtggtcgtatcaagctgccacgtggaaagctagtcgtcaaccactagctgttaaagacaaacaactagagccaggattagttcacctggaaccccag

SEQ ID NO: 151079 - DNA, 701 bp, Cannabis sativa
aataccctattcatcagatccataaaagctgcgagagcattggttagtccaaacgacataaccaaaaactcataatgcacgtacctagtatggaaagccgtatttggaacgtcctcctctcggattctcaactgatgatagcctgatcggagatcaatctttgaaaagaccgtcttcccctgaagctaatccaagagatcatcaatcctaggtaaaggatacttattcttgagtgtcagttattcaattcccgttagtcaatgcacatacgcaacgatccatgtttcttcttgacaaacaatatagaagctccccaaggtgatacactaggccattgaaaccctaggtcaagcaacccctaaagttgaatttttaattctttaagttctactggagccattctgtaaggggccttagaaaccgcctctgctccagatgccaaatcaatgataaaatcaatttccctttgcgtcattaggaaaaacatctaaaaatctcgaaccaccttgatgttttcttgccaaattaactcagactgtgtggtatccaataccatggccaaaaaccctaaacatccatcccctaacaattccctggttgttagtactaaaatcactaggatccgagatccctaaactgatccaacaaagacaaacagttcctcaccctctggttgaaagattaccatcttccatttacaa

SEQ ID NO: 151080 - DNA, 630 bp, Cannabis sativa
  modified_base (32)..(42): a, c, t, g, unknown or other
tactaatacaatacaatacaacacaatccaannnnnnnnnnnacaatacattacaatacggcgtactaaacgagctctaagtttgttatttggctgttactattagattagtggttaggatctgttatgttagttaccacatcctagggaagttagttattgttgttgtaattagtcttaaccgacttactacactatatatatattccctggcatctttcttgccgtactaataaatgttgatgatatcgttgttgcaacaaatagccttgaagaattacaacacttcacatcaacatttgactcccacttcaaactcaaagaccttggaagcttatacttcttcctcagccttgaaattgcaagaaacaataaaggcatctgtgtcactcaaaggccttttactcttcaactactccaagaaactggttgtcttggaacaaaaccagtcactactcccatggaacctatcacaaaactcaataatgaaataggaaaactcttggataatcctactcaatatagaagcttaattggcaaattaatctacctcactataacacgacctgacattgctttttcagtcaataaacttagccaatatcttcaacaaccaagagaaccacatct

SEQ ID NO: 151081 - DNA, 502 bp, Cannabis sativa
ttttttttttttttcatttaaatcattcgttgaagtgaatctattgccagtaaaactttaaggcagagtattattttttatacaaaagaaagtgtttaagtatatgcgcacgggtacacaaatatatacatacatatcactactacaatatgggcctttagtttccctttttttaacccattttataaaaagggaagctaaagggtgtcaaaacacccacctaattcaaaattgacatttagaggcggtttttcggtaaaaacagtaggtatatatattaataaaccctatcccgtcggttggaaattgggaaattttgagggttttggggagaccctatgccgtcggttcctagcaaagaaccgacggcatagggtctccccttaataaccttctgcatcatcttcttcttcctcacttcttctcgagcataccagccactctacagcagagagaaacccacgaaaaacccacgaaaaccctcgccaaccacctctaaaaa

SEQ ID NO: 151082 - DNA, 639 bp, Cannabis sativa
  modified_base (473)..(474): a, c, t, g, unknown or other
taaaatatttccaacaagagcacccttaatactatagttgacccattaaattatagtatgccataaaggaccccaaaagccctattagttaataatcccttagggttataagggtaataacatgtgtatatatatgtgtgttatgtgtggtaaaggggtcattagggattgtgtggtaaaaggaaaaagggttagctccacaagtgctctctagacttttgctcaatgatcttggtggtgatggctctcatggatggcatgggaggtatgcattttattatctttgatgctctaaataaatactagatcttggctttaatgattatggattatatttggttgatgctttcgaatactcataatctgtaattgtttttcaacaattggtatcaagagccaaagttattgattttagggctcaaaattttttcacaaacctgttttctcaaatctgaaatttgtggtgatttttnngattaatgtgtttaaggttgtgtgaatatgagtattatcctctaaatgtgttcatagatgtcttggaaacaatcttctacaattttttattgagatatatatgagctttaacaatggaaacccattttggattcatcattttatgatgtattattttgtgttttt

SEQ ID NO: 151083 - DNA, 1050 bp, Cannabis sativa
aaactcgagaccagactcttgtttagaggacatgtgtactcagatttccaatgaaagttgagacgtccatgagagactcctcgaagtttaaaccttgcctgagatagagtcagcgagccaatgcaagtatgaccaaagtctgatcgcatagccgtaactcgcattatgtgggactagagaatggatccaactcgcatgtatcaggatatgtgcgagtatcctttccatactcctgcgaaagtttagagatcgactctctataatgtgagttagtcccaatgatcaaacagccttgataaaccaatatagactcgcgtgtctaggttctattagcttgtcatacgatgtccataaatgcgactataaaagaacgccgacatcctaaacttaattaaatgataggtctgtcttaagcccgcgagcttacatcagaatatgaacagtcagctcgcatgttagaagacgcatacgttgctgtatttagtgaataaaaactgctattcatttattgatgtttacgttttttagtttaatttttgtaattcaatgtgtaaacggattgacaatgaatgcaatctttgtataactaattggacacttgctttgtatataaaaggggtgattcgccatgaaatgagacctaggaaaactcttgctacagtggactaagcagacagtgatctgactgaaccactataatcctctgtcttcctgttgttttccagttttctgttaagcattcacgttcccagctcgagtactcgccattatagattgaatactcgcaattgttcttcaagcaatttcttcttgtcaataatattattacatacttttggtgttgcgaattttgctcgacaacaagaacattacaggaaatagaaataggatgtatttcttgttctaagtaatagaggttgtcttctcttttagctatcccaatcttcatttgctgaacgtttgacatgtgaaacatttacattagggaaaaaggatatagactaataacatcaaccattaaatctaaaaaagatgaatttggattgaagg

SEQ ID NO: 151084 - DNA, 510 bp, Cannabis sativa
  modified_base (453)..(485): a, c, t, g, unknown or other
aattatagtaatgtcatcacagtacaaaataattatgattatatgtttcgaacttacttagtcccaagatttattagtacaccagatttacattgacgtaataatcggctatgtggtgtacttacacttaagcaagtagaatatcttttttaagacgttagtaaagtaaacttgtatcgaatgtataatgtttacattaaacttggtcgatattaacagtataaaaaatgttataaacctacagttatatttattctaagtcaatatcatttaattcatcataaatcaatttgatgtgagatcaatatcacataaaatacagtgtcatggtcccatagagctatgttattatctttgtttgtttatatttgcttacgaaagtgcataatagtatagcagaattttattaggctatttttaaaaggctaattatgatttttgccccctgaactnnnnnnnnnnnnnnnnnnnnnnnnnnnnnnnnntaaggtcgttaaaaatgccccctga

SEQ ID NO: 151085 - DNA, 568 bp, Cannabis sativa
tatgagaacggtgatatttcatatttttatttggtatgaggctttttttttcaatttttttttagataggtttcaatcatttattattattattttcttttttgaagattgatgcaattttgttaataagaaacacaatcagaattagaataaaaaaaataagctaactaatcggccatttgatttttgatttattttttcaaaaaaaaaaactaaaataaagtcaaataaaaaagattgcagcattatggtgtgagaaacagaaacaatcaacaacttacgtttcagtttacggtaccaacaaacactaaacacaatcaagaaatcatataccaagagatcacaagattcaagtaatgaattaagcagtaaaataaaaaagaataacaccaagtttaacgagttcgagccatgtgcaatgctctacatttcggttggaacagcagcagccatatctttgttgatattagtatttacaaggttataagaattttcacacacttctcagagattacaagaagaaatttctctctagtctagactctctgtcactctcaaccttacacta

SEQ ID NO: 151086 - DNA, 639 bp, Cannabis sativa
aaaccatacttattgtcgctatcaaagagtgatgcatctacattaatcttgatagtgttttctgcgggtttagtccatgactcagcgccatcactaatgttttccagacaattgatgacaacgaaattttatcctgagttttattccagtgatcaagagctatttgtgcagacactacaagaaaaggcctttttaccggcgcaattcgtcaaatgcgccggtaaaagttgtcgacgtaaagcaaaaactgaaatcccatttgtatttatgctttacttttgtcggcgcaataatgaatatgcgccggtaaaagtgaggaaatgaagccccaactggcgcgaaaagtttaccgccttttatttcatttattctggcgcttatatacttttaccggcgcatctatgcgccggtaaaagtcccaaaaaaaagagagggaaacttccggcgtggatttccttggtaggtggggatacttttaacggcggacatttgccccggtaaaagtattaaataaaacgcgtggattttgacctggcaagtggggataattttaccggcgcaattgtgcgccggtaaaagttgtaaatgaaacacacgttttgacttagctcaaatttttaaaagaacttttaccggcgc

SEQ ID NO: 151087 - DNA, 978 bp, Cannabis sativa
gcataaaacccaacaaagagttgggggaagctcaggctcatctcctcagaccaagaattctaggggcggtgagacaacaccttccagagagaaggcaccgactaaagctgttatcgatcttaccgatgagctaaccattgtggacccttctgccccaaaagctgctaagtccaaagtctctcgaggagggagctcggacaggcccaaacaggcgaagggtggatccgagctagccaaaagcaaatctgagcagatccgggctcctaccccacctgcatcgctgcatccagagaccaaaagaggcaagggtatgctcacccactacataaatcggtcagtccctaaggtgaaggagcagctagtcggagctgacaacgagccttccctggagttgttgatgggaggagtcctgaaggagtttacgacggtgagtatttcctgacagtttcctttaatccttctttactcggctcaaattctaacgttttttctctgtgcagactggtctgaagatggcttacacttattctcgagctaagtttgctacttccaagaacacttccatgtccaacaccatgagggcagaagtggacttggccaggaggggcgctgatgaagccagggttcaactcgaagtcatccaaattgaactgggtgaagtcaacaagaagtttcttgttgtcgagaagaaagtggccgagctgaccaaggatttagaggcttctgaccaacttcaggctgccatgacctccttatacaaagaagtgaccgaccttcaggaagaaagggaggttcttcgaactgttttctgcaggttggaagcagagaagaagtctaaggaggaggagtttaacgctgaagtagagaggcttcaagggacggtgaatgccttagagacagtcggtctcgagattttttatgacttctggaaggctaatcctcaagcaaattttgattacttgggcgatgccaaagaca

SEQ ID NO: 151088 - DNA, 710 bp, Cannabis sativa
tgttattcgcatttttggtattggacacgtggactccaagtcagcactgcagacctattagtgggactctcagcaaaggagaagtaagccaatcccacctggatatgtccttccatgaacatatcttggttctgcagtcgtaaagccttccgccttcagtaatttgtacctgaaagacatgttcggtacaacgagattggagagataaaaccgtgcgttcctagaaggcccttctgatttccctttatattccaacacaaaataaggaaactacagttgttagatcacaacagagtatcgtatcaatactaaagggaaaacttcctataacaaatattagcagctaggagcagggtcgaccctaggcataggcgagctaggcccatgcctagggcccactcatttcgagggcccaaaataaaaaaataaaaaaaattattaggcttttattaaagtaaaattaagtgtattataaacaacaaatagtcatagcttagttggttgaggtgttgacatattatacaatgtcatgggttcgaattctataacactctttttaattttttttatatatatttctaagggccccaaaatttaattcgtcttaggtctatatattctcagggtcggcactgactaggagtaaccaaacttgtgataactaggagtaaccaagcttgtggtacttggtttgatccacatgggacaac

SEQ ID NO: 151089 - DNA, 720 bp, Cannabis sativa
aagactagtcgaatatgtacatttgctgcgaggacaggtcgactcatggtatatagtaagtgtttatattatttgctattggattaccggcctacgctattataaagtaggttggaagagtagcatagtgaatatttttataagaatatgtgtatggtacattcatattgatattgatacccgtcttagttttaaattgttagaagatgtggattaaatgtgtgataagttacgcaataagggcaatcaaatagtctgattagcgagctatttggggtcagggcaaacagtacggaagagaattatatattgccataatgctaggaacatgtaaactctgctatacagggtatgattagacaacaaggggaaacagattttagatcagaaagaacaataggctcatcttgtggctattcttgtacaatcgacacttcctattgtaccactaaatgtggtgtaatatatgatgccaacttattagtagatcaggaaacgaaaactaaatgaaccaccagttatgggacaagataaaaaggttccagggttgtcaagatagcggtcaatgtgagaataagaaatggtgaccttatcttgagtgttcaagatgcaaaaagacgccatgtgagatatgtagagccagatcttgttattgtggagtagtgggtcatctgaaaaaaacctgtccacagttaagaaagattgatgttaaagaagaaa

SEQ ID NO: 151090 - DNA, 548 bp, Cannabis sativa
ttcagtcctcatggtcctgagggctagtgctctttttagggagcctgcccctctgtggaccttttccctttgggaatcgaaccggacctttcgcggatctttgagcctttttgttcttttattggggaaagatgtgggatttttctttggataaccttccgagggataccgaatagggcttggttctcgacatttacgtctttaggtatttggtgaagattcttctcttatttcgcttggtccatgaggtatagcttttgggtgcatgtgcatgcctgctgtctccatagccttctgcatggcaactattatctattgcatcttcctattttgatctttctgtgtcgccagttcggcttcatgatcagtagctttttgcatcaaggccactaactcagtgtaactgccatcatataggcgtcatactcctcttggttttcctcgtactccacatcatttgctttgtcttgttcttctacctccacgtctactcatgaagctgcttcttcgtcccctggttctctggaccctagggggacgaggctaac

SEQ ID NO: 151091 - DNA, 581 bp, Cannabis sativa
tttagttgatgagcgtcatactccagtagctttagtaggtaaaccttctgatgctttgggtggtaactctcacgggaatgatgtagcagttcgaccaaactctgaaccacgacccttctatttttcaggaactaatagtgacagtgatgctaccacgaacttggttagtatatatatatatattttgcttatagtaatttgcttgtagtctttaccatatatatatttttacatttcttattacttttcattacattttccttttttctaatttcaaggtcattacaagatacccacttgtcccttcttctagtagcagcacattttaaagtactatcacatatgaattagctcccacaactgcacctttaaaggtattgaagtctttctggtatatatatttcatgtatatgtgtagtataatataaatacttacatatgtatatattttgcgcaggcaaccgggtttggaggtttctctagaactctccatctgttttctttatctcagacgcatgccacatacactgatcgaagcactcctgaaatgtgcttgccagctcccccaagcgatcttttag

SEQ ID NO: 151092 - DNA, 508 bp, Cannabis sativa
tttttagtgttagtggctgttagggttggaaatgattagggttcaaattctaagcttaatttgagttgaatatagcttctcgcaactggttttaatgtatgggattggatttatgcaagtttgaacttaaaaacctaagctttgatctttaatggcatattgtgatacagtgagtttttctgtgaattgctggttggaaaatattgtgtataccctaaataggtactctggaaggtttggaggcatttggaggagctttgaccaagaaatggagtatttcggtgaactggtgtaaaccggctagctggttttaccagtacctgtaaaaccggttagccggtttttgtggggttccctgaatgttccactttctcaattctcatgcattttagtgccttagttgggtgtttccctatttcttgagttagagtaatctctagagagtatgatagatcctagagtggtgggttcaggtttctcgaattagggtttcaatcatgtgatttac

SEQ ID NO: 151093 - DNA, 548 bp, Cannabis sativa
tttagtggatttagaaattgggaatttaaatgttatttgatatattggctgaaatgaataaatgaaaccttgttattttcaattttacaaagttggaaaaaagttagaaaaattgaaacgaaaagcaaaactttctctctcaattctctctcttttttggccctcttggagcagcaagaagctggccattttcttgggatttcaagctagtttcaatctaattcggtgatcataagttgttggtatgttccctttagctttcttttaagttttcttgaatttttgaggaaaatggataggttgcatgcttagttttggttcattgttgctgctgtgtttatgggttaacttcagaggtttcatcttgcttaattgagtggaatgaaactgttttgatgcatgttgggttggtttgaaactaatttagagttttggttcaaaaactatcattttcaaagtgaaataatgaaatctgttgctgcagtggttgttgatgcttgctgttgttttctgaagttattatatgcatgtttaggaagatttgagct

SEQ ID NO: 151094 - DNA, 524 bp, Cannabis sativa
  modified_base (27)..(31): a, c, t, g, unknown or other
actattcttttctttttatactaattnnnnnagggttaggattgaattatatggaataaaaatgataaaataatagcaaaataaggctatagtggctggccatatgtgggccctacactaattatattttttttttttatcatttttctcaaccatttatctattatttcacaaatgccaaattttccaattctaatcctataaatgcaaaaactattaatttaataattataattaattatcaaataaaattatcatttatatgatttattaattagactccacaaagtcttttaattaacaaataaaccctaaaatctttttccttcacaatcaagccataacttagtaaaaattcataaataagtcataatctaatttagaattataattaattaattaaaataaattaacccagtcttacaagcagtattgtcttaactagtatggggaccatgaacctatataaccgagctcctaataagtagatctagaatttcccaagtaaattctctaacttatta

SEQ ID NO: 151095 - DNA, 914 bp, Cannabis sativa
gttcacaagcgtaaactaaaggcatgcactgatgagctccaacgaccatatcaaccacctgggggtcatgatgacgatccacctgctactgatggcggtgatacaactttggacccgtagtcctagctgctctggtttgttttctctgctttaattttattgcatagtggggacactgtttattttaagtttgtggatgcatgggaagacaattttcatgtttttaaatttttttgttttttttttaatttattttggtttttatgggtagatttaaagttttttttatgactgtatcaacgttaacttatgacctatgggaatttgatgatgaacttatgctaaactctttgacattatttggtatgtgtgaaaaacttttggattgtgtgtttaacctgttatgcttgcttttgatattgcgatatgaattatgtgttgttctacttattctatatattgtgattttatgtgcttatgtagatttggtttgatttggttgatattgagatagctagaacttgtgtgattaatttattgaggcgaaatcctaaatctttgttgtgaagagatgattaaggctatattctttgaatcgtttgagccaaaaaactaatcttaatacattatcctttgttgtcctatttttagcctaatttttttttccaatttttattctctattaaaaacaaaacgaatatttatccttgattatgagccatgaacttaaataaattatcttaatcctattttgcaccataaacattggttattgtgtactaaatgaaaaatataatgtaagtgggatgagaaatttttctaaaaaaatatatttggaaagggtgtatgtgcatagagagttatgatccaagtacattatgttgaaaagttctcttgtaagaaaataaaaaaaa

SEQ ID NO: 151096 - DNA, 562 bp, Cannabis sativa
aattttatttaaatatataattgagcgaataattataaaaacaataatttaaaatgtgtatatataaaaacatacaaaaaattaaaatacatatataaacaaaatgtacaaagttcatgttaacataaatgacacgatcacacgccacattttgttatattttttcttaaattaacaactgtaataatactaataataatatgataataaaataattaaaaaaaaaaattattacttttttgttattaaaattattatattaataaaaattatctttacttttactaaaaaaatgtacaaccgtgcaacacgcgattttattgcctaatatatataatccttttgttaagggtgatgacatggtatgctaatggagttttgttgatcattttttgattttataagttttttattttcttttatttttttttattatactatgaattattttagttttattaattgttgtaacgccccaatattttgccttattttacaaagtgctaattttgatgcattaattaaaaagattcaaagctgtttgaaaatacacagtgggttt

SEQ ID NO: 151097 - DNA, 627 bp, Cannabis sativa
attagagacgttaaattaaaactacttttagcatgcaatacaatccaattgtaattggatatccaactttttgtaattgaattagattggttcggttcaattggattggatgatgcccacccctaccgtctaccatgctaagtatgattttgagtgccaatgaagtgattaaaatgtattagtgaataattacttggtattagtgaccttagcggttgtgtgatcgtaggactagtggtggtcgctgtggcagtgacagtggtggtggtactagtggtcataagacaactagtctgaccataaacgtgttcattatcttcgataatattgctattatcaaaaattaattattaattaaaattctgatttactaattcattaaactaatacaaatagttttgctagaacatttttgttacttactccaccgtattttttgaaaaaataaataaattatggtttgaatttcggaacaatattttcaatatatataccttagttttatttttgtatttatatggtatatatctttatatattaaaagtgtctatctaacggcatttattggtttaaaagaatatacttaaaaataaaaaaaatattctgttaaatttaacgtttgatctc

SEQ ID NO: 151098 - DNA, 548 bp, Cannabis sativa
aatcatgtgaaccatacaacattaaatgttatttctgatcttttctgatctttttttttttttttgaaagaagtgttctttattaagtcaggcaatcgctctcaaggatagacaacaattccaaaggaacactattaatagaaaacatgcgttcagcaagggaaatagaatgtcgggccacaaaatgcgcggcacaattcgcagaacgcttaacaaacaaaagcgaaacattaatcaaactttcaaggattttctttcaatcttccaccattgaaccgaaagaagaaacaaacacctctgcactacgaatggcttctgcacaaacgaggctatctgtctcgacaatggcctaagtgaaggagtaatttttcagccaactcagagcttcccgtatgcccattacttcggccaaatcaggagaaacaatgcccggttttacaccagcaaatgcagcaatcaaagtgccctcggtgtctcgaacaacacacccaaaaccgtgctttgaagagcgttcaaaaatggctgcatcgacattgagtttgatacct

SEQ ID NO: 151099 - DNA, 575 bp, Cannabis sativa
  modified_base (449)..(456): a, c, t, g, unknown or other
  modified_base (521)..(531): a, c, t, g, unknown or other
tggtaaaataatttccaatagcatcatcattagcagttagctcgttctacagttcagtaagcttttattgctttcgtagtttatttaaaatagtatgatttaagaaaagccccttaagaagcatgttagtagcctgatagtagaataggcgcatgtttgtaatttccaaattaagcggcattagtaagctctcgttgatcatgatctgatttgccaactatttgttacgcaggctattcagactagatggactccaggcgaaatactaggagtcagggcaattcggtcgggttaaatgaaggtcaaagagctcagtttcccctaaatgctcggggccgaggtagaggtcccaggggcagggctcgtggccggggtgatgttaacttgcacaggctacccaggttggccaagctactcaagaagtccagaattgggaaaataggtttgcnnnnnnnnaagccagaattgaggaacaagatagtgaaatgcagcggttgagacagcatggtgctcctgcagtnnnnnnnnnnnaaattccagtggcacctgcccctgttatccaggccgaaccagtg

SEQ ID NO: 151100 - DNA, 554 bp, Cannabis sativa
caatacaatctgtctcaactagcacattggacaaattcttcgacttcaaccaactaagagcctccttgacgctcaatacttcagccatagccggctgacaagtcctagaatgcaaagaggaactagcttcgattaacttcccatgacaatccctaatgaccatgcccgtaccatattgagttgttgcctcaatcgccccatccgtgttgatcttcagcttcccagcaggcggctttacccaacaaacactgctaccaacaacagtagcatcaaacaacagcggttcaaacctgttctcttaagccaacagctaactagaatgacatgaccttgccactcgaaccacatccgcagcctgagaagaacgaccatgccaaagaagctcatttcgagcttttccaaataccctatgctaccatcaagagctcatccaccagagccactctactagggatgcacattttccccatagggatggtgccccgcggggacccgcccctaacggggattccccgtttaaatggggaactgggcgaggacggggatcaaatttt

SEQ ID NO: 151101 - DNA, 594 bp, Cannabis sativa
tggggttttggagagttaagatttctgttttagggtgtggaaaatggagaagaaataggtggacatgtgggaaatagaaaaaaagtaggtggacacgtgtaaaatgtggcgagaagtaggtgacgattttttaatagacccttatatgcgacggtttaaaaccgtcgcttatagtataagcgacgatttaaaaccatcacatatactataggcgacgattttataggcgacggttttaaaccgtcgcctataagggtatgataaactgtctacagagttaattagtgacagtttgttataacagttagtggttgttatgtaattgttctcttttctgttatttgttttcttttccactactctgcaacaaactctgtatcagttcactataaatactatgcttaaatcaaggcttgctaacatttgcaaagtcttgtgattcaattcctcaaattgtgtcctcatagaattgcatatataagttcactcgttttacagggtccattaaaaaattgcattttattaaaaaaaaacgtcgcctatttttttactacgattttaaatcgtctcgaatactaaatttttcccgacggt

SEQ ID NO: 151102 - DNA, 522 bp, Cannabis sativa
ctatatgttttaaattaatataaattataagtctacttgtgctgtggctgaatccatgagaggcagttcgtacggtcatcatctaattaacagtcgtccccgtaattaactaattaaataaaatctatttatacctgcgatttcaacagccctcatcttaattatagggtatggtttgtgtactaattaaattgttcattgtaaaaggttcattttatatatattacgtctttttttcttcttcttgatctacattaaatatgatgagcagcgtaagttgggtacaaagatattgcccaaaacatatctttattaagtaaatgtttttatgaattaattagagaaatgatctctacatacggtactttagtcttcatataattatttggttgtataaataaattcatatatataaaatatgtatatattgcagtcccctgttcttgtaaagaccgcttaatttaatttgaaaattagcagttaattatgtttaattatagaaaattatttatagctatttaa

SEQ ID NO: 151103 - DNA, 560 bp, Cannabis sativa
tgagtttgtgtctcacttcttgttgggctgaaccattgtgtgagtgaagagagaattaaattatgggctatttacaaaaatatgggaaaattgaattgctggacacctccacctctggactggataaaattgaattgtgatgttcgtgtgggcttggagagtatgtgcatagctgttgtagctaggaatcacctggggagggtgacctctattcacacgtcccggttggatttctcggaggctctttgtggagaagcggcggcctgttgcttggcggtgtctgttgctttggagctaaagtataagtatgttattgtggagagtgactcgagactagcaatcaatgctctcaatgggaaggtttcccattgggccctagagaattatgtctccttttgtactaggtcttctccttattttatttgttgtaatttttcaaatgttagtaggaactgcaactatgcaactcataatgttgctaagtgggctttcacccaccacgtgtatggatcgattccgatcaactccgttccggagaacttattgtgtaacgaccatga

SEQ ID NO: 151104 - DNA, 529 bp, Cannabis sativa
  modified_base (363)..(371): a, c, t, g, unknown or other
gaaaaatattaaaagatattagtagtgcttaattttttttttattattatattgttattagtgtaattaaatatcaggtcacatataattgagaatagatttactaaaaagtaccactgatgcctaacactctcttcgatgttatattactattggtgtaattatcaaaattcagcgagtacaacacagaaacgaagaaaaacatgtggaaaagccattgtacccgcactcaaggtgagaacgaaccctcttccctcccagccatggccttaagccaagcccaaaaaagggtcggtgactcctagcgagagagggagaggagaaaaacttagcacatgaataatgtaaatatatatatatatnnnnnnnnnttaaaagttatttttaaaaattaatttaagttattatttttttaaattaggatatacttataactttatagtgtgtaaataaaatttttatttttccttaaatgtataatttttgtttcgaggatttctaatagagtgctaaataggtggtgtattat

SEQ ID NO: 151105 - DNA, 784 bp, Cannabis sativa
tgaacttaaaaaatgagctagtggagctctccatttatagagcatgaggtcatattaaaataataataataaaataatccaaaaaatataaaaaaaaatacatttaggctattttgattgtagaagatgatctaacaatgaaattgactctagaggtcgatcatcaattttcgaagctttagttgcgtctgcgggactcgctttgggtaagttgtggcttaaattcgtaactctattgagggtaaaatttggagtcagaaacttcagaattatgattggattgtgaaacataacttaatagaacattgacatagcttcaaaaagcattaattgcgtcaattgggttaatattgagtgagttatgaccactttcctaaaggttgttctgggcctaatgcccaggttgacatgtgacatcaacctggatggtgggtgagtaggaaaatgtgtcgggatgtattttcttatgcctaagtgatacttggacatcatttttcctgaatatgtgttctggtgaagctagtcaccagtttttggagatgttgctgttctgcgaaaatggaaaactcaaaacttcccaatttttgagtaagtcactttgccgaaaaagtgaaaatatgaaattttgaatttgactttttttactttatagctctcaattactatgaaaaaattagatgaatggtcgagacagaatcaaaatcggataagcaaaacctagtgcaccaggccatatgtcaacctaggagttgggtgctctttttggagcttccaggatgtcatt

SEQ ID NO: 151106 - DNA, 562 bp, Cannabis sativa
atcaacagtttgtttgactctgagtaagtagtcatttaaactgagagatcctttcttcaggtgttttgaagcttagtgcgaaattcgagtatctttgcagagacttgaagagtgaagtatctctgcaaagtgatccagatctgactcgaggtgttgcaccctaccatacgagtaagaaggctttcagacatggatgacaacaaccaggaaaccagtaaagaatcttgaacttcccaggcagaataggcaggattgattgattcagctcgacgatcagcatcagtcagatactgaggtggagttgagttttcttgaatgtaaggcattaagcgattccctcgtatggcagcaaggacttgttggcgccatagaagatagttgtgatcgtttagcttgatggacagagtatgattgaaaaacacagggctttgatcatcaccacgatttcttgtattcatctgattggagttgcctgggtttgatccgttgacagcttgagcgcttgatgcatttccaggttgagcttggaagccattgccggagttggtaacaacattagcca

SEQ ID NO: 151107 - DNA, 569 bp, Cannabis sativa
aaaaaggaagtttttgaatacattcgagccaagattagagcaaaacttcaaggctggaaagctaaccttttttcccaagccggaagggaaatacttcttaaagcaatcatccaagccatgcctacttacgttatgagttgcttccgtcttccgaaggagttaataaaggatatacattcaatgatggcccggttttggtgggggtcttcggattccaaacataaaattcattgggggaaatggaataaattatgcaagccaaaggagaaaggaggcatgggttttaaaaacttggaaaaatttaaccaagctcttttggcaaagcaaggttggaaaatcattaataatcctcattccatgatggctcgggttctcaaagcttgttacttcactaacaatagctttttagaggctaaaattggaggatatggttcgtttgtttggagaagtattatatggggcagggaaataatagaaaaaggaacaagatggagggttctctcaggtaaggacatccgaattaatgaagataaatggcttccccgccccctaactttctcattacggac

SEQ ID NO: 151108 - DNA, 613 bp, Cannabis sativa
tatatatatatatctatatatcaatcaatatatcaatatcaatatatatatatataaaagagaagtatgaggtggtgacgtggcattctaaaaccacttcaaatagatttatcttttctctcttttttttttaattttttattaaattttaaatatttattatttattttctcatatttttttattattttattattaattatattaataaataaggtgatgtgatattctaaaatcactttaatcaatctatatatctataaaggagaagtatgaagcggtgatgtgacactctaaaatcactttaatctcactatctcttctctccttaattttctctttttttaattttttattcacttttatatatctataaaggagaagtatgaagcgctgatgtgacactctaaaatcactttaatctcactataataccctagaattaatagatggattagcaaaaccctaattagataattatgaataagtgaggaattatattattatattatttaatatatgtgagtttaattgatttataatatgctaagaccccgttggtgagtcaggggcattttggtaattatgacccgagatgggtaaattgatgaaa

SEQ ID NO: 151109 - DNA, 769 bp, Cannabis sativa
  modified_base (206)..(211): a, c, t, g, unknown or other
catgtgagttagcaatgttacaaataacttacgctgtatttattcctcacatcgctagttggggcagcaagcagctggttcaacaaattcacccacactcgatcacctcttgggagtagctgtctaaagacttcaagaaacagttctaggcagcaagagacaggcgacttgaagcgtcttcccttactaacataaagcagcagccnnnnnngacgcttaaggcctacttaagtcctttcaatacagctgttgcgagggttagaaacttgaacaacaacatcaagcttactgttcttcaagcagggatcatagctgatctctcgacggttggaggcaaactgtgggatgatttgtagggtcacccagtgaaaaacatcaacgagttcaataagagagctcaggtgtttgttctaaaaaaggaagcaaggaaagagatgaaattgttaaagactagcttgggaagtaaacccagcactatctcgacaagcaccgtctcgacaaaggctgaaaatctaggaggctctagtacaaagaggaaagatgactctaaagaatcagccaaagataagaaaaaacagaagaagcacgacaagtatgtgccaatctacactatttagccgagcttaatgaaactctggaaaatatctatctcgcacatgagcatagggttgcattccgcaaacctaagcctatgaggcatgcgagacacaaccagccaaatctgcctaataacccaggcaaccagagattacaacctcctcctcttgaa

SEQ ID NO: 151110 - DNA, 710 bp, Cannabis sativa
tccggaaaggggcctgcaagagggtggctgatggaagagacactagcatatggagggacccgtggatccctcacttgaaaggtttcgtctcgaaaccaaatagaagtgttgatatggataataattgtgtcgctgatcttcttttgcctacgggagggtgggacatctttaagctaaaaagtctgttcgatcaggagacggttttagcgattctaaaaaatggaaccccctaggatcgggaaaggatagttggttgtggactttggaaagtaatggacatttctctagtaaatcggcttatctgtcccaggctttggagagagctccccagtgtaatgttgcccctgctctttggaatagtaacatcatggagcgtaataaggttctctggtggtgcatcctttcccaagctctccctgttcgagcagtgattaaaagaagatttcagattgatgataccagttgtccgttgtgtggtatgggtgaggaaactatggaacatttgtttcttacctgcgatgtagcgatgcagttatggcgttcttctccgtgggggatcttccctgtatgtgacaccggtattcgggtttgggattgggtgaagttcatttagaattaataggcggggtatccaagtggaggatgtttttctttatgcctcgcttgtggtggacaatatatggagaatgcgcaacgacgtgatacataat

SEQ ID NO: 151111 - DNA, 511 bp, Cannabis sativa
  modified_base (210)..(211): a, c, t, g, unknown or other
cgcacttgtcgtttctctgaaaattctcttttgtattaatcaaataatatattttggtgttgcgaaattcagtcgacaacagctgcagtcaagtttggatttatggcatccaacaatgaggccgaatatgaaactttgatcgccgggctaaaactagcccgagagatgaaggccgaacatattgagatctgcagtgattcacagctggtnntaaatcatgtatccagagaatacgaggatcgaaaagaaaagatggttgtgtacctgagcaaaatacacgatctgctcgcatggttcaaaagcgatgcactcaggcaaattccaagtgaagaaaacacgactgctgacacattagctcagcttgcgagtaggactgtaagtcatagagcaaattcgattcctattctatttctcgaagaacctagcatcactggcatgaaagagattgaaatgattggtacatccccaaacttgatgacgccaataacaacctacctcaacactggggaac

SEQ ID NO: 151112 - DNA, 640 bp, Cannabis sativa
  modified_base (590)..(592): a, c, t, g, unknown or other
gctcgcctggtctttgcttaactttgacaaagtctcctagatgcaatggaagttggcgtgaggaggagaattgtgcatggaaatccgaagagaaggttttccacgactaaacttttgaggggccaacttgaaataccattgctcagcaaatcagccgctcaacaatggtatggtcagaatcaaacctagacgtttttttgtggtgacatgcggatatggtcagaatcaatgcttgtatcatctcacatgttctgaatatcgatcttaactttcagtcagttcaacaaaaacgaaggttgttggacaaagaacgagcagtagccctgaaggatgaagttgaaaagctgcgcagcaacaacttcataattgaagctttctaccctgcttggtcgcgaatcccgtactagtatccaagccgaacaagaaatggcgagtctgtattgatttcaaagacttcaacaagcatgctctaatgactgttttccacttccaaggaatcgatcatctcgtagatgtaacagtagggcatgaaatactaagccacatggacacttactcaggctacaatcaaatcaaaatgcatccaccannncaagaacatacaagtttctgaacagatatgggtctatattgctacaaa

SEQ ID NO: 151113 - DNA, 520 bp, Cannabis sativa
  modified_base (32)..(37): a, c, t, g, unknown or other
acaatcaccccccttacgaggtccgacgtccnnnnnnaccatacttccggctgggtcaaggttttgataccaagttgtaatgccctaaaccctagggacgccacatgtatatttttgaaacatagtttactaatagttctttttaatcaaatttgtgataatagtaagaatttcactaaaataaaaccatagcaatgaacaaaatgacattgctaaaaatttatttccgggggttcccaaaacaaattttagcgatgtcatcatgttcattactatagttttatcttggtggagtttttactattatcacagatttgattaaatacttaatctactattaaataaaactacgtttcaaaagcacacacgtggcgtccctaggatttaaggcattacaacttgccattttttagtattcttcgagaggatcgaaatttgtattttggccataatttttcactcaagtgtccattttagacgttctatatactgttttgaagcttgcgaagagctctacaat

SEQ ID NO: 151114 - DNA, 733 bp, Cannabis sativa
acacattctcagtaccatatacaaacttataatagcaaatcataactcatattccaatacacaaagaatccaaatttatgcagataaacacatacaaaattacttaattttcttacattaaattctgatgtttaagaccttgttatcccgtcactactccctaaattaacacataagtcaaggccctaatattaaaattctaactctttcaatacaatagaatgaatattatttttgaccaataactaaatgaattcaatgaaagttgccttcatagtaattatagaaaattaaattatctttctaatgatatgctaattattaaaaatagattaaaaagtaagagagttatcatagttttactgaaataatttctgagaaaaaatatggagtaacggatcacaggagaaaaatacaaagttttaaccctaaaatattctaaatcaaagaataatctcttcataaaagttttagaaaattgaattccctttcgaatgaaacaaaaatctttaaaatcagactcataatgtaggagatatatattttactgaaatggttttttaaaatcttgaagcaaacgaatttcaaactacagcaataaaatgataattacgacttagaaaaataaatatttggtaaatggtttcatcataaaacatttagaaaattaaattatcttttcaatggtaccaaaattgctagaatcagatcagtattcagagagatattcagg

SEQ ID NO: 151115 - DNA, 1054 bp, Cannabis sativa
atcccataaccgttttctctttctttttgtttctcaatccttaaaaaaatggttgtgacccgttcttcttcatctccttccactgttagaaaaaaagctccaaaatgggtttgaaatcattagctaataaagctaagggaaaacgtcctattattgaggaggaagactctgattttgctcctctattaacgaagcgtgggagagctcctcctaagaagaaaacaaaggtcggtgtgcaagaaaaaatggttgaagatgtgtctgggaaaaacgagaatgttggtagtgctattcgaaccgagatttgttttcagtttcttttttcgtttcccccttttttgtacatattcttgtctttccattttatcgatttggtgttatctggtttgtgatattttaggttttttattttaaaatttcgcttggttttctttggatttttagggctttaatttttcttgatcaattttatttgttcttttgtgggtttgacattttagtttgtttattctttcttttgtttcattttgttgtgttttttgttctgtttgtgttttccagttttttagatattttgaaacttcagtttcgttttagtgtctcttctcagtgggttttagttgttttttaatagtttaatccgtttatgtatgttgtgttttgggaatattattaggtatagttgtttgctgttcatttttaggtaacaattcgattttagatttttgtagtttatattcgtagaattgtttttgtttgtcactttgtttttagtttttctttttatagttttattatagtttgtatacttgtttatttgcaatttatatttatttttgccatgtttgttaacttgcaggtctgggattacaaatttagtccctctggccgttgtatttatatttatgttttccacccccaagttgtacatagcctactgttgagtgaagtgtaccagcccaatcttaaagaattttgggctaaggttgctggccgttgtatacggtttagtgtcgaggagttttatttgatcactgacattgattgttttggt

SEQ ID NO: 151116 - DNA, 953 bp, Cannabis sativa
tatccctcttcatacccggccaccaataaaaagctttcacattatgatacattttggttgtacccgagtgtaaggagtacggtgtggtatgagactcatcaagtatctcctgtctgatatctttgtcattcggtacacaaattctattcttgtatcgcaataatccatcagatgagaatgaaaaatcttttgccgacccaacctcttacttctccttatgtccctgtaactcaggatcactttgttgtgccactctaattctttccaacaaatcagactgcaaggtaatattggcaagttttccaatcacaaattcaattcccgatatagtcatatcctcagccaactctgttgaaattttctttagttcacagacttgccctggtccttttcgacttagagcatccactaccacatttgcttttccagggtggtagagaatctcgcagtcataatctttgaccagttctaaccatcgtcgttgcctcatatttaagtccttttgagtaaaaaagtacttgagacttttgtgatccgtataaatctcacacttctcaccatatagatagtgacacaaaactttcaatgcgaaaacagctgctgccaattcaatatcatgggtaggataccactgttcatactctttcaattgcctggatgcataagcaataactttcccggactgcataagaacacaacctaacccctgtttggacgcatcacaataaatcacaaacttttcatcacttactggtaaggttaatacaggagcagtaatcaacctttgcttcagttcctggaaactaccttcacacttatcaatccaaatgaacttgcagttctttcgggtcaactctattaagggcgtagaaatctttgcaaagccctcaacaaaccttctataatatcctgccaatcccaggaaacttctaacttcagttgctgacttaggt

SEQ ID NO: 151117 - DNA, 639 bp, Cannabis sativa
tttttttttttttttaatgtttggtggctcttttttttttgctctactttgatcggatttattttttgggtcgaatagtcgtgagttttttttttattttattttttatttttgctctgataccatgttagtgaaaatgagaataagatgaatggggttccatctcaaaaccaattggcaatgggaggagtagtccattcctcttatatattctattatctttccacacattagcaatgtaggacactctaatatcccccctcaagatggtggctattatatatgctcaccatcttggacaacttgatcataagcggctctttttttggctcactatcccttatcacaagtagctcttttgctctactttttggattggtatttttggatttttgatggctctcttttttttttgctcactatccccgaatcacaagtgatattttttttttgacttttggctcttggatcaattttttggttttttggtggctcctttttttttggctctacttcgattggggttttttttttttgattggatatgctagagatttttttttgtttgttttttttttctgctctgataccattttagaatttgggaataagatgaatggggttccatctcaaaattaa

SEQ ID NO: 151118 - DNA, 719 bp, Cannabis sativa
  modified_base (641)..(675): a, c, t, g, unknown or other
tttgtaaaataataataagtttggcgaaaaagtcgtcgaaaaagttaccagtgtcggaaaagtcactgaaaaagttattgccgccagaaaatttgccagaaaagtcatagtcgctggaaaagtcacagtcagggaaaagttattggaaaagtcaccagaagtagatgtctcagatataaataaaaatataacttgttctataacataatgaataataataaacaacataaaataactcaaagtcgttataattaaaatataactggttctataacataatgaataaaaacaaataacttaaaccaattataattaaaatagaaccggttctataatagtgttacaatacataaaaataaataacatgaaataactccaaccggttataactaaaatagaactgattatataacatagtgaatgagtatttttggagtaggtataatatgtgtgtaattcttttggtaggttagagcatgttgaatggatgttttcatttgagttattttattgaactgatttttgtgtatgaaattttatcttagttgattgtcaggtggggagtttggttggggcgacacatctattaaaagataatgcaagtgtcgtaagatgagctcaacgagaacagaaatctcgtnnnnnnnnnnnnnnnnnnnnnnnnnnnnnnnnnnnttttcagtacgaatacgaaccgtggcctatcgatcctttagacc

SEQ ID NO: 151119 - DNA, 599 bp, Cannabis sativa
cactattaccataatttctttttatatcatttaaataatttgaaatattaaaattataaaataataactaatttgtgctatatttgagtcactatttataattgtgttcaaagcacacgatgtaaaaaaaatacaaaaaattagagcattgttattgggcaccaatggtgcctagccctctaaacattttgccttgcgattggctagcgatactctctaaaaattattatattaaactatatgagacccgataattaattgaaccaatagcacttctcgaaaaaaaattaattattattgatcattatttattatattgaaaatataaaaaaaaaaaaaaaaaaaaaattattattataatagtattgatataatgatgggcttttttcagttttaaccaaaaaaaataacaatattacaaaaatacttcaagctgaccaaataaacaaatatacagcctaaataaaaaaatttacacaaataccacttacacaccttcaacctaggatccatgctttctgggcaactatcgcgcaactacacagcaacctaacgcaccaaatcaaaaattcaaccagaaagagagccaccattaattc

SEQ ID NO: 151120 - DNA, 807 bp, Cannabis sativa
  modified_base (751)..(753): a, c, t, g, unknown or other
atatatgccagccgaaatatacaaagaataataaaatatttttgtcaattaaatatgccaaaaatgaaattaacacagttgaaagataaaagccaaaatattgaagaacaattttacatgtttagagaaaaaaaatctaacaaatttgcataaaattagtccgcaattgttagaatttacatagcattttagtagtgaccaatggcaatcaaaattatttaggttagaacaaagatatgttctatacaattcacaatcatttcaacagtgttggactgaaattcacaaactttatgccttttatggtagtctttgacagttttgtctatagcttcaaaggtgcagatgacactgatgaagacaatctggacacgactcctttgaaatattttgatttagtggtgtctctacaattgcttatttcttcaatataaattcaattattttagccttttttaagcattaatttttctattttaataatcaatttgtgatcagcttaattgggtgtcaaattcttttggactagaaatcaaattttcacctaaagttctgttggatttacattcttcttgtttttttatcacttcattttgataaaagaatcatgagaggagatgaaaagaaagataaagaggagagagaagaagaaacctagataaaaaaaatggagaagataataaaagtatagacagataaagaggagagaagagtgagaatattaatatttgggatattggcggctaaaccnnntgaactttacggtttgtaacacttaaccaccaaaactgaatttttggcggctaa

SEQ ID NO: 151121 - DNA, 524 bp, Cannabis sativa
atgtgcattttttttttgttcggtccgagagagagagagacaaagtgatagaggggggtatttttggagttttgaaaaagaatcatattttttgtagtgttaaatgtattggttcaaaaattttttttgaacatttttaagtatagaaaatcaaatttccatatcaaaatgcaattttttttctttttgtgtaacagtttaaaaatgcaataattgatatattattttgccttgacaaatcacacttacataccgatttttttttttttttttcatctattctaagattggagaaatgctaaaagggaattaatgcatttattaatattttcagaaagaattatatggttaagaattaattaaatatatttttttgataaatttaatcatacatcattagcaatatataaaaaataaaataagaaagtactgaaaccttttggttgtagcattatatcatttggaaaattttatggtgtatgaatcaactttatctatttcaggagccactaaattttttaaat

SEQ ID NO: 151122 - DNA, 889 bp, Cannabis sativa
tgtccattcacacacttgtctgttgatattgaacaaatctactgagtgcggctatctgaccaattaagctttggacttcatttgtttttgttggcgatttcatatccaggagggcttgaattttctctgaattggatttgataccttaggcattgacaataaaaccaagaaacttacccgagccaactccaaaggagcactttaaggatgagtttcatgttgtattttctaaggattttgaagcatttgtccaagtcatctatatgccccctaccttctttgatttgtcgagcatgtcatccatgtatacctccatatttcgttcgatatgatctttgaacattttttttaccaatctttggtaggtagcttcagcgttctttagaccaaatggcatgaccttataacagtacagacccatatctgtttggaaacttgtatgttcttagtgtcgtggatgcattctgatttgattatacccccaatagacgtccataaagcttaggatctcgtgcccagctgttgcatccacgagctgatctattcttggaagtggaaggtagtctttggggcatgccttgttgaggttgttgaaattaatacatcctcaccatttttcgttgggcttgggtaccagtatagggttagctacccaggccggattcaaagcttcaatgatgaagttgttattacgtagcttttttacctcttcttttaatggttgtgcccgttctttgcccaacaatcttcttttttgctgaacgggacggaagttcggataaatgtttagggcatgggatattatataaggatcaataccaactatgtctttatgcgaccaggcaaaaatgtctaggttttgtcctagaaattttatcaatgttgattt

SEQ ID NO: 151123 - DNA, 549 bp, Cannabis sativa
gttccctctgtatgttatacgccctagaaagtgctctggtaatgggagaataagttcaggaggcatctgtatttaaaaagattaattagattatatcgcataataattgcacaaacatcgcctaaaatcgcataaagacagcaaaaaataagccactgtcaattagaatcgcataaatatcgcacattaatcgcataatatcgctaaaaaaatgtaaaacaaaacaactaaaaaatcaagtttctgtcagttaacatcgcacaaacatcacacattcatttcaaaaatcgcacaacctattccataccccatatatcgcacaaacatcgcacaatgtcgcctaaaaatcgctaaacatctcctaaatgtatcgaccttggtgaaaatcgcacaatatcgcatataaatcgcataatgtcgcaaaaaacacgaaatcaggaaaaaagagtttactccgaaacccataatttccctagacttttcttgcacaatttatcacaaaaaacacatactaaataactgttgggattttattttaccaggatctta

SEQ ID NO: 151124 - DNA, 802 bp, Cannabis sativa
ttactgagtatacaacaaagtttgaccgtttggccaagctcgcctcgggtattgtgccaccagattttagcaagaatgaaagatatctggctaatttgaatgtgaaaattagacatgatttggttatccctactaatgaggcaacatcatatgcggagatggtagaaaaggctctgcgagctgagatgcaattaagtttttccaggagccccgtgtgactgtgagtgttggtgggacccccactcttcctactcctatttatggtagggatggtggtgattcaaccactgaccagaagagtaaagttaccccggcatttggtggctcgggataaaacaagcgggtccgtgggaaccaagatagaggtggacgccagggttactcttaccctgagtgcccacattgtaagaaacatcatcccggagagtgcaaccgaagacatgctttcgatacggtatggtggggcatttcaagaaagatttccttcaggcaaagaaagaaaagcagaagccaaaggcaaaacccatacctgctcgggtgtttgccatcactcaagctgatgcggtagccaatctttttgtggtgataggtcagcttcctgtcaacaactccttttatactgtgttgtttgattcgggcgctacacactcatatgtggctacacgggtaactgatcttttgggtacgccttatgattttcttgaaagacagtttggaaccctaatgcctagcgggaagttagttatctccaataggcacattaggtctatgccagtttggattgaagatagggagttgagtg

SEQ ID NO: 151125 - DNA, 634 bp, Cannabis sativa
tttaatagtccacaatttcttccacaagtcagtagcaacattattgtgaatattgccattaatctcttgttgcagtctatacgcactcttgaccgaaaacaaacctttaccatcttttagccaataccaatcggcctccctagcagctgccgtaagagggatacgccaaaccaactctttgtcccgaccatttaacacatccgaaagtacttcattatcccattctaatttgtcaatttgcattagtgaactcaccatttccccttgaagactcgggctagaagtctcaatataaggattaacatcatccataagccatggctcattcagaatactaacccgagaaccatcaccaatcaatcgccttgctccagagcgaaccaagtcctgagcttccaacacactacgccaaatgtaacttgggttactgcctatagtagcagtaagaaacgtaccagagggtaaatatctagctttaaaaacttttgtagctagagaatcctcgcaagacaacaactgccacccttgtttcgcaagtaatgaaacattaaaatcccgaacatcgcgaaaacccatatcaccattaactttgtgtgccttgagcttgtcccaactcaaccaatgaatgccttta

SEQ ID NO: 151126 - DNA, 523 bp, Cannabis sativa
  modified_base (47)..(58): a, c, t, g, unknown or other
  modified_base (474)..(491): a, c, t, g, unknown or other
tactcgcacttgttcttcatatagatttctttctgttattaataatnnnnnnnnnnnntggtattgcgaaattcactcgacaaaaacaggttcatgattgaagcaacaaaagttaaagggctgactaaggaagggaggttggctgcaatatttgggggcattgagcctctaggagaactatggaaggatattaagagattaattgtgggatcaatggcaaaatatctagatcaagcatatcgattcattaaactcaaagaggcagtacgatgtgtagatacagtgggacaatagaaaaatcagcaacacacgtcagccacccttgaaagagtgcgtaatagctcactgatcgagcgctcttgcgccgaagatgaacggggctaagtgatctgccgaagcgccacatcgagactctaacgattaggctttattctatatacgtcaacgtcgaaagtgttggaaattattttaccnnnnnnnnnnnnnnnnnnacaagtatgttgattaacaccataaatatgaa

SEQ ID NO: 151127 - DNA, 694 bp, Cannabis sativa
tttcattgttttagagatattcatatttaaaatgttaattcaacatacttgctaataaatctagattctcgtaaaatattctcatcaagtttacattttatggtaggtgatttaaattaatattaaaaaaaaacagtaatttaaaataataataaataaagtatataattaagaatgttttataaagaaaaatataataacaatttaagcttatgagaatattaaaataatacaacaattatgttattgtatcttttataataaaactaagcataaaattgagctatgtaaatgtttaacataatataaataataaaaatattttagttgtgaaaaattatttttcatttaaataaatagcaatacaaaaatttaatataatacaaatatatttttaaaataaaattatttttataaatgtatataaaacattagaaaattttacattgtagcccttaaaaagggtgtattaatacacctttatttggtattttaaaaaaaaaattagtccaaattatttttgtgatcgtatacgttgtggttatgtaagacctcctgccaaattttggaaaaattttaaaaagttaaacacgctgaaaataaggttcaaagagcctgtcacacgcgtgttttttttattttatacgcatgtgaaataaacggtttgaacattaaattttaggctaattagcaa

SEQ ID NO: 151128 - DNA, 767 bp, Cannabis sativa
aatcacactcaaaaaacaagtgtacaatggtctcttcttctttgctgcagaaaacacattttccatccatggtaatcatgaatttacttagtctctcctttgtatttagtctttcccaaagtaccaaccatagaatgaatctatgcttgggaacaacaagtcgatcccaaacaagattactccaaggcaatttatcatattcagcaaacaacaagtgatatccttgttgaatcttgtatttctgcataacaaaactagttagtgaaacctgttgctgaagtttgttcttgagagccactattttcctccatgcccaactgcaatccgagggagcattatagctccaccaatcttgttccttgatgtacacattgtgaatccatttgacaaaaaggcaatcttttttactagctatatcccacacatacctccctaaggctgccatgttccaatgttgcacatttcgaaagcctaaaccccctgctgccttgggcctgcaaacagagtcccatgccactaaaccaggacctgctccatcttatgtattcttccagagaaaggacctacaagtagcttctatatccttcaaaagcttctttggtaggataaagatttgagcccaatacgtatgtatgggtagaagtactgagttaattagtgttactcttcccatataagataagttcctagtgctccacatctttattctacttgtcactctgctctagatatcttctttgaggatataggaataccaaggtatgtaa

SEQ ID NO: 151129 - DNA, 589 bp, Cannabis sativa
gtgccctagttgtctcctgggttttgtgatttgatgcactctggacttattctctaactcgctcattcacaaatggaatgaatcctttcgtcttaaactgagtcgttgcaggggtcaggctttttcaggttcagatgctctcatagatcgcccttgtcatgattgtggtcgaaccttgcccttcctctcaaggtttgactcactttttctttcctacaagggtttgcacgagtttcattctcatgagcctgaatagtgggttggcaattttcgttcgatgttccacgtatcccaggctatacccccagactttcctcagtttccccaggttgcatctcctgagagttctgagcatatctctgggtcatctcctgcctcttgacttgtgagccgcgaggtttgcctcgtaaatctcttttcccaaggtcaggttgattttgggtaccatctcctagctctgcttttatggcaactatttcatgctccaactcagcatttcgccggtttacttcctccaattgacacctaagatggcgattttccaattctacgattggtatgtatctggttgggccgtaagcgccatcct

SEQ ID NO: 151130 - DNA, 543 bp, Cannabis sativa
  modified_base (135)..(138): a, c, t, g, unknown or other
taattgtccgatcaggtcaatcccccaaatggcaaagggccacggactttgcatctgtgttaactcgttgggtggagctcttggtacctatgaacctatgaaaatctttggcatttgtcacacttcttaacatannnntttgaatcttcaatcattgtcgggcagaagtaaccttgccttagaattttcttggataagctttgtccgtcggcatgatttccacagaagccgtcgtgcagcttctttttgagtgacacatctgagtaatggaatcgagaatcctcttctgtacttgactccttctactatgatgtaccgtgtagctttccttctcattttccaagtttcatttcgattatctaggagtttcctaaactcgaggtaggccgctattggtgtcatccaatttgggaatgcatcaatcatttcgatttcttccgtgccagtgatgctcgactcttcgaggaactggataggaaccaagttttccttgtcacttacattgctacttgccaatcgagctaacgcgtctgcagttgtatt

SEQ ID NO: 151131 - DNA, 671 bp, Cannabis sativa
gagtcgactcaggactcgaatggcgagcagaaccaccaacctctgattggtaaaggacgatgtcacgacatggattagacatattagtctcgactgtagatttgactgtaggatcaacagtagttgacactgatggaacgaacatggcaacagagggtactgcaatgggagtggtattctccattttagagagagttgtgaaagttgccggacttagggtttttgagagtaaagtgaaagagtgagactattcactttccttaggccttaagtataggcaccctgacaccagctgaccaggcaaagaaaactaatgatgattttttaaaaaaatatgaacttttccaaataaaatgtacacgcccaaaatgaagaatttccaccacataatacggcacacaaaacgaaacaaacccaaagtcatcaggtaaagagagtagtattgtgacctgaaaaatttcaaatatgccaacaatatttgcacacaacccacacttgaaacatcagataaaaagatagacacttatagatactcaaaattttagaaaaaaaaaacaggtaacaactaatcaatgaacatgaataaagcctctgagtattaaaaaaatgtacaccctgagcaacagatcatttcagcacacccatccacaatgatactcatgggatcacta

SEQ ID NO: 151132 - DNA, 590 bp, Cannabis sativa
aaaataaagtagatacaatcgattcgcaaaacaaaattataaagacaagtcaagtgtatagatgaacaacgaaagatatcgtaatacctccagtcattgatcttcgagattcaatctagtgtagctttggattgggtaatcgggcttctaaactctctctactcttttacatgtttactatttgtacagaatgagtgaggagcttgggaccgagaccctatatttattagtgagatactccatccatcagtatttcgccacattaattgtcagaataatttgataattaattcagtatatcaaatcgagaaataaatgattcagaaatttgaaaactaaccataattagcaaattttctccttgaacttttaacaatacttattttgcctcctaaaatatacaacttgttaagaatttcccctgaacttttatatttacaaaaatttagtccttccgttaggttccatccctttattctgtttaaatgatgatgtgtctttgtaaattagcaactttgcctcttatactttgacaattatcgaattgtacccccttaaaataaaaatgagaaagattcactatttttttt

SEQ ID NO: 151133 - DNA, 680 bp, Cannabis sativa
tttgtgttgttgattcgagaattatacgttcatacatggttatgtgaataattaatctttttggataaggccttgtgatattttagaaatagggtttggaaccctaatgcctagtggggcgttggttatctctaataggcgctttaggcctatgctggttaggatcaaagataggaagttgagcgctgaccttataacattggaattaattgagtttgacattatacagggaatggaatttccatttaagtgttcggccagtatagattgtaagtagaaattaatgactttttcagccgaaggtgaagatccatttgtttaaaatggatcagttcaggggtcttggatttcagttacctttgtaataagggctagcgatttactatgcagtgaatgtgtagaatttctagcagtggtaattgatttcagcagacctgaaacatttgggcctgaggcaattagggcagtgaaagattttcttgacgtgttttccgagaagttgtcggggttttcgcgtcgccacaacgagaaattggtttcttaattggtatggcacctagagtcgaacttttttgtctaaactcaatatagaatggttccagcgaggctttaggagtttaagttgcaacttcaggggatgctaaacattgggtttatttgactcagtgtatcgccctggg

SEQ ID NO: 151134 - DNA, 514 bp, Cannabis sativa
  modified_base (27)..(33): a, c, t, g, unknown or other
cttttctgtagcagagtatcaccaagnnnnnnncccgattctccttcttgttgtttgaattcttcacagtcttacatactatggttgaggaatcactcgttatgtgtgggcatgtactcaatcactaatggctgaattttggtttgtgaacaacactagggatttcgaaattttaaagaataaaagatgaagaagaagtctcaaaaatctagagagaaagaaagctaggttttcttgcctttgaagcattagttggataacgagactttcttttctttttatactacttctcttagggttagggttgatttatttggaataaaaaaaataataaaaatgaaaaaaaatagcactaagtggcccgccatgatatgggccctacactaggaatgtcaatggggcgggtcggatctgatccgactatgatcctacctgatccagatcacgtacgtatttgccccgccccgccccgctggatcagatactcggatcagatcagatccgacccgcctta

SEQ ID NO: 151135 - DNA, 669 bp, Cannabis sativa
  modified_base (115)..(146): a, c, t, g, unknown or other
taaattatgctcctcatactttgatatttaccaaatcatgcccctcaaactttgatatgtactaaatcacatcccctgaactttcctctatattagaatttttttactaaaattnnnnnnnnnnnnnnnnnnnnnnnnnnnnnnnnagttcagggggaatttttaacggttaaaaaagttcagggcgcatgatttagtatatgtcaaagttcaggggaaacaattgctaattagcctatatataatatttgagagaatgaacaaaattagaatttggattgtatatttaaaatgcatatgtcattttctatagcatacccttactttttatttgatgttaatcactgttctttgacgtggaatgatctttaatttatttatgtaaaattgttactgctagttaattatatatgctactttctatcataataataaatatatttatataaatagctaaataaaactcaatttaattatttataaaaatagtggctagtattatcaatgagaaaagaagaaaaaaaaaagataaaggtaaatagcggcatacccaaagttttgagtttgtaaggggcataaactcaatgattttttttagtggcataagtacctaatgtttgtaaaagtgtaatttttctctatttttgttagtacaagctccatttaaat

SEQ ID NO: 151136 - DNA, 823 bp, Cannabis sativa
gtctcacaacttctctttagacacatcattccattaaaaaacctttcggttttaaccctccaaattttaccattagtactctttcatagatgggacaagagtactactttttcactatattgacttggtattacctattgaacttaagactagatttttactagtgttaagataggctaccatcaatgaataaaactctaagggagtttaggtcccatcgctcaagatttcatgctttaatcttgtacggagattaagcaatttttttataacacacacttttcgattccaagcgaatcttgctagccaaaattagtgtccattattacattaccacttttctccttaagtatacttaagctttgaaaattaaatcacataagattaattttcacacttactcaatttctcacaaattttgataccaatcatatgatcaaaatatatacactaactttagacaccaaacatgtctaagttatactcaagtcttaggcaccaagcatgcctaaatttcacatatcatctattcttttaccaaattgcttgataaatattggatatcacccccacactttctcacatttcactatcaagataatatcttgattttaaaatatagatgaccattttgtctttataatttttctttaattttattcttgaaattattttcactaaaatttgacaccaaaatatgtcaaaatttctcatatttacataaccaaaattgatttagaatttgaattccaaatcaaataaactaatcaacaatgtcttatcacattttgattaagtttgtggctcacccccacatttccac

SEQ ID NO: 151137 - DNA, 596 bp, Cannabis sativa
ttttttatattaatttattattttattattaataattatattaattaataattttacgttgattattgttgattatatatatactaatctaacaactaacatcttattctcttttttttttaccaaacaaataaaaatttatcaatataataagcaattgtatatacatgttcaaaatataattttttaaaaatatctaaccccactaaatatttcaacggtatatataccattatccattatatcttaaaaaaaaaaaaaattgtatatctaattcaatcaattatccaataaactatagaggaatatcgattattcttattaatattaatatatatttttatcttttttttcctcattcaaatatttatactctcttagtcgttctttctatttcttctactatatttttgttctattgttgaatgttttatgcagataggtaggtttcgcttcaacaacttgctcgaactgagattcaataattattaattgcttgatgtacgtgtgggcacttcaatggatgcgatgagcggtattgatagacgacaagtaattttttattatgattaaagaatatcttagaatgaattgct

SEQ ID NO: 151138 - DNA, 508 bp, Cannabis sativa
ttatgatttctcttttcatatataagcaactcatatggttataaagttcaagtcatacaattaaatttaagaaacatccataaaaattattctcattttttatattttttgttaacatattattattgatatatataatatgtaatatatatgtatattatataattttttagagacaatccaatacaataatttaattagtatatatgttgtgacgttaaaagtttgataagatatttttttttcttgtttaattgttgaaactttattagactattaatttttaagtttttaatttaatgtttgataatgatcatagtgtaaatcgctataaaccgcaccgcactataccgtatttttgcggtgtgatttttgcggttttaagatcttgtgatgcagttacagtttaattgattaataattataaaaactgcgtatgcagtttgatttgaaaaaatagcctaaactcgcactactttcgcacccttaattaaaagtcgatcatact

SEQ ID NO: 151139 - DNA, 569 bp, Cannabis sativa
acgggttaacctgaccaaactgacaaaatcattgggtgggttgaactttttttaattgttaattgggcgggttacaagtaaatatttacaacccgatattttatattggatttgtaaaaatatgatataacctgactaaaccgaccgacgtacacccttagggcaaactagaggtggtggctctataagcgaagtgttttattttggaagggaggttcagatgccaaattattttccaaaaaggagaggcagaagaagatgtgggaatgctactattggaactagtggagtagctcaaatgatatccaaatttgataaaataggtgccagattttgtaggactcccgataaaggtgtcctttgtgggtgtgaagggcaaagggatagctagaatttcttgaacaatgtcagaagggtaaaactgcagtagacaggtgctatcccaagtcatgttatctgaaataaagaaagcaatatgatttatgtaacgctctaatctatagggacgccacgcgtgtaattttataaactagtttaatactaatagattaattaattattaaaaaccg

SEQ ID NO: 151140 - DNA, 654 bp, Cannabis sativa
  modified_base (392)..(393): a, c, t, g, unknown or other
caaattaattatcaccattaatgtttggttgtatttttctttattacattgatttagtttcacattcttaattaacacactaggactcaataaatatatacgagcgttatgaaaaaataatgacagaaggaaagagattgtaaataaaaacaaacttaattaacactactacaaaagtcagaattcgcgacggtcttaaaaacgttttttttaaagaccgtcgctaaaaaaattaagtaattatttaaaattgtcggaaaaaaattagtatttccgaaggtttataacaacaaatctggaataggtggcgattttaattgaaattcgtgaatttattgggcccttatacccaacgatttaaaaccgtcgggtatagtataggcgacggtttnnaaccgtcgggtataagggcccattcaaaaattgtcacccacttctcgccatatttcccatgtgcccacctacctcttttctatttcccacatgtccacctatttcttctcacgttttgcttctccatttcccacaccctaagacgaaaaatctttactctgcaaaaccccactcaggtctccgcaccatcgccatccttcctctctcgatctccctttcttctcgtctctctcgtccattgatctccacccacccctcctc

SEQ ID NO: 151141 - DNA, 882 bp, Cannabis sativa
aataaaaaaataaacaatatgaacaaatttattattaattgcaacactttaagtggattaattatatttaggtttaactaactacatctacatactacatggatgctgaccctttacgtggcagcatctaataatttgttatttttttttatttaaaaaaaaatcacccaataatttttcataaaccaagaattatatagccacattttatatagaaataatatttaaaatttaactaattttaaatatcaaaatttgaaaataatttttaaagaaattatacatacgaaaaatattcttaatataaaaaagtaataatttaaaaatctaatacatatcatacaaatatattttaaaaatcaaatgtatatttcattcttagaaaatataatttaaaacaaaattaaacatttcttcctacatataattttttttcttactttaaatgtgttattttatttattttaatatattattagagacataaaacaacaataatttattctattttgttgttagttatgtaaaaaaatatatttttttaataaatattaaataattcaatatgaaaaaataaccgatccaaactgcactttcgcagattggattagattagatttgaactatggcacaaattagattggatctaaaatatgaaatccgcacttagtgtaaatcagatatactatgaacaaaatagagaattggatgaacacccctaatttcagctaccctttgagtaattgatcaatgcattttcttttgagattattttataaatacaccaaaacaacaaaaaaaattacaaaaatacaattttacagaattttaaatatttttacgattttttgattttatttataaaaaatacagtctttttat

SEQ ID NO: 151142 - DNA, 531 bp, Cannabis sativa
ctggtaaaataaattccatcactttctctcctgcagctccctgaagcacttcggccaactcagatagccaacccacttttccacactgtcaacaagctttttggtataaacgcagtccacaaacaagtggttatgggattccaaagcattctcacaaaccacacaaagatccgaagggatggtcagaattctacttaaatgatctcgtgtgagcaattgttcattgatgatttgctagaaaatgaacctgtgtttaggaataataaacttgtgccaaacagtagcagcatagtcaatcttcgctgccccaatcagatcaatataaaatctacaaactttgaacttacccccttttatcgcctggttcagcatgcccatgtttgtcacatttcggatcttcaaaagtttcttgaaataccagctgagatctgattttataggacaagaccaaatatcctgggtctttaagtaaatggagttgatccatttaacccaaaggttatcttatttgctcgagagtgcccataagtg

SEQ ID NO: 151143 - DNA, 581 bp, Cannabis sativa
  modified_base (274)..(281): a, c, t, g, unknown or other
gtatactccactatatgctctagctaatgttgcttggctatcacaatatattgatattgtagatacatcctctttaataaatgaaatctcaattaagagatctcttaacgattcagcctctttcccagtggtatctagagctataaacttcgcttccattgtggaatgagaaatgtaagtttattttttggacccctaagaaaccgcctttccacctagggtaaatacccaattagttgtggataaattatccccaaggttggctatccaactnnnnnnnntatatccttctaaaattgaaggaaatttggagtagtgaaggcataggtttttggttttctttagataacccaaaactctaccttccaatatacttggattactagtaaacctactaagtttactcactgcaagtgatatatcgggccttatacattgggcaacgtacataaagctccctataatagttgcatactctaactgaccaccgctctaccactatttttaactagtagtttactatgatcgaatggtgtgttggcctctttagcctttagatggctaaacttattcaacacttt

SEQ ID NO: 151144 - DNA, 754 bp, Cannabis sativa
attttccctatatgtgatactgggtaaaattcttgtgggatcttaaaaacaaaggcattaacacggatgaggttttcctttatgcttcattaattattgacaccatctaatggactcgcagtgacaaggtacacaataattgtcccgttgatgttatcaattgtattctttgttcgtttttcttttacagatcaccatgcttattttctccctcgccctatttcgagctcgaaggatgtctggcgtccccgccccccaagattggctgaagctaaattgtgatgttagagtggagttagacagcatgcgtgcagctgtggtcgtaagggatcattttggcaaggtgatctgggttactacttctaagctggagttttccgatgctctttgtggggaagcggaggcttgctgtttggccctggagacaacgaaggcatgaggcttaaagtttattgtcattgagagtgattcgaggataatgatcaacgctcttaatgggaaggagtcctgctgggagcttgagaactatgtctcattttgtgttagatcttctcctttttttgttggttgtatttttgaacatattagtagacattgtaattttgcatctcataacgtggctaagtgggcatttttccaccagagatttggcttaataccgatgtcctctatccccaaaaaaactcttttgtaacaatcatgaagtctaactacttttatatatatatatgaatgcttttctttaaaaaaaaaa

SEQ ID NO: 151145 - DNA, 1111 bp, Cannabis sativa
taattactaattttataattaaaaaataatatattttactctatttattttatataaaatcattaatgaaaattacatgatttaaaaatatctaaaattaattttcaactttaatctaattttcaaaattcaaaaattttgaaatatctgcatttaaaataaataaaagcaattcgaaagtatatgggaaaatgattattaaaataaaataaaatctatttagaaaattattttaatttaagtttatctaaaattgaaaaatttcaaacttaaatacaattttctatttaattaaaattattaaaatagaaataattaagtatctagaatgaaatcaacttaattattaattttaatttaattactaagaaaatattctaatttaagttggtccaaaattaattagaataattaattttaacttaaataaatattttaatttaattaaacttcatgaaatcgaaataaataattaagtatcttgaataaaatcaacttaattataaactctatttaaattctaagttctaagaaaaatattctaatttaaattggtctaaaattaattaataaattaactttcaacttaaatatatttttcaacttaattaaatattagaaaatataaattagaaattactagaaataactatctacaatatttcattaaactaagtgtatttatctgaattaaatttaaaataatccaatgaaaaattaatttcatttattttaaaaataattatgttgctaattaaattataattaggtttaactagtatcattaatctaatacaattatttaaataaggcaaatgtgtcttcacttgggattattcatgtgagggagggcttggtttagtatgtcgtacccactactaatggccccctctcccacacaaggcccaaaggagaggaatttaacctttcattaaataattgttattcattgaataagcccaatactaattggtcctaaataaaactatgaatggcgatattttattttagcaacctagtccattcaaacatctagaaataaatgggctttctatatgcatctaagcccaaaagcaaacatttagggtcacacaagtcaaattgatttgga

SEQ ID NO: 151146 - DNA, 614 bp, Cannabis sativa
ctaaatcacatcaataacaacacgcataagtgactcgctaaatcacaaccgggacttaggttttaagccaaaaacctatctactgcaacttaaaatggcaataccttacactagcagggaatcaaccaaccagaaaccttaaactgacgcgaaaggacaagctgaatttttgggtttccctgctgtaaaatcctgataaccggttttacaagcagtgtaaaaccagttagccagttttacccagaaaaaccaaaaagttccaaacccaaaccaaattttatccaaactcaatcaaactttcgagacctgcatattataccccaataaactatttccaagcaataaaacaataacccaagctcagaattcaaaatcaccattaatgagccaagcttgagttcaaaaactcaaagcttgctcatttaacaaactacctatcaaaacctactcaaatcaatctatataaacataatataactacaaaaaacataactcaacaccagcagcaagaacaacaaccaaaataacaaagacatgcatgaattcaattccttaaaactcaagaaacttaagaggataaagtcaagaatttacctagagcttaagaacactta

SEQ ID NO: 151147 - DNA, 1367 bp, Cannabis sativa
  modified_base (47)..(62): a, c, t, g, unknown or other
  modified_base (694)..(696): a, c, t, g, unknown or other
tatttcatattgttttagaagttcggatgttaaacaacatacttgtnnnnnnnnnnnnnnnnctagtaaaataattccaacaatatttttgatgtgcatggccgagtttcaagattagaaaccgagctcacatgctatgaacactacattgtaaaattttacataaaaataattttagaaaatgaaaattacataaaaatttctatgccccattattagcttacattattttctagaaaaaaaataataacgaagcctacactcgattttaccatataattgatgattcatcacctctcatacattcacaataatataaccatcaattcacatacgtatcacacttataaatacataaaacccacacaatatttaatgtatatacattcatggaactgctcttgataccaattgttgattttttggtactaaatcaggtacgtagcagaagatttgtatatctaattatcattgtgccatagtctcaaggatctctagatgtatatacattaaatcaaagcataatttatttgaaagaaatatataccttgtgaagcctatcagggtatccttgattctttttgtaagttgtaccctttcaagtgttgggattttatgccttaaataaaatccattccaatacaatttcttttgttatcaataaaagattagaaatcatttatgtttacatgtnnntttcatgtttatggtttaatatacgatttctgttaaatccaagacatatagttattcacaattacagtgatgtcaacacagtgaaagataattgtgattatatgcttcaaaagataatgttccatgattcatcagtgcactggatttacacagatgtgatagtcaacgataacgcttacttacaccttagataagtgttatgttctttccaagacatttgcaaagtatgctagtatcggatgtacggagtatacattggactgggaacgatattgatcttggtaaagatattataatcttaccattgtatctttcttagtcaatatcactggttttaggtcaaaagatcttaatcctgatatggtattaaagttgattttattcaagatacttaaatatttggcatttttcttaaaaagttaattaaatagaaaaattatatttgtgttgaaaattaatttattaattaattttgaaccaacttaaattagaataatttttttagaatttattttatataatttcaaaaatgtatttactcttaaatacattaaatttcgtatttagtcatatatatttattgagaattaatactaagatggaaaataatttcatttattttcagatcaatctaagtataattttataaatattcaattaaaatttatatt

SEQ ID NO: 151148 - DNA, 500 bp, Cannabis sativa
cttggttaaatctaactaacatgcattcaaaccagctcaaatcttcctaaatatgcatatcatcatctcagaaaacatcagcaagcaacaacaacaagtgcagtaacagattcttcaatttctttgaaaaacatagttttgagtaaaaatttcatatcttgataaaaccaactaatcaccaacacaatcatgcttgaatcaacattctagaatcatgctctaactacagaaatcaacaacaacatacaacagcaagaacaactacaaaactaagcatgcaaccaattattacttgatttttcaagaaactaaagaggacaagagtaagaacaatacctaaagcttgaattgcaaacaaaatcagcttggaaacaaaagaatcaacaaaaatcttgctattcaaaggggccgaataaagagagagagagagagagttgagagaaaaagttttgcttttcttgatatttttttccaatttgataaaaatgataaaaattaaa

SEQ ID NO: 151149 - DNA, 1095 bp, Cannabis sativa
  modified_base (43)..(48): a, c, t, g, unknown or other
  modified_base (402)..(416): a, c, t, g, unknown or other
attagtttactaaaatattatttataggtagctaagtattttnnnnnnaaaatacattgaagggtataacgggttctttatccacattcgatgtagatcatctatagaagatctttgaatatttagattgatacaatgggtaattcaaatagcatctatttttggtaatagtgcgttcaatgtaattaagagttcaattccaaatctatagtggcacaaggaggaattaataagttacgaaatttactttgtaaatttcggtctacttattgtaaacttgatcacataggatcatagtcgacacactagttgagataatacttcttgtagactcagataattgattttatttaatcaattataattctaaaattatagatgtcttatttatgaattttcacnnnnnnnnnnnnnnnttgtgaagaaaagagattttgggatttatttatttattaagagtctttgtaagatctaattaataaataagataaatggcaattttatttgataattaataagtagttttgacatttataggattgaaattagaaaatatggcattattgaaagaaaagatgaattatgaaataaagtggaaaaattgtaactagtgaggcacactaagtggccggccactaaagcaatttttgccattaattttatctttttttaatccatataatttaaatcctaaactctagttgaaatactagaaaaggaataagatgcccttattctcatccatctaaaaataacctagttttcattctttgtaagctaactagaaaattgagagcctccttccttagtgatttcgatttccttcttcttcatcatcaaattcgaagcctttagtgataaagtaccatgcctactcatatcaagtcaagtactcaatcatagtgtggaagaccatagttaaccaaactggaggagagaatatcaaagttctgatcttgataatgctctgttacagaaatgaatcaagagctagatatctgaacggaaggagtcatcgtaaaaaattttaatctcttatgtttatttcatcgtattaggaaatttatatttagagtgttagattatagattataa

SEQ ID NO: 151150 - DNA, 588 bp, Cannabis sativa
ctaaagtgtataaatacactcttaagtcactggtattggttagctctcttggtgtatcaattctatattacttttcaaagttagagtgttctctttgttgtgtgaagaatttgagtccaacaaattcttagtattttattattgtgttactctgtgttgtttcttgttgaaattgtgcatgttgaacaccttgaatattgttaatcaagcttcgggagaagtcttgttcgtgactcacctttttgtaattttgaaacttaagtacagtatttttgaaaacttagtacagtaaaaatgtaaaaaaaaatagtaaaattgtaaaagagacaaaagaaatgggtatttttgtaagatcccccagcaaattgtcattggcccaaatacggtttgtcgtggagagtaaaattggggcctcaaattacaatagtactgatcaggcccaacccattataacagccgaaatggtcgggccatattgatgagttttgataataatattatactgtggggtaagttgaaaaatgcctcttttattaatcaattaactaaatttgtctctaattttatatttatttgaaacatacctct

SEQ ID NO: 151151 - DNA, 1165 bp, Cannabis sativa
cccagagtcaaacaatacagagaaataatagttgttgaccgagagctaacctgttacaactgaggggctagcctgtacatctgcctgagttagagcaatcacccttgttggagcgggttttgctgttgacttttgttcctctttcttaagctgcggggaatctcttttgtaatgtcttggcaacccacactggaaacatccttgccctttccagtcacccagatgatgctttttacaactgagacactccgggtaagtgtatcgggtttcaaaataaccctgacagttgccttgaccttggttcccccagaacctcttattctgacctgagtcaccgggtgtagtttgtgcctttcgtttctgatcagtggtcgagccactaccactcctaccataaccggaggtaggaggagtaggggccctaccaacaacctgagtccctcgagactcctgagtgcactccactgcgctctcagctcctagtgccttccccaccatgttagcataggtggtgttgtcgtcagtagtaatcataagatcatgtcctatctttagatttaatccatctaggtacttttctttcttgctaaaatcggttcataaaattcccgaggccgacctagctaatcgatcgaactgagttatgtattcggtaacactcatattctccttctgggtcagctgggtaaattcttttcttttttcacttttgaccgcttcgttgtagtaatttgcattaaacaactcctggaacttttcccaggacatagtagtaacatcacaagtcagggacaccatgtcccaccaaaccagggcatcctcttggaactggaatgtggcacaggccactctgtcattaccggtgacgcccatgaaattcaaaattcttgtaataaccgtcagccacttctcggctttcatcacatcgggaccacccagaaagactggaggtgcttgtttgcgaaacctttcatacagtggttccattcgattcactgcagcaatcgatcctgcctgcacagcaggggcaggagccatctacatttctagagcagacattgcaggagcaccctgctgtctcaggcatctgatttcttcctcttgctcgttaattctagcttgcattgctgcaaacatgttatcccattcttgggcagcctgcggc

SEQ ID NO: 151152 - DNA, 557 bp, Cannabis sativa
tgacatcttgataattggaaaggatagaaaggctattgacttactaaaagaacaactcagctctgaattcgaaatgaaaaacctaggtgaagctaaaaggatactcgggataaaaatcaagagacaaagacctggctatgtgttcttatctcaggaaggttacattcagaaaattattgacaagttctgcatgagtgaggccaagacagtcactactcctcttgcctcacacttcaaacttgctcaaaatcaagcccctgataatgaagaagacagaacatacatggacaatgttccttatgcttcctgtgttggaagtctaatgtattgcatggtctgtaccagaccagacttggcatatgcattgagcatggtgagcagattcatatctgatccaggcaagacacattgggaggctgtgaagtgggttctaagatacctaaagggaacatctactgttggtttgctgtacaaagacaatggaaaatttgaaactgaggttgcagggtatgttgactcagactatgcagggagtattgttaggctaaaattagtct

SEQ ID NO: 151153 - DNA, 621 bp, Cannabis sativa
attgcacaatgattataaacagagtctgttgcttccaggaacatggctatgtccaacaccaagagggcagaggtggacttggctaagaaggacgctgatgacgccagggtagaacttggagttgttcgtatggagctagatgaagccaacaataagctttttaccgcccagaggaagatagctgagctgactaaggatcttgaggcttctggccgacttgaagagaccatcgagaccttatctgctgaagtgaacagccttcaagatgaaaggacttctcttcaagtggttcttcgtcaggtggaggaggagaagaactctaaggaggaggagcttacgaccgaggttgcgaggttgaagagaaagttaataatctagagacagccggtcttgagctcttctatgacttttggaaggctaatcctcaggaaaacttagactacttgggtgatgctaaggacatgtaccacgagttctgtgcttctcaagtggcttatggtgcgaccaaggcgactgcttctatctccgaccaaaatgctgatgtacctcccgttcaaacaacagatcctccagcttctactggcccagaagacccgaaccaagagcctaggactccagctg

SEQ ID NO: 151154 - DNA, 886 bp, Cannabis sativa
atttatgatcttatatttatgatcttatattagtaaatctgattattttgaaaattattttgaaatggatattttgaaatggattttatttagggcacaaaactcaacacgaaagtcatagagagcaggcctttcgagcattacggtgtatggagacttcacgttgaccactatgaacgaggccatgatggtggtctgcttttggcagtgccaactgtaagtggtagtttgatcttgccacatgaaagaatgctagctccgttgaaactatacataagttgttcgcatggttccaggtctagagttaaacccattctgattagggcttgcttgaacatgatatttgatgacgctccatcgtcgatcattatcttggacagtgaacctcaacaactagaggatcattgtgagggtagttgtctgatatgagtccgattctccaaaggtgataggctcacatttgtagcattgagactttggaggacgtaactgtgaacaaaatctgaatttgtgtttacttgctcaatattgtgtgtaaacattgtcatttacagtgatcgtttatgaattatgagttcgaattggattaggcttggactggatggcattggaatatgtaattttgtgtttggttttagaatggattgaactatttttttttaaaaaaaaaataagattaatttgtggtataaatattaaagtttaatttctggttgcaaataaatacttaaatttaatttttagcggtaataatacttaagttttaattctaaaactttgtaggtacctagatgttaagtattaagtatattgccatgtatcaaaatttgattggtttaggtcattaaatttttattattttaaaaaaattagtttaattatacta

SEQ ID NO: 151155 - DNA, 587 bp, Cannabis sativa
gttccattttgtttcttcaacaagtctagtcgggttaactcgaactttttgccaaacgatttcatttcgggtcttccaaatattatacaccagccctacaacagcagccgtgagtactccctttttgaactttgacagtttggatttcccaatccacttgagaagatgctgaaggctactggtttgggcataccagctcagccaattcttcaattcctgcaagcatttcccagcaacagaacactcaaaaaataagtgttgactggtctctaattgcagctcgcataagcagcaggttccctgcactttcaggccaaatctcagcaatctatcttgtgtctttaacctgttgagcattgctaaccaagctatgacactatgctttgggatgttaagcctagaccaagcttctttactccaatacagtcgggttacaggtggagagaacagtttgtaaccagcagcaacactatatttttgcttatggaaagcatcaaaatctaccatgtctcggatctgatctttcaatgcgaccattttcttccaataccaactggaatgtatggaaggagagtaagtcccccatg

SEQ ID NO: 151156 - DNA, 698 bp, Cannabis sativa
  modified_base (35)..(62): a, c, t, g, unknown or other
aatattaatgagatttgttttattattattttatnnnnnnnnnnnnnnnnnnnnnnnnnnnnttaaataaaaataaaaagtcactcctgaaattctcataaacgaagaatttcagttatataggcacactttatatagaatagatattccataaatatcgttttcttgtgaaagagtcgctaatcagttggcggtcgtttttatttcatattgtggttgttttaaaaagaaaaatcaacattattctacatattattaaaaaagcattgctattaggtgtgaggttttataagagtattgttattattgaagaaaaataactaaaaacttaatattaaattgtatgagtaataatatgacactttataagagtgttaggcattatgcatattttttagaatttattttattataaattatggtccaaatttaggcaataaatcctcttgatatttttgtaacatgttcctatttttcctaaatggattagtctttttatagtaaaaattacatgaaatatgggattttgtaaaaaagttacaaaaatatggcatttatagggttgtcactcttctatgataattttttcacatttaagatttttttatggtatttgatatgccatctttttgtaaatctcttatccaaacccatatttcatgtttttgtttctaacataattagtttttttttttttt

SEQ ID NO: 151157 - DNA, 758 bp, Cannabis sativa
ccagtacaggattagcaacccaagccgagtagaaagcttcaattatgaaattgttgttccgtagcttttctacttcttctttcaaagctagggctcactccttgtccaatagtcttcgtttttgttgaactggccagaagtttggatcaatattcaggatatgtgaaattatagaaggatcaattccgaccatatcctcatgcgaccaagcaaaaatgtctaggtttgctctcagaaattttatcaatgttgattttacttcgagcaacaaaacctttcaaatttttagctttttggtcagaatatttgggtcgatttcaatctcttctagttcttccactggtccaacattgttgtttgggtccccaagtcgaggatccacatcttcatccccgccttaggcggttccctatttcgtaatgtttttcccttccccgtactttagctagaggatacctccattttagccttagttagggtaaggttgtaacattcccgagcaacttcccggtttcctcttaggcaccccacccaattctttattgggaacttaaggcatgaatagaatatcgacgtaacagccttcaagtcatataaagatggtcggcctaacatgacattaaacgctaatggaacgtctaacactaaaaattatggtagttatgctcttcgaagcttgcccaacagtgaggggtaggcgaatttgccctagaggtgcaacactttgaccggagaaaccatacatgggctggagacag

SEQ ID NO: 151158 - DNA, 631 bp, Cannabis sativa
  modified_base (442)..(447): a, c, t, g, unknown or other
tccgggatgatgtttcttgcatcaggggcactcagggtaagaataatccttgcgtacacccttgccttgatttcctcggaaccgcttgttccgttttaaacccaccactgacgacgtaagtttattcttctgctcaaccatggagcccctaccacctctgccataactagaaatatggcaagcggtatcccgatttcgtgtcataacctcttgaggtcctataataaattctttatggcttctagtccagtgggcattcttcgtatcttaatccccctgaagaactgtaggttcatgtatccaaattttctcatgcaatgatcccacttggttatcagccatactatgctctgctggtaatctcgaattgagaatgactggcatatgaggtaaaggtagtgcaggaaacctttgctgtttcaacctctgaatctcctcatcnnnnnnttgaatcatagcttccatttctgcgaacctttgctccaactcccacggaacctgtgacgaacgaggatcactcccatccgaagccctccaaaggctttcaccttggttacggggagaacttagactccattctctccaaccgttactagccctgaccacactatcctgactccccatattgcac

SEQ ID NO: 151159 - DNA, 507 bp, Cannabis sativa
  modified_base (349)..(372): a, c, t, g, unknown or other
gtggttggaattgaaaaaaaatttagtgctaaaatagtagctttttggtattaatttaacattaaatttgagttttaccattggagatgaccttagtaccgtaaaaatataaacaaaaatgtttaaatttaacaaattttataaaaatagtagtttaggttaattttctattaaccaacacaaccatggaatgatagaacctaacaatgatttctatttgggccgaagtctgttgtttcacctctattcctctctcttcttaaagaattttacaaaaatatgtagcacttttactatacgcctcgtttagctcatgtattttaaggattattattattgttattattannnnnnnnnnnnnnnnnnnnnnnnttattattattattattaatttggagaattatccaatatacagtttttttaattttttttttaaatttacggtttgactttttaaagtgattgcagcgctagttgcaatacgggtttttatacgattttttgttg

SEQ ID NO: 151160 - DNA, 562 bp, Cannabis sativa
atatcagcctatactcagtactctagtcatactctagtcgtattgatgtgatagcatcgatctcgtacttgagccaaatatatagttatcggtatccaatacaaccctacatatactgatactgctatcaatgtaatctaacaggctccataaatatgcacgctaaacatgtaaatacatatgcatataattatattaatcttacctcgttttcgagttctggtgtgccagtcaaccttagtggaactcctgctcgacgatttataggacactaaattacattatttgcaaaactgatgaatgacacgctaaatcacttttcggaggcttaaaatcaaaattaaaagtttttctatcgatggataacatggcaataccctaaatatcgcaaaaacgagaaaaattagggttccctaaattgccccaacctgtagaccggttccccaactaaaagtctaattatgtgggtttcctagggaccaactggaattctggttcatataagtcccactgaaccggtggaaacacaaactccatctaaacaattcaatttgaccctaaa

SEQ ID NO: 151161 - DNA, 614 bp, Cannabis sativa
atcatttcatgtataaagtattcagcatactttataacgaatacaccacagtcactacaaaacaaaataaaaataacacagtcagaaccattgtaaactaaatagttaataaaaaaaataataaagtatacaatatagttaccactgatcttgttgaggcaatttatctaaaaaaaacaatttccaaaggatctgtatccttcactccctgaaaataatcagtgctcttgtcaatattcgacctttgaccatagaaatctacatgagataatcaaatggcgcaaaataatagcaaatgcattcacaaaactacgattgtccttatacattccacgcctcaaagaattgcacaccttaagacatctcatcttgatgtcaaagatgcacaaaatccaatgtgccaaagcaattacatttactggaaatagcatgaaatctaaaacgatccatggtttaccacacaaccaaccaaacccatcaatatacgcagctgccttagtatcccgaaaaacagaattaatatcctcatcttttgcacaaaacttattgtacaaatcaaatatgtgtgctgcaaaacaaaatcagtggtgctggcagcaaccctcacacttttg

SEQ ID NO: 151162 - DNA, 958 bp, Cannabis sativa
atgagtctatccatgtctgtgaatataattgttgcttattttataaggagaatgcatctaaggaggcttgtccagtttgcgaaagtaattgttgggttacttctgagaatggtaaaggaaaaaaagtgccttgaaaagtcatgcgatactttctgttgatacttcgactcaaaagattatttagttcgaggattacagcgaagagcatgatatggcatcatactggtaaatcaaaagatgatggggtgatgcgacactcgatcgaaggtcttccttggaaagactttaatgcaaagcatcctgagttaacaagcgatccaagaaatgttcgactagggttagctgctgacagatttaatccctttggcaacatgagtcttgcatacagtatgtggccggtggtgttggctaattataatctaccaccttcgttatgtatgaaagacaattactttttgctctccatccttattcctggtgcaaaatctccaggtaaagacatagatatatttttaagaccgtcggtggacaaataaaaggagttgtgaaataatggggtatcaacgagagatagttcgaccaactcgatgatcacaatgcgtgtagcacttttatggacagtgaatgattttcctgctcgtagcagcttgtctgtatggagtgatcaaggttataaagtttgtcctacttgtaatgaagacacaacgtccattcgattaatcgggaagacctcatatgttggtcatagaaggttcttgccaagtaatcatgcaatgagaagggatactcggtttgatggtaaagttgaaagaagacctcctccaagacgatttacttgtgaggggatattagaacaagttggtgctctcgaactgcaaattctgggacatcatgaagattttaggggcgtgaaacgtagaagagttgcagaaacttctaattggaggaaaaaaagtat

SEQ ID NO: 151163 - DNA, 588 bp, Cannabis sativa
tgaggtgtccatgagagacccctcgagtttaaacctcacctgaactagaatcagcgagatgatgcgagcatgatcaaagactgatcgcataattgtgactcgcattgtgtgggaccagagaacggatccaactcgcatgtatcaggatatgtgcgagtatcctttctatattcctgtgaaagcatagagatcgattctctataatgcgagctggtcccaatgacctaacagccttgataaaccaatatagactcgcgtgtctaggttctatcagctcatcatacgacgtccataaatgcgactatgtgagaatgcagacgtcctaaacttaattaaatgttaggtctatcttaagcccgcgagcttacactagaatatgaacagtcaactcgcatattagaagatgcatacgttgctgtatttagtaaatagaaactgttattcatttattaatgtttacatttttagtttaattattatgaattaatttacaaacggatggacaatgaataacaattctggtgtaattaactggacacttgctttgtatataaaggagtgatccaccatgaaatgaggactacgaaa

SEQ ID NO: 151164 - DNA, 855 bp, Cannabis sativa
  modified_base (310)..(314): a, c, t, g, unknown or other
  modified_base (468)..(479): a, c, t, g, unknown or other
tttccatctttagtattaattttcaataaatattataaaaattacttaatttaagttagtccaaaattaattaaaattaatttgcaactcaaatttaataaatttatataactaaattcgaaatccaatgtgtttaaaaaataaaatttcaaaatttacttaaaataaaataaaatacatctggaaaaattattctatttatattgatctaaaattaatttttaacacaaatataatttcctatttaattaaatctcttaagaaaaaatatctaatatttaagtgtcttgaataaaatcaacttaaatannnnntttctatttaattaaatatatctaaaaaacaaaaactctacttagaaaagaactatctagatattcataaactaattattgattttctaattaaaatataatatactttagtctatttattttaaataatcattaatgaaaattacttgatttnnnnnnnnnnnnaattaattaacaaattaattttcaactttaatctaattttcaaaactggaaaaaaaaattaaaatatctacgtttaaaataaatatatttcaaaatttatatgaaaaaataattattcaaataaaataaaatatactttaaaaattattctaatttaagtttatctgaaattgaaaaaaaattcaacttaaatataattttctatttaattaaattaattaaaataggaacaaataattaagtatcttgataaaatcaacttaataattaattctaatttaatatccaaaaaatattttaatttaagttggtctaaaattaattaacaaattaattttcaacttaaatatattttctatttaattaaatttcttga

SEQ ID NO: 151165 - DNA, 768 bp, Cannabis sativa
ccattcccaggattatatcaaagtcagaaaattgcaattctattagattggcagttaattgacaaccgccagtcaagaaagacaaggatcgaatccatctagtggatactataaggtctcctgatggtaatagggtaccaaaccccgaagcatatatatcacatggtttatggaaactttcaattactctactcaacacgtaagaatgagtagctcccgagtcaaacaatacagaatatgaacaacaatttatagataactaacctatcaccactgacggactagcatctgcgtcagccaaagtcatggtaaaaagtcatcctgggttctgagtagtactcttcttaggctcctccttgttggcttgacgacaatctctgattaagtggcccaccatgcctcactggaaacaagtcttggcccgatattcaccctgatggtatttcttgcattttggatactcaggataagatcggaatgaagatttgcggccctgacggccacctctgtttcctcgaaactttttgttaccccttgatgttctggaagcatcaaccttctgcttctgattagggttaccaccgtcgctccccttacttacattaccactagcaggaggattcgatgccatggcggcttcctttgcagtctactcttttgttacatgctgctcaaccacttcagcaattaaggctagctctaccactttcttgtacaaagtgtcatgtgcagtggtaattttcaagtcccgactgattgtggcattca

SEQ ID NO: 151166 - DNA, 630 bp, Cannabis sativa
acctccttttataatgtttaggtgatcacacttagaattcaaatacacaaccctcatttctctcatatagtttgtaacaactatatttcataacatttgaattccatcattaattgtgtaacatctcttctattacacaaaatatgatcaaccaaaagaagttacaaaaataattaatcttgtaattcctctccatattacaaaatgtaggttacaattttaagttaaataaattatatgttacacaatttatttaccaaacacttaatgtatattattcacataatatattaccacattttaatctacacttattatattataaaataatataacatgttatagtgtgaatttttcacctagaaactcgagatcaggctcccataaggacgacacgtggactcactctcctcaaggattactgagctgttagaaggagatcgctcgaggataaacctcgcctaaaccaaactcagcgagatgatgtgaccctgatagagtctagtcgcattattacgcctcgcatgacgtaggaccaagatggaaatgttcaggtatcgcatatactaagatatatgcaatgtctttgaagacttatcctgcgacttagtaaagatcgtttctttacat

SEQ ID NO: 151167 - DNA, 809 bp, Cannabis sativa
  modified_base (393)..(404): a, c, t, g, unknown or other
ataaaatggattacattgaaatggagtattatttatggcataaaacccaacagcttatgatatacatagtaatttacttactctagtacaagcaacttactttagtaagatgctgaagtatttttttctaatggataactctatatgaagtcttttggctcctagacatagattttatttatctaaagaatagttttaactattcaagaaaagatcaaagtcataaaagaattccttaaggatcaacagtgagaggtcttatgtatattttggtatgcattagaccaaacacctgctgttgagtaagagtagtgagtaggtatcagtttaatccaggaaaggaacattggaagacaatcatgtaaatcttaagatcaaaagaggaactatatnnnnnnnnnnnngggtggtattttaatactcttagactacaccaaataaggtttctagacttgtgttaatgctagaaagtctacttatgagatggtaattactctggaggtggagcagtgatttttggagaagtgtaaaaacctatttgaagtctccaactctgccaatgagactgaatgttaaagttgtagaaatgatacttattcagcctattaaaaattctatacaatttttggcattgtacaaataatgaattaaatattagtgttgcttcctgaccaacacaaatatagttgccaaataataaagaatccagtatcccaatatgagtaaacatataaagaggaattttacaatatcaaggattttgtgactaaggagatgtaatggtagagaaaagtttgtattgaatacaa

SEQ ID NO: 151168 - DNA, 549 bp, Cannabis sativa
agggcataaaacccaacacctaagatgtaatcaaacaaggaacattaggagacagtcaagaaatttttgaaaatgacctatatgttagatgataggggtgtattttagaatccttatatctacgccaactcataaacgattcgagatggtggttactctaggggtagaggaattattctagtaagatgtaaaaatccttctataataatttaagctccatcagtgaagatacataactttgtaatttcgaaaatactggaaagttattcaactgatgaaaattctacactgtgttatctctattccatttttcattggatagaatgagagatatgtcttctgtttattcagatgcacttaataaactgtaaagaatttagtatccctagataagtaatgcatatagtaaataatgctgcataatgttttatgaacacaaaggaagcaatggtgaagaaaacaattgcttaccacaaacttacagttcctgtaatttgggtttagtcaaatatactacacttgatctggatatcaagacaattgattgat

SEQ ID NO: 151169 - DNA, 599 bp, Cannabis sativa
gtgcctaataacaatgctcatacatataatattttaatttaatataaaagataagattcgatactgcttaaatgcacctaccaataccaatgtgggtagtaatgctcgataaaaataaaattaaaaatagatttagtcactataaactaaactactgtcaaaccattagaaaaaaagaaaatatacttctattgtagcgaggattttttatgtttgaaagttgaaactagttgaagatactttcctaaaaaaaactcttaatttgcagcgttaaatttggattctgctactgtaaatagggaaactttccaaaaagtaccaaaatcaagatttggtctttaaccggaataaagattatttgtaggggtgtgcataaatcgatccaatccaatgagaaccgactgatccaattacaaccgaccgccaaacattggatatccaattgtgatcggatcggattggatgttatctttaaatatccaattagatcggatcggatggtgggtgggatgtctaaaaatccaatatatcgaacatccaatcaaactaattaatattttcatttagtttggatgagtaattggattttatattgttat

SEQ ID NO: 151170 - DNA, 508 bp, Cannabis sativa
aatgactcgagctcagattgagtttgttgtggggcaattggctaatattaccctgcaatccactcgtttagagagaattaaataagcacaaaagcaagattcggaattgatgaaaaacccgagctaaggtttcgactgggaaggctagtgatttctcagtggatgaaatgggaatgttgagatttgggaaccaaatttgtgtgcccatggatgagaacatcaagaaggagatcatggatgagtttcatatgactccttattcagttcatccagggtcaataaagatgtaccaagacttgaaagccatgttttggtggccaggcatgaaaaaaatgacatcgctgaatatgttgcaaagtgccttacgtgtcagcaactgaaagctgagcaccagcgacctgcagggttatttcaaccactagatataccaaagtggaaatgggaagacaatgctatggactttgtggtaggtatgcctagaaccacgggacaatttgactctgtgtgg

SEQ ID NO: 151171 - DNA, 561 bp, Cannabis sativa
taaagaggagatcggaatagagccgtacaattggtggatgaaagttcacttagtcacattatgagcaatataattacaagttctgctaacattagaaaaattacaactaataaaagaaggagatgacttaatacaaaaaagacagttctcaagagcccaatggagcaccttcccattgagcgcattgccattgagcacattgatagctagcatcaagtcactctccacaataacatacttataccctaaatccatagccaacaaaacagccaaacagtaggccgtgcttctccacataacgcatccgaaaaatccaaccgagatgtgtgaacccaaaccaccctgcctagatgattccttgctacaacagctgtgcacatactctctaagcccactctaacatcacaattcaattttatccaatcttgaggaggaggagaccatgtctccctcaatatcggtgtagaactaggcaagagagaagcatgtaactctgcaaaagaagtataaatatggtcaatacatttcatcacatctggaggagaattattgtgtacaatt

SEQ ID NO: 151172 - DNA, 793 bp, Cannabis sativa
ttaatatctataatattttgactttaattacaacttggtgtaataagtagaaaatttcataaaacttgaaagattttaaacttgaagcatttcctttatacaatcaatagtacatcatcgtatataccccctatacttaggattttttataaaaaaaatcactaagtataaatacaaggcgaatacaaattggacaatgggagtactattgataatagaattttaggctttcgccattccaagcccgtggaatcgtagtaccatcgagttctgctagtcggtatgtagcgtcaccaatcttttctgcaatgagatatggtccctcccagttatccccgaagaccccatgcgctgggttcttggtatttggcattactcttcgaaggacgaagtctcctgttcgcaggacttttaccttgatcttggaattgaaatatctagcggtttgccgctgataagccgcatttttcaagcacgcctgatcgcgcttttcttccagaagatcaaggtagagcgactgtttttcctcattttgtgaaatattgaaaacatctcttcgtagggaacctgccccaatctcgaccggtaccatggccttgcacccataggaaagcgagaagggagtttcaccagtcgtggatcgaggagttgtgttgtaagaccatagaacttgtgaaagctcatctagccaggtccctttacgttcttcgagtttccctttgattgtgtgctttattattttgttgacagcttcagtctgtccgttgctttgtgggtaagcaactgcagagaa

SEQ ID NO: 151173 - DNA, 621 bp, Cannabis sativa
tctttgagtggctcgcggatttactggttcccatactttctcgatcattagctcattgagtactttctcctcttcgagttgatcgacaatgggttcttgaacgcctcaatgtcacactttcttcttcacgctttgttctttcctcccgagagcagtttatcgtatttcccccatcagggtctgtacaagtcctcactctatgggtttgggaagaacgctggtaatttatagcaggtgacctccgttcccacggttgcgtcccaatatcctcctcattctcatgagggatttctcgttcatcagtttccgattgtctcccatctggctggtcgttctgattttcagggggtgtctcattttccctagattgttcttcctaggccttttcctgtctcttggttcgtgagccacgaggtttgcctcgcggtcttctcattccaggttcaggttgattttgaacattcgtgccctctacggccctagccgggctgcatcacgctctaactcagtgtttcgactatgtgcctcttctagacgacgtctcaggcagcagttttaagtttcataagctcattatcccacagattgggcacctccacgattgagctcttaatccctcgt

SEQ ID NO: 151174 - DNA, 582 bp, Cannabis sativa
aaactagtcccatagttaccaaagaacagttctacgaagtcagaatctccatagcatttttaaatcataaagcccctgtataaaaccaatcgtttttaaacttaaaacgaaattaaaccataccttaagctttttcttttcaaggatttgctatcttgctattaccggagcttagatcgctaagttttggattgaaaatcgaagaaaatagatatagagagagaaggttttatcaaaggaaggagaacgaagattttgttcgtcgtttgttcgttctattcattgataacttaatatgtatatatatacttaaagttaatgttatacgttaacttatatatatataaataatattataataatatattattataataataatatattaataataataatataatcatataataatataataatattaataaaaattttattattaatagctatcttattattttttagccactagaaaatctatatttttagggtatttggctaacttcgagtaccctaaaatagcctgataattctaaaatcaacttatctcaatagatcatcaatatttctaactaaaac

SEQ ID NO: 151175 - DNA, 656 bp, Cannabis sativa
cccaaataaaaaaccagactgagatcaaaactcgaaccgcgactaggacccaaacccgaacttacaccgggacacaaacctagactagaatcgggacctggaaccagaaacgggattgggacatgggcaacggaactaggactgggacccaagacttgaccccagacccgaacatgaacctaggacccagctcgtgacccggcacaaaaaatggaaccagacaagcacgtgaggtcagggtccggatcaggacccggggcttggaccgaacccgtagtcggtgtctggatctgggacccagccccaaacccgaacccagaccaatatgcaaacccggacccagacttgaactcattcccaaacccaaaccttgatccaaagccataccgtgtgacctgaaattggaacaaaaatcggaagtagatcaagacccatgaatgggaccggaaccaggacttcgacctggacctaaacccgaaactgtaaccggaccaggacccagtttcccacccagtcctagatctgaactgggacccggacctgaatcctaatcaagacttagagtcggtgccgaaccttgacccaaactcagacccaaacatggaaccagactcgggacacggaattggggccgagacctagaagtgcaccctagt

SEQ ID NO: 151176 - DNA, 734 bp, Cannabis sativa
gtccaagttttctttttctttagagcagtcatttctgatcccattgcagcattccacttaggattggcaagagcttccttgagggaagtgagttcatgttcagtgtgtgtattagcaagaaaacttctgggtttgtaaatgccaagtttagatcgagttaccatatgatgttggtttctggtgtgagttggaacatggacagtaggtatatgttgtgtttcagaaggaggaatactggtggctgaggtggactggtttggtaattgctgagttgtgattggtggtgtttgattgctggtaggagagacagtaggtgataggggtgttgtgtcaggttgtggtgtagggacaggacttggaattgggaaagaaagttggttactggtttgggcaggggtatttctaggtgttggaggaaataactcattgtagggaaattcttgttcattaaaggtcacactcctagccacatatattcttcctgaaggatgtaagcatctatatcctctaaaattggggctgtatcctatgaatatacatttagaggatcaaaaggcaactttatgagatgcatagggtgtaagtagggggaaacatgaacaaccaaagaccttaagcaaattataatcgggtgagtgatgaaataatttttcataaggtgtttgaaagttcaagattggtgttgggagcctatttatgagataggctgcagaaacaaatgcttcccaccaaaa

SEQ ID NO: 151177 - DNA, 667 bp, Cannabis sativa
tgaaatcatctcacatgatgatgtagtggtagtctgttacactgttgattgtaaatacacaagtaaatatcttatgacacagcaatctcaagtcaatacactgattgacccaatccttatcttattagtagtctgtcttgttacttaattgtatgacacagcaatgtcaagtcatatgtgcttaagcttgcttctgtaatcgtatatatggtaataaggcaaatataatatagatttttttttaaggaagacaaatatatatatcatgacttcaggtgtttacaaatggtgtaatcatcaacaaatgaacaatgaaattcacaagaaaaaaggaactccagtttaataacaaaaagttaattacttcatatgcattccatctaggtttttagtcgttctaattctctctgtttttagcttatttctaattaaaaaaataagttcgatgtttggataatttggtttttttcttcaaggttttaagatctctttagaaaattaggattgctaattatttatatatatatatatatatatctatatatatatactaaataggtgttatgtgccaagttaagttacgtatttttattttagtttttagtttttagttttttttaatattataattttaaaattaataatattcaatatagtgataatcatt

SEQ ID NO: 151178 - DNA, 1040 bp, Cannabis sativa
ttattattattattattagtttaattggagtttttttttaaataaaataataaaaaactaaaaattagagaattaaaaaacataaacagaagtattgaagtatggtctataattaggaaaggaagaacaaaaattatatatataattaaaataaatcataattatatatacatgtgaaacaaatcataattataattatataattaaaacataataccaacctaggggttataaatcataaattgaagaacaaaaattatatatataattaaaataaatcataattatatatacatgtgaaacaaatcataattatatatacatgtgaaacaaatcataattataattatataattaaaacataataccaacctaggagttataagtcataaactaaagttatctttttcagaaaaaacatatctatatgtatacatttatatatataaagttttatttaaaatatctttttgagaaaaaaaagtactaaaaataattatatagagagcgagaaaaatataatgaagaatagagattatcacatgagaatgaggaagaaaaaattacaatagccttttcatcacttttcatgaatttatcattaaaaaaattatttttttacatcaaataattcatactaatgagtaaatcatgaataattcgaagacatcgatgatagtaaagttgttgacataagaaaaaaagtttgtatgtctccaaattatagaaaaatattgaaaattgaggtcttgatactatatattgatgactgtcgaagtgcgatgtatacatcaaaaattaataattacataaactcaaagcaaataaaagaaaaaagagaaaaaaataaataggattagagatagatggagaatctttattcaaaaaacaaaaaagaaaaagaaaaaaagatataagaagaaatagtgtgtaagagaggtgtatataaaataattttcattaaaaaaataaaaaaataaaaaataaaaagaaagaagaagaagaagagaaaacgtgagagagaaagagatatatgtata

SEQ ID NO: 151179 - DNA, 547 bp, Cannabis sativa
ttgggctgagttctcacgagaattttacacataattctcgtcctcaagacttgtaccatcacagctagaagaccttgtcaaagtcaaatagcgacaagggaaacctttgaaagcttaaatccagaggtttatggctgaggttaccaaagtcaaaggccttatagaagaaggccagtatatggccataatagggggcatactcccattgagtgatttctagaaagatatttagagaatctccaccaacaacatgaaggagttccttgatagagcttgcggctttatcaaacttgaagaagccatacgacaagcccaaatagggcatgtcaacaataggcaggcacccagcaaccttatgacccaccaagcgcataggaagatgccagcaattctgtccagacttctagtggtaaaaacactagaaacaagcgcgacaccaacaactttggaaggtacaatggcaaaaaggggaagtttaacacttctcccatgccacagaagaataaggaggagaagtacacctgcttcaccctcctaacagagaagc

SEQ ID NO: 151180 - DNA, 779 bp, Cannabis sativa
  modified_base (316)..(324): a, c, t, g, unknown or other
gtctcggtctggttcttgttcaggtcgcaggttccatttcagagtttgggttctggatcgagagtggggtgcggttctaggtcccgaccctggttctttgtctttagtctggttcaatttttgggtctgagttccggtttgggttcgggtcccctgtccaggtttgggttgggatccgggtgtggctcccaattcggctctatgtctgatttggagtccgggtcctggtccggttacggatctagatataggtccaatttcagttatgattgcaagtccaagtcctagttacagtcccggtcaacttccagttttnnnnnnnnntttgggtcacagggtacgggttcgcgtgaacttttgggtttgggactgggttcaagtctgtgtgtgggttcgggtccttgtcagggtttaggtcaaggtctgggccccaaatcaagacaccgacaacgggttttgtcacagccctcagtccagatccggatcccaatctcgggtctcagtttagttccatttctggtgccgagtcacgagcggggtcctaggttcaagttcgagtctgggtcgtgtactaggtcccggtcctagttcttttccctaggtccctatcctgattctgggtccagttcccggtgattgagtgtgtttgggtccctgtctaggttcgggttcgagtccttgtctaggtttgggtttaggtctcagtgtgggttttgatctgggtttaggtttcggtttaggtccttgtccttgtcctagtcctagttcagttctagttc

SEQ ID NO: 151181 - DNA, 1282 bp, Cannabis sativa
aggtgccccccaagtgaccgagcagacttttgactcttggtcacttgttattcacaagtatgttttttgtctgtttgggtctttgggtgcgagcagaccttttgtacgcatttaatggtaaatgcataacttgctaataaacttcactcaatttgaattgaaataaacatctttattcatttattggtcgggaatatgtttgttaccatagtaacttacatttgagctattatattgatctagtctgatctttagcttaacataaacaaaacaaattgcaataaaattttactttcataagtggtcacccggcctgagtactttgtcatttcattcgaacatttgggcgtggtccgcccaataggccatttactttagagtaaatgttctttcgttttgtacttaacatggtcatccgaccggctaccgtcactggtagtattttcttaagtgttccccgttccaataccttggtactagaatgagttgcatttttttgtcatacttacccagcttgtatgcttctgattccaaaacttcaatcacctgatatggtccttcccagtttggtccgagcacacctgtcgtgctgtctttggtgttcaaaaatacccttctgaggaccatatctcccacaaagaatttttgtgctttcacttgcttgttaaagtaccgagctaccttttgttggtgggttaccagtttcaagtttgttgtggttcgcttttcttcgatttcatcaagtgactctacgaggagtgcatgattaacctcttggttatatgtcaatcttctgtgggacggaggttcaagttctacgggcagcatagcttcataaccatatgccatggaaaatggagtctgttcggtcgttattttctcagttgtgcggtatgaccataatactttagggagttcctccggccagtttcctttagcatcttcaagtcatttcttcaaagtatctttgagtgtcttattgactgcttcaacttgaccatttgcttagggatgtgccactgcggattaactctttatgatcccatggtttgcacagaaatcagtgaaggattggctgtcaaattatttgccattgtccgagactatcttatacggtatttcgaaccaacaaattatatttttcacactgaagtcttgcactttcttggatctaaagtaatcaactgcaaccactacctacaatactccacctttgcccttgggcaattgtccgatcaggtcgattccccaaatggccaaaggccaaggactttacatctga

SEQ ID NO: 151182 - DNA, 579 bp, Cannabis sativa
gatgggatcaaggtggatccgggaaagatagaatccgtcaaggattggccaagaccaaaaacagtgacagaagttagaagtttctttggtctggcgggctactatcattggttcattgaagggttttccaaaatttcaacacccttaactgagctcaccaaaaagaatcagcattttgtatggacggataaatgtgaattaagtttttaggaattgaaatagaggttaattacagctctagtgctagctttgccttctggtaaagaaaagtttgtagttttctgtgatgcatccagacagagtctggggtgcgttctgatgcaggccgatcgggttattgcctatgcttcccgtcggtcgaaagattacgaatagcgatacccgactcatgacctagaacttgccgcagtagtgtttgctctaaagagttggcggcattatctctacggggagagatgtgatatctatacagataataaaagtctcaaatacttctttactcagaaagatttgaatatgagacacaggcgttggttagagttggttaaggattacgattgtgatatcctttaccatcct

SEQ ID NO: 151183 - DNA, 673 bp, Cannabis sativa
aaaaacccctgttttcgtcagtattcttcatcaatgaggacatttcgttggtaaaaaaccgttgggaatagttcgtcggtaaaatgattattaacgacgactttttaagtcgttgggaataaaaattatcaacaacgacattgtcgttgggaataatattttatttatttatttatttttaaacctgagggcatcaacaacgacattgttgtcatgtcattgatattattatcgatgacgacaatgtcgttcttgaagagctttttgaaaaaaaaataataaataattatattaaaattatttgtaattaattattaatatataatattatattaacattattaaattaaataattattttaaattttatatttttttgattatataaaaattatttaattaattaagatatgaaatcatttaactaaaagtaaatatttagagtcactaatattacaataaaaaatgagtcataaatattacagtattgcatacctaaatataaattagtgttcataaaatattaacaaaaattaaactgatagttcataaaattaaaataaatattctaaaagaagtttgtagtagcatcgtcctcatcactagcatttccaggaacattcgacccaggaacatccggcatctgtgggtaatatggcggcatttgcgaact

SEQ ID NO: 151184 - DNA, 522 bp, Cannabis sativa
  modified_base (31)..(32): a, c, t, g, unknown or other
tgttttgaattcataaaaaaagtgtagaaannctactacgaaactaaaattcaatctaaaatccagtttaatttgcataaaacatgccttgacttcaattttcaaatccatgaaagacagatctcaaaaagttgatctggagttcccaacagtccaactcaagtatagtccaaaaaaattacatcaatactatagtaaaatatttatcctcgtgtattttcgttattttccaaatttttaatggtaaattttttcacattaaatcatttagagacatgtagacatagttacgtacatggaaacactgttcagatttttaatgtttcactacagttacattacagttgcataaatattttgcaaacagttatttcgtttgattgaaaccttcgtgtgatacaacctccaggcaaccacccataaactttcgtctaattgaaaccttcatctgatgcaaccttcggccaaccacccagcaactatcgtctcattgaaaccttcgtctgatgcaaccactgcgca

SEQ ID NO: 151185 - DNA, 525 bp, Cannabis sativa
  modified_base (348)..(353): a, c, t, g, unknown or other
tggatgtattgttatacattagactggaccaatattcacatagaaaatatattataaacttaccgttatatctttctaagtaaatatcacatagttgaccttagataaatgatctaaatcttgagatggttcggttctggttcaattgtattatttgagttctttcacttgtttgttaaagttgaccaaagagatcttcccaatacttacatcatgggaatgttgtagtacaattaagtaggagcgctaatgatagatacaaaatctatatcttagaagcaaaatgatgatttccttcgagcttggctaaacaagattaaattgtagagtactcatttcagtaattannnnnntttactaaaatattatttacaaggagctaagtgttttaagaataaagtacatggaatggtagaatagtaaaaattgtccctactcgatgtagatcatttatagaggatcattgataatttaaattgaaacaatagataattaataatgcatctaaatttggatcatatagag

SEQ ID NO: 151186 - DNA, 590 bp, Cannabis sativa
actgaccgagttaactaagaaaaatcagcaattcgtgtggtcagataaatgtgaagcaagttttcaagagttgaagcaacgtttaataacaactctggtgttagcgttgccatcaaattaagaaaagttcgttgtttacagtgatgcatccagacatggtctgctttgtgttctgatgcaagctgacaaagttatagcctatgcctctcgtgaactgaaggattatgagcagcgctatccaacccatgacctagagcttgctgcagtagtttttgctctaaagatatggcggcactatcttttatggtgaaaatgtgagatttatactgatcataaaagtctcaagtactttttcacccagaaagatttgaatatgaggcagaggaggtggctagagcttgttaaggactacgactgtgagattttgtatcaccccgagaaagccaatgttgtggctgatgcctgagtagaagaggtcccaggcaggttgcaccacaattctaatagcccctcaactagcttctgagatggttagtgcagggattgagtttgtagttggaaagtttcacaacttaacatttcagtctgat

SEQ ID NO: 151187 - DNA, 510 bp, Cannabis sativa
  modified_base (482)..(484): a, c, t, g, unknown or other
aaaaaataaccaaggtttaaagaccgcttggccgatcatgatgtcttaaagtattcctaatggttggatagatatataaaaagaaagaaagataaaaagagaagtatttagacagctggagtccctggctctttgttcgggtcttcagggccagtaggagctagaggatctgttgtctgagcggggggcacgccaacgttctggccagaagtagaagtggtcgccttgggttcaccatgagccacctgagaagcgcagtacacgagaaacatgtctttggagtcacctaagtaatcaaaatttgcgtcaggattagctttccagaagtcataaaaaatctcgagacccactgtctctagggcatgtactttctcttcacgcctcgccacctccgctctctgctgatcagcctccgatttgtacttcttgaccccagctgtaagctcctcctccttagacttcttctgtaaagcccgcttagnnnatttggaaattagcagttaatcttga

SEQ ID NO: 151188 - DNA, 640 bp, Cannabis sativa
ataatttttaagaaatattactaaacaatcacaatgcaagaaggtgtcagacaccactagtatttaatagcaatactaagaaatatcatacaacaaaaatacaagtggatatgaaaagtgaggatttattgagagaaaaagcaattatatattaaataaacgacaggtagttttaccttaatcactgtaagagataaaaaacgatatgtcgtttactaaatgattcaaattctcaaaaataaccgaaataacttccttttctttctccttatactttccttgcctcttaaactcatccttccctctctctctctagaaagaacgaaccagtaaagattattcatcttgttgcaatggatgtagttgaagcatggcttgttgtctcatcaaacatttccaaggcactaacatattactcacaagaaattgaaagcagcgccccggatttacaaaaagaattcagctctctaggtgaggctgtactaacaatttttaagagtaaagatcttaatgcgttcgagaaacaattgaaattcgtagaattgatcaaacaagctctttctcttaagaagcgcgtggatgaattcgatgacaaatgcttaaactacaaccttccattatttcttggtgatggtgagca

SEQ ID NO: 151189 - DNA, 609 bp, Cannabis sativa
aatatatttagttcaataattaagacattaaatataagtattattggtagaggttcaaaaagtaaaataaaaatactaaagtaaacatgcttttattgggattataactcaagacttcatttagatgtataaaatgactttaccattataccaaaacttattttatgtttatagatatcacttttatttataaatatatgttgtaattaactaaaatgtatatatatttttttcccgatttttttttccagggtgggcgaatgccccacctcgcctctatgtgggtccgcccctagcgacaggggcgactttatattaatttaggccttaggcaaaaataaaaattagggcccaataaaaaagtaaagttattgagatttgaactcccaagctcttaattgttaaactaatcaaattaccactaaactataacacatatttaacatcaaaagtattattatttattttattactaactatattttaatttttttttttcaaaatgggccctgagaggtggggggggcctaaggcagccgcctccttcgtcttagctcagggccgaccctatttaacggcaaaactacttaaattttacgttttgtaaca

SEQ ID NO: 151190 - DNA, 538 bp, Cannabis sativa
aactcaaacccggacctagacccagagcaagatcaaatcccaaatctaagtttgaaccttgacttaggacccgaaccccaaccaggacccaaactcaaactcggtgctagacccaaacccaggacccacacctgcacctagacctagactcgggaccttaaatttggacaagttcttaggacctggacgtgtctagatccaggtctgatctaggtcctagtccgagtctaagtttgggtctgggtttttggtttgggtcctagatctacacacctaatataggttgggtccaagccttgggtcccacgtttgagctacaaattctcatctggatccttatcttaggtcacggttcaatttcgatttgggttttgggtcctaggtccatgtctggggttaggtctcgattcaaaggtccaagtcgttgtccccaaccctggtttggctcctggatctcggtctttctttgggttcggttcccaatccgggtttgggttcgagtccaggtccaagtttgagtttgggtctgggtttgggt

SEQ ID NO: 151191 - DNA, 815 bp, Cannabis sativa
  modified_base (763)..(766): a, c, t, g, unknown or other
atgaataaggaaatcttgtattgctcaaactatcaattacatctcaagtttttgtacataaatcggctatttactgctataaataatctagaatttttacaattacaaattcatcacccaattcttgtccacctcttttgttttgcttggccatacaattcttctcttactctcctgctgaactcggttaacaattatcctaatttttcattatttttggttccacaacacatcatttcttgcaccccaaatctggtataccaaggcagccaacatagttaacatcatgcttctccttgttgctgaaatccctttaagcttgctgataagttgcagcattttctgcaactctgttgctttcgtcccccattgcagcctcttcttccattctgcaagacacttgctgctatattcacactgaaaaaataggtgttgaaccgattcattacccttcccacaaagcaaacaagttaagtccacttgtgtgtcatacttgcttattctgtctttaatcttcaatttatcccacaagactagccataagataaacttgtgtttgggaatgacaagtctataccacacatgtttgcaccaatccttcttctctggcttgctaaacaacaatagataggtatttgatatgctgaatttctgcataacaaaggtagcccgatccatcttagccttcacctgactcttgactcctaccaattttttccaaaaccagctgcagtcggtgggggcttcataatcccaccagcannnntctttcaagtatacattatgtatccatttgacaaacaaacaatctttct

SEQ ID NO: 151192 - DNA, 558 bp, Cannabis sativa
  modified_base (98)..(98): a, c, t, g, unknown or other
gacggttatttagacattgggaatatcgggattggtcgggaatttagaaattcccaaaaataccctttagtacccctttatgttattttagtgtggangggcaaaatggtcattttgcccaaattatgtttttttcctttagtggacttattattattgtgtaatatgatttatcttttattggttggctgaaataagaaaggatttagtcatttatttcatttcactcaaagttagaaaaattagaaaaaaattggtgaaattgcttttctctcttcctctctttcggccacttcttcagcagatgggatttgagttttttttttctgcatttccagtaagaatcttcttgatgttgaggtgcttaaactctatgtaattccttgtagctttttcttggtgttttcttgagtttttaagaaaaagatagtgatttgcatgcttaattttaaagtgttgatactgctgtgtttgtgtgttaatttcagaagtttaatcatgtttatttgagtagattagagttggttgtgatggatgttagttgctttggttcaagct

SEQ ID NO: 151193 - DNA, 1011 bp, Cannabis sativa
  modified_base (42)..(43): a, c, t, g, unknown or other
ttagcttatatcgtatgttcttgacgcgttcttcttccatgnngtttgtttccacaatataagtcttttcaaaaatgaagttatggaagtcaaccgttagttcacatatgaatgttgcgtattcgaattgtatcaccaaggtctgagacccggtgctagacgtcatcgatataggggacatgtgacaaagcaacccttagcactataaacttttcttgtgatttgattaaggctcccctcaccttttgatttcttcattaattgcgatgacctctcgtagggctttaagaatcttatcctcttcatgacggatattttcgatcttaagtgacagaatgctttttatttctgcaagtactatttcgtttgacgccttaattctaaaagacatatctcctatatctgcaacaatttttccttaactattcaataagacttatcataagtagatatatctatttatataaatctttatcagataaaataaaacctctttatttatttataaattccaaaagataacaagctaaaggagttacactaaaactccaaactaaagtggaaccatactaaaactccttattacataaacaaataaacacataaaataaaatgcaacttgacttttctactcttctatgtctgacccttcctctaacatatcttctatcaaatctacgtagtcgagttctagtacaccaggtttgatgagattggtaacttttgaaggaattcagacctaacaacattattgggtcgatgatatatttcttctttagaaccatcagggtgatacatggtgtcggtaattttgtactgatctactacgttgatcatgagtaggtcatatctttcagcctcatctacccagacataccctaaatgttcctagttttctcttagactacgttagacatgtggcatgctgagagcatgcatcagggctatgtacttctcatgtgacttcaataaacaattccaacagtctattatcttatccatcccctcatg

SEQ ID NO: 151194 - DNA, 1024 bp, Cannabis sativa
gacattaaaaactcatcttaattaataaaagtaggtttttgtttttaaattaatttattatgtatgtagcatactgttcagtatttggtttagtaaataaagtattttattttttattttgtttttttattaatattggtcttaatgaatgtgatagttgatgtaattttgatgaaattgagaataataaggttcattgattaatgggttagttacattataattaagtaactaacattctatatgttaagagaagcaatctcactctgtattaaacaaaattttcaaaatagaacttttcaaacaaacaccttaatagtgttcataaacaattgcatcaattaaatagatgtttaagagcaattacatcaatcaaaaataaaaaataaaaaaaaactcaaaatgattgggaagtttttctttttcataattaaaccatatgagaaaataattcaagcacaagaaatgtggtatttataaatagatgttttcaagctttcaaaacagaaataaacggcctctgaagcttaatgaaataagctgtgataataataatgaatctgaattgataaatttgtaggtgacatacactttgaactatataaatataattagtgggaattacggaaagagaatacagtgtttggttaataaaactggacaagtttaaatgtcttctactaaggtatacatattattacagaatagaatatggtggagttttgctatagtgtagctggttactagacctatgttattagacacctaaaaaaagaataatatatattaattaaaataataatttaaagtcaaattgatcatttgtgatgaatctttaaccacgaagaatattaaaatattaacaatatagactttaagtattttgaaaacatttatattcttgagatgtttgatattgttggagaactcctttttacataattattttttacttattttgaaaatggtcttgtataatacaataggatcattatagaactttgataagttttttttttttttt

SEQ ID NO: 151195 - DNA, 1146 bp, Cannabis sativa
  modified_base (704)..(704): a, c, t, g, unknown or other
taaaatgtctttcgacttgaattttactttagtgtatttaccacaaagttagttgaaattttggttgccgtagcattgaactattattcctttaatacaaaccgttgataacatgcatattttttctagagttcacttgagatctcattgtatctcgcttgtgtatcgttaatggccatgtgcaacatccatttcatgggctctctagacaataactcccaattttcataagaggtagcaccacctttagtccatagaggtagaatttagtgtctcacagcttatctttagacacatctttccattaaaaatcatttcgattttaaccctccaaattttattactagtactcgtacatagatgtgacatgtcgagtactacttttcactctatattgacttgttattacctattgaacttaagactagatttttactagtgttaacataagttaccatcaatgagtaaaactcttgttgttggaagaatttagacaacaccaaataaaatattataatcaaaataaaaacaagaatatgcaattactctactcaaaatagctagtattcaaactatggacacacaaacatattggaaatataaataacacaaagtgagcatagttgttctgtcagatcacggtctacttagtccattgttgcaagagttttctatcttctccatttcatgttggatcactcctntatatacaaagcaagtgtcatttgattacacaaagattgacttaattatcaaatctgtttttacaatgaataacaacatttaaatcaattaaaacataaatataataaatgaagaacagttttggcccaattcactaactacagcaacgtatgcgacctttgtagtgtgagttgtctattcatattcccacataagctttcagggtgaagacacgtacaagactaattgagtctcacatgcgtaagacatatgcatcctattcgagttgcatatacggatatcttgtaaaaggtcgataacttaggacatgtgagtccttatcaagttatcgagcacgttaggtcattcagaccagctcgctgagtaaagaatcaatctttactaactatgttagtgttggaatttattttaccaggatcttagaactactcacaagtatgt

SEQ ID NO: 151196 - DNA, 1616 bp, Cannabis sativa
  modified_base (1424)..(1424): a, c, t, g, unknown or other
ctagcacaattcaaaagctacagtctcagataaattccatgggaagaaaacacaactgtagatgcgttagctcgattggcgagcagtaatgtaagtgacaaggcgaacttggttgctatctagttcctcgaagagcctagcatcactagcatggaagaaatcaaaatcattgatacttccccaaactggatgacatcgatagccacctacctcaacactgggaaactcccagataatcggaatgaagctcaaaaaataagaaggaaggctgcacgatatatcataatagagggaattatgtacaaaagaggattctcaatgccattgctcagatgtgttactcaagaagaagcccaacgactcctatctgaggtgcgcgatggattctgtggaaatcaggccgccgggaaaagtctatataagaaaattctaaggctaggttatttctggcctacgatgattgaagattcaaaggactatgttatgaaatgtgaaaaatgccaaagattttcaaagatacctcgagctccacctaacgagttaactcagatgcagagtccgtggccctttgccatttgggtaattgatctgatcgaacaattacccaagggcaaaggaggagtgtagtatgcagtggtagcggttgattacttcattaaatggacagaagccgaaccactagcaaccattaggtcaaagaaagttcaagacttcactgtgaagaacataatctgcctgtttggattgccgtacaaaatagtttcaaataatggcaagcagtttgacagccaatccttcactgacttttgtgcaaaccacggtatcctcaaaagtttctccccagtggcacatcctcaagaaaatggtaaagttgaagcagtcaacaagaccttgaaggatacactgaagaaaaaacttgaagatgccaaaggaaattagtcagaagaacttcctgaagttctatggtcatatcggacaactgagaaaacggcaaccggacaaactccatttcctatggcgtatggatatgaagctatgctgcctgtagaactcgagccaccatcccatagaagattaacatacaaccaagataccaatcacatactcctggccaaatcacttgatgaaatcgaagagaaatgagccacaacaaacctaaagttgatagcccatcaacaaaaagtagctcgatatttcaacaaacaagggaaggctcagaaattcttcgtgggagatattgtcctaagaagggtatttctaaacaccaaagacaacacgacaggtgtactcggacctaactgggagggaccatatcaagtggttgaagttctcaaatccggagcatacaaattaggtaagtatgatgacaaaatgcaactcgtttaagtaccacagtattagaatggggaacatttaagaaaatnctaccaataaagtaccaggttggatgaccacactaagtattgaaggaaaatttacttttaagtgaatggcctgctgggcggactacgctcaaaggtttcgacaaaaaaaaaagtactcaagtcgaatgaccactatttaaagtaccatttcatatttctgcagtttgttttatttcatgttaagctaaaaga

SEQ ID NO: 151197 - DNA, 926 bp, Cannabis sativa
  modified_base (522)..(526): a, c, t, g, unknown or other
ttagatttttatttgaaaatttggattctaccaaatttgaattttatttcattgaaaaataatttttgaaactcaaaatatcacaaatacaagtttggcacagggattgcatactccctatgcgtgcgcatgggagcaaatgtggtgaaatggggctgcacgcagccttcttgagggaaaaactcggtcagcgggcttgtctgaggccgtgtgaaaaccgagtgatgcttgtgcgcccgcgcatctgtgcaacaggtttgagatattttcattcaaacttcagaaaatcataactaattcaattaaaatctaaatgaattctgtagaagcctaaatttattaatttttcatctactttccagaaaaaatacttttagaatgaaactaaaaaaatttatcatcataaaattataatttacatataatcatcaaatatgtacataaaccaacatgaccacatccaaatcaacacaataaacaaattcatcgttttaaatttatattacatgaaagtaaatcatnnnnntggctctgagaccagttgttgggagaattttatcaggatctagatttactaacaagtatgttgaattaacaccctaaatatgaatatctctaaaacaatgaaataaatacataagggtttaagaaaaccttacattgattgctgcggaataatatggctccttccatttaagatctctatcccttattcttttctgtcgcagagcattatcaagatgtgaacttggatctctttctctccttcaggtttggttagtaccatcttattcactataatggaggacttgacttgctatgtgtgggcatggaactctttcactatgggtttcgaatggtgaaaatcaatgaaggaggtttgaatcactaaggaaggaactatatcagctactagttcttagaga

SEQ ID NO: 151198 - DNA, 1045 bp, Cannabis sativa
gatttttatataagggaagtttgcggtagctgtgtaaacatgtttgttgttatctctatagttattactatgatctatgaataactagggaacttaagtcgcgcttcgagcggtgttttcaaacttttgtaatctttatatataaatatatattgtacttataatcagttatatgtttaaaacataacatgttatgtgtgtatttttgttaattaatataaaataattgattttaaatttattaatttaattatataattagattctattgcatcattatttataatttattattttatataatttttttgagtgagtatatcaaatatcacttagaagagaaataaataaaaaaatatgaaaaaaaaacaaaaaaataataggttgttaattaatattttttggcttataaatataaaaatttgatttgataacctaaaataataaattataattaattgagcaagatcaagttatcaatcacccatatattttcagacaaattaaaatgaatgcagaatactttgtttatagtatagaaatatactaataatgtagttcttaatccatgtgagatttttacaaataataataaaaaaacttactaaatcatatatctcaacatctacaaatatataaaatgaacaaaatttactaaaattatcttaaaatagattaaaatattgtaggatgctacctcattttctttagtactttcctttatagaaattaaatattgatttacataaatacataaactaatagattttacaatagtgtgtgacatttggactgaagtaaaaataatacaacctataatttctatataattttgttttaaaaaataattattatgaaaagtaattatattttaaaaataataaaattaattattataatttttaattgttttatataggtaataatattatacatattaacggaaattaagagtataaaataaaaaatttaaaaaaagatgtattttttttattaataattataggttttaattattttatatatgtaataatactatacattt

SEQ ID NO: 151199 - DNA, 613 bp, Cannabis sativa
ttcaaatgaggggaaaggcattatttaaagtagaaaaggccatgacttgcatttgtccaaggatttccaaaaatacctttgggataagtgccacacagtcttcacttaaagtctaaatgccatttctttccctttgccacttatcacttgtatggacaaaaagaattaatttgcacatgacaaaaactagaaagaagaatttgattctgtgaaagaatgaaaatttgttggttgatgtgatgctggtgctttagtacgtggaggctcaggatgccttattagtgatggggggaacatgattggtgaaagagggttttgaacatggtctcttcccccctcatcaacaccaatacccttaagagctggagatggttgagatggcaggactccattgttgcgtgttgtgcccctctcctcacgggagcctcctcgtggggaatatgtagcattatcttgtgggggtagtaggtccttgtgcgtccctcctagtttgttgttgtgtaggagggggtgcattgttcctcctattctcataacccaaggttgttacgcgttgtcgttattgtgaaggaggacgctcactcctcctgccatggttgtcgttctcacgaga

SEQ ID NO: 151200 - DNA, 508 bp, Cannabis sativa
gcaatttaggaaaggttgcattggctcaacccaagaaacttgggtttcttcgtcttcactcaaggcttcaagatcttcaagagaacttatcaccctttcatccttccacactttcttgtgaaaactttcagccacaatggaatcaattacactcaaacgcgaacattcttcaatttcatccgggaatctcatagcattgaagacattgaaagtgactttttgatcattcaccctcatagtgagttctccattttgtacatcaatcaaagttcttccggtggcgaggaatggtcttcccaaaataatagggacttctctatcggcctcatagtcaaggatattgaaatccgccgaaaaaataaacttatccacttgcaccaacacatcttcaatcttccaatccggatgcgccatggaacgatccactaattgcaaagtgatggtggttggccttgcttctccaattctcaacttcctaaaaatggacataggcatgagattaatgcta

SEQ ID NO: 151201 - DNA, 592 bp, Cannabis sativa
agggtctaatcctcagttagacacactgctacaattcatggctgagattaagtcctccattaaggtcttagaaactcagatggggcagttggcttctcaaaatactaacagggcttaaggtaacttgcctagcactactgaagtcaatccaaaggagaactgtaaggcaattactttgagaagtggaaagagttatgttggcccgagccacgacaacctagagaatgaagaagatgaacaaccagcacctacaccagaaaagcagaagactactgatggtcttcggtgaaaagaaacttcttcccctattagtattgaccatcatataaagattccctatccccagagtttgcgcaagaataatacgaataagcagtttagtaagtttcttgaagtattcagaaagttgcatatcaacattccctttgcagaagctcttgaacaaatgccaagctatgtcaaattcatgaaggagattttgtctaagaaaagaaagatggaagaatttgagctggtagcccgaatagaggagtgtagtgcaattcttcaaaagaaactccctcctaagctgaaagatcctgggagttttacc

SEQ ID NO: 151202 - DNA, 818 bp, Cannabis sativa
ataaagctttcaagaagggaaaggttgagtgtgtccaacccgaaattgttgagatcataggcataaaagaaggttcgagttggattgcaactcatccctgggataatgtagtgttagaaactgatagttttgggtgtgtacaagcagtccaaagtaatgtttttatgtcctcacagtttggttttattgttcaagatgttaggaatttacttttggctatattttgttgagttatgttttgttaaacgatctgcaaacaagttggctcattgcttgccaagagactcttgtttctctacaagttgtgtacttcagttggaggattgttcctctcaagtgtgttctattattttgaacgattttattaatcaataaatctcctgatttattcaaaaaaaaataatttttaaatttaaacctcaaaatatcagaaattaataataacctattaaaaattaaatattattaatttaaaattgatatttaagtttaatatattaaaaataatattttattttgaaattagggtttgaaaatataaaaaatttgaaatttgtggaaaaaatcacaaaaattgcactttttgtggaaatctcccaactgcccacgaaataggctgcaagcagcccattccgtgcgtgggagagagatgttgcagcctcagatgtgcgacattcttcagccattccagcctcagcatacgggacatgggcatcatcgtgcgctttagacaaaattttgtctgaatccgcgtgcgcaaggagcttcttgtccgagttcctggtgcgagtgtgcaccatcttgacacccatggcatc

SEQ ID NO: 151203 - DNA, 692 bp, Cannabis sativa
aataaaatatgcatgtatcatatgcatatttgtatcatatgcatgtattagatttttaaattattattttttacattaaaatattaattgtatgtataattttttaaaatatatgaaaatgtgtgtaaattagattgaatcggttacttttacatgtcgattaacatgcaattcgcacacacaaatgcaaactgaattatatttgattgactattttatgaatacccctattaagcaccattagtacattttagtattttatattaaaaatattgttattagatattagtgtgtctaatatcattatttacatgtggcaccttatttacatgctcatttttttttcttttattcttaatgtataaaaaaaattaaaataaaaattaattatatagaataaaataagtgtctacctctcttaaaataaatatttatagttatatttgtatattatattattttaataatttagtccacccccacttgaatgaaattttggatcagtgaataataatatgacactttgttttaatagtaaggatatttaggatttttatttcacaaattatgacttatgtattattatatctctgaattttttagctcgttacaaatagtcttttgaaccattcatagtgctgtaaattggttcttttattaaattttgtcacatgtggcaaacaaaatgacag

SEQ ID NO: 151204 - DNA, 520 bp, Cannabis sativa
tttatttccttaaatagaaaactatttccttaaatagaaaattatttccataaataaaatattctaatatggtcttaatccgtcccctatatggcattgtcacccattgtcaaggagagacagagagttgagagtagccatttttgatgtagtttggagcttggagactatcatttcaggtatgtaaaagaggaacttaaaatatgggaatccaatttctttttagatatggcatacaaaaagtacataataatgtaaacaattcaaaatatccataagcttatttaaatatgccataaaaaagtaaacacttaaaaaaatcccataatttatgtaatttctactgacaaagaaatttttacatttatacttttcttacatgttttttccttttctattgttttttacttattaaagctttaaaaagttttttttatatatatattttttggtcaattttagctttctttttttcttttcattttttaagtcagacttttttttctttctttctcttctc

SEQ ID NO: 151205 - DNA, 683 bp, Cannabis sativa
tttacaaaaaatataattatttttaaattaatattgtccctactatttcaacatccataataatatacaaggagcttttatagtgtacccaatacaacttgttgcacatatatctcttttattttatatgcatgtgaaatataatatttgaatcctagtttttgcatgacaattattttgattctcttaaaatgtattaaataattacaacacacaagtcttaaataactagaataaatatcatcatcatatatatatataattaagattataatcatttgaatatcaaacaaacaaaaaaaaaaaaaaatgcattagtatgcccaaatttgagtgtggttcatcgtaacaaaactcattaatttgtatatacactgcctaaaacttttgaaaagaaaaattttaattcaaaataaagaatacaacttctatttagcatctatttaaatagaataattagtatttttatcattctatatagatgattaaaaatttctccttacataatcataatctttatgttagattttacttacttttactattaaaatatcgaataattagggttcttgtcttgaactataactgttatcatattatgtctgttatatatattttttaatctttgtattaattcttaagttttctattgaaaatccaataaattttaaaaaaaataatat

SEQ ID NO: 151206 - DNA, 930 bp, Cannabis sativa
gtttaggtccgagtttggggttggctcccagtagtcatgtcctgggttctaggtatagggtcgagtcttgtgtctcgagactgtggtcgagttttaggtctctgtcccagttccggggctcagttttgggtccaagtccctcatctaactttggatgcttagtacatgtctgggtccaggttcaggtctggggcccaagtcccccatctaggttcggatccttggtcccggtctaggtccaaattcagattcgggtttggatctcgagttttggtgcgagtctaggtcctagtacgagttcgagtttgagtttgggtccgggtgttggtcgaagtccaagtccctgttcgggtacgggtcggggtcccgatccgagtcctagtcaatgtctaggtccaagaccaggttctggtctgggtttgggtccgggttcaggtccttagtttgggtctcggttcgggtctcaattcgggtcttggtctggcttctaggttctgatctcggcatgggtatgggtctaggcgcgtgtccaggttagggtttagggatttaggtttagtgtttatggatttagggcttagggtttaggggtaagtgtaaagattttaggatttaaggtttaaggtttagtgtttagggtcacagggtacgatttaaggttcaggtgtgggtctgggtttgagtccatgtttgggtttaggtctgtattcgggttcaggtctgagtcttggtcacaaatccaaacaccaccacatgtcgcgtctagttcgagttctagtacgggtacgagttttggtctgggtctgggttcgggtcaaggtccaattcccaaatttaaacaccgactatggggtcggatccaagcctctggtcttggtcctgggtcccaggtccaaatccagatcctggtcaagatctagctcatgtctt

SEQ ID NO: 151207 - DNA, 527 bp, Cannabis sativa
ttggttgaaatgggctggattcggaacggcctaatcaatgcgaggaggaaggcgaggaccaatgcgtgcctcaagcatggcgtcaagcttcttcttcttctcccggccatgtagacgctatcatcaaaacgcttgatgcaacggctgcaggagataggggagacgagctcatctttcttagccttcttcaaggcttgatctttaaagtccttgagctccttcagctccacggtcaagttagccctggactcaaagtccgcctggtgcagttcctctaaagacctcaccttggcggccatctcgtctaaggcctccttggcctcccgaagctcgtgtttggccttggcgacagcctcgccctccgccctcaacgcttcctggtgctttgcctccagccaatccctccgaaggacttcctctcagatcatcgcctccggttaggcttccctttgcttagcctcttcctcgaacttggccttagcaagagcctcctgccacgcagtctcctcttggaacgcccgcctttc

SEQ ID NO: 151208 - DNA, 625 bp, Cannabis sativa
  modified_base (120)..(121): a, c, t, g, unknown or other
aaaaaaaaaagtgaaaaaaatagtatatatggtaattccctaaaatataaatatttgtatcaaatttctcaaagaaaatccatttaaaaagaaaaggggttttttttttatttttttttnnttttacacttcaaaatatatatatttttgtatttttacggaattctatatagaaatttctatttcaattagcgctgcaatttaaatcgcaacaaaaaattgtatagcaacccacatagaaactaccggataaattattttagaaatctaaaccgtaaatttgaaaaaaataaaagtaaaaaaaacatagtatatgcatgggataatttgtcgaagaaaatcaatagttttttttttttaatttatatatgattttgtagatgtatatagaagtcatgaaaatgaaaataagcaaggaaaaaaaaaataattaaatagtagagagttgggattgaaatagtcaaagaatagttttaataataggaatattgcagtcatagtttgagtctttcatgcattcagactagataaatgagatatttattatttaatttatgaaataagaagaagatcaatagagaaaggagagaagattctatacaaagtaaaccaataaaacaacatg

SEQ ID NO: 151209 - DNA, 819 bp, Cannabis sativa
ttttcggcggtttgttgtaattaatttttatttatcgttttttcagttcggtttgggcgggttattcggtttggccggtttataaattcttttgtacagtcctacccctaaccgctggaaagaggccccctccggatgtttgccaaaaatgggaacccaaaggagtttccttagcaacattgggtgcaaaaatcccaaagcagcgaaagcagaagaaaagcgaaaaatgcagaaatgtgggaacaaaaattgccccataccctaaataatctttcgacagagggatcagtggcaaagtagaaggaaggaaaataacgaaacacaaataaaagagattctatacatcacataacagactcactcaaggttatcccccagaattccaacactaaaccacaaagctctaccctagcatgcaaacaaacagtaaagacatagattgtccaagaaacttacatgaaagttgagaactgggggttggtgttaatcaacagtaaaaggtggattggcagctacagaggaatagcagcaagaaatctatggtttctgaaattttttctcaaaggtgttcttatgaaaaaatggcgaagtggtgaaagtaaccaaatataggagaaaggctggcatttatagaccagaatgggtgcaaagcagctgtgatcaggcgtcatcgtacggtgggaatcgtaatcaattcgcattctgcagatccaactgttgggattaatgctcattagggcagctgaaaatgcttgagtatttgtcttacaccgattaaatgcgttggatcattaatggacgagaagcgaatcgttgcct

SEQ ID NO: 151210 - DNA, 504 bp, Cannabis sativa
aataatttccaacaaaaatttgttcaattggtcccctaattcaaaaagtgaaaatattcttcattttaggggaaattttaacaagttttttccttactcttatactcattagtgttttgttaaaatctcaccctacaaaactccaaaaatggtgaaatttcacagggacgaagccaagaccattgtgtatgacttttctattggacacgttgagagaaaaagtagttttcatgcattaataatcattttaatcgaaatagtgaaaatctctactttcttatagtagtaacccaatgtttgttagtgcatgaaaactaattttactctcaatgtgtccaatagaaatgtgatgcacaacggtcttggctttgtccccatgaaatttaaagatttttggagatgtgtacagtgagattttaagagaacactaacgagtgaaagagtaaggaaaatttctgagggtttagggtttagggtttagggtttagggttttaggtttaggg

SEQ ID NO: 151211 - DNA, 674 bp, Cannabis sativa
  modified_base (611)..(628): a, c, t, g, unknown or other
gtatcgagtataggctgatattgtggtcactagtactatcgtttgaacgttcttgactcagtaccgtgttggatgcggggaagggttacggttaggggtatgggcgcctaatcttaatcctgtttacatttatgttacgattatacttttcttactgagtctgtcgactcacagttactatgtgtatgtgcaggtttgagctagaatcgaaccattgaagagtctaaagctaaggatgaagattgtacatatcatgacgatttagacctggagtgttcagagtctttgggaaaatgccagctcacttttgttggtcgctagacgtctacttttgatttataaatagttcaaaacttatgtaacttttcaaatgggatcccggattatgtaaaatattatgtttaaatattaaagtaaatttatacgataaagtttctagtaattcacatttttattaaaccctttgattagcaaaggcgtgcacggtatctagaaaacaccgtaacacgcctaatctagtagggtgtaataattttggtatcaaagccgccaggttgttcttcgaagatcgtcaagatatgtacaatcatctattgggttttatgccctannnnnnnnnnnnnnnnnnataatcagatttacttattaacatagatcagaaataacatttaatg

SEQ ID NO: 151212 - DNA, 567 bp, Cannabis sativa
  modified_base (28)..(54): a, c, t, g, unknown or other
tttcagtgaactaatataatcactaaannnnnnnnnnnnnnnnnnnnnnnnnnntagccaagctcaaaggaaatcatacattactacaatttagacttttagtgacataatttagtgactcgcacttttgtgcgtgtcactaaagaattaggattgatttttagtcacacgcacaattagattctaaacattcagttttagtctcttataatgtgtgtcacttaaaatatgaggtgtcactaaagaataataccgataattttttaactttttttttctaaaaaaaaatattaatctatagtgacatgccaaacgcgtgtgagtaaacgtgtcccgacatgctaagcgtgtcactatatcatttacttttttcaactttaattaatattttttcaaaaaataatattgatctatagtgacacgccaaacgcgtgtgggtaaacgtgtcccgacatgctaagcctgtatatcattttacttttttcaactttaattaatatttttagaaaaaaaaaacaataattatatataaatataattagatattttatttattaaataaataaa

SEQ ID NO: 151213 - DNA, 1132 bp, Cannabis sativa
  modified_base (26)..(36): a, c, t, g, unknown or other
  modified_base (195)..(198): a, c, t, g, unknown or other
ataaaatggattacattgaaatggannnnnnnnnnnggcataaaacccaacaataaataccccaaaagaagcacaaaggagggattccaacatttttttgggaccttcaccttgaaattgaagactcactcttcatcatctaaaataaacacattgctctaaccctactattaactctagaatattcctactaannnncctcttcttcaagaggaacacgggagaaaggagtaaacatccattgtatttgtatgtgtataaacaaggacacttctatagtagggatgcctcttttgtctttatgatatgggcactttattagacattgattaatgatccaatggtgagaagaatgtaaggagtatgatagtaaatatggaatttactatatggttacatatctcttcaaattttaataatattttaatacttattattttctttcatttttttttttactttagtcaatttcttctcctaatttttttagtttttcctttttaattaaaaaataattagtaaatttatttttatttcaaatagttagttgattttttttttctcttaaaataaaaatattttcatgatagtttaaaaaatataagttgatctaataaaaattactgtaccccctctcagtagaccccttatttcggcaaccaaaaatatttttgatttttcagtggaccacttctaaattttcaaaaaattctaaatactttacaatgttaaaaataaggttcaaatattttattgcacgagcgactgttttttcttatagatgtggcaatcgactatttgaattttatttgcggcagtgtaaactactcaaaattttatgaaaatttacaagtggttttaagtaactacaatgtacatgatcaagaaaaataataatataaaaactctcatagatgccaaaacatagaaggggtatatcaaaataaccctttaagggggcacacttattttcaaaatatttttctttttctacattaattttttatgatgacttctactaaaatctattgtagtacatgttgggttttatgccctaaataaaactcaattccaatgtaatctttatcttttaaatatcaataaagaaacaaaagtattttcatcgcttatt

SEQ ID NO: 151214 - DNA, 514 bp, Cannabis sativa
  modified_base (388)..(392): a, c, t, g, unknown or other
atttagggcataaacccaacattaacggctggcagaacccttgcgttccctgggttctgcagtgcagagtccaccgtctgtggatttgccgaatcaaccacgcccttacgagtttgtactacaatcgtacttgtgattaaatttagaatgaagagcgatccttgattctgctctcaatgaaagtaccaaaatgttgaccttgcttttagccaacgacagtgagtctatttttgtaagcgacaagtagtttgtaatgattaaaatataataaagcaatataaagacacaagaattttacagaggttcagccccgatcaattcaataatagcctagtcctcgttatttatattgacttaagagcgaggagaaagattccttttcttatannnnntacaacagtatctctgaatatgaattcttagataaaatctctcaacaaaaatgtttccaaccctttacccagtgaatatgcatcactatttatatggctatgagcttggagaggaagtattt

SEQ ID NO: 151215 - DNA, 700 bp, Cannabis sativa
  modified_base (383)..(388): a, c, t, g, unknown or other
aagtaactcccggccccgctcaggtctgttgaacatgcgattcgcataagggagcccatttcacctattcggccatcccctcccgtgttcggtaaaggattagctgttatgtctgaaataagatcgatgtcaagtgatgatgaactttcgaatcttgtttgggcagtcaccttgcattctactttgtcttgtttttgagcttcttgacttttatgccttatgtttctgatgtctgttttctaaccatgttgtttttcgttctgtacaaacttgtctcggaagatgtttgaggctctaaagaagagaatgggcggaagctttggcgcctcgcctccggccaagaagtctaagggcggtgaggggtcctctactaaggaaaagannnnnnctggggaggtcattgatctttccaaggagctgactgttgcaaacccctctaaccccaaagttgccaagtccaaggagtctggaccaccaaaggttgggtctgaactggtcaggagtgatcctgaacgggtgcgagcacctactccacctttgccggtgcttctggaggccaaaaagggcaaggagatgcttgcccattacatgaaccggctggttcataaggtcagtgagcaactggccggtgctgacaatgactcttctttggaattgctggtgggcggagtgttgaaggagttcaccagggtaagtcttt

SEQ ID NO: 151216 - DNA, 513 bp, Cannabis sativa
acaatcttaatagttcaggagaaattttcaacggccaaaaaagttcaaaagacatgatttagtacttgtcaaagttcgggggaaatacgtaatgatacactaggagttgtgattttttttttttaaaaaaaaatcaattttaaatattttaattacaaaaaacaaaaccaaaaagctgcgttttgatgaaatattagaagttattatttttaaaaaaaaaataaaacataaaaaatgagagaggattaaagaaaaaataaataagtatatattttatattaattaatatttataaaattaataaaaaaattaaaataataaaaaaattaaggacaaaacaactaatgctaattaaagagattttagagtgctacgtcaccgtcttatatttctccgttacatgggtgattctacaatgcacacccttaaaagggttgtactaatgcaccctttacctgtttcggtattcaggaaaaaattttagtctattttctttttcatattcatgtacgt

SEQ ID NO: 151217 - DNA, 504 bp, Cannabis sativa
taatcttcttagcattagtcaaatttgtgatcagggttatactgttagctttgatagtgatcattgttatgtttataatattcttgatgaaattatctggcaagggctcaagtgacaatcattacactctcactatctatgctacttgacactttgttattgataacaccactgatttatggcatgataaacttggacacattgattacaaaaatctgaaagaattatccaatggagggatcgttcgaggattacctaaattaggtaaagaagctataggaaaatgtggaccgtgtcatctcgtgattgaaagaaagaatcgtactctaacagaaatggctagagtaatgttgaatagcaagaagcttacaaggcgtctttgggccgaagcaatcaacactccttgctacacaatcaacattgtgtcttacgtccaggtactcacaagacatcatatgagatctggaaaggtaagaaaccaaatgtaagtcactttcatgtgtt

SEQ ID NO: 151218 - DNA, 951 bp, Cannabis sativa
ggttcttcccaatgtatacacatttggtgggatttcctgggtcgagaataacctcctccaattattcaattggttttagcaggttctttcatcttgaactcaaagatcaagatcttcatctttcttctcgttttcttctgccaagatcgtcatcagctgatgactggcctttctatgctgcaactctatgcgataacaattgcgagccaacatctgattgccacgcaccactcccataccatctggtgtttggaactttaaagataggtgcttgatggagttgactgcccctagtctgatcagtgctagacgacccaacagtatgttgtacgccaaaggcaggtcgacaaccaaaaagtcttgcataacagtagcaattaaaggtgcctcacctacagttaatgcgagctcgattatgccaaggctagtgatgctatccctagtgaatccgcaaagatttaccatacaacgccttaacttggccttttcgagccccattttctttagagtctcattataaatgatatttactgagctcccgttgtctattaacactctcttgatcatcttattggcgagttgaatggttatgaccagtagatcgacgtgagggtatctcatgttcttctcatcttcatctgtgaatgtaatggagggttcctctgttttcaccttcttggaaggttctggggcaaagaccgactactcgttctttatctccttcaggtatctcttctgagtgttattgctttcccctgcaatatgcggccctctcaaaataaccaggatgtcctctccttccacaagaataggttgtaatccctggttatttgggttatcacgctgatggggttggttgtatccctggccctgtcttctcacatactacttaaaatggcctcgagcgataagactctctatctcatttttcaattggcgacattcgtcggt

SEQ ID NO: 151219 - DNA, 1226 bp, Cannabis sativa
  modified_base (50)..(55): a, c, t, g, unknown or other
  modified_base (164)..(176): a, c, t, g, unknown or other
  modified_base (364)..(367): a, c, t, g, unknown or other
  modified_base (503)..(503): a, c, t, g, unknown or other
  modified_base (798)..(799): a, c, t, g, unknown or other
atcatgaacaaatatatatatgttttgaacttaataaaatttatacattnnnnnnaatcatgaaataaatcacgtgaactatgcaaaatagaatgatttctgattttttttagtaattagtaaatgtgattatattgaaacgagttttatttagggcacaaaannnnnnnnnnnnncacttgcactaatataaaactaagaatacatttcaattaatctcaacaccttgatatccagatcaaatgtagtatgtagtattatctttgtaataggatctgacaagttgtattcaatacaacctttcctccaccattatatattattaatcataaaatccttgatattgtgaaattcctctctatannnntactcctctagggatactagattctttactttttggcaactatttatatgttagtcaggaagtaacattttagttaattcattgttgatacattcagtctaactagtagagctagagacttcatataggtttttanacttctccaaaattactactccaccctagagtattcagcatctcatcagtagactttctagcattgacgcaagtctagaaacctgatttggtgtagtctaagagtattaagataccacccttatcaactaacatatagttcctctttttgatcttaagatttacttgattatcttccaatgttcctttcccggattaatctgatacaaactcattactccactcaacagcaagtgtctggtgtaatgcattgcaaagcatacatgagacctatcactgttgatcctaaggaattnnttccttggcctttatcttttctggaatagttgaaactattccttagataaataaaatctatgtctaggagaccaaaagacttcctatagatagccattagaaaaatgcttccaacatcttactatgtaattcgcttgcactagagtaagtaaattaccaggcataccacaagccacatgtttagataatcttaaacctattatactaagatcaagaagctatgttttagtccattgaatagacttattttcaaattgtctttcttgtcttagtaatagaaaacttttggttattccatatgaatgattttaaccatagttctattgactttacttcttagttctttattctgactatccattatttgtttaaactaataatggattttgtcaacggtgtcttccaagtcataataggatgagttcct

SEQ ID NO: 151220 - DNA, 615 bp, Cannabis sativa
aaacggttcttcaccttcaggttggaagattacaatcttcctcttacagtcaatactggctcagtacttggataagacatccattcctagaataatatcaaaatcaactaaattcttctctatcaaatcagcactcaactctctatcttctattctgattggcatagacctaatcaaccttttggagatgactaactctctgccaggcagtagggttccaaaccttgattcataactatcatgcgatctatccattttactgaattcttgttgccacatacgaatgagaggcccaagagtcaaataacacagagaaataagagttgttcaccaagagctcacctgttaccactgaagggctggcttctgcatcagcctgagttatcgcgaacacccttgctggagtgggtatcgctgcagtctttggtgtctcagttctaagcttggggaaatcccttttgtaatggcctggcatgcttaactgaaaagcatccttcccctttacactcccccagatggtgctttttacaactggggcactctgggtaagtgtatcgggtttcggtgccactctggcgattgccccgaccatggttcccctggaacctcttgttc

SEQ ID NO: 151221 - DNA, 643 bp, Cannabis sativa
gtatttctctgagtatcgcctatgaagggcattaaacgctttggtaagaaagggaagcttagcctgaggttcattggaccttttaaaatccttggaaggataggggaagtagtgtacaggttggcttggctatggccccagcactggcagttgtacatgatgtgttccatgttgctatgcttcggaagtatgtctcaaattcgtcccatatcttgagttatgaagcattggaactacaaccagattaatcatacgaggaacaactgatgcaagtacttgatagaagggagaaagtcttgagaaataagacaattgcactagtaaaggtattatggaggaatagtaaaatggaagaggcaacctgggaacttgtgacggatatgcatcacaaatatccggagttgttcaggtaaatttcgggccaaaatttctataaggagggagtaattgtaataccctaggattaagaaaacggattagcaaaccctaactatttaaatatgtattattatggaattattttattatataatttattataagtgacttaattaaatatatgacatgtttaagaccccattggtgagccaggagcattttagtaattttgacccgagaagggtaaaattgtgaatttaattta

SEQ ID NO: 151222 - DNA, 670 bp, Cannabis sativa
  modified_base (614)..(637): a, c, t, g, unknown or other
cattaccaactttaagtttcaactctccagatttcaaataattccagttttcaagcaaatgcaatgaacaactgacaaggtttgtagatccagaatcaagaatccagatggatttcattctctaaaacacatgattcaaaaactaaatcatcactgcttaaccgttttttaattgttcttattgctggatcaatctgttgtgaagaataatctgaggaagttgaatcgctttctctattcttctcgactgagcttgaagtagtaggattttcgaagttatgaactctttgctcttcatattgaaaaattcctagcttagctgctttctggaatttcatgtttatcatgagcaagtgtaaagtattactcttcaagttcattcctaaaggcatattctagatgagtgttgggatgtgggttgtacattttggcattacaaatatcaataaacagaagtaaatcatttggttgaataaattcaaacacaagttcagaaaataacaagtaatctgatatgtttgcaaaaatactaaaactaaacatatttattattttccaaggtttccaacgtaatgaaatagagtgtccagtaggcaagagtcaaagataacatnnnnnnnnnnnnnnnnnnnnnnnntctaaaatggataccattttagcaaccttttat

SEQ ID NO: 151223 - DNA, 738 bp, Cannabis sativa
tgaacagtgagcatgctatcagttacaaatgtcaccaaaaaaaagtaataataatttaaaaaataatatattatcaaaaaggtttaggaaatgtgacatttggttaggatgaatgaaaatataggaataaaaatgagaatagaaataaaaataggaataaaatttaaaatgtataaaaaaaaaattaataaaaaaattattaatttttttttctcatcatgcattaaaatgatctttctttctattttaaaattaaatagtcatttcactaaaatagtagaaagatcattatattaaaaggaaaatttggtttagtatgcttaaatgtaaaatatattgttttaatataccaccaaattacaaatactatatctatacttttaatattttttccttccaaaaatacccttacatttcaaaaaaacttctctctcactctctggcgtcaaccccgacccagaatccctaccgtcaaacacacagacccagaaccccagttgcaaggcctcgacgtcatcttctctcacgacctctcttgttttttgcgtttctttcttctagtttaccagtttttttgcgatatttagcgatgtatttgtaatgatagaataaatctgaggttagggatgaagtttagcgataatttgcaatttttagcgatgatttgtgatatttagtgatgatattagcgatgctttcacgatgttgtggattggagacatttagcatgtttcatga

SEQ ID NO: 151224 - DNA, 771 bp, Cannabis sativa
  modified_base (433)..(434): a, c, t, g, unknown or other
tttatcttttctggaatagttgagacttttccttagataagtaaaatctatgtctagaagttgagaagcttctatagattgttattagaaaaatgttggagcatcttactaaagtaagttgctagcactagagtaattaaataacaagatataccgtaagccacaggtttagataaactcaaacctactataatactaggaacaggaagttttgttgagtccattgaatagacttaatttcaaaaaattcctttcttgtccttgtaacagaaaacttttggttacaccatatgaatggtttcaaccatagttctcttggtgttacttcttagttccttattctgactatccattacttttttaaactaacaatggattttcatcacaagtgtctaccaagtgatcataatagggtgagttccttgaaaccctnncactacgacaaggtaccatgactttctgtctaagaatctaaatggtattatcctcttctgttgtgtcaagacaacagaggcagtgtgaccatcctatatagaataagatgatagaacactttggaatcaagaaaaatatatctcctctactttgctactttgttttcagatttagtcattttcttagaaaagtggtatttgttgaaacaaacactttcttatcttaatgactatgggatggtccacccctaatcacttagaatagacgataaacatgcaaaccttagttaacagttttagcttttctgaagatcacgatcaggtcatccatgaatct

SEQ ID NO: 151225 - DNA, 903 bp, Cannabis sativa
gtgtaaaaataaaaaagtccctttcattatttaggctaatttacttaatatataaggaatatttttaatgggtattaattaggtttttttttttaatattatacttaaaattgattttatttacaaaaataacttcaataaatttatttgtacaaataccgatgtgccacatcagcataaataccaaaatttaaaataattactaaaaatagaaaaaaaaaaaaaacttgaaaattcttgccttcagcaatttcagtgttttgtaagttttaaaaaaaataattttttagttgcttttgatgtaaataatatatcaattagttatttttttaaaaaaaaattgtttcaagataatttttttctcgtacacatttagttagttgtttatttagatttaaaattatgattttattttttaatttttaggcaatattatatgatatattattatttaatataccatttgaagctatattttgagttgtgagaaatatatatatttttttcaatataaaaaataatgaacaagataaaagtaatatttcccttccttttataaattgttaataaagaaataactaaatattatatttgaacaaaataagtatacaatttattttataggttactacaataaatattataatatttcatattttaaaaatttctagcatctaaataattttactttaagtaacaccaacatatcctatacagcagagaaaatatcatatttaaaaatttagtttcttataagttattttagaaattagttagtatttgaaaattgaatttcgtagtaaagaaactaaaatgttacttttccggcaaaacttattattatttacaaatatagaatctccatctttttttacaaaaatatggcataaaaaaagcccatat

SEQ ID NO: 151226 - DNA, 915 bp, Cannabis sativa
tttgctaatcaaagaattttctcaaaaattgtgtccaattaaaaattttatattaaatattaaactttataactttacataatcatttacaagtgctgggattccgtttctaaactttttgcaaaatatacaaaatacataatctaggttgcacaacgactacaaaataacaaccccagatgtcccgagaccgaagactccaggtcgcgccaccatgacatatacaacctcatcccagctcagttctcactcatgttcagctttcgcctttcctttacctacacatggaagtagaattgtgagtcaacgaactcagtaagaaaagaatataacatatcatataataccgacttgtatctaggtgcccataacacctatttacaaggcttatcagatatgtaagaatgttccatactagggtacaaccactatacaacatacacttgtacctcattgcacgagtgttgttagggtttgatccataccctgagtaccactgagtgatataccacacacaccctctactttgccgtacttgtgcttgtatcaccgtaatgtactccttaacaatatacactataccaatgcactctgtaccatacccatacaagtgttggtagtgtaacaaacatataagaatgcatatacacttaacatatacacatattcgcatattcatattacacattatacacagttcttaccttctttcttgattcaagtgagttggccgacttgaacggaaagtctcatgctggatggatgccctaatcacataataaaattgggtaaatcacatgtccaaaaccctaattcgggaaacccgaacctacaactcaaggttctgtattatcactaggaattacactaacctaggaaacagggaaacacccaacttgttgggttttatgccct

SEQ ID NO: 151227 - DNA, 618 bp, Cannabis sativa
aacctccccacactttttcttactgcaccttcacaaaatttgatcaaaccagctgctaaaattagcagcaacaatcggcctaactctaaccaaaactatttgccagcattgagcaacgaatgaacatgaaataagcatatggaaaatagtttcctcacctttttgacataatttgaactcagaccctctaaccactaattgagtcaaggtgacaaacaatttgaagcagcccgccataccaaattgagaactttcggtggtaccttcaaattccagagcttgcaccatccagaagaatcaactgcaatccaattttttttgagctagtatcttgtatgcactatgcaccgagtagaaactatgatgctccttagaccaaaaaaaaaatgatcattaggctacattcagattcaatggaaccacgccaaaatatgttgttgatcacgctcgttaaaaagatctttaatgatatctaaatcccattccctcttattagtacacatcagcaagttcatcttatggcccaccaaacattgagcatctgaagtaacaaaaggacacacatcatccagaagccatgactgatgcaaaatatcaaccttcacaccagaacctatt

SEQ ID NO: 151228 - DNA, 557 bp, Cannabis sativa
tctctaaactatgaatgtgtattactgtacccctatattttttaatttgttaaaaataatccattaattgttcattagtctttctgtcaaattttgtcacacataacaaacaaaatgatgatataattaattaaccagttgccacatcagcgtcatgtgtataatttaaaattaaaaaaaatatatatatatgtacttttaaaagatcattaaactaaagtcaattaataattacaaaaaatacttaaaactaaattaaaaaacttaaattatttttttcaaattaactaagcacgtagcgttgacatagcactagtgtgtctaaatagccatgtccttgttctatttagcgcgtgtgataaaacttgacaaaatgaccaatttacaatactgtaaatagttcagagactacttttaaaaaattaaaaaatgcaagggtagtcatagttcaagagtaatataagacaaacacacacatttagaagttgactaattaggatttttgccccctaaactttgacttgtaccaaatcatgctcctgaatttttaaggtcgt

SEQ ID NO: 151229 - DNA, 933 bp, Cannabis sativa
agccttgtacaatgacattgtctaacaaataccattgggtatggttgtccagagttttttctatggcttggaacctgcaaggaactctatcttttggcttagaatatgccatgaactctaccttaaccttagcccgatatgtggttcctatagaaactctatccggttcttctttggctataccgttcttgcaaggccttagccttatgcatgtgaacaaattttttattcatattcaacctcaaggcttttatgttcttgcctttggcctataggcactatgttttcaaacactactattatttagccttaaatcctttttactatggacgtatgattgtccttgctatcttcatatggccttgacatgcatgtatccagatttacttttctttatgccaagctgaagtatgcctgcacttaacttagaggcagatttagtagcttattctaagagttaaaatttctctacataagttcttcgtactatttagatgcattgtacggtgtaggttcctcccaagtgagcatgcaaacttatagtctcttagtcacttacaattcaccaagtttcatagaccttgcctgggaattttcttaaggtgttaccaggtgtacgcatgtggaactgaaaaagaataactttaagaagttatctttgttagcgagtggtttagacacatctggtcttacatgtaacaaaagcttacaccttagtatctgcttttaaaatcactcgtggctacccctgcgcgacttaccacgcaaccgccatcactgaagagtgattggaggccatgctaaaacataatgggtactagctcttttatatatggctacctctgcagagcttaccgttcaaaggccatcactgaagagtgatgggaggccatcgcttaagagcgatgggtactagctcttttatgggtccct

SEQ ID NO: 151230 - DNA, 1072 bp, Cannabis sativa
  modified_base (68)..(70): a, c, t, g, unknown or other
aggttaggcatctcgatacgaattttaccacattcttcttcattccgctccaccagaagtagggtttnnnatcttgatacatcttggtggttccgggatgcatggagtatggggtagtatgagcctcttcaagaatttcatttctaagttctgcactacttggaacacaaaccttggtcttaaacaacaacattccactgtctgacactgtaaagtctctggcttggccagctgaaacctcttctctgatctttactaattctggatcagttaactgagcaattttaattcgctccaatagatcagattacagcgtcaagttgtgaagtttgcctacaacaaactcgatgctagatctgaccatgtcttctgccaattgaggtgaaatccgaaccatattagttatctgcccgggacccttcctgctcagggaatcgaccactacattggccttcccaagatggcagaggatctcacaatcttaatccttaaccaactctaactaatgcctctgcctcatattcaagtctttttgagtaaagaagtatttgaggctcttatggtcagtataaatttcacatctctctccgtagagataatgccaccaaatcttcaaagcaaaaaccaccacggtaagttctaggtcatgattcgggtaccgctgttcataatctttcaactgacgagagccataggcaataacccgatcgacctgcatcagtacacaccccagaccctgtctcgatgcgtcacaatacaccacgaacttctcttggtcagaaggtagggctaacactggagctgtgattaacctctgctttagctcttaaaaacttgcttcacaattatctgtccatataaaacactgattctttttggtaagctcggttaagggtgttgaaattttagaaaacccttctacaaaccgacgataataaccagccagacccaagaagctcctaacttctatcactgttttcggtctcggccaatccctgacagattctatctttcctggatccaccttgatcatgtctttgctaacaatgtgcccaagaaaggacacctgaga

SEQ ID NO: 151231 - DNA, 579 bp, Cannabis sativa
acgaaaaaaacaaaataaaaatctaatagttgtgaatcaattttttttggaagaagttgtgaatctaattaaaagttctaatctaccacacccacagtcacgcctttcaagaattcaccaaaccaatcatcaacgtgatctatctttctgtacactctttatagtgctgtaaatttgtgtccatatttattattattttttaaaaaaatatatgtcatgacgtgttaatatttttaaagtgttttacttgtattggtctattttttttaaacaagctaatctatttttacattttaaagtgttttacctttggctagttatacttagaaattttgttgtttgttgttactagtcaaagggtaatacatttggctagttatacttagaaattttgttgttttttagttttttagtattgttgaacttgtgttttaggttgtgtgttaaattctaagtttgtattttaattttaatttgaagaatgccattctaataaaactgtattttttggttttggtgttattatgttttttcagtttcgctacttctgacgacaactattataatgggaaggtattt

SEQ ID NO: 151232 - DNA, 666 bp, Cannabis sativa
  modified_base (468)..(469): a, c, t, g, unknown or other
atacctcttacactatcacttacacattcagacgatggttgtagggtggttgttgcgtggtggttgcattagacgaagatgtcaatcagactatagttgcacggtggttgttaggtggttcgcctaaagttatatcagacaaatgtttcagtcagacatagttgcaaggtagttgttaagtggttggccaaaagttgcatcagacgaaagttttaatcagacgaaagtttctaggtgattgcttggtggttggccgaaggttgtatcagacgaaggtttcaatcagacgaaataactattagcaaaatatttacacaactgtaatgcaactattatgaaacattataaataagaacagtttccacgtacgaaactctatctacatgtgtctttataatttagtatgaacaaattcaccattagaaatttagaaaacaacaaaatacactaggataaatattttactanngtattgatgtaattttttttttttgggattatacttgagttggattgtttgagaactccaattcaactttttgagatctgtctttcatagatttgaattagttttatgcaaattaaactggatttctagttaaattttagtttcgtaatagtttttctacacttttttttttcatgaattcgaaacagctcatgttt

SEQ ID NO: 151233 - DNA, 1010 bp, Cannabis sativa
taagttttacagtattcctaacattcttatcacaaatatatatcatgaatcacatactcaacatatataatatatacaactcatatcatgttatatattatgtatatctcacatatatattatcatataacatattcaaatatcatattatatgtcactatattaatatgacatatacactgatatatataactcatatatacatctcacatataataacataaaaaattcatatctcaacataggaaaatatgttaatatatgttttatataaaaaaaatagtaaatcacaaaatatcacaattcttacccttgtataattatcacaagttgatttcttaccttccattgaagcaaggtaggaaagaataagcttttaattgttaaaaattattgtgctctaataaaaatacccaaaccaacaagattacaactttatgataaataatacaaaggacaaaatcatagattaaataatgttacaacactaaacaaaatatacacataaaatagagagcagagatgaagagaagaattacaactcaaagcaataagctacacataaaacacaatatataaatagcatatatatatataagagatgtgagagcaatctcaacaccacaagtgtataataggggaatcactaaacttgaacaaggtcttacacctttgtccaaaagcttatttccccctaccacaagcacttagagaaaagaaaagaatggaaatagctttctgaatttatcaagcttatagtttctagcaagatgctctctttgatagaaactcacaaaaattgtgtcttcacaagtgaaccaaagtcctctatttatagtgtttaagattacatattttgaaattcaaactcataacccccatgaatgttatgtaactcatgcataactcctatagcattaagaatttcaaattaaaatgtgtacgtaacacctttttacacacttaatattggtgataattgtggaggttacaaaatgtaagtaactcca

SEQ ID NO: 151234 - DNA, 812 bp, Cannabis sativa
ctcattggtactgtctgttgtgaaacgacacagcaaaattactcacaatatatgtaacagagattttcaaattttttttagctaaatgtgataaattaaaaaagtaatttgcgatataaataattaagtttaactacaaatatatacctactttaatttttggcagtataataataactaacttatatttctgaaactctggctattaaatttcaagtcattatcacagtatatctaaattaatttttttttaaaaaataaaaattcatgacctgaactaatcaagaattgtcacgtgacaatttacttaccacttaacaaccaggtatctaaagagttctaaaaatataacttacgtattattgccgcaaaacattaaacttatgtatttatttacaactagaagttaaatttaaatatttatgccacaagttactctaggaaatactaaaggaatacaatttaatatacatgtaaagaatggatagtgcattctctaaacttattttaataatatataaataatgttttatttgtgtatattgtatataggttcaaaatttattatttcaatagggtagaaaataaaaataatattcatttaatgatgtagctagaaaaaaatatatatattataatttgctacacatttctacataatttggtctataaatttttatatacttgaagaaaaaaattatctataagaacttaagagatttttagattagattaagtctagaatatactagttatgttaaactctagaaacatttagatttgtttgcatataattccttctagtaaaagaa

SEQ ID NO: 151235 - DNA, 653 bp, Cannabis sativa
acaaaactagacataaaagataaaatagagggtaaaagaaagaaactagatggtgatatcgctccaggtcttcaagatcgcttcctctcctctttcattgaattttcaggcctgttcttgcttgctttggccttctgagtcgtgttccttatataggaatgaaaggtgtgcctccaattggaaaaaaatctgaattaggtcagcaatctcgatttccgtacctggtcgcgaccaacttaagggctggtcgcgaccacaggcaaaactcgaaaattggagtttctgcaaaatccccctagtcacgaccatggtcgcgaccagataaaagggtcccgactaggctttcttctggtcgcgactactgactcctttttagcagctttggccaaattttcaccagtttatcccatcttttcgtcaattgactgaatctgaactttaatgccctgagaacctgaaacaaggaaaatcaagcgtaaaactgagaaaatgcttaactattagacctgaaacataggctaaatataacctaacaactttccataggctggataagtctctttcatccaactttaacattcagtctcactggtagagttagagactcccaatcggtttttacacttctccaaaatcactactccaccccaaga

SEQ ID NO: 151236 - DNA, 567 bp, Cannabis sativa
aacttgtcccttgtgagcagatgagagttaaccacctgccaaaggataaatctgtgttttggcacaatggttgagctccagatagctttgtggtaattgaccagatttttcgaactagattggtattgtataactagttagtcttgaaacgatccttagctcctgctttaaggatatctgctctcttgaatttctccctcaaatggcataacttgcgccagtaccaactagtgtcagacttgagctcataatcccaaaacctccctgatttcagatagatattatcaatccatttaacccacaagagatcctgtttggtagatatcgcccagacatacttggccaaaattgattgattccacttgactccatttttaaatcttaggccaccataagcctttggcagacaaactttctcccaagaaacaacatggatcttgcttctatttccattcaaaccccaaagaaagtcccgacacagcttttcaacctccttagtaacactatgaggaagaacaaatatactcatccaataattcctaaggccaagtaaaacagagtgaatta

SEQ ID NO: 151237 - DNA, 747 bp, Cannabis sativa
cacaccaattgttggagtttggggatctagatgcctaaagtgatcggtttcacttcttaaaccacttttgggtgtttccacccattctcagaccttgtcgtttgaagattgacctatgggaaccttgctccccttagggaggcagtgctatactctagtcggccattagtactcctgctgatggttggttagccagaggctgcacaatggggggagttactgagctagagatccctggccggccccttgtgctgttggttgccgagatctagctgtttttttcgtttgacctttaaggaaaggtttgtcctccctctagcaagggaagatctaccctagtacttgaggaacttggttgaagtattccttgaagtggatctttgaggagatcttggtcccttctattggttctctagttgaaccgtcttaacagatcactgacctctcgattgcaacaatctaactctgcttggtgagattgaaggatgtactcttggtcattcatccatctcaggaattcacgtctctactgagcgaaaacatctcaatcaacaacgcatggttctttagttaggcttgcacgacctatagtttctctaaacctaaccaactaaaagtcttttcctaggtccaaatggggttcgctaattgcagactcgacaattcctgggcctgtctctccagcgtagaatcggagacgagatccagttgttgttccagggggctgttgttgggttttatgcccta

SEQ ID NO: 151238 - DNA, 505 bp, Cannabis sativa
  modified_base (478)..(479): a, c, t, g, unknown or other
ctataccataagaagcttctataatcatgtcacccacaatacttttcatacaatcccaatactcttttttctaattgcatgagaaatattatgcaaaaactttatgtttatctttttttttttctagatttgacactgattgtcagatttttcttttttttctttttttttttccaagttgtttgtcaatcaaattttttttatattctctcaattttcacaccttttccacacataaaacaaacttccaatccaaattcccccaaactaaagatctacttatggtataattagggttaaatatcttggatattcatgggtttatcttttcagactcaatatgtgtagaacaaagaataggttaaggctcaaaaagggtaactaggataaaattacagggatgacttgataggcacaatcgattcaaaaaaattgcttaaatcactttcctagtcatgcataatttatttatttcgcnncaaatagcaagcaagcaagttctaga

SEQ ID NO: 151239 - DNA, 502 bp, Cannabis sativa
gttgtacacatgttgtgttgatgtaagcagatcctctaaccacatgattaagtgtcgtgttgtttagtaaatatgttgtttatatgaacattttataatcttttgttccgttgggttagtagtagtttcttgttatattatttgagattaatttatatgtaattttcttattgatgttatgaactgactggtttgttttgtgggctaataattttttattattggatgcttatgttttcaattgtgtgttgttatattctcgagaatcattgaattgaaaatatgtagttgaaagtatgtagttcatatgttgttgtgattgttgtcttttaaatttaattgcttacagacaataatattttatatgcttaattttttaaacatatttagtgacactgacttatttatatagaagtaaatggttaatttcactgacttatttattaagcatcacataatcagtaaaattgaggactgatatagaaattatattattttattg

SEQ ID NO: 151240 - DNA, 574 bp, Cannabis sativa
tcttctcaggtgaagtcgccggaagtaatggtggttctctttctcattgaattttcgtttcggttgtgttgggttgctgcgtagttgcacgatggttgcacaatatttttccaagaagcatggatcctgagttgacggtgtgcgtaagtggtattattataatttttgtatatgggctgtatatttatttatttggccagctaaaagtatttttgtaatattattattttttttggttaaaactgaaaaaaaaccatatttaaaaataaaaattatgtaaacattttatataaaaaaaaattaatttaaattaaaaatactaaaaatattatagatagttctaaccacatttttaacttacttagtttaactttgaattaaaataagagataatttcgctcaaagtggagtaagatatttagggtgtgcaaataaatatttctaatgagaaatttgtatatatatatatatatatatttgtacacaaaatgaattgttgcacaaaatttgcatacacatgatattgattgaaataaggtttaaaaaattgagaaaatataatcatgatttgatt

SEQ ID NO: 151241 - DNA, 564 bp, Cannabis sativa
ttataataatgtgaatttatttgttgttaaaaagagaaaagtgaatattattatattctttctcttattagttgaaattagttgtcatatcatataggatattcttttattatttatatatctttttttaatcaatatatcccctattttttgtgtggcaacaatattatatatcctttaatttattacatggaaaatgtataatgtaatttgttatctcttttattgttatgagtcatgattgtaccttagtgtacaagctctcattaagttaaatttaatgtaactcataatttattacaaactgtcaatttaatgtttggcaagaatactagccctagtagttttgttgggtcttttaaatagtatttttaataattattttgtaaagaaaatataaaagaatttttttatttggatccctaagagcgggcagtaaagcggatttagcccactttaacttgaggaaagtacactctataccttttttatattgtcctcttttatttttaccttcttttctaaaatctatcatttttacctctttttttaaacattgtacca

SEQ ID NO: 151242 - DNA, 657 bp, Cannabis sativa
tacaactgaactctccattttttgaccgataatttctctgtagttttttggacaaacaacctatgtttctgtaaaaataattagtaataagatttaatacttttctatttatgaaaaggtataaattttatatatttatttttttatatttatctcgtctgaatatgactttaattgaactgcaatacagagaatatgttttctgcaacatcttcgaacatcacagcatctagcaactcggtaccatcgtcgagttgtacataggtccttttgcactaataatttatacaaaatatataacgattaatatgaatatcaaataagttcaaatattaatttagtgatgatgtgtttaccgtggtgtgggaagacatctttttttgcattttggattctcacaatcagtttcttcattgtcgttgtagaacataagtttcttattacataaatcacacgacatgtaataaaaatcttgattgatgttattaaatatgatttcagcttcaatccaatagtacgctttctgaaaagaaaaaaaaaactatatatgttaaacaaattaatattatattaattataaaaaatcaatgatatttaattaagaagcacaatatatcaacatattgcaaagagaaggaagattacaagaatttctac

SEQ ID NO: 151243 - DNA, 686 bp, Cannabis sativa
  modified_base (27)..(33): a, c, t, g, unknown or other
aaaatagattacattgaaatggagttnnnnnnngggcataaaacctaacaaaaccaagttgttcatgtactaggcgagacgcctcaccaagatacatttggcagcgtgtcctaatccacgtcagtgttgaccccctttaaaaatagtttaaattacagctgtgtgatttttaaatattaactgcatttatttacgtagagcgcaatgaaagccaacaaattcggggcatattgttatgggatttgaacttaaatgtaattaactgcccacctatattactataaatagggccagataatacgaaaaggggacgaaaaatcatatagagaaaaaggagtgtattgattgtaaaaaaccttggttctgtatcagaaaaatctaaataagatagactcatggactatgcagagttaactgcaaaatcacgtaaaaatcttggtgtcatcgttataatttttttatatctgtgcttgatttattaaaaaattggctcatagtcgttaacgaaaatctgcgttaacatttttataaatcataagttagaaaaatgatatttaatatcattttacttatcaaaaaattataaatcgtattttaaatatttaaataacctacaatttttttgtagaaatttgaaaaatgcttaatttgagatattttgatatataatttggataattattatt

SEQ ID NO: 151244 - DNA, 589 bp, Cannabis sativa
aataattatagtcttactaatctagttatacgataattagggattttgtggaaatgaataaataatcgtagtttattaattataaagatgttattagaatatgggggtatcatacatgctgtttatgaaataaaaatattttcaggtcttgcaaccatgcagaccgaattggtggccagaaatgccacagtggtactagtttgtggtatcgatgattgatgtcacccaattagttgcactgcagccgcggtagtaaacttgctatatgtcgtatccacagggaggcaaattaccactaaagattagttaagtaaataaaaaatgataaaaatgtgaataaattaaaaataagaaaatggtgagtgagagagagaatgatcagataaagagtttggtaaggtagaaatgtagttatacaaatcctattcgaataccgatattaattcgaacgcagttgcaattttacaccattaattacaattggaagatatatatgttaaaagcgtaaattaattaatcttgcataaattgaatcttacttctaattttcgagcatatcatattatatatcataaatcgacaaaatacc

SEQ ID NO: 151245 - DNA, 563 bp, Cannabis sativa
  modified_base (409)..(412): a, c, t, g, unknown or other
ttatattttctaaaatttaattaattagaaaaatatatttaagttgaaaattaattttggatcaacttaaattaaaatatttttcttagatatttaattagaattaattatgaagttgattttattcaagaaacatagttatttgtttctaatatttaatacatttaatttaatagaaaattaaatatttaagttgattctattatagatacttaaatattagttattttcaaagatatttaattcgatagaaaattatatttaagttggaaaatttaatgtcagaacaacttaaattagaataaatttcaaaatatattttattttattttattattcatttttccaccaattcaaaattgcattatttaatgcagataatttgatttttttttttgaaaaatagatnnnngttgaaaattaattattttaattaattttagatcaactttaatcaagtaaatttatttataaatgattaattaaaataaataaactaaaatatattacattttaattagaaaataagtaattagttagtgaaatatcttgatagttatttt

SEQ ID NO: 151246 - DNA, 640 bp, Cannabis sativa
tgctgagaagaagttggctgagctggctaaggatttagaggcttctgacaaacttgaggctgccatgacttccttatacaaagaagtgaccgacctctaggaagaaagggatgtttttcgaactgttttccgcaggttggaagcagagaagaagtccaaggaggaggatcttaacgctgaggtagagaggctcaaagggaaggtgaatgccttagagacaattgatctcgagagtttttatgacttttggaaggctaactctcaggaaaattttgattacctaggcgatgcgaaagacattatctcgagtactgtgcttcccaactggcctatggagagtccgaggcaaccacttctacctccgctctgaacgttgacttgccccccgcccagacaacaaatcctccagctccaaccggcctagaagacccgtacaaggaacctgggactccagccgtctaaacacttctcctttgtgatcttttttttatatctgtccgaccataaagccttttttaagacatcgtgaccggccaagcagttgttttcgcagttgttcggtacgaccataaaacttcaggaagttcctctggccagtttcctttagcatccttcagttttttctttagtgtatccttca

SEQ ID NO: 151247 - DNA, 527 bp, Cannabis sativa
tgtttgtgtttttagaaaatagcatttgtgaaaagagtggaaaagaaataaaaagatgatagaaatgaggtccaaagtattgaaaatggcatttttgaaaaaggcccaaattcggcccattttccctctccagccgacagccacaccacgtggcctcctcccattcgtgcgcatatgccaccactagcaccagcaggggcttgtccccctctctcaattccacgcgcgcgtgaggcgcacgacctcatcctagccatgcgtgcgcttcaagcccctgccccgagagtgggcctcgtctctctccttttcccttcagccccaaaagtaaaaattgcacccattttcagccaatcatacggtgccacgtgtcaagttgcacaccaaagccaccaatccaagcttgacacgtggcactttgaattcaactttatatatttacatttttacccacatgaaatttgtaataagtttaattgcacattagtccttttgcccttctataaatagaagcttagaattttagaatt

SEQ ID NO: 151248 - DNA, 701 bp, Cannabis sativa
tctaaggaatagttttaactattctaaaaaagataaaagtcatgaaaacaattccataagcatcaacagtgagaggtctcatgtatgctctgatatgcattagactagacaatcaagttgataagggtggtatattaatactcttagttgataatcaaataaatcttaagatcaaaagaggaactatatgttagtcgataagggtggtatattaacactcttagtctacaacaaatcaagtttctaggcttgcgttaatgctagaaagtctacttatgagatggtgattactctggggtggagcaatgatttttagagaagtgtaaaaacttatctgaagtctctaactctaccaatgagattgaatgttaaagtggcccagaaggctactagataattatttagcctataaaatgttctatgtaatttttggcattattccagtcatggatcaactactagtgttacttcatgataatacaacatagttgccaaacagtaaagagtctaataccctaagaggagtaaacatatatataaaaatttcacaatatctaaaattttgtgactaaggagaagtaatggtggagaaggttgatactatacaacctatcaaatcctattacatagataatactacatactatacttgatttggatatcaagatgttaagattaattgaaatacacttttagtttta

SEQ ID NO: 151249 - DNA, 836 bp, Cannabis sativa
ttctaaatattggggtccacatttaaatttaattcacaaataataatagaataataaaaattagtgctaattgcctttactaatccataaactagagcggtcattacatggactatgtagaattttaaatgcaaaaccacataaaaaatcatgtgtgtttatactttctattttacacctttttttgtgtgtgatattgtcactattaggctcaaatttggttaacaaaaatctgcgttaacagtaacgtctatccaaatagtggttgctaagagtagaacttgcaaggtatgaaacaatggtagaagctcatgatataagaatgaccttgactctcgattaaaacaaagcaacatcagattctcttttcgatcgaataaaaggttactagaatggtgtccattttagttgagctgattgctctattcaatgattgatatctttgactctcgcccaatacgaagcactatatcagtttgttggaaatcttggaaattatttaggattttttgttttgtattttcacttgtcattcctacttgctaagtgcttaataatttctgaatgtgtatgattttgtataaccttatttgatttctatttattgatatttgtagtacccaatatgactatgaacaaccccatggtgtcactattgacttacaacaagctctctagagctaactttgtcaaatggaaagagaacattaatattactctcataggtgataatgcgctgtttgtgttaactgaagaggctcctaagcagccaggtgagaatgcgaccaagacagtcacagaaaagttcaagcgttggcagaatgctaacaataaag

SEQ ID NO: 151250 - DNA, 548 bp, Cannabis sativa
  modified_base (210)..(232): a, c, t, g, unknown or other
ttagaaaaacctcaatcttactttcttagaagatcatcaccactaaatcaattatctctatcaatggattaagataggctttcgctatttgaattattctctttaaattaacaaaatgttttatttaattattatcaaatctatactcataatattaagagttagtctcacattgctaatttgtagaaataaattgtgatatataagatnnnnnnnnnnnnnnnnnnnnnnncaattggttttgagatgaaacctcattcttcttatcccaaatctaacatggtatcagagccacttgtgatccgttgtgagcctaaagtgccaccggtccaaaaagccgtttgtgatccgttgtgagccaaagtgttccgctgtctcccctttaacctccatttgggacctttcggccaatgtgtgccaattttcagtggtggggtctttgacccatttcaaaatccacaaatttcccgacgtgtacacccacaaatttcccgatatttggtcttgtgggattctttcaaatgtcacgttcggtcccgtggtctctt

SEQ ID NO: 151251 - DNA, 1544 bp, Cannabis sativa
  modified_base (1074)..(1077): a, c, t, g, unknown or other
aaatctaatggttgatatttataactattaattaaatttttaaatttaatatttcttattttaacctattacctgatgacatggaagtcattttttatcattttttctattttctcttcattccatatatatatatatatatatatggagagttatattttacacaccataaaataattatgagtgcttatatttacatcccaataaattataagtacacccgtaatctaaatacatcctattttatttatttaaatattatttttaagcacacccctttttatttaataaattaggtttctcttaaaaaaaatgaaatacactccatacaataaatattcaagctactttcatttggatttgtttttttttttttttttgaatctttattatctcttcttcatcattttcttcttttaaataatcattactttttagatttcaaaatatacataggtacttacatatacatctctctttttataattataattaacaatcaattaattttttcatatacataacaataaataaagattttatgatcggaaaaaaataaagtaaatgaatgaaatcttttatatattagtgtatatatataagtgagattcatacgaaaataaatacaaaaaatttagagattataaatttaatgaaataattaaacattttttatgcttacattaaattttctttattgataaaacctcaattattttcctctattaatgattcttttttaagacttgaaggagataattttagttttataagcaaatgaggtgtaattattaaaataaaagttaaaatagactcatcatttaaaattgtatattttgataattttgtacaaggataaaaatttaattaagttttttatttaaattggggtgtattgataatttattagggtgcaaatataatttttcaatattaataactacaccccaataatatatttacgtatttaacctttagtaaaataactaaaataattatttttactccactactaaaaaaactaatttgattgttacaatttttttaagaaaaaaaattattagttaaaaactnnnnaactataaaatcgttcatcaatagataattttgaaatttcatagtaattatcagatataaaagtaatacatttgaaaaattattctattgattcttattatttatgtttatgtttacattatgcttaaatttgcaaaaatttaatgattcataatatatagatattgttactagatctttatccatttgtcatttttttctttttaatttttttttataacacaatacatgtaatgcatcatttttcataaaacaattaaatgcagagaagtaaatcatggaaagtcttcttattctttgagcttttttttttcttaaaaaaaaaattaaagaagattttgaggtgtactaaataatacatttttgtaaataaagtggggtgttgttataaaagttaatatttaatggggtaaatttagtagggaaatttcaatttttgaccctaataatacaagccatatcaaaat

SEQ ID NO: 151252 - DNA, 575 bp, Cannabis sativa
gtttattctgttacatcctctgcgcctgatatatgttatgacgagtctcttgttttttcacctgtctcgatcgtagctcccgcaatgcctacacctctagcacctccaccacttcctagtttcctataatgtagtgtataccatgcgtccacctcctgtttcatgtcttgcaactgcatcttcgtcatcagatccagaactcaaaaataatcttcccattgcactacgtaaaggtaaacgccaatgtatatatcatattttttcttttgtttctcataatcatgtctcattttcttcttactcttttattgcttctcttaattctatcacaattcctaaaactgttctgaagctatgtctcatcctggttgactagctgcaatgatagaagagatgaatactttagctgcaaatagtacttgggacttggttaatttaccttcaagaaaatgagtcattgggtgcaaattggtgtttacggtcaaattcaatcaagatggaacaattgttcgcttaaaggcccatcttgttgccaagggttatgctcaaacttatggagtggactattgtgatac

SEQ ID NO: 151253 - DNA, 664 bp, Cannabis sativa
  modified_base (36)..(48): a, c, t, g, unknown or other
ttgatcttagaacaaaagatcttaatcctgatatgnnnnnnnnnnnnntcaagagtgttatttatgttcttacaaatgttcgttatagcttactaattgcttcgggctaagacatacatcttgggaacatgatagtgtaattgagtgagagtgctaatcataaatatagaatctatagcttctatttagacatagaagtaaaataataatttccttcgaacttgtcttaatagagataaatagaagagctcttatttcagtaataatattagtttactgaaatattatttatagaaaactaaatattttaagggcaaaatacattgagaacggtaaatttatccctactcgatgtaaattatctatagaggatctttgattatttagattagaacgataaaaaattaatggtgtatctatatcttagaacatatagagcgttctatataattaagaaagtaattccgaatctatagtgatgcaagggggaattaaaaagttaaagaatttacttggtaaattctagatctacttattaaaatcttgactatataggaccatgatcccaacactagttgagataatactgcttgtagactcagttatttgattttaattaatcaattataactctaaaattagattatgtcttatttataaattt

SEQ ID NO: 151254 - DNA, 1111 bp, Cannabis sativa
  modified_base (129)..(132): a, c, t, g, unknown or other
  modified_base (517)..(517): a, c, t, g, unknown or other
  modified_base (586)..(602): a, c, t, g, unknown or other
attagcaatttaacgccgtagaatcttgagagataagtattattgtaagtattttattcttagtaacgtccaccccatagtggctgctaagagtatgacttacaaggtatgaaataatggtggaagctnnnnagatagaatggccttgactctcgcataaacgggacaatgccggattgtagtcttgatcgaataaaaggttgctagaatgatatccattttagataaattgactactctattcaatgaatgatatctttgactcttgcccaaacgggacactgtattagtttgttggaaatcttggaaatattttaagatgtgcttgttttgcattttcacatttcttacttgttaattgtatgataatttttgaatgtgtatgaatttatattgaaccatgttgttgtctgttattaattgtggtagtttaattttgaatcttcattgttggtctaatttagcttgttatttttaatggggaaaattccaaaggattgtcatccattagacaaanataatagtgttagatctcgacagataagtatttgtacatgcaacatctagttgtacatccaaagatgannnnnnnnnnnnnnnnntacaatatgaaacaatgaagaaataataaaataagaataactttgactctcccctaaacgtgctaaacgtgacatcgttgacatcgttatattcttattttaatcgaaattatcctttagttatttcctcttagcttttttatttagatttttcttagatagtatgtcattggatgaatgtttataaatcatatgctgatgatgtcatattattttcttctataaaattgaatggcgcaaatgacttctcgactatcctgaaatgatataaatccttgatcttagattatctcctacttgtatatgtttactttaggtaacttagacttagagttagaatagcagtggtggtccaagctagaatcattactcaagttattttgtataaatttaggtctttgactatgaattttagattctaaatataaattttttaatttttgtttctagaatacattgatcaatacagtatgacctttacaagctgttaatatccattttctgtcaat

SEQ ID NO: 151255 - DNA, 666 bp, Cannabis sativa
caaaaatcaaaacaaactctacagatgctaatcgaaggtgccgagataactcatcattgaagctactcaaagctttcgtcatcaaaattcagtcattccttatataaaaccttagatcaaaaacttcgatgtgagattcaaaacttcaattgtcagattcagtcaatgctactcgaagctactaagacaacacttacctgtgaatttcagtcgatcatttcacaagaactaaacttttggaaaagaaaataactatgcttccttcgatcgtttcaagaatcatcgttaaacaaaggagatatcacgttcaacctctgtacactgaaagagaaaaaagcaacatgatcacagctcctagaatctgatttacacagaaaaagtttcaaaaaccagtaagctttttcatatttaataagaaactaaacatataatttatataacattgattacttctatctaaaactacgactctcttctataacagaatcatggaacatttattgttggtactatactacaatggaaaatttgtagatagatgcttatgcagagattatcaagtaacaggtatactgatacaaagaggtttctcataccaagaactgagaacactaatatgtcattatttggaataaacaacagcaccactgttcttgaaatacaatt

SEQ ID NO: 151256 - DNA, 615 bp, Cannabis sativa
ctttccattacatctttagccaaatctatagcactcttccctctcatcttttatcaccatcatctcatgtctattgatctaagcagcttaaagtatttgaggtaataaactctacatttactcatttattgatcacaataggagaatattcgtaggtctcattttcttatttttttctcaaaatgaaacatgtcttagtaaaagtagtgtatctctttaaatactcatctaattctcacaaccttagtgcctctagaaagcttattaaattttccataattcttatgaagaaagattttactgaattggaacttatctatgttgaaaattagtatttctacgttgtttgttgtaaatcgttttttcatatttttttatataagttgtcttagtaaaacctaaatatctctctgaatactgatccgattatagtgatcttagtaccgttgaaaagataattcaattttctaaatgttttatgaagaaatcattcactaattatttattattctaggttaaaattattgttttattgttgtagtctaaaatccatttgcttcaggatttctaaaaaactgtttcggtaaaatatctatatctcctacattataagtc

SEQ ID NO: 151257 - DNA, 634 bp, Cannabis sativa
gccagtccttctgtggtgacaagtcatctccttgtcaacaactccctgtatacagtattatttgagtcaggagctacatggtcatatgtagctacactagtaattgatcttttgggtaggccttgtgatatacttgaaagagggcttggaaccctaaagcctagcagggagttggttatctctaataggcgcattaggtctatgccagttaggatcgaggataggaagttaagtgctgaccttatagaacataaattaacagagtttcacattatacttgggatggattttttgtccaagtattcggccagtatagactgtaagcaaaaaatggtgacttttcagctagaaagtgaggatccatttgtttatgttggatcagttcagggttctcagatcccggttatttcagtactaagagctagggatctacaacacagtggatgtgtaggatttttagcggtggtgattgactctagcagacctgaaacatttggggctaaagtagtcagagttgttaaagattttctcaacgtgtttctcgaggagttttcgggattaccgccgcaacgagaaattgattttgtgattgatctggatcctggatttgaacctgtttctaaagctccatata

SEQ ID NO: 151258 - DNA, 748 bp, Cannabis sativa
  modified_base (338)..(341): a, c, t, g, unknown or other
  modified_base (691)..(692): a, c, t, g, unknown or other
gggacctgaaccagaaccagactgtgacccgtgatagtgatccagatcttgactagggatttgggtaacggggcctggaaaagaccagtggtctgtgtctaaaactgggactcagactaggacaagaacctagacgaagaaccagacccttacccagacctagacctgggacccaaaattaaaacctgaataagaatcgccgaaccaggagcctagaacaagactaggaccaagatcaggacgcggacgcggacccagacctagaaccgaacacagacctagcctaacacccaaactgagactggaactcgggctcggacacggtcgtgtacccagannnnaactgagacccggacatggacctaaatctgggacccgatcctaaacacagacttggacttagatagggatccggatacaaacctggactcggaccaagatccagaatgggatcgaaatgctggaccgagatctggaccgagatcctgacccacacccaaacttggacccgcactcgggaccctaacttggacatgtacccgaacctaaacccagattggggttcaggccttgagacaaacacggacaaaaactcggacccaaactcaaacacccacacatagaatcagacccaaagctagactcgaaccaagaccaaaactcaaacccagaccaggatcagaaccaaggnnttagacccagaactgaatccagactcagatcgggattaaaacttgggactcggacc

SEQ ID NO: 151259 - DNA, 511 bp, Cannabis sativa
cacaaaaatacaagtaaaatttgtgttttttaaaaaataaaattgtgttctataaccaacttttgtttttttaattttgaaaatagaaaataaaagtgtcttcgataattttatttttttgattttatttaagtcgggtccaagtccgaatctggggccggatcgtggtccatcggagactggagtcgaggctgaagttcgggtcccaaggtttatgttggagtcaaagtccaatatatttattaaaaaaaattaaaaaaattgaaagtgatttttttcttcaaattttttaaaattttgattctctattaaaaaattaaaaaataaaaacagttttatagaacgtatttttggaaaatattttcacttttttaattaaaaaaatagaaaattaattaaaaatgtgttaccaaacgcacattacctttagtattgaaaaattattttgaagacctatacattgtattaatattattatacatataaataaatttaaataattaaatattat

SEQ ID NO: 151260 - DNA, 854 bp, Cannabis sativa
  modified_base (812)..(814): a, c, t, g, unknown or other
gtgggattccaaaacacacaggtaatattttggtaatccgaaaatagttacagtttttttctcctctttttctctctgtttttctctcttaaaatcagtaataatttttcttcttctctttctgttgcatgaacgatctccttggcttcttggatatctgaaccctaatcctagggttccaaagcttaccccactgtaagcttcctccaaagaactcaatctgatttctgtgacaacttgtgtactgatttgattttcttattgtatatactgatctaaagttgtattaatctgattctgatattctgtgttgttgttgttgtattttctggctttttatatgtgctgtagaggagagcagagataggagagttagttacaaagtgttaacagactttgtaaataacttaaatactctgtctaggttgcttagaggccgaaggccacataaggtttttactgcttgtaatctttgataaatgttctcgttttacagtgaatgtggggatttactttcaacacttagtgtaatgtgcgtgctaaggtggcacgttacaagctaggtgatgcccacaagttggccaagcagtggtcaagtggtggcgcatgttgatatgcatgctggtggcatgctgatgcttagtttgtacggtagtagcattttcgtaaatatctttagtattgtccaaattgcgacgagacttggtattcgctatttatttgggtctacgaatacaatggtgcaatcagatttgagaaactttgtgatttagtatatggtttgaccatgtgtctgttgggttttatgcccnnnataaaactcatttcaatacaatcagatttacttattaata

SEQ ID NO: 151261 - DNA, 582 bp, Cannabis sativa
gcccagactagatccggactgagatccgaactagaacagggaccccgaaccttggaccttgaccccggaccccagcgttggacctagacccagaccctggccccagacccggtcctaaccccggacccgacttaaataaaattaacaaatgaaaataaaaaaaaaaaattacagaacatacttttttttttatttttataattgaaaaataaaagtagttgtagaagtcaattttattttcaaaaacaaatttaaaaagaaaatgtggtgttcggtaacacttttattttttatttttttaatcacaaaaatgaaagtaaaatttgtgtttttaaaatttgtttttaaaaaataaaaatgtgttctataatcatttttgttttttaattttaaaaatagaaaacaaaagtatgttctataacttttattttttgattttatttaggtcgggtttaggtccaggtatggggacatggccgtggtcggagtccgagaatgaggctgaggccagagtctgggtcccaaggtctaggttagagtcgaagtccaaaatattgattaagaaaaaaaatatttaaaaaa

SEQ ID NO: 151262 - DNA, 516 bp, Cannabis sativa
attagccgaaaactgaagggactcctagtcagagtcacgtcggatcacaaacaaatgcatccaacacatgtcactcatctacatgcaaggtcggctcaagtgaagtctacacatgacttcggaagccccgtgcagacttgggggacaaatgttatcccattttctgcactatgacgaggcagcacatgctagtgacacgtggaccttattccctacatttggctaaagaaatattccgaatagaactcagcatacacctgcacggatgatgtcttcccagccgagcagtagacaatctaagtagcgcatcagcacttagcagttccaagacttgcatcatgaagcataaaagcaatccctataagtctgggatcatatcatagagatatgacaagttgtccaaatcccacaatcagtgtgttctaaatatgtaatatatgttcttaccaactatagacattgtaagcaaaaaggaaatcttccctcaagcatttaaccctataaatagtgatccat

SEQ ID NO: 151263 - DNA, 524 bp, Cannabis sativa
tgcagaaagatttgcttctggttttggtctagttgtggaggagtgcgaattgcgcgcgcatttcattctatttttttttttgaataaaaagtgttctttattaacttgagcaatcgctcttcagaatagtctacatataacatttaggtatttttttaaattattttttatacggttataacttattagttgaatgagtagatattttagttttatttaattattaaataatgaattttttgacttaataaaaaattaaaaattataaaacattaatatgtgtgtataatttttatttaaatttttaattaattaataaaataatattataaacttaataaaaaaaatcttaaaataagagaattaatcaatcatctattaataaaaaataaaaataatgagagaattagggagagaatagataaaagtatttgaggtgattatagaccgctacatcaccgtctcatacttctcctttatatatatctattctatataaagtgtgcctatataaccgaattctt

SEQ ID NO: 151264 - DNA, 800 bp, Cannabis sativa
  modified_base (506)..(512): a, c, t, g, unknown or other
acactcggtactcatcatatatcactaacgctcgtacttatgcccagtacgtcgccaggaaaatcgcatcacctaatcaagtgagcccataatcacatgcttttattatcatcacattattaatactcaaccaatcaatcttttcattatataacaatattgattatatctcaatattaatcatttcattgcaatactaattgtattacatacaacgtactatgcagtacaatatactattcttacctttaatccaggttcatacatgtcgtccaatccaagtggagaactatccccaataatctcggccctatgtcacaataacgggaaaccaataagtattttctaccaaatcccacggtgtaaatacacttaaataaaacttatattttagctctaaaacatacatcatatggtagatctcgtcgcaagcttcaaaacaatatatagaacgtccgaaatggacacccgagtcaaaagttatgacaaaaatacgatttatgatnnnnnnngaatttctaaaaactatgaaactcgaaaatctttattttcgcactcaccgaaacactaccaaaacttatccaaatcccttcaaacttcacaggacgcatatataccataaatattactatccttgtgtaacagaaattaaaatcgagcccttaaatgaaaaacgacattaacgttcggactaaggtttaaaaacttcaaaactcgaattctaactcaaaatcacatcaaattcatcaagaaaacatcggaactagtcccatgactaaccgagaataatcttataaggt

SEQ ID NO: 151265 - DNA, 501 bp, Cannabis sativa
tcacctgatgctatttttttttatgtataaaaacattaaaaaaaaaattggtagcagatatggtctgatgggtccgatggtggtctgatgggtggtccgatatagggtccgattgtgtctgatggggggtccgattatgtaaatgggggtgatgtaaagggagggtattttagggatatcataaaagttgtcatatcctataaatattagttattatttgtttaggaaaaaaaatttaacgaaatataagcataaaaaatcaaatttcccaatgatatttaatttaatttgataaaatactttaaataaaacttagatatttttcttaagagatttcattaaatatgaaaattatatttatgttgaaacttaattcatttattaattttttatcaacataaattagaataattttttctaaatttattttattttatttttaaggtgtaatttgaaaatatatttttaaatacattagatttcgaatttaattagatatat

SEQ ID NO: 151266 - DNA, 1596 bp, Cannabis sativa
tgcaaatagttatgaatataaaatttatattgcactctttttttttagctcatgttttgtcccactgggtttttctgacaaggtttctaacgaggcatctttaaatcatgttaatatacttgcagtttatgaagcaagtagagaatgtgtgggtgtgagatcattgacatagcatattcaggaaacatatggattacactcaataaagaagtatcaacacaagtagtactctatgaagataatactacttgtatcgctcaattaaaaggagggtacattgaaggagatataatgaaaacacatttcaccaaattcttctttatgcatttcaagaaaatacattggtgttcaataaattcaatcaagtgtcaatcttccagacttattcaaaaagtcattaccaacatcaaagaagatagctcacaagattagaatttgtcgattaaaagatatccacgaatgcctaaataaaggggagttaattcataccgcactatttttcttttgaccaagtttttcagcaagatttttaatgagacaatttttatgaacatccaagggagagtgtaatgaaatattatttatagatgttcaaatcactaaattaattatcatcattaatgcttgattgtatttctttttattatattgatttagtttcctattttttagtcatatttttgtataaataagaattcacctatttgaataaataactgagaaattttgattcatttttttttcatcttctctttctttttcttatttattttatattactagtttttggccgtgcattgcacgtgtaatgtaacaaatataattaacgatcacatattattattattattagggtaaatattattttaaaacatgtgtttctaaaaattattaattaaattctttattttgttaaataataaaatagaccctatattttctaaaatgttacaaataagaccttgagctgagtttttgtcaaaataaaacttaataataatctgatctaatgttatgacaaaactggttatatttttatgtatttgttcgtgttaggaaatatcttcaactttgttatattaaaaaaaatttcaaaaattgaactcagggtcctatttttactattttacaaaacacatggttcatattatcatttaagaaaacataaaatacatggttcaaaatgttatttaaccttattattaatattaattattcatctttagtttatttttagaaaatcaccccatatatgattttttaacttttttttaaattattttacggtttaggttgctcaaatagttactatttgggttgctatgtgaatttagattgagaaaaaaaaatataaaatgttttaaataaatacaacgtttatgattattaaaaaaattgaatgaaagaaatctctcaaatactgaaataaataaaagtgtatcaatatatatatatttttttaaggaaatgtattgtataattttccaacagatataatagctttaaaaaaaattataaaatgttaattgaagaagaaaaaaaaaagacaaaaaaattatatatatcttagaatgtgagaaaaaaaaaacgaaaaag

SEQ ID NO: 151267 - DNA, 1206 bp, Cannabis sativa
tgggtacgggtttttcggatcccaatctaggtctaggtttgattcctgggtctgggtcccaggttcgtgtctgggtctacatctgggttcggctccaggtccagtgttttgatcctggtctgggtctgggtcagtattcgggtcttggtttgatctcgaatcccaatttaggtcaggggctttgtttgatttcgagatcgagtcctgattttgggttcaagtcttagtcctagtttgggtcgaggactgggtccgaggccgagttctcgggttgggttctggtgtaattcgggtccccgcccaggtcgaggtactagtcacagtctcggtcctgttccagggtcctagccacactctgattcaagtttttgtttcgggtccaaggtcttggtctgggtccaggtattggtccagcttcgagtttttgttcgagtcccagatcaagacatcgactatgggtcttgtccaagccccggttctcggatcctgggacaagatctggatcctaatcatgggtcccaatcgagtttaaattcatgccccaggtcccgctctgggtatgggtctaggtgtgggaccgagactggggtccagttttgggtctcaatcccagttttgggtcccgagtcctgttcaatgttcgagtctgagatcaggtcagggttccggtgccgagtcccggtttaggttcacgttcaggttttggacccaatcccggggtgggtctatgtccgagtccaggtccaggtccggttacagttttgggtctgggtccaagtcctggtcctgggtcccgatccgcttctagtttcggttccagtttcaagtaacatggtatggcttcgggtcgagttttggttcgagtctaggttcgggtcctgatttgggtctggggtgaggttcaggtctgatttttggtctcggttagggtccgaggatgggtttggtttcgatttcgggttcgggtttaggtcccggtaccgttccaagatcccggtctggttccagttcaagtctcaattttggttcccgtgtgtgggccctggtctttgtatgtgtccgggtcctagtttgagttggagtttgagtttgggttctggtctaggtcctagatccagacattgactacgggttgggtccaagcatcgagtcccgaatcccaggtccctagtgttgggttttgtgccctaaataaaaccctttaca

SEQ ID NO: 151268 - DNA, 717 bp, Cannabis sativa
  modified_base (402)..(404): a, c, t, g, unknown or other
  modified_base (430)..(443): a, c, t, g, unknown or other
aaattaaactggatttttggttgaattttagtttcgtagtagtttttctatactttttttatgaattcggaacagcccttgttttgattgattttggtcgtggttctgtttctggttgaattttcattttagttgcgttgggttgctgcgtggttgcgcgatggttgggcgatagttgcccagaaagcatagattttgggttgaaggtgtgtgaaagtggtatttgtataatttttttttttattttagctgtatatttgtttatttggccagctgcaggaagtatttttgtaatattgttactttttttttggttaaaactaaaaaaagccattattttttgtaagaagattttagttaaactaaagtggcgttttataacatttttttaatcagttttcnnnttttaaaattgaaaaagtgaaaatannnnnnnnnnnnnngttctataaaactgttttcattttcaatttttaattgaaaatcaaaattttaaaaacataaaaaaattacttttaatatttttgtaaacagttttttttcttaatcaatattttagactccgactacacccggacccgaatctcctcccacggccttggcgctgaacccggcctctgcccaaacccaaattcgaccccggatctagacgacttaaataatatcaaaaaataaaatgaaaataaactttacagaacacacttttgttttttgttt

SEQ ID NO: 151269 - DNA, 580 bp, Cannabis sativa
taattttttcatttagatcattttggaattgatttcatgatttttggacgtcggaaaatagttttatggtcgggttttgggtcgggttgaacggacccgcgtgcagtaatcggatcaaaactgaccccgctggaggtaggagacgactccatacgacatgtcttttttctcatgtgaaaaactacatgtcgttttcggtagagagtttttgaacccactccatacgacgtgtcgtttttcccttacgtgaaaaataatatgtcgtttttcagtataaatttttgaacccaaggtcgtacgacgtgtcgttttttcttatgttaaaaacgacaagttgttttccagcatgaagcatttgagtccgactccatacaacgtgtcgttttttaggcagtgattttgaacaaaaaaaaaaagaaaattccaaatttttataatttttttttatttatatggaatataaattattttcctattttgtgttgatttagtcaataaattatattcattcaatttccatttttaatttaatacatatatttagaattaatatgttatttagtataaattgaaaatggaa

SEQ ID NO: 151270 - DNA, 885 bp, Cannabis sativa
aagaaagttgagacagatgctacagaggatttcttggtgacaccaagtagattgttaagatataaagatagagtttgtgttccagtagatgatcagattaagagagaaatcattgataagtttcatattactccatactctttacatctgggaacaacgaagatgtatcatgatatcaaggtactataatggttgtcgggaatgaaaagtgacatagttgagtaactttggaagtgtttgacttgtcaacaagtgaaagcaaagcatcagaggcaagtatgtttacttcaacctttgagagtgcccgaatggaagtgggaagatataaccatggactttgtggtaggtttacctaagaccacagggttatatgattctatatgggtagtagtgcatagatttaccaacttagtgcacttttttcctgtgcgtacaatttatactgtggattaatatgctaaattgtacataaaggaaatagttcgactccatggtgctctgaagtcgattgtttcagactgtgaatttacttctaaattttgggagattttatagattgtcatgggaattacgttgaaatttagtatagcttttcatcctcaaatggatggtttgtttgagagaagtattcatttattaaaagagttgcaagcatgtgtgattgattttgagggttcctagaacaatttctacctttgattgagttctcgtacaataacagttattagggtaccattagcatggcacctcacgagatgttgtatgggagaaattatcgatcacctattcagtgggatgaagtcagtaagaaacggtaccttcgacataagtggttcagaggactagtgaagccattgaaaagatttgatctcgtatgcttgcttc

SEQ ID NO: 151271 - DNA, 762 bp, Cannabis sativa
  modified_base (697)..(697): a, c, t, g, unknown or other
ccgaggaattgaagctaatccagacaagattcaagccctcctggatatgaactcgccaaaaaaaccaaagaagtgcaaagcttaactggtcggatcgccgcgctctgcatattcgtttaaaaatcaatagacaagtgtgtcccattcttcaacatcatgtgaggaaacaagcagttcaagtggacagaagagtgtgaaaaagcttttcaagagctaaaagcacaacttgcaaaacctctcgtactctcaaaacctttggacggtgaggaacagggaatatacttagctgtcacggaacatgccgtgagtgccatactaataagagaagagaatagcgtacaacacccagaacaacaatcaaaggccaagccttggcagactttgtggtagaatgcgtaggaaaaaaaaagaaagcataccaaaaagcaaccccgagctggtacaaacacctcagccatgtcacaatgaagataagccgacctggaaactacatgtagatgggtcggctatagatcaactatctggtgcaggaattgcccttgacacgcctggggggcaacacctgcacgttacagtcaagttagaattcaaagcatctaacaacgaagccgagtacgaagctctaatcgctgggctaagactagcccaggagatgaagggagaacacaatgaaatctgtagtgattcacagctggtngtaaatcatgtatccggagaatacgaggctcggggagaaaagatgatagcgtatctgagaaaaat

SEQ ID NO: 151272 - DNA, 784 bp, Cannabis sativa
aatcgttagcatgcgaacttaccaggtgaccaaataacttgctcaattccttcttaatttgtttcagctcagcaagtaagtctttcatcatctcgtaatttgtcacaataaatgcttgtaactcaacaatagtgtcatttagggaacgagtgtatggatgttgagagttataagaataccaaggatcttcctcttcacaattctactcatataatggattatagtcgtactcaggcttctaactataatcatcaaaactattgtgaataaaccaaggatcttcctcttcatcatagggatgtgcattagatgatgtatgttcataaggacgtggtcgatgagactcgtaccaagcctttcactttttagaattcttgttagactaaaatataatatgaaataaagcatatatgaacgatatgaatagcaaaataaattgtaaacatatcgaaattgtacatgcatataatatgaaataaaacatatatgaatgatatgaatagagaaattaactataaacatatcgaaactgtacatgcaatgaaaggattgaaatacctcaagctattgatgtttgggcttcaatccttgccatagtttcggtatgggaattcaggctttctcgctctctctttagatggaatcttgttgtttgcacataatgagtggtgagctcgggcactgagaccctatatttatataggtgagaccttccatcaaggtctctgccacaattaattgtcaaaatattttgacaatcaattctggaaattaaatcgggtaa

SEQ ID NO: 151273 - DNA, 728 bp, Cannabis sativa
ttacgtttaaattttttttttacattttatagtttttcataaaaataacataaaaacaacaagaaaactacataaaaataatatcattaacaaaaaataatatccatataacaaaaaatcaataacaaattaacaagataacaacataaaaaaaaatagtatttttgataaataaaataaaaaaactgtaaaaatatttagaattttgcaaaactatatttttataattttttttattatttttatatatttgtgaaattatctctaatacaaatccacattatgcgtttaaaaacaaagtagcaattttcttttagaaaaaaaaaaaaaaacttttttacagatgtagttaaaaaagatatcataattttttaaatcatttcttgtatgtaatacaaagtatgtgtggtagtagatgttaaatacgtgtacatatttggactaaaattttatgacaattattactagaaaaaccatctaaattaaattttgaaaagaaaaaacattaaaagcaaatgattattgtatattcttatttaatttaataaaaaagaacataataaaatgagagagagaggagtggagtgggggaaaccctaggcaagagagcatcgagtatatcgaagccgtaagtcacgtgttcaagagagaagacacacgtgcctccactaagctctctctcatttttatttttatttctatttgttttatttatttatttttttaaa

SEQ ID NO: 151274 - DNA, 535 bp, Cannabis sativa
gaggcatttaaggactgactgctggctgctttatatcttgaatcaagtgcctagcaagtctgtcccaaagacaccatacaagttgtggtcaggaaagaaatcgagtttgcgtcattttcatgtttagggatgtaaagctgaagtaaggccctataacccacaatctaagaagcttgatccgaagactatcagtggctattttgtaggctacactattggttcgagaggttttaggttctattgtccttctcacaccaccagggtgataaaatcagatagagctatctattttgaagatgaatttggttcaagtcaagggtcaagagaaattgtattcagggaagaatatttatgtccctgtacctgttgcttccgcttatgctcctactaatgatcatgtgattgaacaaattccaacaggagctcatgatgaatctcagaatcatatgcaagatgaagatcatgatattgagggtggtgaagttgtgttgagaagatcagaaagagctcgcaagcctgctattcatgatgacta

SEQ ID NO: 151275 - DNA, 609 bp, Cannabis sativa
gagatggatattaatatgcctctgctctccggctgtttctttggtctggtttcaagagttaaacgttggctccaatttaagtatgagcatattggtatttttcgttataattgtggttgcttgggccatcaacagaggggttgttctttgtcgtctccagttactgtggctaacagcaatagagtttcctttcccctgtttgggtcatggttgtctacttcctcaacttacttggatgtgtttttgggtgccaatactttcactctgaatcttacaatgtcgaaaaaattggtgcctggattcacttgtcaccgtctccctctagcgatcgctggggcttctcacgatgacaatggtgggttcaaggggatggctcccaatggttcccgtttctcgaggcagagcaagatggtgactaatcgtgcaatttttcccgttggtacttctcactttctctgcatgcaaaatggatccccaagtcgaggtctacgtaagttgtaccaccgttatctggttttggtaataaggttgatgttggaggtgatggtatgggaaatgtgttgggttttatgccctaaataaaactctttacaatatgattagttatca

SEQ ID NO: 151276 - DNA, 533 bp, Cannabis sativa
atttatttcaatctagttttttttttcttttaagtttaaattggaaatgcacatattcgatgtatttttcttttgcagtatatatatacctataatattcatagtataatttatataattgtacctgttttttattttgatcgctgttgacagggacgatcggagttggcttgatttgttgattgaattttgtgtgtgcaggttgatcggtgctttgagcttaagaattctttttctgctttaaggtgagagcttcattgcttttcaggtgccgatggtgttggttgcttctgtctgtatgtccatggctgaattttatattttctgagtttttctggtcagtgttgtttgaatcagaggaataatttgcgcatggagaaaagaggaattgaatcagagaagatggagaagagaattgcaggctagaatcgaaggagagagaagagagaatcgcaggagagagagaagagagaatcgagaatcgcaggagagagatagagagaaagaaaggagagagagagagagggagagag

SEQ ID NO: 151277 - DNA, 604 bp, Cannabis sativa
tctttatgttaaagacctcatgatcaatctctatctttttacaatgaatgaaaccaatctctatcttttggaccaattttctttggcaaaaacaattctattctatgttttacattttgtttaactctttgtacaattccatcttgaccttctatatgattattccatatttggtcatttcgggaatgccaaatggaatagactaaatgggcagcagctgctgcaagaacattctttctaaacttgtttatttttgccttgtgtatccacttgagaagctgctataagtcactggtacgagctccccacgacagccactctttgacatgttgtagacagcctactgagaatggacacctgaaaaaaaaaaaaaaaaaaggtggtcatgtgtctcgggtagcagcagtgagcacaagttgcagctcgggtcatctagcatctgaaaacgctgcaatctatccttggttcggaggcgattctgcacaaccaaccataaaataaagttgtgctttggtgtgttgaaacgactccaaacctcattgctccatgtgactctactccgtgttggaatgatcaactcatagccatctgagatcttgtattt

SEQ ID NO: 151278 - DNA, 844 bp, Cannabis sativa
  modified_base (799)..(804): a, c, t, g, unknown or other
gctaacagaacttgggtttaggagattttaccaccaaaattttagattagggcgttagttgcaaaaacctgacccctttaggaggttatgccgcaaataactctaaagtaaatgactaatatattcacctaaatacaacataaacatccagccccaatccccaccaatatcatttttcttcttctcttctttatttcttcatctcttcatttctccacctcaaccaacctcaataataagcgcaaccattattttttcttctcttcatcttactatttcttctttagattttttttcataaacttatctccatctcttctccttaaatcggtcatctactcccttaatattcctaaaaataaaaccctaatttataatcaatccaatctccatagataaaactaagaaattcttttagtttaatcacggatgcgataagttttattatatatattttccaatttatacaaatatatcatattatacccccataacataatacatatacatttttttttttttttttataaacaacatatacatattcatgagcatcatcctctacttcatgtaaaacaaatagaatataaattgagatttttttcgttctttttcgtgttaaatttaaagttaatcttttttgtgttaaatttaaagttaagttttggcttggttggattttggttctctaattcatgtatttttttttcttattttatgaagaaatcctattttatttgttttgttatctaaatttaaaatcataaaatcccgtctattcccgacattcccaatgtcnnnnnntattgccccgctatactaaaaatactaggatgtgattcta

SEQ ID NO: 151279 - DNA, 1060 bp, Cannabis sativa
  modified_base (1007)..(1015): a, c, t, g, unknown or other
tattggtttcaccaaaactagaggcgtcgctagatgcctttttatgttctgaaaggcctcttcgcactctttcgtcacttaaactttttgttgccacgcaatatattgaagaacgacacacacttatcagttaacttcgaaatgaatttgttaagtgcagccattcttcctgtcagggcttgtacttccttaggctttgtcaatgatggcatgtcaattaatgccttgatcttttcgagatttgctttaatacccctcgcgttaactatgaatcccaaaaaatttcctgaggaaactccaaaggaacatttttttgggttcaacttcatgttatacttctttaatatctcgaagcatttcgcgaggtctgtggtatgatccctactttttattaattttaccaacatatcatcgacataaacctccatgttccacccgatttagtttgcgaacattttatttaccgatcactgatatgttgccccagcattctttgacccaaaaggcataactttgtaacaatagagccccatgttggttacgaagctcgtatgctcctgatctgagacatacatttttttctggttatatcccaaatatgcatccataaatgacataagctcaagcctagcagttgcatccactaactagtcgatcctgggtagtggaaaataatatttttggcacgccttattcaagtcagtgaagtcaatacaagttctccaagttccgttaggctttgggacgagaatagaattggctatccacgagggataaaacacctcgcgtataaagtcgttgactaacaacttgtccacttcctgttttagtgccccttgtctctcggaatcgaagggtctccttttctgcctcttagctgggtagtttggatcaacatttaaatgatggcagataatattagggtcaatccctatcatatctccatgactccaggcaaattgattctggttcaccttcaaaaaatttattagctgctatttgagctnnnnnnnnnggttcttcccaatgtatacacattttgtgggatttcctgggtcga

SEQ ID NO: 151280 - DNA, 1054 bp, Cannabis sativa
gtaaaaggaggctgtggaccaacgcgccggagaaagtcaactctccagcttcccaaaagtgtccgaaaggactagcctttactgtgtcaacaaaatccagctcaataaacttggcattgatatatctaagcctatctataccccgataggtaagacgtcccgtgaaatggtgggaaactggaagtttaagttcaggagccatctgcaaaattgtcaacaaatttgttagaagtatgtcgtgaaagatatcgcagtatgccgctatacatcgtgaaacgtaatcataagttactgctgatcatatcgccaaatatgtcgctaatatatcgctaattcatcgctaaacacaaaaaggaggatgaaaaacaagaatcctatgtacgactgttatatatcgctaatcatatcgcatataatcgcaaacatgtcgccaaacacacatacacgtcgataaaatcatggaacctacgtactaaatacaatatatcgcgaattatgtcgccaatatatcgctaacacgtcgtgaaaaccacagttatcataaaatcctcatcttttctagacgatgtcgcgttatgtcgtgaacatagtcacgatatgtcgtaaattttgcaaaaaaccagaaaacataccaaaataatgaaattcaaacgaaatcaaaaaaattgaacataaactaaatacattactttacaatgaagcacaaacaattaaaaactaatcaaacaacaaaaaagtttagccgaatacctttttttatttgtttcggatctgtgggttttgtttagggggtgtcgcaatttggggtttcacgatatcgtctccggtggtctgctggtcgtctggttgggtttcacaatatgcaagtgactttcacgatttcttcttcgaaggtttcgcgatgtcgtctggttgggtttcacgatttcgcgatttggtcaggacgtgttggggtcgggtggggtttcgtagctcgccttggtggtccgtgtggttcgttggtggtccggtgtcgtttggtctggtcgtttgggttgagagagagagagagaga

SEQ ID NO: 151281 - DNA, 509 bp, Cannabis sativa
  modified_base (57)..(65): a, c, t, g, unknown or other
  modified_base (376)..(377): a, c, t, g, unknown or other
attttaatccatatatattaataatgaaaattacttaatttaaagttggtccaaaannnnnnnnnaactttaatttaattttcaaaaattatttataaatatataaaattggaaaaatataataaaataaatatttaaaaaattatctaatttaagttgttctataataactaaatttccaacttaaattattttcaaacaaaatttaattaaataacaaattaatttactaaccacttaatatgaaaaaatattccattttcagttgatacaaaattaacaaactttcaacttaaaataacattccaagaatctttcaataactcatttttagaatctctcaacttaattatgaatttcaaaaatattcaaattnnagttgatccaaaattagttatttattagttataaataactaattatcaacttaaatatattttaatgaaatattaaataattaagtatctagaagaatctaattagttattaattctttatttaattaaata

SEQ ID NO: 151282 - DNA, 645 bp, Cannabis sativa
gtattggctagaagttctccatagtaagctatttggaggggacaacggttcttaaggatctaattcagaaggataacattactataaggctttatctcaatggtattggcttacaacccatgtcaattttacccagagaatggtaatttttccattattttttataccattcagtcgagaattagcattcttgtagtttacaacataaatgtaatctcaataataagtttgaaagtgttcaaatatataatttcaattgatttttcataatgtgttatgtatatatttgttcatttttatttttatatgagattttgtcaactgttcatgatatttttttttttgaaagggactgttcatgatattatgtgagatctttttttggttatatgatatatatgtatgtatatatatatatatacatgatatatgtgtatatatatataatgtgtttatataaaaaattaaatattgaaatcctaatgaattatgttattatactattggagagttgttttttgcagtgacattgtatcaagttgtaatgaccgctctagtaatatggattagtaaaggcaattaacactaatttttattattttattattatttgtgaattaattttaaatgtggaccccaatattt

SEQ ID NO: 151283 - DNA, 926 bp, Cannabis sativa
  modified_base (522)..(531): a, c, t, g, unknown or other
ttgcaggttggacccaattaacccactcacccgctcacttttttttttttttttctcttacacaagcttatcataaattatgtatggactatagattatggactttagatttttatgtacattctattttgagactttttttttattattattatgaaatttgatgaatcatttattttggattgatttttagactttgcatttgaagttaatttttttttttctataaagaatatagattaatctatttaatttcataaataaacaaaatagacaaaaaaatcatataaaattttgtttatagaaaaagttggtccagtcaacctaatcaagcttttctgttaaaaagtggtatcccatattatgttaagccaattaaaatttgacacgtcaatgaatttattatttataaaaaaattaagagaaatgctaaagggcaccagtggtgcctagctcctatgtgtcaatatcgctattggtctaactaaatatcgggacccacatagtttaatataataattnnnnnnnnnnatcgctagccaatcgcaacgtaactgtcgaggaggtgctaaacaccactggtacttaatagcaatgctaaaaaattaaatctctaataaagtcaataaaagtagttaacatatttaatataaattagattaattgatgtgtcaaactttgatagatttaacacaatatgagacaccaatttttaataagagatcttgattccagtcaacccttgaccagtgacctgcgaacccgctcaaccgattcatttcacgggcgggtacggtctcatttttaaacccgaaacatgtgaacccaatttttcaatgaagaaaaaaaatcttcgtttgctggggtagtgacacgtcatcaaatgaaaaattgcactcctaattacatagaatgttctatatacc

SEQ ID NO: 151284 - DNA, 1110 bp, Cannabis sativa
ttgagtgggagcgctaaacatgaaaaaattgaagaactacgtaggaaataaagcacgtcctgaagggtcgatagtgaaaagttacgttgtagatgaggctttgacattttgttcaatgtatttcaagggggttgaaacaagatttaaccatcttgatcacaatgaagatgaggttgtcccacgaaagctttttgtgtttcaatctcaatgtcatcctattacaaaagccaatctttgggctcttgatcgcgcaactcgtgaacaagtagagtggtatatatttaacaattcacctgaaattcaagcttacttagagtaagtttccctttttttgaatttttttcacctgaattttcaatcaattaattcaaaactatttgattttacagtgaacacttggaagtgattagacaaaaatacccgaatggggatcataatgttctacaaacaaaaaaattggtcgtggtttcacgagaaggtgaatatgaatgtagtaaaagtttattatcttaagtggtgtttgtcattctctaatgaggtatttatttttatagatataggacttgcaattcattatgagaagaagctatttatttagttgacctttgtgaagatgatgtgaacgataatttaattaatagtgatagtgataagggatgatttaattttcagacactttattttgtaatacatacaattattaatttcaagttaacattattaatttcaaatcattgttactataactaataaatagtgtattttttttttaaaaaaatagttatgtcagctgacatatcaacttataatggtggagacggtggtgttaccgtcgacatgtgagtcagctccactgccaagaagaaagggatgtgcccttgctactaaccttagtgttgaacaacaaaggcgggatgcaaaaaccattatcactaaaacttgatgaagtgacaggcaaaatggttggtacggagaacaaagcttttgtacgtcaaatgggtgttgaagtcacgatgatgttgccaggacactacttgaattttaaagatgtacctcaacactttaaagacaaaattgtacaaaaaatgaaggtaaaacacattaacaagt

SEQ ID NO: 151285 - DNA, 515 bp, Cannabis sativa
ataagagcttttctatttatctcttttaagccaacctcgaaggaaattatcatttcacttctatgtttagatatatatatatatatatatataaatatatataactaagatgtctattttttaagtttgtcttgtatctttaatataatagtgatatttgctttgatgtagtataatgtaatgggaatgataattgtaatatgaatggtaatgtaatgaaataagaattgtaatgtgtatagtattataatgtttagtttaattttattataaatattgtaatcaaataaagtaagtggtgtattgacaaaaattcctttaattttattatttttactatttaaaaattaaccaaaagtggaaaaaaaaaaaggaaacttataaaaatactgttttttttttcccaacttttataataacactgccacacggcaataatttcttttttactgtccaagacccttttttttttctttcatactgtccagacctaaaatatttacttttatactgtt

SEQ ID NO: 151286 - DNA, 611 bp, Cannabis sativa
  modified_base (562)..(567): a, c, t, g, unknown or other
catgccagtctaaatccagtgataatgtattagaaaaagtttgcattttaattaattataattttgttattttaaaatttagtgtaatattttttcttttggttaaaaaatttaaattttatattaggcatatttatattaatatataatttttttaaatttagtgtgataatgtatttataattaaaaaaggtaatgtattaaataataatatgtgagatcataataattatagcatttttgaagagtgctataccattagagtgtttttagaagtaaaagtgctaaaaatgatgtggaagagagataaaataaaatattatatttttagatgatgtggatattgttagcattcttaaaggatgctaccattagagatgctctaatagactaaaatagacggaaggactacagaacaaaacgattatcgagtacggcaagtatagctataattttcaagtaagagagttaaaccgtaacaaagataaagatatagatttagattatagagtttgaataaaatgttatattatttattatataatataatgtttaagattannnnnntgatatgttatatatattattacatataatataattgggaatta

SEQ ID NO: 151287 - DNA, 694 bp, Cannabis sativa
  modified_base (64)..(87): a, c, t, g, unknown or other
  modified_base (631)..(669): a, c, t, g, unknown or other
atttaacaatctcaatagtttgggaggaatttttaacgaccaaaaaagttcagggggcacgatnnnnnnnnnnnnnnnnnnnnnnnngaaaaattactaattagccaaactattttagtaactttttatttgatcaaaataagatttctacgttgtccaagattgggttggatgcaagattaatctttcatgagctactaccattgtttaaatatttgtaattatattcttgagcagtcactatttgggtgatcgttactaagaatattgaatttacaaaaagtatttatcttttgacattctatgatattatatccgattttcaaaaaattaaaaaaaaaataatcttgcgactttgaccaagacttataaatttcaaatgagttaacacatccttcttgagggccccatggaacctataggggactcaaaaatattaaccaatcatttggtgtcgggactcacacacccaagtgtgcccaaactaagggttcatgggcccacactagtgttttcatcctagagacctcaatctgataaggaaaccaacaaggacttaactcatttagacataaaaaggattagacttgcataaagtacaaatcgcataagattgttgggttttgtgccnnnnnnnnnnnnnnnnnnnnnnnnnnnnnnnnnnnnnnntaataaagatcagaaatcattttat

SEQ ID NO: 151288 - DNA, 1073 bp, Cannabis sativa
cacagggtgtatgttaaaacatacaactgtattatgggattgtatttacatgttttttattcaatggtggattgtgttatgctaaagttattagcgtgtgaaagtgataagatttttgactgtttgtgtgagaataactttagcataaatactaaatcttatcactatcaattgaggtaagaagattttttattcaatgctcctatagatttcatggatctcatgaatcatgtatataaggacctccttgatatctgtattatattttttattgacaatatccttggatactcttagtccgaaacagaacatgagcaacatttacgaatagtcttatagaaattaagggagcataagttttatgctaagttcaaaaagtgtgagttctggttatcacaagtattttttttgggtcacgttgttagcaaagacggtattatggtggatttgggaaagattgaatctattagagattggccaagacctaaaattgctacagaagttagaagttttcttagtttggttgggtactactgccgttttttagaagggttttctaagatttctacgcctttaacaaaattgactcgacggaatcagaggtttatgtggttagataagtgtgaagccagtttttaagagttgaagcagcgattgattacggctccagtgttagctttgccttcagatcaggaaaaatttgtggtttattgcaatgcctccaaacaaggtatgggatgtgatttcatgcaggttgatagcataattatttatgcttctcgtgagttaaagtagtatgagcaacgttacccaactcgtgatttagaacttgtcgtagtggtgttcacactgaagatatggcaacattacctctatagagagaaatgtgaaatctacaccgattacaagtcttaaatatttctttactcataaaaattcaaacatgagacaaagacatgcagagttttaaatgagacacttattatagacatccaaggatagtgttattaaatattatatatggatgttcaaactactcaaatcaattattaccataaatactattgtctttc

SEQ ID NO: 151289 - DNA, 601 bp, Cannabis sativa
  modified_base (353)..(355): a, c, t, g, unknown or other
agctctctcattgaactcagtgatatttcgtatcggacgtccttgtaggtcatcccacaattcgcccctcgcgattaatggatcagtggagattcccgcttgaagggctgtaagttgcgtgctgtcatccaagtttctaaccctatcagaagctgtgctaaaatgacttaagtacaccttaagtgtttcgtcaagctgctgctttatattggttagcgaggtcgcttggggtcgtctttccctagcggcttggaattgcttcttgaaatccctggacaactgctcccaagaaattattgagtgacgagtgaacttgttaaaccagctacttgctgctccaacaagcgaggtgnnnaacaaaatacaacgtaaattgttcatcatgttactcgctcgcattatcgtgttaaagttattcaaatgcgataccggatttgtggttccgtcataagacgacacatgcgggtttttgaatcccaaaggaaaaggggtattcataatattagagtgatacggctcaagctcctcgttagagtcgtatccagatgatttccctatttcctccacttgatatctcctgaacttgtcctccagctcgttt

SEQ ID NO: 151290 - DNA, 687 bp, Cannabis sativa
tcaccccaagagagttacgaaaataagcttcaggttacctgccgggcaccaaaaaatgtctatgactaccagaagctaatttttcgctgttagataatcatctacgatcaaaaatatctaatttgtatttttatcatatttttgtgggcctattttacttataaaatgagagctctcttagctcattttttacatttaaaaaattacccacaaggtcaaagtacctctctccaaaaactagagcttaaacacttagcatttttctgtaattcttgtgagaaataaaaattcgaagtagacgtagctccattactatcgcaatatggggagtgaacgactataaatttttgtctcactaaattatttacttaaacttattaatatatcattttctcaatctagcgagctaatgttggctactttttagcgtcaacaggatatttcttaatattttctcaatttatttctatgcataaaataataataaaaaaaaaatttcactactaaattattcagttgacataaaaaataatattaaaaataacttatcaactctatatatataaactcgatatataccatatatggatataaataatatattaaaaaaagagtaattgcggcgaaaccctcttatattttaatttttatactcttaacccccttatttttttttttagtggcaaa

SEQ ID NO: 151291 - DNA, 728 bp, Cannabis sativa
tcttcttgacaaataatacgggagctccatagggtgacacactaggtcgtgaaaaccctaggtcaagtaacccctaaagctgaattataaattccttaagttctgctggagccattctgtagggtgccttagaaactagttctgttccaggtgccaaataattaataaaatcaatttctctctgcggtggccgaactatctcaggctgtgtggtatccaatatcatgggcagaaaccctagacaactgtcttgcaataattctctagctgttagtactgaaatcactgggatcttagatccttgaactgatcccacaaagacaaacagttcctcgccctcaggttgaaagattacaatcttccgtttacaatcattgctggctgagtacttggataagaaatccattccaagtataatatcaaaaactgcgaaacccatttctattaagtcagcacttaactccctatcctcaattctgatcggcataaacctaatccaccttttggagatgactaattctccgccaggcagtagggttctaaaccctttatcatatctatcatatagtctatccaacttactaaaaattctggctaccacataagaatgactggccccagaatcaaagaatactaagaagtaagagttgttgaccgagagctgacctgttacaattgaggggctagcctctgcatctgcctgtgttagagcaaacaccctagctaga

SEQ ID NO: 151292 - DNA, 525 bp, Cannabis sativa
ctttattaattagtaaatctaattgtattgaaatgggttttatttagggcacaaaacccaacaaagtcaagatggtaaatgcaatgtacttggcttgattctcttggggagcttgctcggtttttccggtgaactttcccttcttcccattcccttgcccgttattgtcgttggaacgtttaccatttgagctcgaactatttgggtaatgggagagttgggcgaacgttccagtagaaggaacttttgacttgccaggcttttgctcgccttctgcccgctgaatagcctcttcaagtttgatgaagccttcagcacggtcgagaaaatcgctcatcgagtctaccgggccattcttccttatgtccttccaaatttcaccgaggacttcaatgcctccaagtattgcgaacaactttccaccttcagttacccatgaaaccttggtcgcctccgtcatgaatctgctgatgtaggctcggagaggcttgcctggtctttgcttgacttcgaccaggtctccta

SEQ ID NO: 151293 - DNA, 544 bp, Cannabis sativa
  modified_base (460)..(460): a, c, t, g, unknown or other
tgatctccggtgagaaaggagttccgcgtgctcggtctaactcaagatcattattttgttgtccagccatgccgtgaaacatatttttcagttcgtcaggtggagcctgtatggctgagctgacctgctcggcattctggtcaacttggattacgtcagcatctttctgagtgggaaattgagtacgggctctgggctgcacggttgctgtaacattctgatcatctattcccctccttctgtttagatcgttccttaggtcatgggttgttcctaaccttttgaacacagaatcgcctggttgtcttagcgattgattcgcttggttgacgggtggaatggcaccattgatctggttggagccatcaggtatgactcttcatgatgaattaccagacaaggtctgctcgcttactgctgggcccacgagcgggactcatgaccggggattgggcggctnaccattagtagtctgggaagtattcatcgttggatcctcttccgtttctcccaggggaaggacgttcggcgattactgacctac

SEQ ID NO: 151294 - DNA, 558 bp, Cannabis sativa
tttttttttttataaaataactttaaaaaatttaaaaggtagttagcaattatttttgaaatgatatttagattagttgaaaccaggaatggatgtacattaaaacttatggtggccttggccccctagctttctacaaatgaaatatgtcatatataataataattaacaatcaatattaaataaaaaaaactaagttgaaaagtcaaatgtaagtatagtaaaattaatagaaataaattaagtgaattgttaactgtgcatttcaaaatgataaaaataatattttaatatatatataattttttttttgatactaataaaatattaattacatttcaaaaagacaatatatataattagttaaatgaatatgtataagtgtggttctatataaattaacacaataaattaaagatacttaagaaaatatatatgatcactttaattaaatgattcatatatatttatcttaatttataatacttataaaaaatttaaattaaatttaggagaataatatattggatcaccaatgaatataattaacaccatcta

SEQ ID NO: 151295 - DNA, 693 bp, Cannabis sativa
tccagaattttatctgcccgatactaccctcagtcttccttccttagtagctccacggggcattctccgtctttcgtttggcgtagcatttgctgagaaaaagagttgctccgcaaaggccttatctccaaaattggcaatggaaagaacacttgtaccactacagatcattggatcccgggtttccgtcaaattacccccttatccctcgtccccgacagagtcgcttctttcatcacttcctccttgtcttgggatacagataagattcagagttgttacccaccccatgtggcccagattatcctttctattcccctccctcttaccccatcccaggatgatctgatctgggaactctcatcatctgggatttacacggtcagatcaggctatcaccttagtttttccactactggtccacctgacattccctcttcctcctctccctcgccttggtggaaaatcctttggcacctttcgatacctaccaaggtgaagcactttgctttccgagccacaaaccaaaccctccccactgcccaaaacctagcccttaggaaaatcattaaatccccgtgttgtagccgttgtggaaaccatgaagaatcggtgtcacatgcgctgttctactgtcagagtgtctgaagagtctggaaaggtacgcaatttcacccttatattttttcctgc

SEQ ID NO: 151296 - DNA, 788 bp, Cannabis sativa
aaaacctattagactttgttatttgtaatgaccaagtaattaacctaaaaatatagagtggtgactaagtaatgaacatatatcctatttcctatttattactgtttgaaatatattatgagcggtgactaagtaaataaccgtcagcaaaaaaaaattagccgttgcagttagcaaaaagaaattagccgttgcaacaatatatatataatgttgggatttattattgctagtgactaagtaattaactgttgcagtcggcaaaaaaaatagtcgttgcaattagcaaaaagaatttagtcgttgcaacaagatatatataatgttgggattttaccaaaatctacagctttttatcataaagcaacttcaaagacagatttcaccaaaagaaattagtcgttagtcctagacagatatatatagctcatttgttcatgtaaaagaaattattcatgtgaaagaaaaacaaaagagagatcaaagttgtaaaagatcaaaccttttgggtgaactccgagatcaaagttggtgttcttctcctactttcatcacggtttgtattctctcatctcactcttatttttctgatatttgtatttgtgtgtgtttgtgttcttgtttttcggtttgtgttcttgtgtttcggattgtttttcgattcgttactgccattagaatataaaagaaaaacaattacaaaattagtgttttcggctgtagcaagaaataggaaaaagaagaaaagaaaaatattagaagaaccctagctgccattaaaggagaaa

SEQ ID NO: 151297 - DNA, 538 bp, Cannabis sativa
  modified_base (319)..(320): a, c, t, g, unknown or other
aaaaaaaattgttcctgctaccggtcgataccctccaagatcgaagactatcttcgaaaggtcaaaggaggtaagtgtgatggttttttattttgtttagtttctttttataaatatttagtttttttttcttcttcatctcaggccagcacagagctcctccctctcaagcggagaccagtgctcctccatcttaggcgcagcgtgctcctccatctcaggtaacatttttttttttaattttcattttcgtttatttatttatttttttttcattatgataaaataatgtgggttgtgtataacctcaaaaaaattnnaagataaaaaaattagttaaaatttaggtttaccctaattttgtatttaaaactttaatctaaatataatttttttttttaattttagattatttatgttgtttgtaaaagctcaaaaaaattgaaaattgaaagagcaaaaaattaattaaaatttgggtatactctattttgtatctagagctttaatctaaatatgaaaattaaaatatttttta

SEQ ID NO: 151298 - DNA, 511 bp, Cannabis sativa
  modified_base (151)..(153): a, c, t, g, unknown or other
attgaaaaaatttggtagtctaaatttaattaatacacaagataccgagccaatatttagtaagggtctacatggtttggtttagtagggttgttgtatatttttactaacccaatataaatgttaaattacaaatattcaattgtaaccnnntcaattaaaaattagaaaaagttcgacaagcccaataatttcgtcagtttggtcgggttaacccgtccaaaccgttctacattttttttataattattattcttagtttctaattcaaaaaattagattaaaaaaaaaaataaaaatacattatttatatttcaagttaaaaaatactacagtgtaaattaattttaaaaactataatataagatatatatatataattgagtaaacatgaaattattgaataaaataatcaaaaagtaataatattgtatagattttaaccttcaatatccaaatacaatgaaaattattaactataaaatctaaattttaagttaaacactaaaat

SEQ ID NO: 151299 - DNA, 615 bp, Cannabis sativa
gtgtcaaaactttcaaaaaaaaaaaagaaaaagataataataataatgaataataaatgaatataataccacccccctctcccacgtgtaaacacccataatgaggaaaataagattaaaacataaatccatgggaaaaatccttacaaacctttaaacaataaacgaaacacataaataaaaagattgttccataaatttgtccttgaacaaaaacgataaaaaaaaaataacaacaacataatgatcaaaaattgtccatagaacttgtcatacacgcataaaaggggaacagtaaggaaattattaaaatttgagtggggaaaaccccgcccatctctttaggcgccgtcgtcatcctcgcccccactgccttcgtcggactccgaagaagaatccatcaaatcttcatccttcttaaactcggagtatttcacaaagaattcgtccagattccaggcatcggatttgccctccttaaacttagagtacagcttaaaggacgactgataactcccgctaaggaacgcctttttgacttggcccgtcaggattttaacctccttggccaaggattccttctcagcaactagagcctttcgggcctcagccgac

SEQ ID NO: 151300 - DNA, 992 bp, Cannabis sativa
gaaatcatcccgaaccctaaaactggccttgaagaaaacagaaaatttcccctgcaagcaaactggtcgactagttctgctgcaccagaaccaacaggtcgaccggttctgcaaagttgcaatcttgagttttctcctccaaactcgaaccaaaactcaaccacacctgcccaaccactccagataaaactaatatcatatacacaacacatcctaagcattaatacacaacaattcattaatttaatcaatatagcataaagtagaatttaagcttagaaatcctaaattcctctaactcaaccctaactgagctgattataaccaagtcaatcttaaataaactctaattcaagcctagaaacttattcttacttcagtttaataccccaatcccggaaccaaaaccgtaacttatatctaacttgaaacttgaataaaactgggagaacagggtgaaaaacttaccttcaagcttgaacaaaccccagaacttgttaattatgccaagaaattgaagaaaaagttataacaatcccttcagtgcagctggtctcctaggctcgtgcaagagggtagaagagaaggaacttgtgttgactttttcttacgttttctaagttgtatcttcatttatcaacacataagacttaaaataaactataaacctactattagtaatatctcagcctagaaaaaggcactaaaagacaaaagcttcattttacaaaaaaactattctaccccttcccttaacacttaaactttagaaaatcctaggtgtattttagttattccctaattaatccaccaaaccgataacttaaaattctaaactagatcggtataaaaattcaattcaattcatcttttattatcgtaacatttctgacctccccatcaagttccacagttgccaggcccaaaaatattttattcaaattatggtatctacgatacctacatactctaatataatctccataattaat

SEQ ID NO: 151301 - DNA, 587 bp, Cannabis sativa
taactattgaagcccatttagtggtcggccacttagttgatttttgcccattattttattcttttttaatctatataattaaatcctaaaccctagttaaaatactatgatagagactcctttcatagtgatttcacccatcttattgttcttcatcaaacttcgagcctatagtgatagagtagtaccatgcccacacataacaagtcaagtactcaatcatagtgcgaaagacggtggttaaccaaaccgaaggagagaaggagatccaggttcagatcttgttattattctgcgacagaaaagaataagagttagagatttgagcggaaggagtcatattattctactaccatcaatgtaagtttttctaaactcttatgtgttaaatttcatcgtattagggaattcatatttaggatgttaatcaagatatatgttagtaaatctagatcctgataaaataagttctaacaagacttgggaataacaaagaagatacttggaataaacattaaaagagaaaggtctcactggatcacattatcttagattaattaccagaagaaggtactagacaagtttgt

SEQ ID NO: 151302 - DNA, 509 bp, Cannabis sativa
ctcgcgtataaagtcattggctaacaacttttcaacttcttgttttagtgccccttgcctctcggaatccaagggcctccttttctgtctttttgttgggtactttaaatcaacatttaagtgatggcatataatattagggtcgatccctatcatatctccatggctccaggcaaactgatcttggttcgccttcagaaagcttattaactgctatttgagctgctcgtccaagttcttcccaatgtatacacactttgcaagatttcttgggttgagaatgacctcttccaattcctcgattggtttcaacaggtttctctcatcttgaactcgggggtcaagatctttgtcttttttgctcagtttcttttgccaagatcgccatcatttgatgaccagcttttctatgatgtagctctatgcgatagcaatcgcgagccagcatctgttcgccacgcaccactcccatgccatctggtgtatgaaatttcaaggataggtgcttg

SEQ ID NO: 151303 - DNA, 613 bp, Cannabis sativa
gaacatacgagcttcataaccaacatgggactctactgttacaaggtcatgccgttttggctaaagaatgctggggcaacatatcagtgattggtgaacgatatgttcacaaatcagatcagacagaatatggaggtttacgtcaatgatatgttagtaaaatcagtaaaaagtgggagccataccacagacctcgcgaaatgcttcaaaatattaaaaacgtataatatgaagctaaacccgaaaaagtgttcctttggagtttccttaggaaaatttttgggattcatagtcaatgcaaggggtatcgaggaaaaccctgaaaaaatcaagccattgatagaaatcccatcaccaacaaagcctaaggaagtacaagccctaacaggaaggatggatgcacttaacagattcatttcgaagtcaactgataagtgtttgccattcttcaatgtattccaaggcaacaagaaattagagtggacacaagagtgtaaaaaaagaggcctttcagaacataaaaaggcatctagcaacgcctccagttttggtgaaactaataactagagaaacgttactcctctatctagctatctcgaaagatgcaattagt

SEQ ID NO: 151304 - DNA, 756 bp, Cannabis sativa
tgtaccagctccatgccccatggcaagccccgtgaaccagaacgaagtgacgatgaggcttataataatcaatttcattgctttcttccattttcttaccttttcttttaaatttctaatactttaattaacaattattgatcacttaacaccaactatatatataggatacttctgtattgcttctcctaaataaatgcgcatggtccaccaatacatctcctctctgtagcatcccaacaaaatttttagtttaatttttttaataatcctgtcaatatatatcgaacacttattattcatttatggaaactaaataaaatttaagtataaaaattaatttttaaaaatactatacctttagattttgatccaataacaaataataaaaaagaaattttaatttctagtttaatttagctacataattaaaaaaatatcactttttacattatatcaaaaatatatttatatacaaaatacttaaatcatattaatattttttttatttatttttttgctaaaaagcttttttcttaatttttttttcggctgattaaataatctcagcctatataatagataaatgagagatttttttaattaaataaaaaaaaattaagtataaaaacttaaattttttttaatactacccattcatggataatacccattaagaggacacccctatatataggttatagttatttaaaatatttattaaaattttgagagattcaaaaagatttaatacat

SEQ ID NO: 151305 - DNA, 549 bp, Cannabis sativa
ttagccaggcagtctgcatgagcgttcttttctctggggattctttctactttatagtctgtgaacacgtggagcagttcccggactattgctacattcgcggccattctttctctgcacgtctggtattctccagacacctggttcactaccagttcggagtcactgtagacttctactcttttagcccctatggtctttgctaatctcagccctgctatcaaggcttcgtattcggcctcattgttcgaagccgaaaagtcgaatcgtaaggctgcctggagtcgaattccactcggagatatcattgcagcccccgctccggatccattctcgttggaggctccgtccacaaataccttccatgctgggaccgatggttccggtatgttcgcggttgcttcggcttcattacattcggtgatgaagtctgctagcgcctatccctttatggaaatgcgggaaacatagtgtaagtcgaattgacttaactccattgcccatttgaggagccttccggacgcctttggcttttgtaggacttgccgg

SEQ ID NO: 151306 - DNA, 536 bp, Cannabis sativa
cttgggaacatcttcaaaaaaaaagtggttagaagcgccccaggttgcaacatgccaacctgggtgctgagtgcatcaccaggttgacctgggcaccggattcctcaaacaggaagtgttctaattctaatctcggtgcctctattgtgtttgtgacaggtcttattcatgcctaagtgcaagatttgagcaatttgtactaagaaatacctaaaaactgaaaccctagctcaggatgtttgggcactgggtgaaaccctaagtgctcgggttggctttcgggatgctgattcgacattttttcagttctcaggcttcagacttggagtcttcttgacttgttggttcaaaatactgaaggatggtgacttggaaacactttggcggggtccaaatacccattctggagcccccgaagtcaacctaagcatagggctaagaacccttccaagagttgactgctatgacttgggacacttaactccatgaacgttttccttcttgtcatgtgttaaatattgatgtccacatcatca

SEQ ID NO: 151307 - DNA, 861 bp, Cannabis sativa
cataattttgtacatgtcaaaatttaggaggcaaaaatcaaaattagtctattttttttcataaaattattttttgccgtcataaattaattttttttcaattatacttatatatttttattttcacccccataaattttatcttttttattattatcctacataattttatttttacctcacataattttatttttatctttataaatttatatttttattattataccagagaattttatttttatctcacataattatatttttatctctataatacatgtgtaagggatattggtggctataccacctaaacttacgttttgtaacacttaaccacaaaaatcaaaattttggtggcaaaacctactaaactcccattccgttttgcttgtacccctccgtccaaaaatcacagttaagtgccacggtggattgtccacgtgtacacacttgtacatgtggcaattttttgtagtagtccacataattttaattattaaaatattttaaaaattaaaaattataaaaaaatataaattataaaaaaaatattttttattttattttttgcttttcttttttcttttttcttttctcttttattttttattttttttctttcttcttcttcttcttcttcttcttaaataaaccaaaactaataaccctaaccctaagtccatctctttcattatttctctctctcccgatttcactctatccatttttctcccgcgcttgaagacgagtcccaaacatgcttccttggaatacgaattcgttgaggttgttcgagctttaatggtggccaaggaggaggttaacaaagagaacgagaacgagagagagagagagaga

SEQ ID NO: 151308 - DNA, 529 bp, Cannabis sativa
agaaatataattaggaatgacaaagaagcatctaccttctgataacccaccatgagcttaccttggagttaagcatacttaacttgggtctcaagatgggaactctttcagggagtcatcttggaaagcgtatgagtgaggacaaagtacgcaagaaatattcatattgggatgcataatcgatagtcgtttacgaaatttgtaagaggaaagaatgtgttaacaagtaaagatttacaaggtatcaagatgaattatgtattatgggatcttatgattttgaccgaatagtaacggtttgacatactgtgttaatatgctgtctattagtattagacaatttatacaataaatgaggatatggaattcatacgaaggaatagtctaatcttgtgaaattccaagattaatatctttggctttgatgttaagaattaaagaaggttattgagaaccatggaggttaaagcaaaaatagtatgatgttttattcctgaaggatgggtaacctgagaggatcaatggaata

SEQ ID NO: 151309 - DNA, 856 bp, Cannabis sativa
aagcatgttagtagcctgatagtagaataggcgcatgtttttaatttccaaataagcgaaattagtaagtttactttgattacgttttgaccagactagctcttggttactcaggctgttcagattagtattgacgccaggcgaaacactaggagccagggtaattcggttggatctaatgaaggtcagggagctcagagtcccccaaattttcgtggccgaagtacaggtctcaggggcagggcacgtggtcggggtgaagttaatctgccacaggttgcccaggctgcccaagcttctcaggatgcccaaaattgggaaaataggtttgcagcaatgcaagccaggatcgaggaactagataatgaaattcaacggttgagacagcagggtgctcctgcagtgcctgctccagaaattccagtggcacctgcccctcctgtccaggccgaaccagtggtggcagtgaatcggatggaacctctgtatgaaaggttctgcaagcaagcacctccagtttttctgggaggcccggatgtcatgaaagtcgagcaatggctaacaatgattaatagaataccgaactttataggcgtcacaggtaacgacagggtggtctgtgccaccttttaatttcaagaagacgctttggtctggtgggacatggtgtccatgattcacgatgttacgacaatgacttgggaaaagttccaggaacttttcaacggaaagtattacaatgaagcaattagaagttctaagagaaaagaattcacccaattgactcagaaggaaaatatgagtgttactgtatacacaacacaatttgactgtttggcgagattggcctcgggaa

SEQ ID NO: 151310 - DNA, 823 bp, Cannabis sativa
tgggactcctactcctcctacctcgggttttagtaggggaggtagtggctcgaccactgaccagaaaagaaaggcgcctactgcatttggtggctcaagagaataagaggttttgagggaaccatggtcgaggcaatcgtcagggtagctccgaaacctgatacacttacccagaatgccccaattgtaagaagcatcatctgggagagtgtagagggaaagggtgtttctagtgtggtatgtgaggacactacaaaagggattgcccccattttaggaaagaagaatagaagattgctgcgaagcccactctagcaagggtgttcgcgttaactcagacagatgcagaagctagcccctcagttgtaacaggtcagctcttggtcaacaactcttacttctctgtgttttttgactatgggaccactcattcttgtggcagacagaatctttagtaatttgggtagaccgcatgatagttatgatacagggtttggaaccctactggctggcggagaattagtcatctctaaaaggtggattaggtctatgccaatcaaaattgaggatagggagttgagtgctgacttaatagaaatgggtttagaggctttcgacattatacttggaacggatttcttatccaagtactcaccagtattgattgtaaacggaagatggtaatcttccaaccagaggatattaaggtggttcgagaattcttggatgtttatcctgaagaacttccgggtttaccaccgcaaagggaaatttattttgttattaatttaacacctggagcagaactggtttctaaggcccc

SEQ ID NO: 151311 - DNA, 521 bp, Cannabis sativa
acctaatacggcgttccaaacgatcccataggactaatgttacatatatcaaatgtataacaatttagatttttaccgctaaaggtgatttaggatgaacaattttcgcaacaaaaaataattacatatttaagtttaaatgcaacaagataaataaaatataacaaatgacgatttgtgccgtaaatttttataatatgagtaatctactatattaaggtattacaaatttttttacttttagtcataataaaatttgcgactaaaagtaaaaagggctatttacaaaaatatgggaaaatgaaaatatgttttgatatatatggcataaaaacttaattaccttaagtatggcattttttcaaaaaaacttacaaatatgggaaaaagtcattgtgaatgccatagaaaactttaaatttgtgtttcttgttattttattttttttaaaaaaaaaaataaaacactaaaataaataaaaaatgatctcaactgtacatttttttttatagaaattaaac

SEQ ID NO: 151312 - DNA, 558 bp, Cannabis sativa
cgttcttcatcaatttgcttctatgtttattgtagttggaacatgcaatccactgcgctaagtgacaacgttcttcatttgaattaaactgttgaaaggaatttgatcaatacgatatgtaatgaaatttaattaaattaacactattaattaaagatatgaactacctcgaaagatcttttatcaagtctacacatatgtgtatcataaacaatgcaacaaacactccacaatcaaagaaatttagttgtcttggaacgttttgagtacgttggatgcaaaaactagcgaagctaaaagttaacggtctttttttaatctagttcgccagtgtcaaatctaggttgcgcagctgcaaaattatttacaatacaaaaattaagcaataaaattataaatctctcattttatatacaatgaattcaatacttactatttctttaaacttattagattgacgaacttgagatttttcatcagcaagtgagtcccacacttctaccttctttagagatataataactcgagcaaggcaatagtggcttgacgataaaatcg

SEQ ID NO: 151313 - DNA, 531 bp, Cannabis sativa
gtcgtcgttcgtgttgattgcgttatctccgatgatgattcatcttcctctgcttcctcatcggataagtctcgtggtcctttctctaatatgtcttcagattcgttttagggctggttgggttcatgaagaagatgaacaagaaaaaaaaatataaaaataaattaaattaatgattttaaaatatacattttttagttttttattttatttaaaattttttaaattaaaataataatttggaccaataatatttcgacacgtggcatttgaattggatttaacggatctgttaacttagagaacggacaaataaaaaacatgaccttgaggattattgccgctatttttggaggttggggatttatctgtatcaaactgaaccttgggacttttgccgcaaattttccttttaaaaacaatattttaataaaattgatacaataaaaatgtaaaaaaaaaaacttttcttcatctcacattatttttgtaaaattttctccattttaaaatattttttttaagtttttt

SEQ ID NO: 151314 - DNA, 704 bp, Cannabis sativa
tgtagataattgtatagaaattattgaggccatattatggtgcttgtaggatgtaaatatgagtttgtgcaatgaattttcacctgattcatcaaaaaaaaaatagtttttattattgctacctattttttttctttattagtttagagaatttatttatttttttaataaatactttttttgattaataataatataattttttttagttgctactgatttttattttagttagttagaaatttttttgaatttattataatatgtttttagttaattaatcaattaatatttagaaaaagaattaaaaataaaaaattagataaaactattttaagtgattttaaagtgttgtcttattaatttaaatgagatatttaaggagaaaatatagttattttgagtgattttagagcgtcatatcattacctcatacttctcctttataatatgcataaaaaaataatactaacaaaagtaactttaaaaaaaatgatgtagaagtagaaagttatttttctatacacattaaattgaaaaaaaaaaaattgacaataaaaggtatatataccaatatgcaaaatagtgagatgcatgtatgaagactatatatatatatatatatatagatagggttattctatagtaggtcctttagctttttcctcatagcatagggtaataaattagaccaatcacaaact

SEQ ID NO: 151315 - DNA, 732 bp, Cannabis sativa
gttggtgatttcttcagtaattcttgtgattctcagctagtttttagtgatctcaagccaaggtaaagccttttaaactcctactcttgctttcttgaactttaagaaaatggtttatgcatgttttgtggattttgttgctgtagttgttgttggtgtatgatttgtatttttgaagttagattacggttaaatatgatgaattgatctagttttggtagctattagtaggtttgagcaagctttgagttttagaactcaagcttggctctttaatggtgtttttttattctaagcttgtatggttgtgttattgcttggaatatatcttttggggtataatatgcaggtccggaaggtttagaatagattggaatcgatttggttaggttttggaatttttgggggatttctggtgtaaatcgattaaccggttttacaaaaccggttaactggatttgttgctgggttctccaaaaaattcgtgttgtcgattcgtgttagtttcagagctttggttggttagttccctgttagtttagggtattttgatgttaacttacaatagataggtttttggtttaaaacttaagtcccggttttgatttagcgtgtcacttatctatgttataatcgattggccggcacacctaaatttagaaataaggtaagattagtataatgtcatgcatatatatttacatgtttagcatacatgttgtttatgcctat

SEQ ID NO: 151316 - DNA, 667 bp, Cannabis sativa
ttcggccatctcacccctttgctggaaaagggaaggctgtcatgtctgaaataaaatcgatgtcaggtgatgatggacttctgaatttctatgctggcggtcaccttgtattttacttcttttttttagcttcttgactttcacgccttgtgttttctgatggttgttttctaaccacacttttttgttctatgcagacatgtctcggcagatgctcgatgctctaaggaagagaatggacggaagctctagcgcctctccttcggccaagaagtctaagggcggtgaggggtcctcggagaagagaccttttggagaggtcattgacctttccgaggtgctgactgctgcaaacccttctacccctaattttccaagtccaaggagtctaaaccaccaacgtctgggtctgaactggtcaggagtgttcctgagcgggtgcaggtaccaactccacctttgcccgtgctgccagaggccaaaaaggggaaggagatgttggcccactatatgaaccgactggttcctgaggtcagtgagcaactggttggtgctgatagtgactcatctctggatgtgttggtgggcggagccctgaaggagctcatcagggtaagtcttttttgatatttccctttaactttccacacttagctccatatgctga

SEQ ID NO: 151317 - DNA, 1440 bp, Cannabis sativa
atggactttcgagtcttgctcgggcaatcgttttgcagactattccgtcttgtttttaagcttcttgactattatgctttatgcttctgatgtctaatttcactaaccatgttatttttgtttcatgcagacatgtctcagaagatgcttgatcctctgaagaggagagttgaaggaagctcaagagcatctcctctggcaaagaaatccaggggcgatgaggggaccccttccaaagaaaaggtgactgtcgaggaggttatcgacctttctgaggaactaactgttgcgaacccctccactccaaaagttgctaagtccaaggattctcgaggaggatgtttggacaggcctgagcaaccaaaaggtggatccgagctgatcaagggtggatccgagcagatgcggactcctactcctcctttgtcagtgcttccagaggccaagaaaggcaaggagattctcgcccactacatgaagtggttggttcctgaggttagtgagcaactggccgttgctgacaacgactcttctttggagctactaatgggaggagtcttgaaggaattcacaagggtaagtctttcttgacggtttcctttaatcctctttatttggtttggattgtaaagttttttctctgcgtaggctagtctgaagtttgcttacacatactcccgagctaagtctgctgtttccaagaacgcgactctgtccaacagcatgagggcggaggtggacttgccaaggaaggatgctgatgacgccagggtggaacttggagctgttcggatggagttgggtgaagtcaaaaagaagattttcactgctcaaaagaaaataatcgagttgactaaggatctcgaggcttctgaccgacttgaagagaccatcgggaccttatctacataagtgaatagccttcaagatgaaaggacgtctcttcgagctatcctccgtcggttggaagaggagaagaattctaaggaggaggagcttacagctaagattgagaagtacaagtcgggaatggcgaagcaggaagaaaaagtgcacgccttagagacagctggtctcaagattttttatgacttttagaaagctaaccctcaggaaaatttcaattacctgggcgaggccaaagacatgtatctcaagtactgtgcttctcaagtggcttatggtgagccggatgcaactacttcttcctctgccagaacgtcgatgttcctcccgtccaaacaactgatcctccagctcctaccggcctagaagatccgaactgagagcctgggacttcagccgtttaactacttttcttcttatccttctctttttttctatatatatatatatatatatcttatttggccataaggccctgttttttaagaaattatgacggaccaaccggtctttaaacttggaattatttttcat

SEQ ID NO: 151318 - DNA, 502 bp, Cannabis sativa
agatcaacttgtggatgcaacagttagacacgaaatattaagcttcatggacgcctatttggcgtataatcaaatcaaaatgcatccaccagaccaagaacatacaaccgaacagatatgggtctatactataacaaggtcatgccattttgtctcaagaacgttggagctacataccaaaggtaaacaaaatgttcaaagaccaaatcagataaaatatggaagtatatgtggatgacatgctcgtcaaatctaggaaggctagggggcatatagatgacctggacgaatgcttcaaagttctcaggaaatacaacatgaaacttaatcccttaaagtgctccttcaaagttagctcgggtaagtttcttggctttattgttaacacccgaggtattaaagccaaccaagaaaaaattcaagccctcctagatatgaaatcgcctacaaaaaccaaagaagtccaaagtttaactgttcaaattgccgcactcagtagatt

SEQ ID NO: 151319 - DNA, 530 bp, Cannabis sativa
aaattactaattaacctaaaaatatactaaaaaatcgtattttatgtaaataaaatataaaaaccatataaatattaaactttgtactgaccatatttttgtaattttttttttgttgtttttgttttttttttttttttgttttttgaaattatcataccatttgaaaagaaaaaaaaatgggcattttacaaaaatactagatttggggtaatacttttcaattttactacgacacggcagaaataacatttatactgtcatctcattttttttctttaatactgtaaataccaaaataaaagtatgagaccttcatctttcacaaccacagacataaccaccacaacaacaccaggacaaccggaaaataaccattaattccgacaagattgagcaaaagtaataaaatcgacgtcaaataaaaaatcatggcaaaacaacggtaaaacaacactaaaacaatcaaacaaaacaaaagaaaaaaatgattaaaaaaaacaaacaatctgctgcacaacctcaacacc

SEQ ID NO: 151320 - DNA, 570 bp, Cannabis sativa
tcgaagatctcgagttcttcttctggattccttgggggaagcactcattcgccagactcatgcactcgcttcaaaaggacatgttgaaataaaaggccaactacgagaagatgctgagttcgaatgttcagcatgagtgcaaatacacagcttatgccttcgcacctgcagtactatattgggcgtaggaggccattttaagggttgggaagaggtatgacacaaatcatgggattcggtttccgaggatgcttagctggacgagcaagggtgatatagggaagaaagaactcagtgcattattttctagacgggtatgagtttcacttatgtttagagtaattttttaacataaatgcttgtaataattgctaaatcatttttctctgatatttttttgaaccttaaacagaatcttgaaatggtgaaggggctacttccacggacagaagaagaggcatttgtgaggaccatctcttacaaaggtgtggaaaacctagttgatgttggtgtggatgacacagaggctgaggcagatacttaggtaccagacactcaggtaccaatttt

SEQ ID NO: 151321 - DNA, 623 bp, Cannabis sativa
gtaaggcaattacaaatctctcataaacttgtgattggaatataaaagagctttcatcgttagaatatctcatttcaagccttcttctccttgagaattttactttggacaactgggaaatacataacttggagcacatttaaatctcgagtcaacccttaaaaagtttctatctggataatcgtgatgagacaatgactgttatgattgagtcggctccacaattaagcatcatttccttatacaggtgatctccattttcatatatcaataatttcgtcgtatcaggactctgatagactcaattgttcttggaatatggtaacactacacgttgacagtgtcgaggctctaatctttccaaaacaattgaaggggatatttgaaaatcgtattccaatggttaattgggagcatattagagtatttactgaatgtaaagtagaggaagaatcaaaattgagaaatacttagtgcatttggcatcataattaaaaaaaattattattattatttttaaaataattatgcttgtttggctttgttttttttaaaataattttttaaaaaaaaattacaaaaaacaagaattttattaacagcaaaatattattttctatttt

SEQ ID NO: 151322 - DNA, 509 bp, Cannabis sativa
tatttttccttctgtttgatatatactaatttcttgctttttgtattttctagactgccttccccagttgcctctgactccagagttagaagagaggataaatttctacaagtccttctcatccaaggagttgcatgtagagaaacttatgacaacagataacctcccagaagtgggtcttatagcctcacatcaggacgtggctcatctttctttaaaggaaatagtgtaggatgctcaatggggggacccagacgaggttaaggaggccatcacagttattactgcaaaagaggctctaaaggcaaagaaggctgatgagcaatggttggcggattcgaggagacaattcccaaaaggcctaagcgaggctgaagaactcactatccgcttcaaggaggtagtgcgtgatgagggggctccaggagcgagcacctctggtagcggtgatacacccttccatataattagtgttggtaatattttatcaggatctaaatttactaaca

SEQ ID NO: 151323 - DNA, 1142 bp, Cannabis sativa
  modified_base (205)..(222): a, c, t, g, unknown or other
ttttttttttttacatttcaaaatagttttttttttttaaccactttagaaacctaaactataaatttgaaaaaaaataaataaaaaaacgatatatgagataattccccataaataaatataattagcttattaacggaataacgttattataataaaactaaaaagttggtgttgaacaaaaaaaaattaattattattattnnnnnnnnnnnnnnnnnnattatgattattattattattttagtatatgaattgtggtgaatcaacaccattcaagaacaacataaacaagatcaaaatgaaactaaaagatacaaacttgaaatcataaaccagaaaaataacagcagtagcaataaaacaatagaacacaaaggattacaagtttcaatcacaagtgaaatcacttggatctaatccttaggatgaactaccttgaggctttgcctttattacttgaagtaactcagaggattacaatggtggacaccaaaaaattgaacacaatggagtcttgctcctacaccagaagtcactcgagagacatgagttgaaaactctcatgctctttacaaagatgtactctcagctcacacccctcaatctctccttgaaagaattacaaaatggcctttatataaagaccgaataaaaaagtagaagaactaactaactcaaccggttttactaactaacataacagtaaaaactgtccaactaacatcacttgcaccccacatgaatatttcttgcaattaaaacctaaagggaatatttgattattaaaataataataataaaaaaaatagaaatgagtccgtcaaaaaggagagcaaattaaggagatattggctctacctccaccacttttaagttaagtgggttttatcaaaaataataataataataataataaaaaaagggctataaagagatagaggactgaacagttaagaaagagaattttggaaaaaaagtctttggcaagaaattgatatgtaagagtaaaacagagaaagaaaaaaatatgagaaaagaaagaaagaaaaaattgcattattcaaggtcattcttaagctctaaaggataagtgaagatccataaatggatctacctctttgttatagtgagatttctct

SEQ ID NO: 151324 - DNA, 583 bp, Cannabis sativa
attatttatagatatttaaataataagttattctgttattattgaatttgaaatgcattttatgtcatatagtaaatttcataattttgcatttccgatgcatggtaacatggtcaatagtgataacatgatgagttaagttatgacacttgatacctctccatccgcaacaatctgggctactacttgtccacgaggatagtgaatttctatgatcaacaaagcctttcttcaagttgagaagagcttgtctctccttctcaatgcaattattactccatacttgattagtgagtgtggctagcaccaacaaaagcagagcttgtataactttgatcatatttagaaagtaatataataggttattaattattaattatggattcatatacatgtaaccatatatatataggactccaaatcaccactacaaacgacaatcattctttttctttctcatatattattctatatattaatttgaaatttttacatgaaaaatcctttttgcacaatttattacaaaaatactcctacacgcctatatcaacttttttacttacaatgttggttttattacaca

SEQ ID NO: 151325 - DNA, 595 bp, Cannabis sativa
  modified_base (48)..(85): a, c, t, g, unknown or other
atcatgtgaaccatgcaacattagatgttatttctgatctatattaannnnnnnnnnnnnnnnnnnnnnnnnnnnnnnnnnnnnnggcataaaacccaacaattaaaaccatacaacaatgtcagacaatatccatctagaccctaattaaatgtttagctactcatcttcattgtagcaatttcacacatattaatttaagaaaagagaagagaatagagaaaaaagaatgttgaaaaccccgttgaaaaagccttcgcgattaatttttatctctgattttcgtcctccttgattgcttgttaaaaactattgaagtcaacttcttatatagctaaaaaatggtaaaaaaaagattaaaaaaaatgctaaaaaaacctattttgcttaggattagaaggggcgggccgcgacccatgatttccatgcctaggcgctccccctttatttgggcagtgagttttcgtcaactgattgtattttgggtataactctctcgatattgttcggaattggacaatttaagatgtttcggaaagataaaagagagatctagaacttttatgtttctactttttctaaaatctgatcagaa

SEQ ID NO: 151326 - DNA, 608 bp, Cannabis sativa
gtgtaaaaataaaaaagtctcttattattattatagaaataaagacgatagcgtatcaagtgttattttgcttagtgggtatctgaattcttcctgaaaattcttttaaccattaatttttagtctaaatttcttggtttctttatgtatgtcttttgtctattttcaaactagcatattttaatttgtgtttaattaacctacttgttaataaagagaaaatatgcagtagaagtgtaaggagaatatagattttttagttaaggtgacttgaatttaaatattattttttaattttaagaaaatgttataattattgtcaatatgttaatctaaaatatgtgtttaaacattacatatatagttaaaatgatgactactcaatggttataataaaaatgagtcgggctaggctcacataaaaaaagtggacttttataaaaacagagtggaccaggccatccgaatgtacaactttatatataggtacctataaataatatacacatctaaaaaatatataatttaaagagatctctacacgttatgtcaatatgggaggaaattatcatataataaaatttttatcgacaatagatgttgaatgt

SEQ ID NO: 151327 - DNA, 689 bp, Cannabis sativa
  modified_base (34)..(44): a, c, t, g, unknown or other
  modified_base (658)..(662): a, c, t, g, unknown or other
agattcatgtccaaagttacctcaatcgaagaannnnnnnnnnntgaggaacttgatcttgatgagcttatcgggtccttgcaaaattatgagctatcacagtccagctggaggaaacccgagaaatagaaggatgtagtgaaggacaaatctgatgcgagtattgcacttattcatcaagaaaacaagaaaccagtcctagaggaattgaattgcattcctgacgaaactgttgccttgttaataagaaactttgcaaattcttgaaaaagtactacacaagaaatttcccagctgataaagaaaattctctcaagaaaaacaaagatggaaatttcaaacaaggacaaccttctactaataacaagaatcgaggaattaagtgtaaagagtgtgatggatatggccacatcagggctgagtgcgctaacacactcaaaaagaagaaggcccttgcagcaacctggagtgatagtgaagaagaaaagaactccactgccagtgaaggattagatgaggacaagcaggtactggcgttcatggcccaaagctgacacccagttgaatctgaagatgatgcagtctccgcttcatcagaagcttatagcgtatgtaacgccctaaataattagccacgctacccaaaatacttatgaannnnnaatcccctaatcgggattactaataaa

SEQ ID NO: 151328 - DNA, 922 bp, Cannabis sativa
ccttgagaagaaccatacttggatcattgtatcattacctgtaggccatcatgtcactggttcaaaattggtttacaagattaaacttaatgctgataggagtgtggaaaggttcaaggctaggttggttgccaagggttacaaccaacaagaagggattgactacacagatacatttgcaccagtaactaaactagttactgtcaagttggttttatctcttgcagccatcaaaggttggcatttgcatcagttggatgtcaataatgcctttctacatggtgaccactcaacggtaggatacctccgagtatggccgtatgaccttggtgacctcagccatgaaccgttgaatgtagcccttcaaagtttcatcttatctttgattcatttcgacaagatcctccagtcggacaggtatttgtcttgaagaagagaattgaatatagaactctctggagaactcttcccaagaattaaatcttcctggggccagcttgagataccactgttgggctacttcagctagagttgctggaaagattcgacatcgcacatctccgatatacttgtaggagatctgtttggatctcaaagtactttaggtgtactaggggatcttttttctccgtatacatcttgaatttgggcaagggcaaggcgttgatgtatgccgagaagggtgatccccttgacctgtctagctcaagttctaaaggttttagaccagctaggccctaatcatgtctcgcaattgatccaaccgtgcttgcacaaaaggatctcttattgtaggggcctagttgattgactcttcttgattgagctgcagcctcgaattagctatagcctggccagccatatcttgggagagggtatactcaaggccgattagctctgagtctggtgcttgtacaaggtc

SEQ ID NO: 151329 - DNA, 1264 bp, Cannabis sativa
  modified_base (26)..(27): a, c, t, g, unknown or other
  modified_base (352)..(381): a, c, t, g, unknown or other
tgtaaaaaaatattctttgaacgtannaatgtaaatattttacaaaaaattgtgccttatgtaattattccttttatatatataggtgcacttttaatgagtactaccattcaatgtaatattagaaaattttgagtttttatgattaatttttctatttaattagaaaaattttctcatgtttacattatatggactgagattggttcatcaactgaaaaaaaaaataaaaaaaaaaattggcaaaaaaatgataaaaaaaacttaaatttgacttaaatatttttttcatataaacatatttttgatatagtgtaaaaagaagtattttttttatattttctttaattannnnnnnnnnnnnnnnnnnnnnnnnnnnnnttctcttttattattcgctatcgaaccaaaatctaatgatttaatatttttaaaattaatattaataccaaaagctctgattttcctctgttttctctctactttttctcatatggtatcagaagaactcaggccctcagcttccatggctcggccaaccactcgatcccaagatggtactgcaccatcaacgatcgacaacaacacagcaaaagtcaattccgactccatgcctgctcccccttcctcagcaattcctcgtcgaaaccctcctgttcgagttcaatctcagaatgcagatcaaggtcttcatgacaattccaccattgctgaaggcaacttaactcagactctccaatcacgatcggttgttgatgatcattccagcccgttcttcctcaacaccgccgaccacccaagtctggttcttgtgaccacagtcctcaacggaaccaactaccagccatggaaacgaggtatcacaatggcattgacggccaagaacaagatcgcgttcatcaacggatctcttcctcgtcccgaacctggtaacacaaatctaaactcttggttaaggtgcaataatatggtaatgtcttggttgattaattctgtttcacctgagattgcacaaagtataatgtactttgatttagctactgaaatgtggagtgatcttgttgagcgtttcaatgaaggcaatggccctcgaattttttaattacaaacacagctcactcggcttcagtagggtgactgttctgtttctacttattttacgaaattgaaacccctttgggatgagttgaaagaatttcaacccataaccacttgcacttgtggtgcaatgaaagttttcttggattcttacaaccaaaatcaa

SEQ ID NO: 151330 - DNA, 897 bp, Cannabis sativa
ccaacacttctgaaaaaagccaggggtcataccgtcgggccctggggattatctggatgcatttggaacaaagctttgcgaacctcctcatctcaaaccggtagtaacaactcaacattctgttttgatgatacacgagtttgcacactgcttgtgacttctctccaatcgatttgagaagataaaaaaagttcattgaaataagaaaccatgagttggtccaaaccactatcccagtcaacccacgcaccagaatggtccttaagttttgccacaaaattatttcatcgtcttgtagttgcagcagcatgaaaatatttgctattactgtctccttgcaaccataattgcttcaatctttgacaccagaaaacttccctttgcacataacttttggccaaatttctctttgcttgtttgtaattggcaatggatacttcatctcgacccaatttccacctttgcatctcatttttacacttttttaatctttctttaaagtttccagtaacctccttatccaatcggctagcttttccccacaaaactgaattttatacatcacgtcatcagccccacaaatctcccaactatctttaacaatgtgataacaaagaggttccctcaaccatgcattttcaaaccgtaaccacttcacaaaattgtggtcagcagcaggaaccatgaccataagaatcggagtatggtctgaagttgaaatttcaaaattatggagcttagcagaagtgaacatgtttaaccaagtaagatcagctagccctttatccaaacacacttcgatccaatgattagtacccctcccacgctcccaagtaaacagataaccacataactccatgtcttgaagtccactatcaaccaaagactgttgaaaac

SEQ ID NO: 151331 - DNA, 516 bp, Cannabis sativa
tccatgttcccttatcaacaccttccctgtattttactgttaacctattcgcactcatccaatctctatccattctaatatttctaagaaaacaaaaaataatatccaattaattaacctattaaattaatttttaatactacttgttaaaagtaataaatataatcttttatttttgaatggtatgagcttcttaattatctattcgtataattgattttgtttgatttaatcaaacataagagtatgtactcacaatttgatcataacttcaaaaaaaaaaaatagtgattatttcagtaatgatttaggcatcatactaattacttcaataaagtactaatcttaccgaaatttcagaatctaccaaaatttcggcagcatataattggacgttcctgaaaatttaaaacatgcaaataattaaattaaacaatccacaacaatgtaaaaaaacattaactaacaatgcaaaaatttccacccatccgaccgcagtacatttattcccagaac

SEQ ID NO: 151332 - DNA, 598 bp, Cannabis sativa
agccttggcttcctgatgagatgaaccctttcattgaatctgtccatccaggtcttgtggggaagtcagtcaactcttcaatgaaagtcaagcaggttgaatgggatggggaagtattagctgatctgctcactgctagagatcgagctttggtgtggaagattccgctcagtagtcatttgagtactgatttgtggtactggttacatgatgcgttaggggttttcactgttaggagtgcatattctctgcttcaatcagtgaaacccagcagagatagtctagataactctggaattcggcggctattatggcagttgcagctccctccaaaggttcttaattttctgtggagagcttctaccaacagtctcccaactcggtttaatctttccacaaaacatgttccaattgctgcaacgtgtcctgtctgccttgctgctcctgagacgattctgcatgtgctagtgcgatgctcttttgctaggagttgctggagcaaggttccagttactgttgtggcgcctgatgcaatgttgttctcgagttggttcgaagcggggttggtatcgtagaactcggccgaggctcttgaggc

SEQ ID NO: 151333 - DNA, 574 bp, Cannabis sativa
aattaacctagatatttttatagatattctaattataatattttaaaattgggtaaatgggagcaaaacccccacaactttcattttggtttcacttaatccccaaaacccaaatttaggcggtaaaacccccaatactcgtgttctgttagcaattgaacactttcgtcgcaatttagctgttaattgccatgttggactggacatagtgtacacgtgacacaattttattggtccacgtaaaaaattatttaataaaattaaaaaataaaataaaattaatttaaaaaaattagaaataaaaaattaaataatatttatttttttttctttctttcttttttttcctttctttctttttttcctttctttcttttcgtctgtatcactctctaaaatttccacagtttacccttcttcatcaccatcattagccttttccagtaaaacacacaaacccatgaacgccgatttttcttttcatgtgaaacaaacatatctctcgctctatcactctctctcgatctcctctccctgtctctcttgggttttcaatctagggttttcaaaaccc

SEQ ID NO: 151334 - DNA, 761 bp, Cannabis sativa
agcataaatgcaaatgggatttcaatttttgctttacgtcgacaacttttaccggcgcatttaacgaactgcgccggtaaaaaggccttttcctgtagtgatataggagtcttctctggaattattgatgcatctaatattgatgatgatacgtatgtaaacacttacaatgagtgtcttgcatattacgcagttagaaggacaagcttgttgtgagatcaaacgccaacaacccgatagtgcaataccctaagattaagagaacgggttagcgaaccctaacaagttaaatgtgtatttatatggaattatattatgatataattaaatatatgtgaattatactgataagtgatatgttaagacttcgttagtgagccaggggtattttggtaattttgacccgagaagagtaaaattgtaattttaatattattgcgtgcttatggactatattattaggggtgttatatttacaccccataaaattataattacaccccaaaaatatcattacatatttaaccttgtataaaattattaaaatagatatttttaataaaaattgtttttattttttataagtgcacccgaccactaaaacaataactgaatgttaaattcttcaaaaaaaaaagttattcaaattagaaaagtttaaaccctaaaaatcattcatcaatgaaagagagtttagaaattttattaatggagcaatcatctaatataaaagtaagattattatatatatatatatgtat

SEQ ID NO: 151335 - DNA, 921 bp, Cannabis sativa
  modified_base (218)..(238): a, c, t, g, unknown or other
aaataatttccaacaaaactttcatagtaattataacaaatttatcattcttaacaaatcacatgcagtaaaattaaagaaatgataagcatagattaaagtatattctctcacaaaataaagggaaatttatatggtatactaatttttatcatttttttataaaaatattgccagacggtatttttttttttacatttttactgtgtttttttatnnnnnnnnnnnnnnnnnnnnntgtgttaagttttcactgttgttctaataaaattttttagttgttctactgttgttttgagttgttttgttttgtgttctactggtgttttatagaaacatggtatttttgaagagatttccgtgtgacagtatttttataaaagttaactcaaatttgagtatttttgtaagtttcccaaatacaaaaggggaattttcataaatataggaattgagggtatagtttacttttttatgacataaataaataacactaaaggttatgggtttttttattttttatttttttttacatttatatagatttttttttacatttatatggattttttaatgccatatttttgtaaaaaaaaatagaaatctcatatttgtaagacaataataagttttgctggaaaagtcggcggcaccggaaaagtcgtcgaaaaagttatcggaaatatcattgtcgccggaaaagtcgtcagaaaattcactggaaaagtcaactaaaaagtcaacgtcaacggaaaagtcaacgtcgccggaaaagtcaccaaaagtaaatatctcatatataactaaaaatataaccggttgtatgaataaaaactaataactcaaaccggttatatttaaattatatataaccggttctgtaatataataaataaatataaataacataaaataactcaa

SEQ ID NO: 151336 - DNA, 665 bp, Cannabis sativa
caatctttattttgaaaaaaaaaaagatattttgcctcctccactactagtaatttcgtgtcaaatctgcaggaagcacacaaacaattttctaaaccaacacaaattcatctaatttttctccaaaagcaaaagactcattagcaatatcagataatctttcataaaattcacacaaagtttcaattttcgacattctcaattcatcaaatctagtttgcaacatggtaaaatgtgatctctttatatcagcggtacctgacgcttcttttgcagattcacaagatgatatcaatttaataaagccttcaccaacaccattaaaaatagcatgcaaaactttattattatatctggacaatttttcatcttcagtattccaattaagttcaagttttaccttagcattatcttcattatcattttcagtaggtcgagaccaacttttaattatagccctcaatgccttctcatcttgtgacttaatgaatgctctcattcttcattctgatattctaatatggataattcgagtcattcaacaaaggtggtcgactaatggagcttggactactagagaaaatacatttagtaacactttttttttaactaaaaaaattaaaaagcaacacttttaaaagtgttgcctcctaccgtgttgctaa

SEQ ID NO: 151337 - DNA, 564 bp, Cannabis sativa
gagagagagagagagagacaagaaagagaaaaagatgatttgggaaggagaagattgggagagagaaagagagggcctgggtgctttggctccagtggtgagacgagagagagaaagagagggcctgggagggggtttagtagaaaaagaagaaaaaatagagaaagaataagaaaaagaaaaagaaaaagaaaaagaaaactaaaaacaaatatttttattttattttttaaatattaataattattttttaaaatttatattacgtggaccctaaaaatttgccacgtgtacaagtgtgtacacgtggacaattcaccgtggcacttaactatgttttttggacggatgggtacaaagcaaaacataatgaaaatttaagtagttttggcccccaaaaaattaatttttgggattaaatgttaaaaaatttaaagtttcgaactatgtcctttttcttttttccatccctcccttaccactaaaactagcttcagtcacttttttttttcaaaattaaatatactggatttgtagagagcaggaactttgagataattcaca

SEQ ID NO: 151338 - DNA, 611 bp, Cannabis sativa
aacctctttatgaaatttttcagtgtctccgtaggcagctgcttgatgttagtcaaggtgctgacctccagattgactttcgttgcggcgacaaattgtctccggaagctggtttgcaacttattccagcaatctacggatcctggttccagtttcttgaaccactcttccgtggatccgcttagagtaagtgggaagcacaaacacttggcgtcattgctgactctcatgactgtcatgacccggttgaaccgtgacaggtgatcacttggatcagagttctcggtataagctgccatctctggcattttaaaatttttggggagctctgcttccaggatatgtctggcacatggctcccggtcctcgcaatcggagtcggagtcgtcgcctttctgtcttcgggagactcaggcgatgtctttttggagtatggccagttctgccatgattccttcgtttaacgttcccgtggagaccgcgggtccgtatttcttctggtctaagtgatcgtggagatcaccttggttcccattaatatgatttctcagatcaatgggaggacatttctgcccccttcttcctctccctccgggctcttggtgcacgga

SEQ ID NO: 151339 - DNA, 558 bp, Cannabis sativa
  modified_base (433)..(440): a, c, t, g, unknown or other
  modified_base (516)..(526): a, c, t, g, unknown or other
ccgtccgcggctgagaacgagggagcaataaccctcctggaaacatcgagaacgggcaaggatagagaaccggagacgaggattggcccgagaagacaactggagcggcgacggcttagggttccgtattgtgcagacgtgcacagaggcggcttagggttttctttctcttggtctttggtcacattttacctccggagcaaagcagtgtttgcctgattcgtccaccggagcttgagaatggttgcgtctgggagagagagtcaatcggactggattagggttggctgttagtgttaggaaagaggatgggagggtttctgtagaaaaaagaagaaagaagaagaagtaaataaaaaaagaagaaaattaatttttttttaaaattaaaaaaagtaaataaaaaaaatctgattttttaattttttttaannnnnnnnaattattttttaaaactaatattaagtggacgtacatgtggacactccaccgtggtacttaactgtgatttttggnnnnnnnnnnncagagcaaaacggaaccaggatttaggtagtt

SEQ ID NO: 151340 - DNA, 608 bp, Cannabis sativa
tctcatattcaagtctttgtaagtaaagaagtatttgaggctcttatggtcggtatcaatttcacatctctctccgtagagataatgcccccaaatcttcaaagaaaaaactaccgcgataagttttagatcatgagttcgctgctcatactctttcaacttacaagaggcataggcaataacccgattggcctgcatcagtacacaccccaaaccctatctggatgcatcacaataaaccacaaacttctctttatcagaaggtagggctaacactagagctgtgattaacctctgtttcacctctgtttcagtccacacgaaacgatgattctttttggtaagctcggttaaaggtgttgaaattttagagaacccttctacgaaccgacggtaataaccagccagaccaaagaaacttctgacttccgtaactatttttggtctcggccaatccctaacggattctatcttccccgaatccaccttgattctgtctatgttctcgaagccgctgtaaaaccattcggagatgttgctcatgctcctcttttgattgagagtacaccaagatgtcatcaataaacacagatatcgagaaaatcctt

SEQ ID NO: 151341 - DNA, 932 bp, Cannabis sativa
aaaggtacgtactttaattatctcttattcatttatgttatctctatatttctactctagataatatgtttacaagcatatatgctcttatttatttttaacaagagaatatttgtttaataatttgtacttttgttatctcttgcttcatatcaatcattatattttttcaaaaaaaaaaaaaaaaaaggattcatagttttagatttggagcaggttgatgcttgcttgagattaattttattgaattaatttgttagtgttatttttattaatggtggattattagctgagttgaaccttatattttcttgtatatttttattttttttaaaaaaatgacattaaaatcacaactttgtattagtttaatttctaataagctaattaattagcatcattatcatgtatagccaaaactactaatttttgctaattaactaaaaaccctcaaaattaaagagttcaaatcaattatacataccaagcttggatttaaactaattaatctttttcaataaatctttcaaacaaataaaaatatacaagaaaatacaaaaaataatacatatcatactctaatttaaatttaaaaataaggaaaaaaatttacagaaaaaaaagaaagaggaaaaaaaaaatacattagatttgaatcatttgatagatcatcatcataaacataccagtttgttgggccttgggggttgctaaaaaaatttaggtgaaaccctcttttttcttcccactccagcgtccagccgctcctcctcctggcagctctttccttctttctttcttttggtttgtggtaagtggtaacctagtagagagataaaatattgagttgaggagtaattgatttgcctttggtttggtggcgtgccgcgtgggtgggtggagtgagtgaggtgagtgaatgtgatatataa

SEQ ID NO: 151342 - DNA, 668 bp, Cannabis sativa
  modified_base (461)..(462): a, c, t, g, unknown or other
cactaagctagccttagtggctggctaataaatactgtattatttacatgtgtgtggcactttattgattaactaacagaacaataaattaagtgttaaatttagaaatttgagtatatcaatagaaactacaatgatgatatcaactatatatgattgaaatatataaataatgcattatgaaaaaatttgattcataatctcacacatgtttcttcttctacataatctcacgacttttttttttttgcttttttgttcaattcataataaatttttataataaaaaaaacacttttcctatattctgcaaagtaaaaaaaaaacttcacacttatatagttatgaatacatatatataaataattgaataattatttaatttatatttattattatgtattttttaaaatataattaatttaaaatagatatttttataaaaaaaaattattaaaatnntagtaaaatattaatttgtaaatttatattttaataaaatattaaaaaaatgagataattaaggagaaaaaaaaatagttttggagagattttaaactgtcacgtcaccgtcttatacttttcctttatatatatagatgtatagatttaaagataattacatctaattaaaatatatacatatattttataaaattatttatgta

SEQ ID NO: 151343 - DNA, 1193 bp, Cannabis sativa
  modified_base (833)..(837): a, c, t, g, unknown or other
gattgtttgatgtttgcaaaattattacataaaataattataattttgttctggaattatttttcttagatagtatggaaaaaagttaagtaatttaatttttgacggaacttgattttgattttatttgaattagttatgattttttaaaaattaaaaaatatcaaggaatggcatcaccccatgcgcgcgcggacaccatgtgacacacgggtgtcacacatgttcggacaatgcatgtctgaagaaacaggcacacggggcttgtctgaaccccattccatgcgcagaaatcatgccatcagcctcttgggccgagttttctcagccagcatccccattacgcacgcgcagatggtatccgcacccaatgtaaaaaaaaatcattttttttttattttttcatactttttcatggaattaattttgatttttttgtgttattttgtatctagatttttatttttgaaatctcaaatctaattatataaataaaattaattgattttattttaattaattctatatattaatagattttgaacctgaaaatggataaaatctgatattttacttaattgcttaccttattttttaaaaatttgattattttatcttatttttaaatataaggtcagatattttatatttgacattatttaattaattttataaaatgaccttatttgatatttaaaataagatatctattttatttaaaataatctagaaaattttaaaaatctaaccagatcttttgtaactttaaaatttttattattttatttaaattaaattttaaaattagataaatgatatttatttatcatttnnnnntattagatatttaattttattttctttaaaaaaataaaataaattttgaaaagttaattggcattttttttaatagatatttaggtttgttaaaagcttaattttttaaatttataggtttaattttaaaactaattatttaattttgttttattatttttcaaaaataattaattatttatttatttttgaaaataaatttatttatttaattaatttaaattaaataaatcctaaatccaactatccagtttgtagcatgtgtgtgttttatatatattatttattattaaaacttgttttgtaaaacctattattgtttgatctaaattgctatggttaacttgttgacatat

SEQ ID NO: 151344 - DNA, 513 bp, Cannabis sativa
tacacaaccatcccattcctaatagtctttttaattaatcacacttatcattcaccaggctgcctgtttaacaagcttcgataaaagactagagcttggcgcaaattttcagttttcagtttttaaaattgtgtttttaaaagtgagaatagaaaacaattttttgttattttaaaaatttaacagtgtttggcgcaaatttttaaaaactgtttttagattttttcttacgaaaaaaatcaatattttagcaccataccatgacattaatccatccgagtttagttttgggtatggtttcgggtctaggaaccgagtatgtgagaagaatataaaatataatatgttagacaaaaaaaattgtttttgaaaattgaaaacaacattttgatgttttctcttttctagttttttaaaattcatattttaaaaaacagtttttaaaaatttttgccaaacgactcctaatagtttttaaaaactgatttcagttttaaaaaacagaaaacagtt

SEQ ID NO: 151345 - DNA, 570 bp, Cannabis sativa
aaagtaaaaaaaatttatagtgaattttaaatatattatagttaaaaattatgtgataaaatattaagttagggacttaaattcataaataaaaaaaaatctatatacatattaatttgcaaaaagatcttaattaaagaattaatttatttgaattacataatttcttacaattactacaattttaaatataaaaatttgtcttttaatatatatatacatatatgaaaatttatttgaataataacccattgtaacctattataacaagtaatgacaaaatgtaaccaccatggttacatttcattgaaacttgttccatttatttaattgtgaaatttagggaaatgatataatgttctgataatacatctttcaatattaatttattattaatttattttttttttttttaaaaaaaaagtttagaatgacatgattccataacaccatatatttttttgggcaatttttactaatataccaaattaacatattaatgttacagttaccgaaaaaaacaaaaataccatatatacgtatatccctaccgaaatttaggaaaaaaat

SEQ ID NO: 151346 - DNA, 615 bp, Cannabis sativa
tctcaagcttccaaagaaggtaataaatgagattgaatctatatgtagagcttttctttggaagggtcaatatatgatgcagggagctgggttagtagcttggaaaaatgtttgtcaaccaaagattgcaggaggcacgggcattaaaagaatggttgaatggaacacaacagctctctttaagtatgtttaggctgttgcaaacaaggaagataacctctgggtcaaatgggtacatccagtttatacgaaagatggaaattggtgggattaccaagcaacaaatcaagggatttggtattggaagcaaatagtggcagccaagaaccaaatcaaagcaatcacagatgtacataaatttgtccaacacaaatacaagatctcagatggctatgagttgatttgtccaccacggagtagattcacatggagcaatgaggtttgggggcgtttcaacacaccaaagcacaactttattctgtggttggctgtgcagaatcgcctcagaaccaaggatagattccatcattttcagctgctagatgacccgaagtgcagccggtgcttgctgctactacccgagacacatggtcctttatttttcaggtgttcatt

SEQ ID NO: 151347 - DNA, 520 bp, Cannabis sativa
tattctcagcgattgtttggtctttttgaggttgccgtggacatctctaactgctatgaggcggggtacctggtctatagaggagcataaggggttttggggttagggtccggtaagagagagagggtgaaagatatgtgttttaggtttaggttagggttttttttttaattttgttttatgtttttttgtatttattttaatttataatttgttttatatttttttaattcttttattagttattttttaaatttctaattaacttattttaattttaattttttaaatacttatttacgtggactaataaaattgttccatgtgtacatagtgtccacgtagacaacacagtgtgtacacatggatagtccaacatcgcacttaacacctaaaaatggatggaaagggctaattgctaatagaacatgagtttagggagtcttactacaaaaattttaaaattgggagttagttgcaataaactaagcacttatggagattatgccgcaaattactc

SEQ ID NO: 151348 - DNA, 542 bp, Cannabis sativa
ataaaaatattaaattaatcaaaaaaatattaattttatttaaaaaaacttaaattattccttaaaaaactattttcaaactttattttatttatataaccatgtatttcaaaaaaatcataccaaaattattgaaaatctaataaataatttaaatcagctataatttttttgaaaaaatcaaatttatttatatttataaactcgtatcttaacaaataaagataaataattaaaaattcaataaaaatataaaattatttttaaaaaaagttataaagtaaactaaaatttttttatgttcacttaaacaaatttacctttttcgaggaaaacaaaatatattcaagtttgttcccgtgaaatttagtttttacaaaaattaatgtttaatatattatttttaatatctaaatgattttttttaataaaaaataaataaattttttaatcatccaaaatatttttttcttaagatctaaattaattttttttaaaaacgtgttaaatctttctcgtgtttattttgagggggtacgatt

SEQ ID NO: 151349 - DNA, 632 bp, Cannabis sativa
attttgtttaaattgtatgtaaatctttatatataaaatgtggctatctaacggttcttgttggtttaacataatattttaagaatataagaatattccgttaaacttaacggtatttgtagggttagtttcatagatatatataaatattaatattatactattatttgttttaagtgaatttaacttatacaaattttaaaataatttaaatatatataaatattaatatattatttctaacattataatttttgattgttattttaatattaggagtatgttcaattttaatattcttaaactttttatttatttcctcaaatttttatctttaaatatttttttaaaaaatcaaaaaattaataagtgatttcttttaatttataaaactttaaaaatacacgtaacaataatctagtatatatatactcttaatgggtattacccatgaatgggtaaaactataaatttttgagttttaatgcttaattttttttatctaattaaaaatatatctcatttttatatcatatgggctaacattgttctatcgttaaaacaaaaatttttttaacaagaaaaataagaaaagaaaaagtagagtttgagttaaatatttttgtatgaac

SEQ ID NO: 151350 - DNA, 1348 bp, Cannabis sativa
tataatagaatcttaacaactcgcagcactttaaaaattataatttaccaaacactcagctcagcttttttccacagttctgctacagttgtttttccccacagcacatttacagctgttttttcccacagcacagctatgccaaactggccatatgtgtttaatagttggtttgttgctttatgtaactaagttttaatttttttgttattttaggaaactagtttcacatggttcatgagttcgaaattggtttcacaggtagattctgatggggttgttctattttatgatgttattgtatattttttattttaagttttttattattattttgtttctaagttcgaaattcgtttttacacttacattttgtttttagattattattgtgcattgtgtattttttttttgattatatttgtgagtattttttttcatttggttaactgatgaaactaatttatattattttcattgtatatcatttatattttgtgttcacaatttttactattgttgtgtgacgaaattaatttttgtttagtttcataatgttcgttgtggttgtatgatgaaactaattttatttattttttatagatggaatctaattcctccagtaaaaatgcaatggagaagatgttgctaaaaatttcaaaagtgctgactctgagaagaaacttcctccatatcaagaagaaaaaaaataaattgattaaaattttaaggatttatctttagtacattgttgttttttttttttaagtatgttaaattttattttgatttatcttctcataagtgtcttctattacttcaatttcttagttgtttatttatagtttttgaaacttgtttttttaataggaagctggttttctttatgtgtcttatttatgttcaatttcattgctagttgtactaaataattggttttcgtgtttaagtattagttttttttaaatgtaattaagatttaagttttttttagttattttaagaaactagtttcattggttagatttctgattagctaataaatgtaattagtttctgtgagacagattctaacatctaacttcggtgacgactctagcatcaaactttggtgacgatgataactctgacaattttttcgatgattttttctagtgatgatgctaattccggcgatttttccaaaatcaccagaaactcaagtgacttttcatcaccgtcagcaaattttgacaatttttccggcacaacagtaacttcagcgactaaattggttgtaatgaccgctttagtaatttggattagtaaaggcaattaggactaatttctgttatttttataattattt

SEQ ID NO: 151351 - DNA, 1146 bp, Cannabis sativa
  modified_base (140)..(145): a, c, t, g, unknown or other
tagcggcaatagtcctcaaggttacactttttatttgtctgttagtcctaattttaactgagccgttttctttttttaaattgccacgtgtcgatatattattggtccaaattattatttaaattttaaaaaataaaaannnnnnaataaataaataaattatttaaaaatgattttattttctttttctatttttttaattttaatttttctttcttttcttcttcgtcttcttcttcttctcactgccagaaacccacccccaaccctcaaccccaaaccagcaccagcaccagcaccaccataaccactctctctctctctctctctctctctctccctaagagccccttcgaccaccttctgacccaaacaagtccgatcgcaaaagcactatttctctccacttcattctcgtacaaccttggcgcaacctcaccacctctagccagcgacatcatcaatgtctagagatgcttaacaagaacaggaacaactccacaatccacaataacatttaaaatttcctctgaatcacaaaatttaccagaaactcataaaccctaacctccccccaaaaaaatattagatcgaaaatcacgaaatgaaacaacaacaacaacaacaacaacaacaaagaaatactgtatatttgcatgaaaaccgcaccgttcttggcgagttcgcagagggctgttgatccagttcttcttagaaatcttggtcgagcttcctctttaagctttttctggaggaggaggtttggttctgatcgcgttccatagggggttggaggaagaagacgacggacggaggtgagaggagaggagaggagatagaataggtttacggtaattttgaggttgggggttggggtgggtttttggcagtgagaagaagacgaagacgaagaagacgaagaagaaaagaaagaaaaataaaaataaaaagaaaatgaaaaagaaaaagaaaatgaaatcatttttaaataatttatttattattttttaaaatgaaaataataatttggacgaataatatattgacacgtggaaattttaaaaaagaaaacgactcagttaaaattaggactaacggacaaataaaaagtgtaaccttgaagactattgccgctatttttggagg

SEQ ID NO: 151352 - DNA, 705 bp, Cannabis sativa
aatcatgaaataaattatgtgaattatgcagcataaaatgatttttaatcttttattaattagtaaatctgataacattaaaatgagttttatttaggacacaaaactcaacaaactcaacagataatctttcttgattgtattgtactaattcttgctcaatcaataaagaggatttagtggtgttccagaattagaatagagccatagatcacatcgatctatcaaactcgaatcagtatatatcttagtgttgatttctttattttctcccttaattgtattttggttttccttactatgttcatccttgttttttatctgattattgttcttaattttttaatcttgtcattattaattgtttgattaaagttttagttgtttttttttttttttgcaataaaagtttagttgttttgattctgtattgttagttataaattttctcacattttacaatgttgaaatctaaaaatccaaagcatgttttcgattgtaaatttaattattcaaaattaaaaaaaaaaatgtgtatataaaattcgttgtaactacaataaacatattcatgtaaacatcacacattattcacatgtgtaaaaatagacaatccaatacaatacacaacgcgacatacatgacatatatatacatggaacacttcttaatgggtattacacatgaatggttactaaacaaatt

SEQ ID NO: 151353 - DNA, 615 bp, Cannabis sativa
ataccttgtttctttgctagaaatttagggcattggggttttcagtggcctttttcattgcaatagaagcattttccttttggtgcattagcaggagtagcagcctttttatttttaactgttttcacagcttgaacaggctttttgctattcttccatttcttcttgttcttgggtttggtagtagaggcaaggtttgcctcagccttagtcgctccattaccatttctagaattatgagctttagaccctttcttctgtggtcctccaatcaaattttcaaatgtctgaaggtcgttaaccaactcgtgaaagtcttgttcctttattcatgacataattggaggtgtatagcagaaaagttgcagtcagactattcaagattagactaacttgagttgtctgatccatttcagctccatgattctgagcttcttggaaataacttgccatctggagtaggtgatcacgcacattctgatgaggactcatctgtgcattgataaacttccttgtcgcttcaaagcgagatcgggttgatgccattccgaatagattagttaactcagtcatgatttctgcagccgtgtcagtgtttgcaaaccttgttttcaa

SEQ ID NO: 151354 - DNA, 621 bp, Cannabis sativa
attttggtgtagttttcaagagttgatttgagccattagattaaatcaagggctataaattactatccctattgataggtaaaatacctaatccctaccataattgccccctatatatatattgctaaggaatttttctatttatttttttggctcgatcaggttataattgtttggctccacatttattctatataaaatatggctatataacagaatttttggtttacaagaaattattgggtaatttttttttaaataaaaaaaaataacaaattattagatgttgccacgtaaagtgtcagcatcctacatttagaattagttaaatgtatacacacctcgtggcgatagaaaagtaaaaaaaaaattgatgtaaacacatatcacatacaatcactctatgaagatatatatgaacaaataataattttacttatatatgtgttcacacgcatgaccataagaaaagaataattgacgtacactataaactactatcgtatatatacatatactagcaaaaggttacgtgtttcggtatactaaattttacgttagattttttctttttacgttatttaaaagtgatacaattaaaagaaaaatattattagttat

SEQ ID NO: 151355 - DNA, 716 bp, Cannabis sativa
ctatagagcaaaaaaccactctctatctacacttgagagtttctttgggaggaaattctgtacccgagtccttagactccatttaacctcttcaatcattcggttggtgtccacttgcacacccttccatagaacgacattactcagtttccaagcagtgtacaccatggctgcaaccgcagcactatatacagccttcttgaactttgagaatttgccctcccaatccacttaactagctgctgaacattgaatgtgacagctttccaatctagccaagacttgatctctaccaagcattggttggttatcctgcattcaaagaacagatgttgtatattctcattgcattcatcacataaattgcatttctcttgaaccttaatacccattttgaacaaccggtctttgctcttcggcttgttcagcctcacaagccaaagaatcatacagtggttgggtgtattcaatcttgaacatacttctttgttccaatgggttttcaattttggggtgctgaacagtttgtagcctgccttaatagcatatttgttcctatgaaaatcagcactaacattcaaagataggatctggtttttgagagcaacaagcctcttccaataccaactcgagtggatagaggcattgtacctccaccagctttgtcctttgatgtatacactattcaccccccttagccataagctctcttggtt

SEQ ID NO: 151356 - DNA, 589 bp, Cannabis sativa
  modified_base (49)..(49): a, c, t, g, unknown or other
  modified_base (155)..(157): a, c, t, g, unknown or other
tttctgtcaatagattcaaactgtatgttaatgtatggaatatgagttnagtattctgtgaccagaatcctcttggactattctaagaactctttattgtaactagacctaagtgacctcaaccataataaatatctatggcatttgcatcttgnnnatagtggttttgacaagatcattttttgtaaagagtaaatatgccaatatccacttaaaagtaagatcatctatatttaaacatatggatgtataattaggtgtggatatgagttattgttaaatttttaatacaatcactctaaattttacctcatgcaaagaaatttgaattgtttgagaaatttcatgaattttctagcaatgttgaaaaatattaaggtaagtggttaaagatcttgcgaagtgatatgggtggagaaatatttggatatgcagttcaaagttcattaagttgaatttttgaattgtattcaaacttacctccccataaattcgacttgcaaattggtgatcatatacaatctatgattagttactagcagttgcctaagtccttctaggaaaataccctagtgataggaaattttca

SEQ ID NO: 151357 - DNA, 551 bp, Cannabis sativa
gagtcatagtgtttaaccacattgataattgatatattaccacaatcgatacaaggacagcgaattttttcaggatcgctacaattctttagggaaaactcgaaaaagtgattaaatccttctacgaattgtggggtttctctcttctcttccatccatgacttatccattttaaaaataaaaataaattcctaacaaacaagattgatataaaaaacttacaagttgctagaaaaatcctaagcacgcttagtaattaaatattaaaaaacatgttcatttaagaatcctaaaaaaaattggtccgagtttcccttatttctacaacatttcccaatttaataactatctaacaatgcacgcaagtaaatcagataacaagaaaaaataatcaaaatagcatttaacaatataataattgtcacccatccgactgcagtacatttgtatcgcaaaatctacttcactacggatgaatatctaacatattcaaactcctctaatagctttataattagtaaaataaggagtgtaaatatcagcgaacagaa

SEQ ID NO: 151358 - DNA, 556 bp, Cannabis sativa
aaagtattcaaataatttattatccacgcgtataaaagagatgtgtaatatagactatttgaatcatatttttgacgtattatttttttaattttcttaaaattttgtaaaatgttttaaataactacaatatacacaatcgtaaaaaataaattattttttattttttaaaagaaaaaaggaaagaaattaaaatgtaataaaataaaataaaaatacggtaagaaaactagtttggaattagggatacacacgtggcgagaaattagtgagtagtgctcccccatctctatccctattaaggattttaatcctcattctcgctgtatccccgcatatatcctcattggggatggggcgaggaatcccctaagggtagagatggggcggaaaatcccttaatgtaataaaaataaaattgttaaatgtataaaaatattaaacatacaaaatttaaactattacacagtattattatttaatgtactaataatcatctaaaacaaaacttaaaaatttataaaaaaaaatactaatatactaaaaaaaatacaaa

SEQ ID NO: 151359 - DNA, 558 bp, Cannabis sativa
gaaattttgggttttccctgctgcaaaatccgggtaactgcttttacaagcattgtaaaaccgattagccggttttacccagaaaaaccaaacaacttcaaactctagccaaatcgtttccaaactcaaccaaactttccagacctggataatacaccccaataaacatattccaagtgataaaacaactacccatgctcagaatttaaaaacactattaaagctccaagtttgagttctaaaactcaaaagcttcttggtggttaaacttactactaacacaaccccccttaattcttcatgctcaaaacaacctttctaaacatattctaacctctagaaaacaacatcaaacaactacaacaacaacaacagcaacaactatcccaaattcatgcaacaatctctaacttaaaattcaagaaattaaaagggcaaagtgttggaagcttaccaagagcttgaaaacacttagatcttgctgaattctacttgaaatgctgaagaaaatatcaaccctagctgctctaggagttttttagagagagagagagagag

SEQ ID NO: 151360 - DNA, 794 bp, Cannabis sativa
ggcatacgccggaaagcatatgtttcgaaaggacaagtgaaagtggtcttttcttggtcctctaatgcaatctcaatctaatagtaacctgaataatcatggagaaagtaatagaaaggatgaccagctacacgctcaagaatttgatcaatgaatggtagtgggaaacgatctttacgggaggcagcattcaattttcgataatcaatgcacatacgccaacccgtcactgttcttgtgggaacaagggtccctttttcattttggacaacggtaacacctgatttcttaggccctacctgaactggactgacccatttactgtcggccactaggtaaatgatacctgcatcaagaagttttaacacttcatttttactacttctttaatcgatgggttcaatcttctttgaggatcccttcgtgggataacctcttcttctagattaattcgatgggtggaaattcgagggctaatacctttgatatcaacaagcgtccaacctatcacaagtttgtattttcgtagtagctcgagtaattgcaattcttgagaaagttgaaggtcggacgagatgataactggaaaagtttcgccatctcccaggaaaacatgttttaaacctttaaaagttggtttagctgaacattgggagttttttcagcgaaagcttttagcgtttacctctcacgaggtaatgcttcaaagtgtggcttccaaaatttcttccctctattttgtgtatccaagtgatcaacagtagcgagagtggactcaacaagactgggatttt

SEQ ID NO: 151361 - DNA, 683 bp, Cannabis sativa
ttgttaatgatattgtcacttgtattaagaactcattgttgttcagtcctaatctggtcatagtccatgttcctcgtgagcttaataaaattgctcatgtgtgtgcaagggcgggtttaggattagacaatgagtatatttggaatggttctttaccttcctttgtaacctgattccttgtatttgttttgtttgttttaataaaggttcaggtttctcaaaaaaaaaaaaatattaaggttatgtttaaaagttaaattttggtaagaaaagaaaaaaatagggaaaatgttgaggaaaaaagtagaaagtaaaaaaaataataataaattataatatttggtatgaaaagaaaaattgtatagaaaaatattcaattcaacaaaaaatgtcatatcaaacatgaaaaatgtcatttcaatttttgttctctacaattttttcttacattttccctacttttttcattcatcaccaaattccaacttccgaacataacctaagtattcactactacaaaaagctacatttgcatcaatcaaccctataaaccaacgttgttagtaaattttaaaattttgcatcaattttgaaaggctaattaagatttttatcttataaactttaacatgtaccaaatcatgccccctgaacttttctggccgttaaaaattctccctgaa

SEQ ID NO: 151362 - DNA, 549 bp, Cannabis sativa
tcaaattctcaagccacatcacccacacattcagcttttactactatgtctcatgatatatggcacaatcgtttaggtcatcttggcgataatattatcaattctctttgtagtaataaatttattgaatgtaataaaacttgtaaaactttttgctctgataccatgaaggaaatcgattccgtgtcttttctcattatcaatcatggttataaatacaatatataagagtaatgttgtgctataaattagctaactaattgctaaaaatatgtaataaatattgaccaattttaaaataaagatatatacagaaataagagaatatatagtaaatatatggaattattacataaaaaatataaattgacactttatttacaaaaatatatctataaggtgtggacaacaattataccttttattacgagtgagcataataaaatctagaaaactgaaaaaactgtttaaaccgacctaccaaacactgttggaaccaaaaccgacgaaaccgaaaattgaaaaaaccacttacggtcaaaactgcca

SEQ ID NO: 151363 - DNA, 508 bp, Cannabis sativa
atctggaaaagataacatggcttgaaaaagatggaaaataataaataattgattttatttcatttgatatgtatataatattttttcttttttgaataatatgactttattttaattattttttattttttaaaattattttatttttatggaaaaattattaaaataatagcaaaatattaatttgtaaatttatgttctaataaaatattaaaaataagagaattaagggaaaaaaaataagaaaaataactttggagagattttagagtgtcatgtcactacttcattcctctcctttatattgatatattgatctataaagtattttttaaaaaaaaaattgaatttataaagtattgattcataattttttttaataaaatgcctaattttaatttttcgcccaaagttcacaaattgcttggaccaactctaatgccactacgtaacactggtccgaaaatatttatataaaaacaaaaaaattaaataaaaattaatatat

SEQ ID NO: 151364 - DNA, 1174 bp, Cannabis sativa
  modified_base (49)..(63): a, c, t, g, unknown or other
tcaacttcctgttttagtgccccttgcctctcggaatccaagggcctcnnnnnnnnnnnnnnngccgggtaatttggatcaacatttaagtgatggcggataatcttaggctcgatccctatcatatccccatgactccaagagaattgatcctggttcgccttcaaaaagcttattaattgctatttgagctgctcgtccaggctcttcccaatgtacacacatttggtggggttcctggatcgagaataacctcctccaactcttcaattggttttagcaggtttctttcatcttgaactcaaggatcaagatcttcctctttcttctcattttctcctaccaagatcgtcattaactaatgaccgacctttctatgctgcaactctatgcgatagtaattgcgagctagcatctggtcgccatgcaccacccccacgcactctggtatttggaacatcaaagataagtgcttgatcgaactgactgcccatagtctgatcagtgctcgatgacccaacaatatgttgtaagccgaaggcaggtagacagccaagaagtcttgcataacagtagcagttaaaggtgcctcgcctaaagttaatgtgagctcgattctgccaaggctagcgatgctatccccggtgaatccgcaaagattcaccatacaaggccttaacttggccttttttagccctattttcttcagagtctccttagaaatgatatttatcgagcccccattgtctattaacactctcctgatcgtcttattggcgagttgaatggttatgaccagctgatcgatgtgagggtatcttacattcttttcgtcttcctctatgaacgtaatggggggttcctcagtttacaccttcttggaaggttctagggcaaagaccgactgctcattctttattgccttcacatatctcttctgagcattattgctttcccttgcaatatgcggccctcccgaaataaccaagatgtcctctccttccacaggaataggttgtaacccatggttatttgcgttattaggctgacgggggtagttgtatcccttgccctatattttcacatactgtttaaaatggcctcgagcgatgagactctctatctcatctttcaattggcaacatttgttgatcgtatgcccaatatctttatg

SEQ ID NO: 151365 - DNA, 869 bp, Cannabis sativa
  modified_base (434)..(446): a, c, t, g, unknown or other
taaataatatataaaaattaaagagattaactaaattttaaaatctgacaataaataaaaaataaaataatcaatttttaaatttaaacctcaaaatatcaaaaaattaaatattattattaattgacccagattttcaattggtcataactccttcgtttttcatcgaaatcgagttccataaaaactaaaattgcctaatttttcacaaggaatccaaataaaatatttttagaacgaaaataaaattattttcatggaaaaatttcgtaaatcacatacaatcatcaaattaacacataaaccaacatgaacacatacaaatcaacactaaaacattattcatcgtttgaaatccctattacacaaaaacaattgctcttataccagttgttgggaatattttacgaagatctagatttactaacaagtannnnnnnnnnnnncctaaatataaattctctaaaacattgaaataaacacataagagtttaagaaaaccttacattggttgcggcggaatataatgactcattccgttcaagatctctagcccttgattcctttctatcgcatagcattattaagatctgaatctggatctctttctctccttcgagtttggttactactgttacgaaaaattattaaataatacgcaagtgcacgcaatcaagtagtaaactcacgcaagtgaggtcgaaccacagggaattggatcaattactactaaattatacttatgattctatttggcaaatcaataccttttatgatttaaaaataatgaaagtaattcaagaaacttaaataacacaagtgaatattaatcaagatgagacaatagggaggagaatcctgttgtttgt

SEQ ID NO: 151366 - DNA, 816 bp, Cannabis sativa
gatctagcttactaaatgttaaatctggccaaaaattaacattcaatcaacatttcatcacatctaattgaacaaagataggattacttcaaccattgcaaatcaagcactagctcataaaagggttcataaccacccaaatctcaaagatcttatttcatgtctgaaattaaaaacctaaaacaagaaactaacattttcatcgagctaaagagaatatcaaagagtagaaaatgatacaaaatggaagaggagagcaaaagaaatgagtttgtgagctcaaatcttctctattgatggttgccttcttctgcttcttcttaatcttcttcttctattctttgtaccctctttttttgtgtactttgctctgaaaattcctactacgctctttcaaagcaactgtttcaaacttgccaagcctcctttttttttttgtcaaaatgtcctttaaaaactttacataggttggcatttgctccaaagcttccactaatggtatattgatgtggagctgctttagaacatcaagaaatctccggaattgaccatcatcttgttgcttcttcaatcgttgaggaaatggtggaggtggcttttgcaaaggcttttctgtagtagaatgctgatcggatgctgtaactactgggggaatttcagcagctaaaatttctggttttttcttcatttccccctctttttggattgaagatggctccttactgccttttgttgcagccacattttgctccagaatttttccacttctcaaggttaccgctttgcaatgctctttaccatctcttcgtgggtttt

SEQ ID NO: 151367 - DNA, 503 bp, Cannabis sativa
  modified_base (468)..(478): a, c, t, g, unknown or other
gggtgcaataaattaacagaagactgcattgcgcactaaagaaaaagaaagggcagaaagtagaaagaaaacaatctatcctatgccctaagcgaccactatatgaagaaagcatggtcttttacaaaaaataacaacaaatgcgtgacaagagtaatcctattactagagcagtgaacccaaaccgattatatgaagaatttaagcatttgcattcccagaaacttcgaatacaaaccaagaaaagaacaagcagataagtaacagcatgccatgcatattaacaataaagcaaagggtgcaaggaacttacaatgaagcgttgagactgggggtcctgctgtgaatcgaatgaagataagaaggactgacagtaacaaacgaagaagaactgggaaaaaatgcaaagttttcaaaagtgtttttctgggtctgagaattttttctctctgggaaatttgagcaaannnnnnnnnnnatgggaagtaaccgaaatgaaggaa

SEQ ID NO: 151368 - DNA, 924 bp, Cannabis sativa
  modified_base (26)..(36): a, c, t, g, unknown or other
tatctaaattagtaattttaattaannnnnnnnnnnttaaaataaatagattaaaatacgtataaaagaatatacaaccctcaaaataatgagatctagttctaaggatatttgatctccattgttggtcctacatggtcttttgtttttaatataacctcgagacgctagacttcgtcccccttatggatggttattcgttaaaacatttaacaccaaaaagatctcaaaagataagtattttgaatgttttcgtctctattagactctcccctacggtgactactttgagataaatttacaaagttatgaaataatggtggaagcttataaaataagaataaccttgattttcgcctaccaagacaacgttagatttttattttgatcgaataaaaggttgctagaatggtgtctattttagatgagttgactactttattcaatgagcgatatctttgactatcgcctaccgggacactgtatcaatttgttagaaacattggaaattatttaagatgtgcttgttttttattttcacatgtctttataacttgctaaatgtatgataatttctaaatgtatatgaatttatattgaatcatgttattttctgttattaatgttatataatttcgaatcttcattgttagtctaacttagtttgttgttttaatgggacaaatctcaaaggattgtcatccgttagacaaacataatagtgttagatctcgacagataagtatttgtaaatggaacatctagttgtacatccaaagatgacaactaagattagtgtttacaatgaaacaataaagaagttcataaaataagaataaccttgctctcgcctaaacgagacatcatttgattcttattttattcaaaattatcctttagttttttcctcttagttttttcatt

SEQ ID NO: 151369 - DNA, 783 bp, Cannabis sativa
aaaacttaatcaaaaaagatatttgttccataagttcttgtatcacataagcttgtaatatgagtgttgaactagtggaattagatttaacaaagtttaatattatacttggaatgtatttcctgtccaagtattcagccagcattgactccaagcgaaaaatggtaacattccaactggagggtgaaaattcatttgtttatgttggatcggttcgaggttcttggatcccaaccatttcagttttaaaagctaaagatttattacacaatggatgtgtaggattcttagtggttgtaattgactccagcagacctaaaataattgggcatgaggatgtcagggtagtaagaaaattccttaagtttttctcgaggagttattgggattaccatcgcagcgagaaatagatttatcatcgacttggcatttcgggcatagcctattttaaaggtaccatataggatggctccagttgaacttaaggagctaaagatacaacttcaggggatgctagatctagggtttactcgacctaatgtatcgccctggggagctccggtcctatttgtaaagaagaaagatggatctctctagatgtgtattgactaccgggaattgaataagctgacaatcaaaaataagtatccattgccgagaatagatgacttgtttgatcagctttagggtaagacagtgttctttaagatcgacatgcgtttaggttatcatcaactgagaattcgcaaggaacacatgtaacgtccccgcttcaagcctcca

SEQ ID NO: 151370 - DNA, 680 bp, Cannabis sativa
  modified_base (533)..(539): a, c, t, g, unknown or other
tataacttaagtattattatcactaaaaattaaacttaagtatttatttacaacagagagttaaacttaaatatttatgccgcaaattactctaatttaatattacgcttctagaaagtgctaagcactactggtgaccaataacaatactctttaatttagaataattggtgatgaaacctcaaagctaataacaacatgtcacatgtattcaagtgtacacaatagtagtgcaattgttatttaatagtgagatttaagtgacgtctcaaatttacaaacaaaaataaaaataaggaagtattaacaaaacaaaaaaggaaacatcagaagaagtaagtgtttaaaattaaaagattaatttacgacataaatacttaagattaactcttagttgtaaataaagacctaagtttaatttttaacgataataatacctaaattatatttctgaaactctgtatatatctaactgttaaatgtcaaatcattatctaagtgtcattttcttattgatatatttaaactatttnnnnnnnaaaaaataaaaatttaatgacatagaccaatcaggaatttttatgtgaaaatttacttaacacttaacagttaagtacctacagaaatttcagaaatataacttaaatattattaccacttaaaattaaacttaagtattt

SEQ ID NO: 151371 - DNA, 585 bp, Cannabis sativa
ccatatttttttgatagctttcgttgtagttgacagcgaaaaccacaattctttgacctatattatgagaaaattgaaagaaacaattggtgatattgagaacttagccttcgtatcgaataggcatcaaagcattgttcatgctttggagattgtgttccttgatgcacgccacggtgcatgctaccacctctgaattcttgtgcaaatgggcgttcacagtcagcactaggcatcaccaattacttcttttaattttctcatgaattgactataatttaataaatatattattatattatgaattatttgagaattattgcattttagaccccatttatgagttaaggatatttttgcaattttgacacgagaatggtaaaattataattttgatatatattttgctaatagactatattattatatagcatgttcatattctcttactgcaggtaatttttgataatttggcacgatatagtcacaatctgatattttggcccgaatcaggttcagggtctaaaattattttattgtgtgattgtgttataacaaatgtaattgagaatatctgaatgtgta

SEQ ID NO: 151372 - DNA, 689 bp, Cannabis sativa
cctcaatcatttatcgcgttaaaccaagctaaaagaaaattatcatttcatttctaaatacttatcgaagttgtagattctatatatatgattagtgctcccactcaattatactaccatgtttctaagatgtaagtattgggcctatctaattggtcagctttaatgaacaactcaatgaacacaaataatacatttaagccagaacttaaccatctcaggattaaaatctattgacctaagatcaactaagtgatattgacttagatagatataacggtaagtttatgatttcttatccaatgtcaatatcagtccagtccaatgtatactccatacattcgatgctagcatattttgccaatgccctagaaaggaaataatacttatccaagttgtaagtaaactttatcactgattatcatgttagtgtaaatctagtgtactgacaaatcatgagacaaaaactttgaaacatataatcatgattatattccactgtgtcgacaatactataatcatgaataactatattttatggatttaatataatttatacattaaacatataatcataaaagtaatcatgtgaactatgaaccataaaatgatttctaatcttttattaatttgtaacgccctaatctataaggacgccacgtgtgtaattttataaactagtttaatac

SEQ ID NO: 151373 - DNA, 561 bp, Cannabis sativa
  modified_base (442)..(447): a, c, t, g, unknown or other
catcacctaatcaggtgaacctataccataacttgacaccaatatattgcatcgcctaatcagacgagcttgtacctacacttggtacgtatcatatgtcactgacgccgtatttacacgtcgccaggaggaaaccctacaacggtttcattctatgtcataacttggcaattttcatatcactgacgccgtatctacacgttgccaagagtaatcgcctaatcagacgaactcgtacctacgcccggtacttatcatatgtcactaatgtcgtatctacacgtcgctaggagaatcgcatcacctaatcaggtgagcctgtacctatgctcggtactcatcatatgtcattgacgcccgtacctactgcaaagaccgcttagtttaatttgaaaatatgcagttaatcatgtttaatcatggaaaattatttatagatatnnnnnnaattatttatgctgttattattgaattctgaaatgcattatttgtcatttagtgaatttcataaattttgtatttccggtgcccggtaacatggaactcggtgtttggctcagt

SEQ ID NO: 151374 - DNA, 827 bp, Cannabis sativa
actatctttggaacacaactccaacgtcagcttcttgagtttatcttcaagttcacatttactatcatcaagcgctttgttcaaatcctgaagttccttcactctctttgccatatagctgcattgtgcgaacatttcctcataagctttattcttctcatcaactgttgattcagaatcagaattaccctcatctccctcagattcttcagggacagattccctgaccataaaggccatcacagactcttcatcctttgattcatcactagcctcttcttcttcattatcactctaagtaacagccaaagctttctttttctttagagtattcgcgcatttcgcctgaatgtggccaaagccagaacattcatgacattgtatccttttcccctttttttttcagattgttgagactgcctgttgggaccagaaaagttccttcccgaagagttttctttattgtcagtattagatttcttgaagttcttctttagaaattgagcataattcttccccagaagggcgagattcaaatctgtgaaagtatcagaaagatcaacctctttagagttctcttccttatggataaatgcaacacccatttcggttttctccttctcagaactcttgattttcttccctttttcccatctttcaagagttaactcataattttagagagacccaatcaatttatctagatcaagtgcttcaatatcccggctttcttcgatagaagtcactttggacatgaatctctttggaagaacaccaagaagcttcctcacaagtttcttgttagagtaagtcttaccaagagcata

SEQ ID NO: 151375 - DNA, 819 bp, Cannabis sativa
agaaaaatgtaaacatatggttacaataaaaatataaccattgaatagacacacatatatatatatatatatataaaatattaaaaaaagggaatgtgttttccaagagaatgtgatgtttcattaattctctaccattaaaaatattttggttttatatattctcttggtaataaaaagaaaaaatagttcttataacaattttcacatgatattggcacttcaattcaataatcatattttatatactgcactggtactcagctttggtattgcatctcttatttttttttttttgaaacaagtaacatttaatttttgatattaaaaatattaaattttaaaataaaataaataaatgtattgcctctcgaccctccacgtgtccatatttatgagttaacagaagtggtagtaatagtgtaagagaattgtaagattgaatatttttgcctccaaaaataaaaataaagtatttaaatgtataaaatcttaaatattaaatatttatgccgcaatttaccttaatttataatgtattatgtattggtttaaagttgtttttgtttattgtgtcttaatttgctaaatttttaatgttttatttatttattaatttatttttataaaatcacactaaacatactatttatttaattatcaaatcactattatagagttaagacttggtaattactaagtgtaatataaacatcacaaattagtgacacaagagtaatgtgggacaaatactgtaaagaccgcttagtttaatttggaaattagcagttaattacgtttaattatgaaattatttat

SEQ ID NO: 151376 - DNA, 741 bp, Cannabis sativa
  modified_base (188)..(191): a, c, t, g, unknown or other
agacattatatgtcataaaccatatttcatagattgaaggtaattttagtaccattagacattatatgtcataaaccatatttcatagattgaaggtaatttttcattttaatttttcattaaggaaaatttactctattgaagtatagtgctttatttgtgttcaaaccttctaacatgttattttnnnnattacttggaaacgtcatgctctaaatagtgaaatctaattgaataaatgagccctcactttgtttccaattgttaacccaagataaattttcaaaagagagtgaattgaaaatttaagttaagttcactaaattaaaactttcaacacaaatctatgcaattaatcaattttataaagtaaataaaaatagtatggtaagaaaatatagagagcaaataatcaagcttgtgacgtaaagagtttaagggtaagaaattgtaaactctcgatttttacaagattcggtaaaactaagccacatacgtccttagcttttaaagttatggacatagctttgattttcactattgagttaagttaacaggcttgactaacccttacaatcgggaatttttcaccaaaagtattttcaaacctcttacaatagttttctaccgccaaggactatcaatctctttcttggattgttgtagtaccaatctcaccctaaccagtttgtttacaatattggtgtcaacctcatgttaggctatttttagcctactttt

SEQ ID NO: 151377 - DNA, 521 bp, Cannabis sativa
gatctgaaatattctggggcatttctcacctggaataacaaacaaaagccagaggagagaatttattcaaaaattgatcgagcaatgatcaatccttgttggatgaattttttctctagctcagaagaggtctttttgcttgaattgtcatttgatcactctcccatcctggtctctatttacaaagattgtaacacagggaagaagccattcagatatttcaatatgtggaagcttgctcctcaattcgagaatctggtggctgagtcttggcgtcctggaattatggggtcgaagatgtatcaagtagtcagtaagttgaggagattgaaagaagtgttaaggaagttaaacaaagagggcttttcggaaattcacatggaggacatagcagccaggttagcccttgaggatgtgcaaacaagattaaacaaggacccgatgaacatggatttgatagaagaggaacatagagctcatcaccattacacagaggtacacaaagcttattccctttttat

SEQ ID NO: 151378 - DNA, 721 bp, Cannabis sativa
  modified_base (32)..(37): a, c, t, g, unknown or other
tgtgtttattttattgttttagagaattcatnnnnnngatgttaatgaaacatacttgttggtaaatctggatcctagtaaaatattctcaatagacttgttgctgaaaaatttatgtcgcgtgttcaaattagtattttggccataacttcttcaatacaacttagaattggacgattcatgatgtaccggaaagctgagaacgagatctaaaactttcatgtttagctccaagttcagttttgcttctaaggtcgtctaaatttagtagtttttttattctcattttacaggactaggctcgcaaatataaccactattgtatttagtattgaggttgtgcagaagatggttagttttttttaatcattttttcttttttcttttaatttatttaagtgttgttttacagttgttttgccgtgattatttatttgacgtcgatttttctatttttgttccatcttgccggaattaatgattgttttcagccattctcgtatagaaaaaaaaggcaaggacaatataaatataatttttaccgtatgacagtataaatgtaaacttttatctaaaatccaatatttttgtaaaattctcaaagttttccacatgtgaaactgaactcgaaacttgaagtcctaaacttgtattttctattttttttttgggataagttgattttttttaattacacattaactaaatataattgcaaaat

SEQ ID NO: 151379 - DNA, 511 bp, Cannabis sativa
taagaaaggtcccatttattaaaattaacttaccacataagttagagattttataacaataaaaaaaaaattaaaactttataactttattgcaatataatataaggaccaataaaaaaaattaaataaatgtgataagagcatctccaacgtatacaccaaatttggtgttacactatcactaaatttagtgtcaaaaattatttcaactccaacgtaacaccaaaatttacactaaaaaaatatttcttattattatattaatttttatacaaaataaaatattatttttagtattatattaatttagtaaaatcactacaattaaaagcatcttttcatagttgtatacgttatagttgtttaaaacattctgtaaaattttgagaaatttaaaataattgataatataggatacaatattcaaacaatctatttcacatgtgtataagataaaagagtcatatgtgcaacagagaatttgaatcttgtttccggcgtgttaattttt

SEQ ID NO: 151380 - DNA, 516 bp, Cannabis sativa
ggtatattccggtggtacagattttgagggataattttttgagtttggatgggacatcttagcaagagagtgacaatcccatttctggatgtaactcaccaaaaactagaattttacgaaatatggctacactgagccaccgttttatacttagaacccagtaacggtaaggccaaaggttaagaaatccaacagttgggaatgaggtagaagatgaaaagacggttcattaatactaataatgaccctcgaaactatagaaccgttaaagttgggggcatgcatggtcttgaagaaagggattatgacgaatataccctctataagcatttaaaatgtacttttcattaaaaagaattttttgagaggtaattgttatacccgaagcatgtaacagtattaacatttaatggaatcattcattaaatacggaagtaacagagtatatttgcaacttgctgactataaggtcttatgcaagataaaagatatacaaactgttgcctcgtgtattaa

SEQ ID NO: 151381 - DNA, 507 bp, Cannabis sativa
  modified_base (67)..(70): a, c, t, g, unknown or other
  modified_base (442)..(442): a, c, t, g, unknown or other
aatcaaagagatactatattaaaccggaagtgttcggaggagaaggccaagagtgttggatcagcgnnnncgaggtggaagatgtgtgcgagctctataagattggaaatactattatgcctttttggtgcatgtataatagtgaataactaagttaatatctaagctaaaaattatttatagaactgtttattaataatttgttttaatttagttatttgcaagaacacacacttaatcttggtgggttgaggaatacatacgcatttaataatcctgcttcagtagcaactgatgctgggaaactcaaacaacgttcagaaaatctatgtcagcgattgatgggtatgcaacctcaaaaatggttaatatgtccgcggaattcagagtaagtacgtttttatattaataaatgtaacaaactaatggatcgattagtganttgactgaattaacatgttttgttctgtagtgatcactggatgacaattatgattcatgccaata

SEQ ID NO: 151382 - DNA, 503 bp, Cannabis sativa
tggttgttgcttcaagaattcttgctgatttgaaagatgtttgtttttgagttgttttcttattgttttactatttttgttaccctactttgaatttttttagtggtttgtttattttaattttattaaaatcttttttgttttattaagctggatttattttctaatgatgatgatgattttattgatgttggttcttctatggcttgtggtgttcaagttgttgagaagatgatattttatggtccattattattttaaatttgtttctgtttttgtttttttttaatttttctcttttattatttttttatatttttgagattagttattttattttagatagagtcttcctctatcgctgctgttgctggtcagtcttctagttcttctggttttcaaagttatgttcaaaatgatttctatgacattgctgtttttgaggaaacaccaatcttaattcctggaaagagggacaggaataaagggactgttattaagtc

SEQ ID NO: 151383 - DNA, 640 bp, Cannabis sativa
gttagtttttgaagtagaggcaatatttgtctcaactttagccgtaccattgtagcattagtacaattaggagctttgttatttcatttttgtgggcctctaatcaaactcttaaatgtctgatggttgttgatcaactcgtgaaagtcaaaagttaacgtgttcataatgttatttgaattagagggcaaaaaagttggagataaaccattaagaatcaaactcacttgagtttcttgatctataatagctccatggatctcagcttcctagaaataactcgctatctggagtaggtgttcatggacattctaatttggttttatctgtgcattgatgaagttcttggtcgcatcaaaacaagattgatccagcgccttcccaaaattttcaattaactgattcatgatctgagcagccgtgagagtgttatcaaatcttattttcaaggtatcaaccatgctagacagcataaataaacgagctttgttcttagcattctaccaacactcatatctatctcttactattttggttgcattttcacctggttgctcaggtgcttcttcagttaacacaaacaaagagttttcacctatgagagcaatattaatgttttttttccacttgatgaagctag

SEQ ID NO: 151384 - DNA, 704 bp, Cannabis sativa
  modified_base (616)..(634): a, c, t, g, unknown or other
  modified_base (675)..(679): a, c, t, g, unknown or other
atatgactatttaaaaaatataaaattaaaactaatatattttttttattgtagttgatttaaactttaaattcaatctatataaatttgtcatattattacaattaactaaaatataattattgaatgtaaaaataaaaaaaaaataaataaataaacaaattagtggtcggtttggacgggttaacccgaccaaaccgactaatttcattgggcgggttactattttcttttttttttagttgggtgggttgcacttaaatttttgtaacctgatttttatattgggttgaataaaacatagcataaaccgatcaaaccgaccgatgtacatccctaaaaggaatagaaatgaacaacaccctattttcatcaactttgaagttcatcatcactagaaatcaagtcctgcagcagttaaaacaacattaaaacaacattaaccaaactataaaacaactttctactgtgattttttcttcaaatgaatgaactacaagcggattacgtttcaaacaagacaaataaaaaaaacaagttataaaccttagtaatattttttctttggaaggttcaacttgtcaacaccattagagtgttggaattattttaccannnnnnnnnnnnnnnnnnnaagtatgtttattaacaccctaaacatgaactttctaaaannnnnaaataaacacgtataaagtttaaga

SEQ ID NO: 151385 - DNA, 531 bp, Cannabis sativa
tgttggatgatttgaggggtagaaattacagggaggccaacatatatttggtattgccagatccagtttttgcagttgaatggagactagatgaggatgcagtaaggcatgtcccccaaccccaacctgctaaattggacaaatgcattctagaggagttgtcatcttacaatgagttagtaccagatgttgttgtaaatccaagaggccatcatgatcctaatgatgaattctacaacaagtgtgtgtgatggggtgatttagcagcacaatggattgatgaagaggtagattctcgagagtgcagccctcaactaggtaatactgtgcctgagacaattgatatttcatcctcctcatcattagaatctgaggaagatgatgatgctgctgatgatggggatgatgatgatgattctgctgacgatgatgatgctggtgatgatgatggagatgatgatgatgctggtgatgatgatggatataatgaagatgatgaccatgataaaggagatggggaagttgatgatc

SEQ ID NO: 151386 - DNA, 541 bp, Cannabis sativa
taacaccactgatttatggcatgaaaaacttgaacacattcattacaaaaaactgaaagaattatccattgcagggattgttcgaggattacctaaattgggtaaataagttgaaggaaaatatggaccatgtcatctcagtaagcaactgaaaaactctcacaaaagtgttcctgatgtgaatacttccagagttcttgaactcctacacatggacttagagggtccaattcaggttgaaagtttgaatggtaaaagatatttttttgtgtgtatagatgatttctcttgcttttcatgggtagaattttttagagaaaaatttgatccttttgatgtttttaagtatttttgtttgaaattaaaagttcaaaaagattgcaacattggtaagatagttcgtggtaagagtaatcatggaaaaatttttgaaaatactatgtgtggtaaattttgtaaatcttatggtatttttcataatttttctgctcctaaaactccacaacaaaatggagtggttgaggattcccaccttcttgat

SEQ ID NO: 151387 - DNA, 1132 bp, Cannabis sativa
gtacaatcaatgtccttgtaacacgccacacactctacctttacaatcgaggaagctctgtgtccacacacctaaccacaaaataactcctcttacaattatactacatgtacgagagagaaagttgtaggtgttcattattatttgacacttaattaccaaatagctcatcctagaatcatgaatacttataagtggattttagcatccatgcagcctttccaatcgatattactaaaatcataatatgtcgtgatgttggttggtcgattgctaacacatccttgataccataaggatgacaactcaagtaccaatctagcatgcatgcaacagatatcacgatagaaatgtgtatacttgaataagccctaggttgcctttcgatacgcatatatatatgtatatgggactgttgacctcgcttttagccaaagacagtgagtaaaattaaataaattaaagaataaattaaatagttagaaaagtaaataaaataaaataaagaaaatgtcaaattttatagaggttcgaccccttttgattggtaataggctacttcctttttgttgtattaacttgtgagatgatgaaaaagaatgacttattctctcttgaaagctcttatactgatctctgagtaatttactcttggaccgagtttaatctctaatccatcctataaatatagaaattgtgccgtgacttgcaagtattaaatgtaccagatacacctcagaaattgctataaattagatcgctgagaacacaatatacactaaagacaacattcaccattaacgaggacgaagagagagagttcaatcccttagttggttttttctatagaattctcatcaattctaacttaaatataaagtaattaaagtttttctaataaaaatggtaatttactataatgacactcacatatactcatatacttaactttaagggtaaaatgatcattttcaaaatttctcacttaagcctgtactttctaattgtccataaaaatttctggcacctctaaaatactgaaggaaaatttgaattaatatacttacattaccctaaaaaatttcccctaaacttatacttaacataattagttatatatgacactttttgt

SEQ ID NO: 151388 - DNA, 1210 bp, Cannabis sativa
  modified_base (38)..(47): a, c, t, g, unknown or other
tggaagtccagatagccaacaagatggtggcccgaacnnnnnnnnnnaatggagcctcttccaacatcctattcaagacagcatattaaaagatgggactccaactcaaagatttaaccctctttctccagcccgtgtattggtttctctagacaaggagtcgcacctctagggaaaattttcctacccctcattgttgggcaagctccgacaagcataactgttatggcataatttttggtattggatgttccaccaggctttaacgtcatgctaggccaacaagctttgtatgatttaaaggctattacgtcgatatttcattcatgcctgaagtttccaacaaagaatggggtagggtgtctaagaggaaaccagtaagttgctcgggaatgttataacctttccatagcgaaggctaaaaagaaagtatcctctagccagagttcagacaaggggaaaaacatttataaatagggaacttcccaaggcggggatgaagatgtggattggggacccaagcaacaatgttggaccagtggaagaactggaagagattaagatcaacccagttattctggccagaaagcttaaaattggcaaaggtttgttgctcgaagtaaaattagcaatgataaaatttctgagagaaaacctagacatgtttgcctggtcacatgaggatatggtcagaattgatccttctgtaatttcgcacatcttaaatattgatcctaacttttgaccagttcaacaaaagtgaagactgtttaacaaggagcaagctctagccctgaaggaagaagtagaaaagctacacaataataatttcataattgaagctttctacccagctggggttgaaaatcccgtactggtacccaagccaaacaagaaatgactagtttgtattgatttcaccgacctcaatacggtgtgccccaaagactatttttcacttccaagaatcgatcagcttgtggacgcaacagccggatacgaaatattgagcttcatggacgcctattcggggtacaatcaaatcgaaatgcatccaccagaccaagaacatataagtttctgaacagacatgggtctgtattgctataaagtcatgccgttcggtctcaaaaatgttggagccacataccaaagattggtaaataagatgttaaagaccagatcagacgaaacatggaagtgtacgtgg

SEQ ID NO: 151389 - DNA, 868 bp, Cannabis sativa
gggggactagccgactagtgttgtagtttgacactaatgttgttttggtttgttttcaggccataatgaaactaagctcagctcgtgatggctcttggggatctttagatgcttttcaagagcgcgtgaagaccttggaggcttctctcatggtaaaggaaatagtcaattcttacttggaagccctcttgacaaagaggcaaaggatggtttcaggcttggagaccatgcttggcgctgggaatgtagagaacaccgcccaggctgccctcatctttgtgttgcaatctgaccttgatgatcatgagaataagttgcaggaggctcttgatgtccagcaaaccattaggtaagagtatgtcgacctgtcctctgaacttgcctatgagttccagttgtacaacactcgagttgtactgtcatacatggacaataaggctttcatggagagaatgttagcccgtggaaaggcactgttcaagagtcgaatggagatagaccaagttggtgcctatcgagaggggtcatcattgaggacacatgatgaggagttggctgacccacttgtggaggaggtggctggccaagacattgaccaccaggccggccaacatgctgatgatgggactagcctggactctatggatctcgatctcgcgacttgagattcagctcattctacccttgcacacatttagacagtatttttattagtagcattcaacattatgtttgtatcacataaacaatgttttcatgttccacctaacctgtggctttttatggcatgtggcctttcacctttaaaacattactcacttttgtgttccatgtggcatgtggcctttttgaaactttactttcatgt

SEQ ID NO: 151390 - DNA, 785 bp, Cannabis sativa
taaatctatcaactctattgtaaaatgaatgatgtaaaaaggattatatttacaagtagttaaattaggtgctttgagggggcatgagagaaactatttgaggagattattttgattggggatgccgcccttgtttgttgtcttgtacacttttgttttgttggtgattaataaagctcttttttcttcataaaaaaattgttttctatgtatttttttattatttttttcaaaatataaatttatatacatttaataaaaataaattatagtattttcaaattatatttttataacatgtaaaaaaaattagaaacttaaatatataaggaactattgatatggtatgttaatattaaaaatataaaatatatatatcttttaacaaataagagatttatatattatttattttaaatatttattatttttttggacaaatgataaatatttattgttttaatatataataataagtaaaaaaaaatatttttagtacaaataaattttttatagaattttttgatcaataattttcataaaaaattagtttgtatcaactttaatttttaactgtattttttcttaaattcttgaacaaacacttttaaatcaaaactttttctgaaagtaggttgtaatttgggatttttataccacatactgaaattttcttttttaatgtgaggcaaattttttttcttaaaaaatactgtatatttttgtaatgtgcacattgttaagttttcattgttgttttatggttgttttttagttgttcaact

SEQ ID NO: 151391 - DNA, 790 bp, Cannabis sativa
acaagtgtgttccattcttcaacgtcctgcagggaaacaagcaatttgagtggacagaggaatgtgaaaaagcttttcaagagctaaaaatgtaaattgcaaatcctcccgtacgctcaaaacctatagacggagaagaacttggcatatgcttggctgtcacggagcatgatgtaattgccgtgctgatctgagaggaaaacaatatacaacatccggtctattacatttgtaagagacttgttaaggccaaaggctgatacccattgatagagaaactcacttactatctgattctagcaacaagaaagttatggccctattttcaagctcatcctgttcgggtgtacatagaccaaccattacgccaaatattacaaaagtcggatgcctctacacaattactcaagtgggcggtagaactgggtcagtatgacattacttttcaaccccgaacaacaatcaaaggtcaggccttagcaaaatttgtagtagaatgcacaggcaaggaagaaagcatatcaaaaggcaaccccgagccagtacaaatacctcagccaagttacagtgaagacaagccgacttggaaactacatgtggatgggtcgactacagaactatccggtgcaagaatttttcccttgtcacacctggggccaaaaaacttgcacgctgcagtcaagtttggatttaaagcatccgataaccaggccaaatatgaagctttgatcgccggagtaaaacttgcccggagatgaaagtcgaacatattgaaatctgcagtgattca

SEQ ID NO: 151392 - DNA, 517 bp, Cannabis sativa
gacgtttgatttgtgattatttgtagtctctctactttatttatacatattgatactggtgatgatatattttatttttacaaagctaaccatacaggaattttactaaacgaagagtcttttgatattagttgttttcctagtggatgaggatggtaccgttgaggaagaaagtcgttattaatttagtcttattctactctttaatcttctaatgaaactaattttgtatttaagctgaaatggatggtctggatgacttaaattagctagtactagttagaaatgaggaatgatggatgctaggtattatttttgtattttaattgacttattagatctatctatctagtgattacataactatggggatattattgttcttttatattgatgagtggtcctaattttgttactagtattttaatattaatataggagttaatccattacttttaaattagtattttctaatataaattaaatgattatttataagctttatcttcctacaagg

SEQ ID NO: 151393 - DNA, 888 bp, Cannabis sativa
gtggagaaataactgttagaattccgtaaaccaactttataacaactaaataaatatattaataaaactaaccgtgttataatttttttaaaagagttttgtgttggattgtcgatatgaaacacatacaaatatcataaaaatgattgcatcgctattagtttgcaatcattgatatgtctaatttcagagcgttagtaaaatgttaatgcaactgaaatgccactacgcaataacttaaaaactaaaacaatatttctatgtatgtagctctagatgaattaaaattttctttgttattcgtgatttgatatgaataaatccactattaaaaatctagaaaatgacgttaatgcaattgaagaaacattagctagtgtattgatataggttttttttgtttatacctgatttagattgatcaggaactccagatctatttcagacaaatctacattttattagggctgagcatgaaatctagaaaaccaaaaaaaccttcaaactgacctaccaaacattgctagctagaaccgaaatcggtagaactgaaaactgaaaaaactgctaatggttaaaacttccattaaacgatgagttttttttggattataaactaaccaaaaaaaccaaaaccaatcgttatacatatatatatatatattaatttattaagtttttttgtttgctttatgttttgtacttactcgtaatatataataatatattattattctattaatattaaaattaaaagaattagacaattaatttttgaataattagtttgtgtgattgtagttgtagaatgtagaataatgtgcttatagaataaattggatcatattttaaagaaaaagaagttcggtttgggcagtttaaactgac

SEQ ID NO: 151394 - DNA, 556 bp, Cannabis sativa
ttaaaatgggaggcaatttttttttatttttgctccaaccatgctgatttgattattttaattatattttataattttaattttgttaaatataaattaatttaataaaataataataaaaataataatgcttttgattaaaataaaattaaaaaaatctagtaaaaaaaatagagaactccctactcattctttattatagggagttatattttgcataattaaaactcattttttttaaaagctcactctctattttagctaagaagtatgtttagagaatatagttagagatgctctaacgaatgaagtaacaaatattatattgacattttaacacaagacttctaaatgtaatttatataattttaattttattatgatcattagcctcgaaaactaataataagaaaatacatagaattaaaagcaaattatttttttagcaaaaattgaatgtacatacattataatttagaaggaaaaattgaaataacaatttagaagatagtaagatatgagttaaaaaattaaattgctaaaaaaagtactttca

SEQ ID NO: 151395 - DNA, 668 bp, Cannabis sativa
caagcttgatcaaactgtttagatcgtttgtttcatctttttttgttcactatatttattattattattattaatattttctggaactatttttagcccctttgaaggtgtagcattttatgtcttgttttgattatgacccaagttggaataggatccatggttaggcctcttaaaatgttctattcttgtttgaagatctatgatggactgtattgaatctaggttggtcaaactgtttagtgcttgggcagttcgaacaccaagcagctaaggctttcatattgtattatagaactctgcatatttcaactgtaaacaaaacaagtcccactccattgccaccaaacccaacataaggagaaaaaaatgacactatgaaaacagcagtgatccccatcccacatacccaaaacttcacaggaaaagatgttaaagcaatgccttttgtctttgttactcccatatgagagttttatatcactctcttgtgtgatgttgcttagtatatatatatttatataagagaaggagaggctttattggagagagaatattgagttgggtttgtttgtctgttcttgggctgtttaatgtgttgggccgaacactgtgtgaaagagtcattgattgactctctttggcttagggttgttcatccgattcaa

SEQ ID NO: 151396 - DNA, 723 bp, Cannabis sativa
  modified_base (536)..(538): a, c, t, g, unknown or other
tcgcgccctccagatggtatcaaccacaatcgaagcataaagaaaaacctcctccactcggatacccctgttgttaagattccaaagaaatttcacctgatcccaaacacgaattccattgccacagaccggatatatgccccagggagatgagcgccaaaggtgtaatgccacatcgcacaagagaaaaaggtgttcaacagattcctcccccactccacacataggacagcttgtatcctctatttggaatctcctcccgatcactttcctgacagggagcgcctctgagagaatgcaccaccaaaggatctgatgccactcaagcattttgctattccataacttgttccacaacattggagccaccacataatggctggctctttcctgtgcttgagttaggtaagctgatttacttgtgaatctcccgttaggctctaaggtccatccccatttatcctcttcctgccctgagggattacctcctttcaaaatagcagagacagtatctttgtcaaacagattatttagtnnngaaatgtcccaagagccagaatttgtgagaagatcagccacacagttcaagcctggcagaatttctctccttggtttcggaatgaaaccttttaagtgaggaatccaaggatccctccaaatgcaagtgtttctaccatgacccactaacttacaagctcatttttttcaggattgccttagctt

SEQ ID NO: 151397 - DNA, 530 bp, Cannabis sativa
tatatatatatgtgtatatatacaataactaaagtttaataaaagaagatataatgatcaatggtgggaatatcttatctaatatattttcttctttgtttggtcataacttatattttgaatagcattttgttgtttgatcacaaatctctttcattatttattatttagtgattccattgtgttaattaaatatttactttctatatttccttcaaaaaaattaagaaagaaaaatagaagcttcatttaagaaacattacaataagttaaaactaggaaatttggataagcaatgaggaaccgagattggtttatctaaataaataatgactggaaataatacaaacactacaaaaaataattacttttagttataattttttagtcacaatataattttttttgtaactaaatgcgacttttagttacaacaaattgtcacttgtgactaaaacatagcatttagttataagttgtccctaatttattagttttagtcacaccaagtattgtgactaaaaatacat

SEQ ID NO: 151398 - DNA, 713 bp, Cannabis sativa
aactgtctgtatggatttgtaaaaaaaaaataaagaagaacatgaagaagaagaagaacatgggagaaagatgaataacttaagatgatgaaaaaaaaatatgaattgatgaaatgtgtggtaacgtgtgattataaaacaaatataatatattaagttttttttttattttatttgttacttttataaaaaaaatgtgagctgccatgatttgatcgtgaacatcacatcaacaatttttttaaaaaaattaattaatagggcatgcaaaatgacaagtggcactataaacagtataactgtacagtacttttgtaatttctgtcgtgtggtagtataaaagtaataaaatggtaaaatacagtataccatgtaaaaattcccaaaaaaaatagattgaatcagatgcccacccctatgtaattgtatggtggtttttcttttaaaaaaaaggaacgagtgtttggaaaataattggcatccaaaatgggcaaagaatcaatttctctaagtcttctgtgttttttagcaataatactggtattgaggtgcgggattctattgaggccggtgaaaatggctattacttgggtcttccgtattcggttggtagaaataagaatgttatccttggttttcttaaggataagcttcggaagagaattcaaggctgggaaggacgtatcttatctcgtgcgggaaaggaggtattg

SEQ ID NO: 151399 - DNA, 547 bp, Cannabis sativa
tattaaaaattttatcaaatttatgtatcgtctttttttaaagtttttcatattttttataagaatcatgggttccatctcaaaataaattagtgatgagtggagtagtccatgtttttatatatggctcaatacttttatatttaatctatgtgggacaagattttcaattaattttaaatattaattattttttaatctcatatttttttttaaattatttatttatgctatataaaagtaaactctattaaccttttttatatttatgaataatccccttttttctttctatactgttaatgggacttaaggaaacccagtttaacatgagatataatataaaattcaatagtcttatttattttactttgataatacaaaaaaatttacttttaacaataaaatttatgactaattacaaatcatcattcttattcttatgttgtgattaaaaaagttgtgactaaaagtatgagtcacaaaaatcacaagtttttgtgactaaatgtgtttttagtcacaatacttgttgtgactaaaacta

SEQ ID NO: 151400 - DNA, 695 bp, Cannabis sativa
atgaatgaggatgatgccccagcaaaaacgtagtgaaaagaagcaatctaaacacaaaaaagaagaaatttaacacatcattcaaaaactctgacaagattattcccagaagttcaacatccaatccagaaaccgtaaagcacgctatatgaacaaacagtaagcaaatgtacgagatatgaagaacttacatgaagtttgaaggctgggggttggtgttgatcaccggtaaaacgtagactggcaacgatgaaggaatggtagcaggaaatcaatggtgttttaagtttctgtttctctgaaaaactctatgaaaatttggtgaaatgcggaaagtaaccaaatgaagtgggaaggctggcttttataggccagaacaggtgtgagacagctgtgatcatccaccatcaaacggctaggatgacaatcgattcgaattctacagatccaacggttggattaaatcgtcatcaaggcggtagaaaacgtttgagtgcccgtctgacacccatttaatgcgccgtatcaataaatggacaagaaacgaatcgacgccagcaaaaagcaaataactgcagtaatgatggtcatttatatatcaccatgcgcccgaagcacttgccaggaagttgataaggcaaccggaggcatctaagcaagccttgttcacttcatcaccaaacaaggcttggggg

SEQ ID NO: 151401 - DNA, 598 bp, Cannabis sativa
ttccaggaatatcgaagattgcttgcttgacctcctctcttgagtaatgcataactagcatatcggcttgctggctagacaaaatcggaccttgcctcataactccttccaaaaccgatttcctattcaccattttgcttcccaaaatctgattatagtattctaagaacaaagtagaaatttgatgaggattatcaactcttaccccattagaatccatgatagaaagaatttgattttgacttctcctagcacgaatactattgtggtaaaaagctgaattggagtccccatctttgagccataaaatctttgctttttgttggagaaaagaaagataagcagcttgaatggtagcaaattcagtcctagcagcagcttcccgaacctgtaactcagcattcaatggacacttatgtagctccttttgacaatcatcaagctccattttggccttaccatgagcagcaggaatatcagcaaaatactgatgattcagctgcttaagtttcggtttcagcccttttaacttggtcactatctgaaacatttttgtaccacaatccttttccatccacctatctcgaatcagcttatt

SEQ ID NO: 151402 - DNA, 528 bp, Cannabis sativa
  modified_base (486)..(495): a, c, t, g, unknown or other
aattaataaaaaatattctgttaaagttaacgtagaaactcaaaaattatcgttaaatcaaaaattttgttacatggccatattttatatagaatagatactagattgatgttacgtgatattatgtataatgtacacgtataattaggtttttttagaattttttttagctaatccaattacacttatttcagtgtgattatatacatatattttatatgtatattaaaatcaagtgagttatttaaaatgtgattaaaaatatctacaatattttaaataaattaaattaaaattaaaattttcttatattaaatatctacataatttttatttttaaatatatataattaataaaaaatattatgttaaataataatatatacagttaaactaaaaattctgttatgtataacaacatttatatataatatatatatttataaagaacacgttaaaattcagtacaaaaaatcttacttttannnnnnnnnnaatttgtgactaaaagtgaaaaagttgtgacta

SEQ ID NO: 151403 - DNA, 1301 bp, Cannabis sativa
  modified_base (856)..(864): a, c, t, g, unknown or other
gcaaacaagttgtatcttaagaagaagttgtacacacttcgaatggatgaatcaaaggaattgagaaagcatctagatgattataacagaatcattcttcatctgaataatcttggggtaaaattgatgatgaagaccatgctataatcctgttgagttcacttcccaagatgtatgagcactttgttgatacgatcttgtatggcgaagaaactctaactatgacagtggttaaggctgcattgaattctaaagaaattcacaataagagagctgagaaagatgagatcagtggggaaggattactcaatgttaagggaaaattccccaagagggaatacaagggaaatcagaactcaaatggctacaaaggtaaccattcaagatccaattctagaaactccacaggagggccaagctttaatggagttgcagaaaagcaatgttattattgcaagaaggagggccactttagagatgagtgtttaactttgaaggctaaactaaagaggggaaaatcatcacaagtctaggaagcaaggagttgctaatgtggctgatggctatgggtcgtctgatgcacttacagtgtcatctgatgctcttgtgatgtctagattagattcaggtggagattggattctagatttagggtgttcatttcatatgacaccaaacaaaggactacttaggactctttcaaaaagtcataggggcatagttcttcttgggaacaacaaagcgtgcaagatcaaaggtataggaacaatcttgttaaagaatcatgatgaagtcatgttgaccttgtagcaagtcgggtatgttccagatctcaaaaaaaatcttctctctattnnnnnnnnnataaattggggtatgttgtcaaaattgaggaaggtgtaaagaaaattacacaaggcacagaaaactatgttgagaggaaggttgagtaatggattgtatttcctggatggaaagacaatatcaggtagtgtagcacctcttatggactcaactaaacacagtcaagcaaggctatatcacctcatattggggcatgtatgtcagagaggacttgaggaaatgaacaggcaagggctgttcaacgagaagctaacataaagacttcaattctgtgatgaatgtgttttagggaagacttgtagattgaagttcaacaaagcagaacacaccaccacagaaaggttagcttatgtccattctgacctttgggggccatctaggattccaaccaaaggtggagcacactactttatgagtattattgatgattacaacag

SEQ ID NO: 151404 - DNA, 671 bp, Cannabis sativa
gacacttttaaaaaataaatttagggtctttttgttaaagagttttgagcttgggcacaagccctgggcgtgggcctatgttgccccacccttgagccgatcctagacaaaataaacttagtaagggtatgagcttcaacattaacactgatgtctccaatagagtaccaaataagttgtgcaatatatttttgtaaaaattctttctccaataatgtgctaaaacttgtgataaatttgacaaatgctaaaagttaagtccaatttatcataacatataatatgtcaaatttaatacacatttttttatttatattattaccatttagtattagtgagttactttaatacactttttaatgacaatactgctattatgttttgagaaaatatatttaatttattaattattaataataataattattttttttaggtcaatttgtattttaatatgtaattattattattagtttaattaaatatgaatcttattaaatttaacaaaataatttttaaaaaatattgttaataaattatataaggacgtgtttaaaaagtgctaaacactaatgacacgtttactacacagtaatcagaatcggaataaattaatggagaaatgtaacggaataaatgaaaaataatcggaatcaatatttgtaatatgt

SEQ ID NO: 151405 - DNA, 508 bp, Cannabis sativa
tccatgttagctctcgaatgagctccataaagatcttctagagctgtccaaagacttgctgcagatctgcacccaatgacttctgaagcaatgccttctgtcattgatccaaaaagccaacccattaagagttggtcatgtgtaatccaaagctcatactctggatttggagcagggatttcagcttcagtattttctgaaggaagaaactccgggggacatggttttagaccattgagaaaaccctccagacgatgccctcttataatggttagaaccattgttttccacaaaggaaaattgcttctgtcgagcttcatggtgaatggctgacttaaagtgttgctgaaaggagtagctattgttgcagaacttgcagaaaaggatcctgacgacacaagacctggattggcctgtgaagcttgtcctggtgttcttcctggagtctgagattcatcagatgccatgactagagtacaaccgagctctgataccaagtgagaaagta

SEQ ID NO: 151406 - DNA, 1301 bp, Cannabis sativa
  modified_base (943)..(945): a, c, t, g, unknown or other
  modified_base (1161)..(1166): a, c, t, g, unknown or other
acacgtggaatcaactccatgtatctgctcacaagaaatatgccagacagggcatcacatacattcgctcagatgaagctctctcagccgcgctgtgagcaatctgcgcagcatgccaacactttggaaatgtagctttcacatcatgagtcaccgaagaaatccctataactttgggatcagatcacagagatatggcaagctgtccgaatcccttgattagtgtattcggtatttactacgtaatctttccacttatatcaattgtaattagaaggaaaatacttccctcccaagcttaaagccctataaatagtgactcatactcactgggcaaaatgtcgaaaatctatttaagaattcatattcagagatattattataagagctctaagaaaaggaactattctccttattcttaagtcaatacaagctaagaggaataggctattaccgaagtgctcggggttgaacctctatcaaaattcccgtgtcattatttgctgtattattttacctacctattatactacttgtcgcttacaaattagactcaccgtcgttggctaaaagcgaggtcaataacctagatattttaaaattagtttcactttgaattttaaatttttttgaaaagatattttagattgtttttttaaaaaccctaaattttcaaaatttattagttagttaaataataatttaattacataagtaataaatatcttattttacatttgctacatggggtattgttagttttatttaattctttattcaaaaattgttttttcaacaaacctattatttatttgatctaaattgctatgattaagttgttgacagatccaatgatctgattttaatcatagacaaattgtccatagatcctataaataatttgtatcaggtaaattttgtaatttctttcatctgtgtaaannnagaaacatgatagggcccatccaaatcaatttgacatttgtgagcctatatttttgcttttgggttcagatgcatataggaagcccatttatttctaaatagataaatggactaggttgctaaaatgaaatattacttttgatagttttatttacgcccaattattattgcgcttattcaattaataacagttatttaatttaaggttaaattccnnnnnnttaggccttgtgtgagagttagggggacattaatagtggatacgaaatactaaacccagccctccttcacatgaacaactccaatagtgaaggtccatttgccttatttaataattgtattaggctaattatact

SEQ ID NO: 151407 - DNA, 1330 bp, Cannabis sativa
  modified_base (176)..(178): a, c, t, g, unknown or other
ttggatggtttcatgatggtttatgtgcttatttgatgattgtttggaaatcgcagtatatgttgtaaacatatttttaatttcgttctgaaaatatttttactggaaagtagatgaaaaattaatgaatttacacttttacagaacccaatttgatttttttatgaattagttannnttttttgaatttggatgaaaatatgtggttttgaatgcacgtatgcgcgcgcacctaggggatagccggcatccctacgcgtcttcagacaacctgaccgaggaagctcagacacgggctgtctgaagccatgtcacgccgagctccctcggccaagtaggctgcatgcagccttgtcactcggccactcctccaattccgcacgcgcaggggtatgcagtgcatacccttgtgcgtcaaatttgttttcttcatatcttttgattcaaaaatcctttttcattgaaacaaaatttaaaattttggtagaattttgtgtagaatctaaatttccaattaaaaatctaattgtcagaataaaattaatttttaattaattaaaattagttttaaatattagtaagctttaaattttaaaaatttaatttctcacaaaaatagccttatggttaattttaaaattttagattattttatttattttaattataagattcgatattacatttttttattaaatttgaatgatcttattttgatattaaaattttatttttaaaaaataatcttgtttaaatttcaaaatttgataaccataacttttttttaaaaatttgttattttgaaatatattttattaattaaaattataagattagaaatatattagttttgacattttatcttattagatatttttttttattaaaattaattttggcaaaaataacatgaaatttaaaaaattggtttgtttaggtttgaatagaaattttagggtttctaaccattaatttttttttcaaacttattttattttatttttaataaaattagaaatattctaaccattaaatatcttatttttcaaatagtttattttgtaatatttaatttattaaattataagactaagaatataatattaggaatatctaattttttttttaaaaattcaagatattatattatcttattagaaatttaaataatttaaattttgaataaacttgaaatttgaaaaattggttagatatttgaatttaagttagaatttaggaaatttacggtttttgttaggtttttgaattttttcaaatattctctaacaacctaaatttaaattctagttaagatatatatatatatata

SEQ ID NO: 151408 - DNA, 709 bp, Cannabis sativa
cgttaaactttttcaatgattatttcacttacacttaattttttaaagtcaaattttaatggtaaaattctctaaattactgaactgtttgtaaatttaaggtgtcatctattttttttacagttaattgccaacatgaaccgtttatgtgtatacttttgtacacgtgacacgtttctattagtacacctaatattattatttaaaaataataaaaatattttaaaatttataatattttttatttttttaatatttaatttttattttttataattttattaattttaaaataataatattaggtgtatcaatataaacgttcacgtgtacaagagtgtacacataagcagtctatggtgatagttaactgtaaaaaaaaaatgacacattcagtagtttggaaagttttactaacaaaatttaaacttagaaggttaaatgcaagtaaattaatagttaagagagtttagccgccaaaaactcttaaaaagttgagaaatgctaaagtacactcatagtgcttataatgtgtaatatcgctattagtgtaatttaatatcgggtctcacatattttactttaataataattatagagaatcattaagcaattatgaaaggggaaatttgattttctatacttacatatacctaatattttattcctaaactaatacacatcaccattgaaaatatatgaccatttt

SEQ ID NO: 151409 - DNA, 614 bp, Cannabis sativa
acttaggtatttatttacaaccgaaagttaaacttaagtatttataccgcaaattaccctttcataaaatatttacattttttatttttagagcactcccaacaacttgtctactttatcctttaaaatatcttaccaaaatctcactttttctgttttatctcaaatatttattatattataccatacatcaactttttttatatttttttctatcatttaaatattatatctctacatatattttataaattaaaataaaaaaataacaaaagtaatgaaataataaaaaaataattaaaaagaatgagaaagaaaaagaaaataataacaatatttttagctcactactattcattgagctaaatgtagcgctaaaggaagagctatgatttattctagctcaccatttaccttacttgttagaggtgcaattttaccaaatttttcaaaattttagctaaagaattattttagctcatctattaggaattctcttatattagaaaatataaattttcaataataggtaaagggaaatttgattttctatgcttagaaaatcaaaaaatttgatttataaaccaataattaaaaccctaaaaaaactatac

SEQ ID NO: 151410 - DNA, 619 bp, Cannabis sativa
  modified_base (362)..(366): a, c, t, g, unknown or other
tataaatatatgtactaactaaaatgcatctaaaatgcatattgcatatatatatttttttctcgatttttttttcagggtgcgcgactgccccacctcgcctctatgtgggtccgcccctgtgagttagtatatgtcaaagtttgaggaactcgatttagtatataattatatatgaaagtttgaagagcataatttagacgttagtaaaattgaacaaaattgagcaaaaattattaaatctaacaatctcaataattcaaaagaatttataacggcatgaaaaagttcaaaatgtataatttcagggatacttcaaaaaaaatataaaaatacgattatatagaattttaaatattttnnnnnttttatttacagaaaatatggtattttaatgtatttttatattatacttttgttaatttattgttgattttttaatatttgtatgttattctttgttgttattttgatgttgtttgtatattatttttctactagttttatgtatttttttgttatttttatagaatattataaaaatacaaaaaaatatatatatgaaaatataaaatttttataaactagagcaatttgcggcgaaacccccttatgtttt

SEQ ID NO: 151411 - DNA, 686 bp, Cannabis sativa
gagacaaacaaacgacacactagggaacgagaaagagagataaagagggcactacgaataaaaggacacaagggagaccacagagaataaatggaaacaaacaagggtagacacaagggacaacgggttaaggactgggtaaaggactgcagagaggtagaagaccccccattcatcccaccaatttgattgattgaaaattaggcattatgaaaattggggatattgattgaacacttacttttccacggtacgtccatctgtcccgcatattcgttgagaagtcatcaaaagaaaataaacgactgtaaatagttttggcatttaagtggttgaattaaaaaatatggcatttttgagaaatataagataaattattgaaaaatggtaaaattgcaaagtgatgggcccacatccaaggccggccacttatgctctattttaccatttatttattattattattatgccaaataattcaaacctaaacctagatggattcctataaatagatagtgatggactcaaaattagaagcttaataattcacttgcctttagtcaaattttaagccttctcttctctctctatttcgaatccttcatctttctttctttcttctattttcgaaccctacattgataaagtacgtgcccacacataacaagttggtactcaatcatagt

SEQ ID NO: 151412 - DNA, 553 bp, Cannabis sativa
tccaaaaagcttataatcttaaagttatttatttataccataaaaagttaactcttataatttttttcatatattgtataatttctacttaaatttttggacaccccatctaatattcaatgcaatctaattgcatattcaaaaataatatctaatctaatttgatcacaattggatatttaatgttcggtgatcaattttaattagatcattcattatcaaatcaatttatatacacccctaaatatagtaaacaattgcttcaattatcctatttttttttttaaaaaaaagaaaaaggtaattattgaggaagagtataaattcttttatcaacaaaaaaatcaaaaaaattctgttaaggttgttctttattcttttaatatattctaacactttttttatcaaaaaattctaacgcttgtttttatgatatttggatttttttttctacatacttggcaaaaactacataaaaatatgaaataattaagagaaatgctaaagggcactagtggtgcttagcactctcttatgtgttaatatcactatt

SEQ ID NO: 151413 - DNA, 1118 bp, Cannabis sativa
ataaaactctcttctgtgagtcgatatgttcacttcaacaggcagcattgcttccgaaccaaatgctagagagaaagcagtgtgtcccattgctattttctcggtagttctatgggcccagagtacctgaggtagctcgtaaacccatctgccattagcagcgtctagcttcttcttgatagtatcctttgaggttttattaacaacttccacttgtctatttgcctgaggcctggatactgacgagaagcttttgataattttgttcctctcgcaaaattcagtgaacaagtggccatcaaattgggttccattatcgaatactatcttcatggaaattctaaacctacagataatgttcttaacgacaaagtcaagcactttcttgcaggttatggaaacgaggggctcagcctccgtccatttagtgaagaagtcgactggtactaccgtatacttagctcctcctcgcccagtgggtaatgcctcaaagagtcgattccccatatagcaaatgggtagggcgaggtcatcattcttagttccattggcggcatgcgaggtgtatgtgagaacctttgacatttatcacatttcttcacaaacttgtgggtgtccttattgatcgttgaccagtaatatccttgtataatgatttttttaggcaagctttgccaacccgcaggatccccacaaaagccttcgtgaatctctctaatgatttcatttgcttctgcagggagaacacaccatagtaggggcatcgagtaccctctcctatatagtttgcctttaattattgtgtaacgaggcactgaatacaatagtttttgcacctcgtttttgtcatttggaagttgtccgttgagtaagtaattgataataggagtcatccatgtaggagagtcgtctatcatcttaacatctttcgtttcacgtatacttggctcgctcaacatctttaccagaactaagttcaattcatccaagtcattatgtgaggccaattttgctcaagcgtcagtgttggagttatgttctttcagaatttgttcaattttaaagtaatcgaacctttccaagttcttccgaactttctctaaatacctcgccatttt

SEQ ID NO: 151414 - DNA, 548 bp, Cannabis sativa
  modified_base (472)..(506): a, c, t, g, unknown or other
gttttgaaaaaaaaggcatagttttttaagggtttagatttttggtttaataataaaattttttaattttgtaagcatataaaatcaaatttccctaattatatttttgttagattgatatataattttttttaaaaaaataataaaaacacgttatagccaataaagccgaagaaaaaaaaatatcttatttagattttttaatttaagaaaaaagtaaaaaactcataaaaaagctaaaattcttttaaaaaaaatgaaagagttaattttttttttaaaaaaatttaaaacatgataaaattatataaaaaaaatatattttatattaattaatatttatgaggctaatcaaaaaaaaaaaaaagagaattaatgaaagaataaataatactaattagagataccttatactatcatatcaccttctcatatcccaaatgtctcctatttatttatatatatatatatnnnnnnnnnnnnnnnnnnnnnnnnnnnnnnnnnnnaccatatggttacatttttttttgacctgcaatagcaggtta

SEQ ID NO: 151415 - DNA, 520 bp, Cannabis sativa
tcttcttcattacgccaagccatttcgagagtctcgttcgatctttgcgagagtatggttccatcgtcattcttcaccgcatcctcatcaatcttctcttcctcagaattagaaaattccactgtgttgatctcaaagatcgctgccatagatatcgtctttctcaccagtcttcgacgacggtcccctctgtttttgaatcgctgcattcgttccatttttttcgacctttgagtcttcccgccatagcaacagaagtaatttgaaaaatctccaaaaccctagcagagcactattctgtacttagtcttttttctttttgaaatttaactccccaatgtttagaaattttatactttaaaatatatatttatgtctaaagaaactcaacagggttattgctttaattaatataagataataacgtttttttaaaaatgttatccgtaaatgtaattaaatgctggaattcttgtagtgtatcattcatccatgatttatctattctaaaaattaaaaa

SEQ ID NO: 151416 - DNA, 566 bp, Cannabis sativa
  modified_base (412)..(413): a, c, t, g, unknown or other
ttcagtacgaccaagctctataagtgtttcatgcctccttttagtataaataaccaccataggatcaatctgaagttcaaaaagtaaaaattcaaataatactcaaaatcaaagagatgagagcgaaccggcaatgactttaagaaagtgatgtactccatccacacagacttcagtcgcaatagatttaagaaaggtcaggaaaaatctaccctttagcataataatactcaaaatgctatcttaagtttcataaggccgtgatagacttatactgatagataattacaccatacatataaaaaacagagctatggaagaaaatttggacttacgtagcaagaaattgaataaagccataaccaaataaaaaaccaccataggatcaatctgaagttcaaaaagtaaaaannaaggaatacatgttaaataataacattacataattaaaagatgcagcctccaaagatatggtgaagtagcgatcaagagcccaaatcgttctttatgtatggctgttgctgctgtgaattgaagaggttgagctttagaaatgtaaaacccta

SEQ ID NO: 151417 - DNA, 573 bp, Cannabis sativa
atcatgtgaaccatgcaacattagatgttatttctgatctttataaataagtaaatctgattatattgaaatgagttttttttagggcacaaaacccaacaaatgcctcccagacagccaatggtctgccgtccaatccctggtcacgagttccactcgtgggccaagaggtaggcagacaaaccttgtccgggaattcatccggaggagccatgctcgagggatccacgcagtataatggagccattacacctatcaacaaagcgaaccaatcgctaaggcagctatgttcttctgtgtttgataggttgggaacaacccatgacctaagggacgatctaaacagaagaaggggaatagacgagcaaaatactacaacgaacgtgcagcccagagcccatactcaaatccccgctcagaaagatgttgacgtagtccaacccgaccaaaatgccaaccaagtcagccaagttgtacaggcctagctcgacgaactgaagaatatatttcatggaatggccgagcagcgtaacaatgatcttgagttagactgtgcacgcggaactcccttct

SEQ ID NO: 151418 - DNA, 711 bp, Cannabis sativa
taaaacagtggtattactattattattttaatgagtaattagtatttttgcctcctgaattttcagtattatctattttactttctaaaatatacgacttgttaaaaattttcactaaactataacaattacataattatgcccttaattctgttaggttctgtttcttttaccgttaaaaattagtatttttaccccttaaactttgactaatataaaattttgcccccttttattaaaaaaaaaaaattaaaaactataatattctatcttttttaaagcaattataatattatattaattcaaaaaaaataataattaaaaattggataaaaatattaattttacttaaataatattttcaaactttattttatttatcaacacgtttcttaaaaaaaacaaaccaaaattattgagaatctaataaatagtttaaatgaattaagattttttaaaaaaacaaatcaaacatatttatatttataaactcatacattaacaaataataagaaaaagaaattaccctatatactattttttttttttaactttttcttaaatttacaatttgagtttcttagatggtttctctaatagtttccatgtgggttgctatactgatttcggttgcgatttaagttgtttcgttagttgcaatatgggtttctatatagagttctgcaaaaatgcaaaaatgcaaaaaaaaaa

SEQ ID NO: 151419 - DNA, 839 bp, Cannabis sativa
  modified_base (591)..(593): a, c, t, g, unknown or other
atctccactaatccattaaccgccaggggcgagttgtgggatgatttacaaggacgtctggtgagaagcatcactgagttcaacgagagggctcaggtatttgtccgtaaggaagaagcatgaaaggaaatgaacttgttgaaaacaagctcgggaggtaaacccaacaatgtttcaacaggaagtgcttccacgagaattgataacttgagggcttctagtccgaaaagaaaggacgaaattagggaaccgttgaaggatagaaagaaacaaaagaagcatgacaaatacgtgccagtttatactatttacaccaagcttaatgaaacttgggaaaatatttacctcacacatgagcagaaggtagccttcggcaaacccgagcctatgaggaattcgatgagtaaaagagatcctaaaaaatattgtaaattccataaaaatattgggcatacgaccgacgaatgtcgccaattaaaagatgagatagagagtctcatcgctcgaggtcattttaaacagtatgtgaaaagatagggctaggggtactactagcccaataagccaaataacccaaacaaccaggggttnnnacctattcctgtggaaggagaggatatcctggttattttgggagggccgcatatcgtaggggaaagcaataacgatcaaaaaagttatgtgaaggagataaagaacgagcagtcggtctttgccccataaccttctaagaaggtgaaaaccaaggaaccccacattgcattcatagaggaagacgagaagaacgtgagatatcctcacgtcgatccgctggtcataaccattcaactcgccaataa

SEQ ID NO: 151420 - DNA, 530 bp, Cannabis sativa
acatgaattagcagttcgtgcactcagggtggatgataaactagtttggatagataatttttcatcttttttctatgtaaaaacatttgagtatcttcaatgaaagttcattgtcaaaaaaaaaaaagggtaaaagttgagaagtaaaagtataaaaaaagggtaaataactaaagagacaaaatcaattccataaaaataaaggtaatttgttcctatattatatatatatttttcatcgatatgtattgtatgcacataaatatacaccatcaaattatttacaaattattgtatctaaaaatgtgtgtatcatatcaatcatatattttcaaaccataatatttttgataattgtacttcttgcccatgctccatgcctcaattgcaagaatatcttctttcattttgtttattattattatattaagagataaacattaaaaaaaaaaaaatcatttcaaaaaaaatatatatataaaacaacaaaaaaaattacaaaaatttgtacggaatgttaaatattttta

SEQ ID NO: 151421 - DNA, 734 bp, Cannabis sativa
  modified_base (397)..(400): a, c, t, g, unknown or other
gttgaaccgtgacaggttatcgctagggtccgagttcccagtgtaagctgccatttcgggcatcttaaaatttttggggagctccgcttctaggatgtgcttggcacatttctcccggtcttcacagtcagagtcagagtcatcgcctttttgtcttcgggagactcgggcgatgtcttttcggagtatggcaagctctgccatgattccttcgttcaacgttcccgtagagactacaggtccgtatttcttttggttaaggtgatcccggaggtcaccgtgtttcccgttaatctgatgtctcagatcgatgggaggacatttctggccccttcttcctcttcctctgggttcttggtgcacggaaatgctctttcggtcctctcgatcctgaggnnnnagactccctttttggagtttgcccctctgtggacctttccctttcgggaaatctgagcgaacctttcgcggatctgcacctttttctttttcccaggagtggaagtagggtttttcttttggttccttttggagggataccttatagggctaggttccctagacttctgcttttggatacttggggaggattgttctggtctctctccaagtccagcagggatggctttaggatgcacgaagattcctgctgcctccatggccttttgcatggccagcatcacctcttgcatcttttggttttgttctttttgggctgcgatttcagcttcgtg

SEQ ID NO: 151422 - DNA, 733 bp, Cannabis sativa
aataaaagtgttaccaaacactccttaaatttttatactttccaataccaataattaacttatatgtgtgattgaattttaaattggataggtaagtttttacttaaataatttaataaagaatattgtttgttttttaataatttaataatttaatttttttacttaaataatttaataaagaatattcattaaaatagcttagcattctgagtataaaaggttttgcaactcaaccgaactaggaaaataaaaaatgctacaaccagcatgaaactgagagttcctagcaacaaagtgtgctactcgatttgttgatcgtctaatgaaatataaatgaacatgtggtgaatcctcaccctcaaaacaagaaacacaattcaaaactaaaaccaatcaaaaaaccaaaacttgaacttaattgaaaataagagaaagaaaacttaactcaataatgaatgaatggtagatctttattaaatagaaatagccagtagtacacaatagaatgagtacacaataattcatcaacaaaaaaaaaaatctttattgaataggaatagccagtagtacacaatagaatgagtccaagattacaactcaacagagtataagtaattataaagaaatacctcacattgagggaaatcacttcaagagtgatactcccttttacatccctctacacacactcactatgatcttggagtctctctctaaactgaatctaaag

SEQ ID NO: 151423 - DNA, 707 bp, Cannabis sativa
  modified_base (678)..(679): a, c, t, g, unknown or other
gccaacctgtgacccgcgtgccctattcgagttcgggttcaggttcggtttcattttattgaacccgaaacctgtgaacctgaaatccgcgaacccgaaacccggtaaacccgcccgatgtttagccctaagtgataccgtcaacatcctattacaacttcttagtcaacctccacacccgaaaacacatgtcggagtatttttttttaaaaaaaaaaatcacggcagtgttcgttatgcttacaacatcatccctgtaaatttttaaaattttttgaatagtttatagtatcaaaaatacgtttgaagtttttgaacacgcttggtaaattagaatatcaagaactctattttcggtaccgtaaactattcagaattttttaaaaatttacagagatgatacagtaacaataacgaataccgctataaaaaaaatttaaaaatatttcaacatataatttcaaatgtagaggttattaagaagttgtacttaacactcccctataaatttaccttttacactaatatataaattttaaaaatttagtttgataatattgttataattaaatgaaataatctattagatcatagagtgtgacaactttgagtattggagtatttaatatatatatatatatatatagggtgattatttaatggttacatttttattgnnaccatatggttacatttttttttgacct

SEQ ID NO: 151424 - DNA, 680 bp, Cannabis sativa
aaaaggggtattcattatgtctagatgatacagctcaagctcctcgttagagtcatatccagatagtttccctaattccccaacttgatatctcctaaacctgtcctccagctcgtttatccacaattggattggatcctcttactttggaccaagctgttggtgaaggtcaggtttcttccgattcaagtgctctcgcagatccggttgggagtaattgctaacaaatcttgtcttactcacagatcgcgacctactcatagactttgtctttgagtgggtcgtggatttactggttcccatactttctcgatcattagcttgttgagtactttctcctcttcgagtttattgactatgggttcttgaccgcctcgaagtcacacttgcttcttcacactttgttctttcctcccgagagcagtttgtcgtatttcccccattagggtctatacgtgtcctcactatatgggtttgggaaggactctggtgatttttagcaactgaccttcattctccaggttgagtcccaagatcctccttattctcacgagggatttcgtgttcatcagtttccatttatctcccatctggctgttggttttgattttcagggggtgtctcattttccctgggttgttattccgggcattttcctgtctcctggttcatgagccacg

SEQ ID NO: 151425 - DNA, 540 bp, Cannabis sativa
ttgtgggcgcgtctccttcatcgccggtggttccaaaattatcgaagctaatgacggtatgcttgatgatgtgtcacgacataccgatggattgtttttatataacgttttttttttgtaatattaatgtatataatgtatatatataaaaatttccctttattttatttatgtattttcttctttttctctaattttaatattattataatcatttctaaccattaatatcaatctataatcaaataaaaactcgctctttaaaattaattttctgtgtataagtttttcgttttctttctttattgttttttcaaattatcacattgatataatttttctatgtattatttcttttaatacaactttttatttcttcatactaattttctctattaattagtataacgaatcttttctttccaaaaaaaaaataataaatctttatttatgatgacagtaattaattaaaagataaaaagaatattgaaaaccaactgttagaaaaattaattataatagaagtaattcaatactatt

SEQ ID NO: 151426 - DNA, 875 bp, Cannabis sativa
  modified_base (362)..(365): a, c, t, g, unknown or other
aaagtcaacagacaagtgtgtcccattcttcaacatccaacgaggaaataagcaatttgaatcgatggaggaatacaaaaaagccttttaagagctaaaaatgcaactcacaaaacctgctctactctcaaaacctctggatggagaagagttaggaatataccaagctatcacggaacatgctgtaagtgtcgtactgatgaaggaagagaacaatatccaacacttgatctactacatcagcaaaagactcatcgaagctgaaggccggtacccattgatagaaagctcacttattgcctaatcctagtaatgagaaagctaagcccctactttaaggctcatcctgttcgggtgtacannnnccaaccattacgccaagtattgcaaaagctggacgcctctggatggttactcaaatgggcagtggagttgggccagtacgaaattatctttcagccctaaaaagcgattaaaggacaagccttaacagattttgtcgttgaatctgcgtgtaaagaagagagcacttcagaaagtaacccagagccagtacaagtacctcacccgagcaatagtgaagacaagccgacttggaaactacatgtggacgggtcagctaccgatcagttgtccagtgcaggaatcacccttgtcatgcccggggggcaacacctgcacgctacggtcaaatttagatttaaggcatccaataatgaagctgaatatgaagctcttatcgacggccgaagacttgcttgagagatgaaagccaaacacattgggatctgcagtgactcacagttggttgtaaatcatgtatctagggagtacgaggctcggggagaaaagatgatagcatatttgagcaaaat

SEQ ID NO: 151427 - DNA, 749 bp, Cannabis sativa
  modified_base (29)..(29): a, c, t, g, unknown or other
  modified_base (281)..(289): a, c, t, g, unknown or other
taattgtattaggctaattatactagttnaacgtaattaaaattgaattagcaacataattaattttgaaataaatagaattaatttttcattggattattttcaaagtaatttagaaaaacacacttagttttaaaaaaaaattctagatagtgatttaaataaaataattagactaaaatatattatatttgaattagaaaataagtaattagtttatgaattatctagatagatatgttctaggtagacttttggtattttctagatatatttaattnnnnnnnnnaattaatatttaagttgattttgtttaagataattaaatatttgatatttttctttagagatttaattaaataggaaaattttatttatgttaaaattaatttatttaagtttagaccatcataaattagaataaattcttccagttttattttattttattttaagttttcgaaaaatgtattactttataatatgttggattttgaattctggtatatatatttatagaaaataaaatttgagttgaagattaatttaattaattttggactaacttaaattaactaattttcataatatttattagaaaattaatactaaggatggaatatattttttattttttggatcttcctaaggtataattttataaattttaaattaaaatttatatagagttatctaaattagtgattttaattaaataaatatattaatgttaaaataaatagattaaa

SEQ ID NO: 151428 - DNA, 833 bp, Cannabis sativa
atcatgatacttaagtatttatttatttttcatgacatttcttctccatggaagaaacaataaaattctttccaatctcggtccgcgaatttcggtttccaaatcaaaaactggtcctcatttcgacttacaaaactatacctccccttttctttatcatgttcttttacggtgtagagagcacgaaattctactaagtcaacacttatctcaaatacctcagagaacctcttaatacttaaaagcaatctccaagaaataggcatcagtttgctaggagaaatctaataccaattcaagatcgacgaaacaaaaggtggaaaagaaaacctgaagcctcagaaaaaggtatacgaatacatgccacaccaatcaggaacatcccaatctattcgttcctccctcctaggtagtctcatttttatattacgaggaatgccataagccaatctcatttgagctaggagtggaaccgtcaatttaaagatgggattaatgcataaaatactctgttatttacttaggaaactcggtccatcatcctcgttcactaattgggctaaggcataacctattaatgggacttccatcccgtccaccgctaacccaattgcatcatggtcgtctacatcctgatcatagtactcttctgcgacggtgataggaatgagagacgaggcatccggaacctctcgatcaaaatcaccatccatgcccgtaaggaccacagcctgtcagccaccactatgaatatcagaatgtgctgatctaacaaccatattctagggacaaaaatgagggatacccccttttccactactcaatgtaagtaa

SEQ ID NO: 151429 - DNA, 883 bp, Cannabis sativa
cacagtaaatatacttctataattactaaaatttcaattctatattttttgcagagtaatagtggaattaataaataaaaattatttggttgatgagactcaagaaataatctagtttgttggagcttagagttataggtccatggcccccgaattaccaccttgaaacactgtcataggaagggatgaagattagtttaatgtcgttcagaaaaatctatgttaaattggaaaaatagtaattatttattttgtaataaataagtaatttttcaaattaataaaataaagacaaaaattattaagacaaaatttatcaaggcaagatttgttaagataaaagttgtcaggataaaagtcaccattcttgtcctaaacaaacaagaataggcgccaatccctatgcatattttttttgggttaattaattatttaattaattcaattagataaatatttgaatttgaaaagtagttatagatatttcaaaattattgagatattctctcaagtagttgagagattccctcataaatatcaataaccgaatttagttatagatatttatttatttaaataattatatataatttaattaaagggttttaactactataaataaaagcctaatttggagaaatcaaaacactctttttcacactaatattttcaaaatatagagagcagaaaaggaaacagttttttgtcttaattgttcttgctcatgtgttgagaaccgaacaagaacaacattatacactttatcctgttagaattaaaagagagattataatggaagaaaattaagatgcattacaactctattgtaaaataatacaagaactaaaataagagattgattaaatatatgttacaatacaca

SEQ ID NO: 151430 - DNA, 727 bp, Cannabis sativa
agtttagtaaggctaacatgactagtttttttgttttgtaaagttattatatggctagttttaattttgtaaggtcagttttgtttaataataacacagcaaatgtagtgtagtcactgtcaacaatggagatgagaatagataagttctagtatttacatcagagaattctatgtaactatttatataaaatttcatattttattttattttatttgtaagggaaatttcatattttattaaatatttattatgtattgatttttttttctttattttgtaggtgttctattagtgggttggaagtgaaaactctcagttttgaggttttcttttctgatattatggttttattgtctagttctcttagggtatctctgcatgcccttaggatagacaatgaactattatagatggaagaaaattctcctctggttacgtaactttgttaccgttgttattttaacctgtatcggtttcccttcaaaataataataataataataataataataataataattcctacaattgttttttttattttgtgagaagtttgatatatattatatgtttttagataatttaaatttcattagattaatgcaaaaagatacttatagcttacatttggttggaggtaatgcaatggaatagaatggaaaggaaacaatttttactccattcctttatttggttgtattttaaaatcattggaataccattc

SEQ ID NO: 151431 - DNA, 598 bp, Cannabis sativa
  modified_base (57)..(60): a, c, t, g, unknown or other
gcgcataaatatgagaaaatcaaaaataagagtttcattaataataactttatttgnnnnaattacataagggaaccaagtcccatgttctctacatgatccttaaatttatgaggtgacaagtcttttatcataggatcgacaattatcaattcagtgctaatgtgttgaatgaccactttattttttttaacactttctctaatagctaagtacttaatgtcgatgtgcttgcttcgacttccacttttgttattcttagccatgaaaacagcagctgaattatcatagaatatttttaacggccttgctaatcaacaactctaaggcctaaaatgaaactctttagccatacaccatgtgatgtagcctcaaaacaagaaacaaactcgacctccatagtagaagtagcagtcaaagtttgtttgttactcctctaggacacacctccaccagcaaacataaatacgtaactagatgttaatttttgtgaataagtacaatcaccaaaatctgaatctgagtagccaactacttctagattgtcagtttgtttgaacatcagtttgtaatccttagtaccctgaagatacctcat

SEQ ID NO: 151432 - DNA, 627 bp, Cannabis sativa
agattcattatcctgctgacagaatttgttgatttctcctcgcaacttggcagactttgctggaggaaagaacttagacagaaattttgttgccaagtcattgcatgtggctatagagtttggtggtaaggagttcaaccaactcttggctcgttcccttaacgagaatggaaacagtctcaaactgatggcatcatcactaactccattgactttaaaagtttcacatagttccatgaagtttgataagtgcagattgggatcttcataagggagtctaccaaactagactgaagactgcaccatttgaagtatggcaggcttgatttcgaagatgttagcatccactgctggtggcctgatgcatgactgaacccccgtaagagttgggaggatataatctctcaagctacggccattagcttgatcttcaacggcacctccgttattaccgttatttcctccattatttccaacattagcattatcagccatgatttctggtgtttcagcaggtgctacaactctctcttgccttttattccttctgtttctcctacaagtcttctcaattttaggatacacgggcaatatgactccttacccttgacggcgcatacactcaaa

SEQ ID NO: 151433 - DNA, 765 bp, Cannabis sativa
  modified_base (736)..(738): a, c, t, g, unknown or other
ggcttgtacttccttaggctttatcggtgatggtatgtctattaatgccttaattttctcgggattcgctttgatacccctcgcgttgactatgaatctcaaaaattttcctgaggagactctaaaggaacatttttttgggtttaacttcatgttatacttctttaaaattttgaagcattccgcgagatctgtggtatgatccccacttttaattgattttaccaacatatcatcgacataaacctccatattctgcccgatctggtttgtaaacatttcgttcaccagtcactgatatgttgccccagcattcttcagcccaaatgtcatgactttttaacaatagagtcccatgttggttacgaagcttgtatgctcttgatctaggacatgtatttttatctggttatatccagaatatgcatccataaatgacataagctcttgtcgaacagttgcatccactaactagtcgatcctgggtagtggaaaataatcttctgggcacgccttattcagatcaaaaaaattaatacaagttctcgaagtttcgttaggctttgggatgagaaaaagattggctatccacgagggataaaacacctcgcatataaagccattgactaacaacttgtccacttcctgttttagtgccccttgtctcttagaatccaagggtctccttttttgcctcttagaatccccatggctccaagcgaattgatcctggttnnnccttaagaaacttattagctactattt

SEQ ID NO: 151434 - DNA, 707 bp, Cannabis sativa
agaattatatatattattagacattagtaatatctcacacaattataaaagtgccttgtcacttaattaaacttactactaataacaatacaaaacctcctatagttataagcaccacagtaatagttctctattatatattttgtacacaataattattgtccttttatactattaactatcattgacatgtcagaagtgttgattactacttctgatgaaattacaaataatgcaacatataatttttatatatataccaagtacaaaatgagatcaacgattttgacatgagtcaattttgaattaagaacaattcaatgcatttgtaaacttaaaaggaaaatcaataagttgaactcactatgttgaatgtgatcaatgcaataagccaaaaaattgatccccacaataatcatataagaaaaaggcagctatcttgctaattaaattaccattcatatatgtatttagtatataatagtagcacattcgaccataaatacttagacatagaactcgaatctcttatgaatatttctaaataaggataatatataaaggacaacttttgtttttttttttaatttatttaggagaaaggacaattctgtataaactaaaagaatagttatactttgaaattcaaaaatatatatatatatatataaaaatatatatatatactagcaaaaagttacgtacga

SEQ ID NO: 151435 - DNA, 651 bp, Cannabis sativa
ttttcttgttatttcagctccagctgcttgaactcggatgctatcttagcgagttgaattggatggttggacagatgggtggagatagtcaaagatgaagatgaagctagaaatcttcttttattatttttgaattaattttttcagtttcagaacaatttggatttcaattattagttttggatttttattccctatttttcatattgttgcagacaattccttttattttggagaattttataataaagttttctattttgaaaaatgaattgcatttatgaattgagattcatttattttatcttgtgtatgccagtaccaactatatttatatgtttaatgtttgtatgtgtatttgttttattattgatacgaattctatagtatctttacctctgcaaagagttaatactacataaacacttagaatttcatttctatgtttatgaatagttgttaattctaaaacaattattaagaatttgtttaatagatgatctgataggggtagaaaaagttaagaataatatacaattcaacgatcttttatatctattgaactctggactatattcacaactccacatgatccctataacacttagggatggaccatgatctctatatcccttaggggtggatcataat

SEQ ID NO: 151436 - DNA, 736 bp, Cannabis sativa
gatcattataacaaaaataatgagagtggggcttgaagttttcaagagaaataccagagggtctctttcttttctcgggaagaataggacttggagagacaatgggtctttttcctttgtccttctctggaattgcagcagggacggcaacaggttctttactgacaggatcagcttcaggttcttcactttcagatctagaatcatcaacagagggttgatctttgggcacaaatacttcacttgaatctgataagccctctgaatcatgatcctcctcagttccttcttcaggttcagaatccgaagatgagacggaagggggattctccttgagatttttggcctttgaagatgaagacactacctttctccctttgaagacatttttgggcaaaaccacttcgggcttttgaggtttggatacctttgaccttgttcgtgaacttaccatgggcaaagtcaccaatgctttcttgacattttgagcaccatttgaagaagaagacttcgacaatgtgtgatcggatgaatgagatttatcataatcaccaaacccaagtgttggagtagcaatcggagaagaaatgtctggaggagaggcgagattgaaggtcaatttttgagcttggatctttgactttctggcaaattttgttggagcagaagacgaaccaggaacttcggtcactggtgcaggcggcgcaggtgtggtgatcggagatgcagaggcaga

SEQ ID NO: 151437 - DNA, 586 bp, Cannabis sativa
gggcataaaacccaacatgagcgtgtgacagacttcaagcaatccttctctcttctgggaaggaaggttgaagacgtgtcgtacccctagtgacctttcttacacgaagaaccatgtgcatacaagagtcgtattgattttttatgatgcaagctctggcttctgtgagggaaggctaaagttgcaaaaaaagaatcaagcgatgacttcgcttaaaagagaccaaaggatgaaacatcactaggtgtgtgatagacttcaagcagtccttctcttctaggaatgagggttgaagacgtgtcgtacccttagtgatctttcatgcacgaagaacaatgtgcttgcgagagtcatgttgaatttttgtgaagcaagctctagcttccatgagggaaggctaaaggtgcatacaatttcaagcgatgactttgcttaaaaatgaccaaagggtgaaatatcactgggtatgtgacggacttctagcagtccttctcttctgggaaggatggttgaagacgtgtcatactcccagtgatctttcatgcacgaagaacagcgtgcatgcgagaatcatattaaattttta

SEQ ID NO: 151438 - DNA, 518 bp, Cannabis sativa
aagtcagccattgacttggccacgacaggtgcggttcccaaagtgattgggagtttgatcattccctttaaagcaatggtgtccccggtaaaatcatagataatggaaacgactggtcgcagatccttttcttgtagtcccatttgcttaaaagcttgaaagttaaggagattcatagaactcccgttgtccactaatatgtgctggacattgtctcctccaatgttagcgatgatgaccagtgcatcggcatgtgggtggtgaacccatctggtgtcgttttccatgaatgtgatatcattgcactccttcttgaatagtttttctagtcgttcactcaaattgttcacattggtgagtggcgtctctcttgcctccttggtgtatcgctcctgtgattttttggagtctcctacgatgtgaggaccaccaatgattgtcaatatattgcgaggagttcttgaaccactcgcattgctattttcttccttgtcatccgctcgaggatgaccttcctc

SEQ ID NO: 151439 - DNA, 651 bp, Cannabis sativa
  modified_base (549)..(557): a, c, t, g, unknown or other
atttagagcttagaaaagaaataataaattaaataataaatacaagagttttacgtggttcaggcgttaactatccttagtccacgagtccattttattaggcaatttagtcgccaaataataatacaaattagtatacaatagactgaaactctttattcctcttgttccccttgaagaagaagaaacttaggaatttttgtagagtttttaggtcagtagtagtacacagtgcttttttttttttttgtctttttggagtttcccctatcctatggaatggaggagtatttataggccaaccccccttcatgtgctggctggactgatcatattaagaggaaatttgaccgttgatttggtaggtggccgattcatcacatggcatctaaggttgtcagctggtatagtccaaacatcatacacgtgttgcctcagggtcttcctttttgaattgcccttgttgatggctgttggatcattcaagaatgtacgattcggcacacgtgctctgtactatctgctggatttattttaccaggatcttannnnnnnnnacaagtatgttgatttaacaagctaaatatgaacttctaaaacaatggaaaattaaacacataaaagtaagaaaaatcttacattgggtgcagc

SEQ ID NO: 151440 - DNA, 567 bp, Cannabis sativa
ttaaaatttaactaattctaattatcaaaatttgaaattaatttttaataaaaaaataaacaatatgaacaaatttattattaattgcaacacctggattaattatatttaggtttaactaactacatggatcttgacctttacgtggcaacatctaataatttgttatttttttttattaaaaaaaaagtcacccactaatttctcataaacgaagaattctgttatatagccacattttatctagaatagatataattatatatttatgtatatttatttattttttttttttaaaaaaagaaaaatatcaattcaatttaaatttaaatatttaaaaattaatattatatgtgatattttgttttaaaggttagagaaatcgtgaatttgaaattaaaagaatttaatatttttaaatattattttattttcattaaacataatttaactcaatttacttacgtaattagttatcttaaaataataattaaaaaaaacacttgaggttaaaattaataataataataattatccttctactattttttttttttgcgccattta

SEQ ID NO: 151441 - DNA, 562 bp, Cannabis sativa
tgaacattgaagagtattaccatcgattgtacttgaagaagcagcattgttagaagcttcatccttaattcttttcctcttacacaagtttgcaaatctggggggcggcattacaatcaaattccgttcataagcttgcaattctacttctagcttatccatgtcggaagagttaaaattgttgatcatataagatacaacaaatccattatactcaggaggaagactattaagaatgaattgaacccattgttctcttgataattcaattccaagtaagtttactttttggaatttcagattcatcattaacaagtgtgagttaatgctctttccaaggagcattttcacactatagagttcatttacaaaggcatttactaggagtgggtcagggtgtgggttgttcattttaacactacaaatatcaataaacagaagtaaatcatttggttcaataatgattataaaaataccaaaaatgaaacatatttttattttccaaggttttcaacaaactaatacagtgtcccatttaggcgagagttaaagcatcatccat

SEQ ID NO: 151442 - DNA, 501 bp, Cannabis sativa
tgcaactcattcgagtaccacggtactggaatggagaaaatttaaggaaatactaccaataaagtaccaggtccggttgaccatttaaagtacacaggtttgcttgaccatttcaaagtactcaggtcaggttgaccattttaaagtactaaatgaacattaccttctaagtgaatggccttatgggcggactacgcgcaaaggtttcagaaacaaagtactcaagtcgggcacaccactttaaagtacagtttcttatgactgcaatttgttttatttcatgtgaagctaaaagatgagattagatcgaatagctctaatagtatttcaaattcaattgagtcaaaaaaatcaacatgattataatttaccaaaagtgcgttcaaaaggtttactcaaacccaaaacaccaaacagataagcaatatatttgcgaaagacaagtgaccaagagtcatacgtctgctcagtcacttggagggcacctatacctatacaaag

SEQ ID NO: 151443 - DNA, 561 bp, Cannabis sativa
ataattaatttctaatcaatccctctggagacgatactcttttacttatcattgtattaattgtttgtgactacgtgcacttgcgtatatctaatattagcacaacaagtaattggcgccgtcgctggggatttatttagataatttttttcttgttaaaatcaattgcttttcaatttggtcttttatttttcttgtttgcttttacgtttgcttgttttgtttgagtttttcttgcaaggtacttaagatggctcatcaacaagtacttactaatttcattcaacatgactcggagcctttacatagagcattatggagatacaaggatttgctaatacggtttcctaaccatagtttgtctagagagtgtgtacttgaagtcttcctaaatgggttgcatccaagcacaagagaatgagtagaaggaagagatggtaccagcaatttctaccaaatatctatcgatgaagcctattggatgttagagaacatggtggagtatgatgagtgttgttggaattcttcatcaaccaaccaagtttgggagaacacctctag

SEQ ID NO: 151444 - DNA, 666 bp, Cannabis sativa
  modified_base (473)..(474): a, c, t, g, unknown or other
taaacatgtaaatacatatgtatactattatactaatcttacctcgatttcaaattccggtgtgccagttaacctgagtcgaataatctgctcggcgaattacaggctcctaaatcataataatcacaacaccgataagtgatacgctaaatcactttccggggacttaaactagaaactaaaagtattcctatcgataaacaatatggcaataccctaaataacataaaaaagtgaagaactagggttctcaaatttgccccaattggtagaccggttccccgaccggaattccgattctgggtaaaattcctggacgccaaccggtagaccggttgctacaggcctcgttcagtgcaggaaagggtcaaaaattcataactcatgcaattcaaccccaaatcaaaccaaactctgcagacctgctatttagaccccaatgaacatattccaagtgacaaaacaaagcttcnnacacagaaatgaatttcaccattaaaggttcaagattgagttcaaaactcaaaacttgactaacccatcaaacaacccctagatcatgcattaaacaacataaaaactcatatctaatcctctgaatataacaataaacaactacagcaagctaaataacatttcactcattaaaaactaaagtttgagttc

SEQ ID NO: 151445 - DNA, 779 bp, Cannabis sativa
  modified_base (77)..(78): a, c, t, g, unknown or other
tttttgaacaattaatttgtatatttgtagttgtaaaatgtagaataatgtatttatagaataaattggattatttnntttttttaaaaaaaaaaggttcgatttgtgcggtttaaaccgactaaactgaggttcaaaacggtcagttttaagatagattctggattggtcggtcggttttcggattgcaccaatctagactgaaaatcgaattttcgatttttatatagaaaaaaacctaccaaaccgaccgatgctcagtcctactataaatatttcaaaattttcaaaaattgatagggatgatgttgtaactataacgaacaccgctatagaaacaaaatttaaaaaataatattccgacatatattttttagcacaaaaattgactaaaaaattataattagagtagtactcttgattattttatttgatgaacacccttaataaattatgtcactatcacactataagaaaaaattataattaaagaaaaaaggatctgttccactaaattcagaaaatattgatgggaagtttcctgcatatctttcatacctgataaaggccgaatggtacttttggacttacatgtaagatagtgacatctagactagtgtggaacattaaaagatagcccagcccaattaaagcccattggatactaatcatgtggcatattatataggggaattttcagtaatatacgtaatattaaaattaattatgaaaatgacaacgcaattttaatatgcactaatacgtattcttctaccgaa

SEQ ID NO: 151446 - DNA, 772 bp, Cannabis sativa
  modified_base (444)..(448): a, c, t, g, unknown or other
gaatcgtcccttcatattctgccccactcccgatcgttagatttcccaatcctcagctttcttgtcattggactctgtgtataaaaaggcggctcaagcttgtcatttttcacaaacctctggctttttagtgagatccattttcagaatggatcatctctttcttgctagaatgtccctcctgagttcgcaagttcactcccccaaactcataataccaggatgcaccaaccattttccattcgttcccaagaacttcaagcctcaattggaaccgaaaatgatggattccaaggctgaggagcttccaaccaatccaaacaaggggaaccccgtagcccgctatgggagatcctcacaagtgatcctggaagatgagtatcatcccttgtgaatggtggtttgagtcggtttatacatatcattaattttgtatgttttttnnnnntccattgaccttttttcttcgtctccacaggaatagacatagatcttgggagcgatcttaaaggtcctcctctggtttataaggatctcggaagaaggttggcacgactttggatgaatccaggagggaagttggcgtggtttttatcagagaatccagccaacccaaggcctccaccagaggacctttgcaccagcctctttctaatatcgagaagtatcctgaggctgggaaagaggtctcgacttcaggaaatgggatctgatgatgaggagaatgagttctgtgctgagatcaagactctctacgtgtagacggtctttc

SEQ ID NO: 151447 - DNA, 1170 bp, Cannabis sativa
  modified_base (283)..(285): a, c, t, g, unknown or other
ccaatgactgaggacccaagaccccaacctagaccaaaaccttgacttgagacccaaaccaggacacaagacatgagctagaactggactaagatcttgatttagacctggaacctaggacctaagacccgaggcttggacccgacccacagtcggtgtctaaatctgggaattggacttggactcggacccagacccagaccagaattggaacccgtaccagaactcaaactagactcgacatgtggttggtgtctggatttgggaccaagactcggacctnnnccaaaacacgaacctagacccagaccaggactcgaacctagacccacacccgaaccttaaatcttaccctatgacccaaaatgtgaattggaactagaagcagacccttaaaccctaaaccctaaaccttaaaccttaaaccctaaatcctaaactttgtacacttacccctaaaccctaagccctaaaccctaaacaataaatccctaaacactaaacccaaaaccttaaacccaaaaccctaaccttgacatgggcctagaccgatacccataccgagatcggaacctaggacccagaccctaacctgaatatagacccgaacctaaacccagactcatgacccgaacccagatccaaacacagacccgaacctggttcaagacctagaccttgactgggacctggatcgggaccccgacccagacctgaatagggacctggactcaaactgcaacccagacccaaactcaaacctgaacccgtactgggacctacactcagacccaaactcgggatctaaacccaaacctgctcttggacctacaccgagacctagaatccagaccttgatgggggacctgggccccaaaccaaaacctagatctagacctggaccaaggattcagacctagataggagacttggtcccgaaactgggccttggaacaacgactaagaaccaaaactcgaccctagactcgagacacaggacccgaccctggacccgaaacccaggacctgactacagggacacaaccccaaacacgaacccaaacccaaacttaggacccaacgctagacctagggctaaattggaacaagacatccaagactgagatccgaatctgaacctgaggcttcgacctaacccgtagtcagtgt

SEQ ID NO: 151448 - DNA, 542 bp, Cannabis sativa
  modified_base (107)..(107): a, c, t, g, unknown or other
cagactaaaaaggtaacagccacacatatgatgtgtcactatatccttttttttcgtttttattaatatttttggagatatagtgacacacaaaaagtgccactatnttaaatatttttctaaaaaaataatatttaatttgatttaatacaaatctgtattaaaaatttaaatgagaataattatcaatttacttacaaatatattattaatgttatattattattagttataaatattaaatttatcttgcaaaataatatttatttttgatgatgacaataacaataatataacaagaatgttaattttatacattcatttcttttttttaaagacttaatatacaatgaaaaatttgacagaaaagagcatttacgaaacctaaaaaatacattaagaaaaattgaactaaaacattcaattcaatcacataataaactactggacaatgtttcaaacttatcaaaaaaattcagataaatgcttcaaatttcctaggccagtcgaacaccaagccccatcccactgaaatcacgaac

SEQ ID NO: 151449 - DNA, 736 bp, Cannabis sativa
ccaagacatgagctagaaatggactaggatcttaattttgtcccgtgacccaggacacaagaaacgaggcttggacctgacccttaagaggtgtctaaatcagggaattgaacctggaccaggacccaaacccggaccaaaacccaaatccgtaccagaactaaaactagactaaacatgaggtgggtttttggatttgtgaccaagactcggacctgaacccaaacacggacctagacccagataaggactcgcacccagacccactcccaagcctgaaatcatatcatgtgacccgaaattgaagccgagacttgaagcggtcccttaaaccctaaaccctaaaccgtaaaccctaaatcctaaaatttttacatgtacccctaaaccttaaaccctaaatccctaaaaactaaacccaaaaccctaaatcctacaccctaacctggacaggggtatagacccatacccataccgagattggatcccaggccccaaacccagacccagatacagacccgaacctagacctagacgaaggacctaaacccagaccagaacctggtctgggacctagactttgattaggacccagatcaggatccagactcgatattgaaaagggactaagactcaaaccaggacccggacccagactaaaacctgaacccatactaggacctcgactcggacccaaactcgagatccaaacccgaacttaaacttggacatagac

SEQ ID NO: 151450 - DNA, 738 bp, Cannabis sativa
caactttcaaagttaatggacaacatttaaagctctacttgggaggtcaaattgaccaagccaagttcgccatttttctggcgcctctctaaacaacaactcagcatccggctagatgacgataaagacagcgctcttgggaggcaacccaagtgttttctttaatttttcagactttttatgtttttagtttattttttagtatttcttgtattttaattttttttagttaagtaccagacattattttttccagttgaatcgtgaaaaacatgaaaaaaataataataataatttttcgggactgggagcctagtggtcgcgaccaccaggttcttgggtcgcgaccatttttggtagtcgcaaccctggtcgcgacctgggactttacagaaacgagtgaaattttagcttccagtggtcgcaaccagggcctgtcatagtcgcgaccctttttcatagtcgcgaccctagtcgcgaccaccccaatttccagaaagcagggatttttcgaattcaagctagtcgcgaccagctcgcaaatttctttgaataccccatcttttccccccattccaaccctacacccaaattcaaacttctcagccgtcccaacacttttcattcaaagaaatttcaaatttcttccccaaatcttcaattctttcatcttcaaaccaatttctcaatcctaatccatcctaaaacctaatttcactcatcaatctacactttcca

SEQ ID NO: 151451 - DNA, 713 bp, Cannabis sativa
taaaattcctgtgtcttattattgttttattatatattcattacgacatatcgtttattgcttattaaaaagactcattgtcgttgactaaaagggaagtcaacagagaataatcactgatccaactccagatgtatcaaagcaaaatttccaagaatttcaactctaaagttaagagcagaaaattcaaaattggtttccttattttgagaagagcattccccgcctctcaagagcctagatggggatcttagaaccaaattaggaaggcccatatgaagttatagacaaaattggtgagggaacttatcattaaaagagactagatggaacaagaatcctaagagcatggaatgctgaccacctgtgttgacactattagtaaactggggtggtgaggctcctttttatttttctttactttttattttactactataatttccatgtaggcctcagggcagtaattatttgaataaaagaagaagttttcaattcatatttttgtctttaaaagttatgtcatgtaacaagtgatcaaaagtctcaactattaatcacttggcggtagcatatatgatattgttaaaaataattttacctctttcacaagaaacaactaaattaaattctcaaatataagatccactacaagaaaggggaccttttatcccacttttttagttaacaaaaattaaaaatgggataaaaga

SEQ ID NO: 151452 - DNA, 636 bp, Cannabis sativa
  modified_base (26)..(38): a, c, t, g, unknown or other
  modified_base (353)..(356): a, c, t, g, unknown or other
ttgatttcgatttaatttgaattagnnnnnnnnnnnnnaagttttgaaaaaagataggggtggtgtcactcggtcacgcgcgcctcagacacgaggctgttcaagatttctttgtctgaagcctcagattttgtctgaaatcttggctgcgcacgcggacgaggttgttggcagcctctctggctaagttttctcggttgtgctccctgcggatggtatacaatgcataccatccgtaccctttacattttttttttcaattttcttcactttttcatgctttttcatggaattaatttcgaattttttttgtgtaattttgtattttgatttttatttttcatatttcaaannnnattatcagaattaaattaattagttttttttaaaaaaattaatttaagatattagtgaaatttcaatttggaaataggtaagaatctatctttttgattaatttgttctcttatttttaaattttgattattttatcttatttttaaattcaaggtcagatatttaatactttaattttttttcttttttttttataaattgactttatttgaattttaaaataagattattttaatcatgaaattttaaattgaaataggatattttgctaacttttaa

SEQ ID NO: 151453 - DNA, 705 bp, Cannabis sativa
ttaaaagcaaaatgaatataacatgtggatttactaaaatgtcttaatttttctaatatttaattgcaactatagccttgtcagaaaatttgataaaaacctgtagttggtttagtagttatatggattgctaataaataaatagcaacatcatatatatatggatgatttctaaatgggtaatactcatttatgggtaataaaaaaattgatgaggtggcaatttgatgatctgccatagcaggtcactaacaagatttttttttttttaaaaaaaaactatatttattttcttaattatgataattctaaccaattacaaattatttttagaaataaatttacttttctaaaattactatattatctttaaactaaatatataaatgtattaaatatgaaagatttttttgttgggaggaacaacacattcgttttttttttaaatgtttattttattttaaagacatgttcatttttcttgatgggctatactgttcattaaaaatatgtttataaaaagagaaattcattcttacaatctcttatttattctttattataattttacttttgtttaaattaatatcaattttgctattattatttaatgtggatcattaatatgataccattttttcatattaaaacaacaatatcacgtcatttacttaggtgagcgtgtggagcttagaatataagccc

SEQ ID NO: 151454 - DNA, 821 bp, Cannabis sativa
  modified_base (210)..(212): a, c, t, g, unknown or other
  modified_base (744)..(766): a, c, t, g, unknown or other
cctcttatggcggagatgctaccggatcatctctgcctcctcctccaccagggcctgcaccagctgagcagcctatgatagatgatcctcctgctatgagggaactgttggattatattttactaggacctagatttactagtaagtatgtttttaacatcctaaatatgaatctctaaaacgatgaaacttaaacacatataaagtatnnnaaaccttacattagttgcagcgaaattaaatgactccttctactcagatctctaaccattgttcctttctgtcgcagagtatgatcaagatttgagcccgacactccttcagttgtttggattcttcacattcttacacattatgattgaggactaacttgctatgggttggcatgcactcaatctctaaggctcaaatttttatgtgaaaaacactataggatttggaaaatagaagagagaaaagaaaaagaagaagtctcaaactctctagttgtctgacaagatgtaaactaggtttagagtcattagttggattaagagaccattcttttctttttatactaattcatttagggttaggattgaattatataaaataaaaaatgataaaataatagcaaaaataagactatagtggtcggccatatgtgggcccaacactagttatattttcactatttttctcaaccatttatctaatatttcacaaatgctatatttttaaatttcaatcatataaatgccaaannnnnnnnnnnnnnnnnnnnnnntaattatcaaataaaattatcattcatattattattaataagactccacgaagtc

SEQ ID NO: 151455 - DNA, 871 bp, Cannabis sativa
attgctttcttgttgggcgcatgctttcttatggttattctaacactttgtttatttctttgttgcagcagccaagccaatggaagatcttctggctaccctcactgaggcctacagcccggatgcttctctgcctccagcttcatgccaactggtgactcccgggaggtccttgtccagtgcccttttaggcacaacagtcttgatagacgaggagggggaagtcgaggaggatgagggcgagattgcagccgccctcgagcgcaagcagaagcgtaaaatggttgaggccgagtcttccaagcggccccaggaggagggacactccggctgttagcactgactccgggattccttccgaagcagaggagaacactgtgctgcatggtatcgttctcaccccagtccctgcaaatgaggaaaggcaaatgctccgcgtcgccaaacataactacgccctggatgagttcagtcagggatatgctgaggtggaggccctgaagaagatcctgcgggaggagcaacagaacaccttgcgcgaggacgccttcaagaatccttgggacctgaacatggacccctgacggacttgttcaactgcttcgtcagtcctactcttgcccccttcgcctcgaagatgaccagccagtttgtctcccatcggactcaattcccaaccaagagatacgctgcttgtgcctcagtgaactctgtttaccaggttcaggacatcaccgctgctctggccgcggtgagttctcgtgatttattcctttcttttatatcttgtcttaaggcatctgatttcattcttgtttcttttttcagattactggagagaccggctgcctctccaagaccctgattgatc

SEQ ID NO: 151456 - DNA, 500 bp, Cannabis sativa
ttgggtagacctcgaacaatacctgcatttgacaattttttttcaaatttttataatttatatgtccaagttttgcatgccacaaaatcagtggggttgttgatagcttaatgacaagtgaacacaagggttagggtataacaattatcattggatcgaaatccttgcaagatacattgattatcatcatttgatcacaaatttgactaatgctaagtaaattagcccttagtcattcaaccaacatcacattttttaatctacctaacccttcaaagttgagagtttctattccaatgacttttcaagctaagccattcctaaatgtgacttcgccacactgcattggactgacgttaatcaaaaagtccttgtcacctgtcatatgtctagagcaaccactatcaaaataccacatttgtgaggcaagactttcattataaaaaccagcaaaaaaaaattttcaacctctttttgtttcatacctctatgtttctttt

SEQ ID NO: 151457 - DNA, 656 bp, Cannabis sativa
tcaacagacaagtgtgttccatttgtcaacatcctgcgagaaaataagcaatttgagtggacagaggaatgtgaaaaaacttttcaggagctagaaacgcaactcgcaaagcctcccgtactctcaaaacctctggacggagaagaacttgggatatacttagctgtcacggagcatgatgtgagtgccgtgctgatcagagaagaaaacaacatacaacacccggtctattacattagtaaaagactcattcaggccgaaggccagtacccattgatagagaaactcgcttactgcctaattctagcaacaagaaagctaaggccttattttcaagctcatcctgttcgggtgtacactgaccaaccattacgctaaatattgtaaaagccagacgcttcttgacggttacttaagtgggtggtagaactgggttagtacgaaattaccttccaaccccaaacagcaatcaaaggccaagctctagcagactttgtggtagaatgcacatgcaaagaagaaagtacatcggaaggaaaccccgagcaagtacaaacacctcagccaagaaacagtgaagacaagccgacttggaaactacatgtggacggttcggctacagatcaactattcggttcaggaattgcccttgtcac

SEQ ID NO: 151458 - DNA, 941 bp, Cannabis sativa
  modified_base (118)..(127): a, c, t, g, unknown or other
  modified_base (915)..(916): a, c, t, g, unknown or other
gtgtgtgtgtgtgtgtttatgtattttgtattgtaagtctgtaatcaagtctacaaaagaagaagatattgtgttttgtagagaagatgttgttcctctctctctatatatatatatnnnnnnnnnngtgtgtgtgtgtgtgtgtgtatttatgtattttgtattgtatgtctgtaatcaagtctacaaaagaagaagaacaatagtgctaccttcgggaaaaggttctacaagcttttgggagattacttttcaagtcttgactcaggaggccgccggcactcttcaaggagatcgaaaggtaggtcgagcaattgaagtttcaacgagattcagttagaaggtggaatacatcaaacttgtagcatacaataagagggagtatttatgcataagtcaattactttgtattttcgagatctatctaatgaatcttattcctgggcatgaccccatggattagtaacaatctacaagaattattaaaaccacttacaaaaaccttgtgtatttttacgtttatgcactgttttttttttttttgtttattttagagctacagagttgttttctgtagttacaaaaaaaaattgttcaacatcaattttattattccatatttaattaaaaaattaattaaataataaattagtaatattaaaatacgaaaatacatttgttaaattttttaatagtattttaatccaaaattagtttttcattattttattaaattaattcatatttaacaaatccaaattataaaatatcattataataatcaaatactaactaaaatatgaagcatgattggagcaagaataatcaaatactcactaaaatatggagatgatcttatatctattctatataaagtgtggctatataactgaattcttagtttatgagaaattnntgggtgactttttatttatatttaa

SEQ ID NO: 151459 - DNA, 1249 bp, Cannabis sativa
aagatcgtgggatgaatgctgaatgcaaagatcgtgggattgaggctgaatacactgatagcgggatcgtgtgtatgccacatccacgtaatttcatccctgagttatagagattgtgctgatgactcacgatgcgaaagttgaatttgctaagtgtttgaccattttgtgcgggttattgaatactttgctcttggcatgccagtgaggcattctgctcggactgtgcttctcgagcagatgttccaagtagactccacgtgtcaccattcatgtgatgccacgttagagaacaaaaatgggataacagaaatgattaacaaactcaagtgaatcttagaaagaaaaagaagaaatcaataggtagcagagagtaacaagaatctctgataccatattaagaaagataatattagttataaagttgaaatagtagagtacattaataaaacaactaggaaaattaactactcagttgtcataacaaactctaactcacttattctaacaccttgatccacatattttttttttttaataattagaaattttgccacctgaattttcgacgatgttaatttttgtccctaaaatatacgacttattaagaattcgctcgaactattacattaacagaaactccttttgttaggttctgtccaattattccgtttaaatgatggtatatctttctcaatttgcaaattttccccctaaactttgacaactatcaaatcataccccctcaaaataaatatgagaaaaattcaatatttttttagtaaatcataaagatttaatttaaatcttatgaaaactcattttaaatgattaaaaaaatttaaaaataaatgaaaattttaaaactaattacgcgatataaaaaattatttatttttataagaaaattcatttagatattacaaaaatatattaaaaatttaatttgtaaaaactaaattttaaaccctaaaggaagaagcttgaatatattttgttttcatcaaaaaatgtagatttgtttaatttataattttttttaaaaaaaaattatatttgtatttaatttataattattttttatatgttaaagtatgagtttataaatataaataagtttaattttttctttaaaaaatcttagttgatttaaattatttattagattctaaataattttggtttaattttttaagatacgttgataaataaaataaagttcgaaaatatttttttaagtaaaattaat

SEQ ID NO: 151460 - DNA, 743 bp, Cannabis sativa
  modified_base (705)..(708): a, c, t, g, unknown or other
tggatgtcgttaatggcggagtagggagaggtaacattagacctctcaatctattccctgaaacagctggtcctcaagtcggggaaacgtcaacaccacgagcaacaatgcactttccacctgtcactctggcggtggtatctgagggaatcgtccaactcaccaccgaccaatatactgcgatccaggatcaactgcgtgcactacaggccaaagtggatggacagaacaaggcccgacgcccctctcgagcccctactactcgcacagataaccctcaagtaacgaactctagacgtcgtaataattgtgttcgcagggaacgaagaacccttcctgagggtttggacctaaaccagccaacctcgagagaccaatctgcgagatatcctaaccaggaaacacaggttaatgaagaccctgagtgacgtaatcttcacagccgaccatcaagagacaatgacgcagaatctgcctcttcatcctcgcatggtcgtacacctagcagatacacaaggtccggttctgtagagacgcggcagggaggacgatatcaagtgcataggggcgatctgcgtgatcacctcaatgcggttttcagagcgcgctcctgcgctcccccgatgtgaggaaacaccgcgtgatctcccagtagtcgatcaaggtgtaaacactcacactaacccgcctatcgcaccggcagcnnnnactggagtcaatatcccagcaaacctcgccgcagt

SEQ ID NO: 151461 - DNA, 558 bp, Cannabis sativa
gtacaatatttaaaaaaagaggataaaaataaaataggacgatataaaaaaggtataaagtgtaatttcctctttttttttttttaatttgaaaatgactcctcacctccacatacaattctccttatggccatttctcttggactagatagttaaatttaaaaaagtatcctcaaattaatattttgatgtatgtacaattaaattaaaagttgctatttcataaatagtaaaaaatgtagatgttcaaaaaatgagcaatagtagtaacctaggctcatttaatatattttcaattgggataattttagaaaaacaaaaaaagttacaaaaaaacgatctatataaaatttttaatattcttacgattttttaaattttatttacagtcttttatgcatttcatgttgtactcttattattttgatgttgatttcttattatttatatattattttttatattgttttgatgttatcttcttgctattttcatgcggttttcttgttatttcatgtggttttcttgtatttttattgtgaaaatgtaaaaaaaaaa

SEQ ID NO: 151462 - DNA, 871 bp, Cannabis sativa
ccacccccggtggctcgcctgccacccctgacactccccccaccaccgagaaatcgccacctagcgcagctatcggcttagtcggtaacatgaaggtcattgggggttcacttgttttggcagctttgttgcttgctcattgagtgattttgagctaggggagaggcagtgcgatatgatttgtaatatttaggcccatttattatatttgtaatttaatgttgtttgttgttattgttggttttttggtgaagttgtgtgattttcaccatgattctatgtctatatcatttcattataatcaaataaaaaaattatcttctttaattattgtttacacatgttgattttgtttgtggaatgatttcaatcttttttagttatccttttctctttttaaatgataattcaatattttgtcaattataataagggaaatttttatttttataggttttaaatcacaagtttataaaaatgaaaatgtaaaaaaaaaaaaaaaattattacacgtataaaattgatactttatttacaaaaaatacttccataaggtgtggacaacatttataccttttatgtaattttaattaccaaaatacctcttatattatcacttacacaatcagacgatagttgcaaggtgattgctgcgtggtgtgcggtggttgcatcaaacgaaggtttcaattagacgatcgttgcagggtggttgctgcatggttgcgttgtggttgcatcaaacaaaagtttcaatcagatgatggttggagggtggttagtcgaagattgcatcagacgaaggtttcaatcaaacgaaagtttctaggtggttggccgaaggttgcatcagacgaagggttcaatcaga

SEQ ID NO: 151463 - DNA, 722 bp, Cannabis sativa
  modified_base (27)..(35): a, c, t, g, unknown or other
tcgttggatcaaaatctaatagtttannnnnnnnnaaattaatatttatagttaaattgtttagtaaccatcaatgggtaatacccattaagaaatgatatatatgttagaccttattttaattagtacatatatatttagttatatttttagtcataaaaaaattatatttttatttattttaattatatgtatatttttagttggataattagtttttttttatgtttattcaataaataaaatttctttttattaaaaaaatatttaatttaattattatttataaaaagaaaatatagtattattcaaaaatattattttataattttaatttaattactataatacttttaattttataatattttttttttatgaaacattatatattttttctattttttaaataataataatcaaaatacattttttttggtaaaaaaaatgataatagaaagattctttttaaatatgtgcaataggtttgaatttgaattgcaatattaaaaataaaacactttatgttatataaacatattatataagataaaaaataagagaaatacgtgtaatgagtttaaatttaaattgtaatatttttaaacgaaatagcacttttattataagggctttttcatttttacacttcaaaacaatttttttttttttgtatttttacgaaattctacatataaactcatattgcaactagcgctgca

SEQ ID NO: 151464 - DNA, 549 bp, Cannabis sativa
  modified_base (166)..(168): a, c, t, g, unknown or other
gttcggcgattcttgttcaggttctaatttgggtcccaagtctaggtctgggttcgggtttgattcttcgtctagattctggaccaagtatgagtcccagatctagacaccaactacttgtctattccaggccccattacctgaatcccgagtcaagatctagatnnntgtcacgggtctcggtcttgttatggttcaggtccaggtcccatttctaagtttgggtttaggatcgagactggggtgcagctctatgtcccgacctggttctgtgttgctagtctggttccattttttggtctgatttccgggtccgactcccaatacgggtctaggtcagatttggagtccgtgttctgttcaaattacggttctggacctaggtaaaattttagttatgattccaagtccaagtcctagttccaggcacgatcaacttccggttttggttccaatttcgggtcacaggtaaagagttcgggtccacttttaggtttgggactgggtttaggtccgggtgtgggttcgggtccttgtcagggtttgggt

SEQ ID NO: 151465 - DNA, 571 bp, Cannabis sativa
taaccgttgattttagataacttacttcctaaatatattatgtgtagttttaacatttatatcttattataggccaaatatgatttacatcgtgatttgggaaaaaaaaaaatacttttaaatgatggttgatctatagagagcctcaaaatttagacttgtcaaacatattatcaacgctaaaactgataatgaacaacaagcactaaaaccagattgcatcaagagccatgtagagtggaggcttttattaaacagaaaatgagtaaaaaaacacatagtacatatatatttgtctctatttatttatatatttatttttctctttatttagttacataaaaattgtatattttgtatatacatataaagtttcaggtgaattttatacttagcatttctaagttatcaaatcttgtatatctattagtgttctgtaagttatgtcaccactattctttttgctagtaaattaaaaacattctcttaggggataatacttttttagtccgctataactagcttttgaacttttttttttttttttggatatagtttgttttactttatt

SEQ ID NO: 151466 - DNA, 621 bp, Cannabis sativa
ctaagctttcctttctttccaaagaacttataccttttataggagatattcgaaggaataccatatctccgacctagaaatcaatatctcgtcgctttggatcagcataacttttctgtctactctgagcagcgagcatccacactctaatcttatcaccaacttcacttgtcctctgaacagctttgggacccaagaactttctctgacctacttcattacagtgaataggtgatctactttttcttccataaagtagttcataaggagccatcccgattgttgcctaataggtgttgttgtacgataaatcaatcaggggaaggtactttacccgtgatcctttaaagtctaatacacttatccataacatgccctctaaaatatgaatcgtcctttcggactgaccatcagtctgaggatggaacgctatactacccatggctcgatgtaagctctcctagaatcttgatgggaactttggatccatatcagaaatgatagactttgggacaccatgaagatgaactatttctccgacatacagttctgcatactggtcaatggaaaaattcgtcttaacaggtaaaaagtgcactgactttgtaaacctgtcaacta

SEQ ID NO: 151467 - DNA, 578 bp, Cannabis sativa
  modified_base (86)..(87): a, c, t, g, unknown or other
attcctcatgggctcgggcttaccgatggcaaccttctactcatgtacgaggtaaatattctcccgagtttcattaagcttggtannaatagtatacactggcacgtacttatcatgcttcttctgtttctttttatccttcgacggttccttggtaccgtcatttgtcttcgaaccaaaagcccccgagttatccattctcatggaaacaatacttgttgaaacattgctgggtttgcttcccgtgcttgtttttaacaaattcatttcttttccggcttcttccttctgaacgaatacctgagcacattcattgaactcaatgatgcttcttactagacgaccttgtaagtcatcccacaactcgccccgatcaatggataagtagagagatccccgcctaaagggttgtaagttgtgtgatgtcatccaaatgcctaaccatagctgcaaccgtgctaaaacgacttaagtgtctcactgggcggctgctttatattggttagcgaggccgctttgggtcgtctatccctagcagcctagatctatttcttgaaatccctagacagctgctccca

SEQ ID NO: 151468 - DNA, 544 bp, Cannabis sativa
attcttattacgacatatcgtttatcgcttatcaaaaagactcagtgtcgttggctaaaagcgaagtcaacaattttgaatatttatgagtttagtgaagtatgcaatttattttttttagtgacaataaaatttattattttctttattattattattattattttattttgagggtatgtataatggtggataaataattaaattattggagataatttaatatttttttttttgaataaaaatcaacttcaataactcaagagcaatcgctcaaaagtacaattttaagttccgaagggacatcatccttcgtgaacatacgatcagcaaataactgagactgacatgcaataacaagtgcagctcgattagcagaacgtttaacaaaccttaccaaatattattcatagagtctaacaaagacttacaatctttcacaattaaaccaaaagccgaaaacatctgtaccggactatgaatagcttgtacagtaactaagctatcactctccacacacacatgttggtacgacttgtccttc

SEQ ID NO: 151469 - DNA, 861 bp, Cannabis sativa
cattatatgagttgagatttgttccgttatgaaaaaaaaaattaagaaaaacaaattttcggcaaaacaaaagttgaatttgacttaagtattttgtatataaatatatttttgatatagtgtaaaaagtaatattttttatatttattttaattaagtagttaaattaagtatagaaattcaaaattttctttttattatttgtcgttggatcaaaatataatactttaatattttcaaaattaatatttatagttaaattgtttagtaaccattaatgggttaatacccattaaaaagtgttccatataaatatatatatatatataatttttttagaatttaaaatgtgtgaatgaagctttgatattctttccctaaaaaagaatttaaaatgttttatttacaatttttcaggactcaaatattttatatatttacatcttaaataattggagaaccaatattggaaaatagcaccttcaacctttaaaatttaaatccattactaaataataaaattcacatttaaatgtgccccaaatataagaaaatctattatacggtcttcaaatatatgggacctaaggcgaaatgaaattttgaagcccctatatatataatttaactattatcaaaattatagttctagtgatttagagtaatagtaaaacttttagttcaattctttataactacacattaaatatttttttttaaaaaaaaaatagaaaagcagaagttgcgaattgatttattgatctcttagtttaaaataagactctttaccactacacagtacactaaataattttgtttttttatttaatatttttctatattgtggtgaatcctcaccct

SEQ ID NO: 151470 - DNA, 1751 bp, Cannabis sativa
  modified_base (459)..(462): a, c, t, g, unknown or other
  modified_base (1031)..(1041): a, c, t, g, unknown or other
agatcctgctcatgtgctaagttatgaaaatcttgagcatgcaatcagacttatcttacgaagaacagccagtttagatcttagacagaagataaggttcttcgaaataagaccatagcgttggtcaaggtactttggaggaacagcaaggtggaggaagccacctgggagttagagtctgatatgagggcttagtattcagagttgttcaggttagattttgaggacgaaatccttttaagggggggataattgtaaacgccgcttaattttaatttagaaattaatagataattagggtttaattatgaagcttgcatgttagttatgaattatcattttacggagatttatttgaattcaaaatgtattttatatgtcatatatggaatttcatatttttgcatattttgtgcccggcaacattagaacgtggtgtttggctattagaatcacatnnnngtatttttagtatagcggggcaatatagttagacattgagaatttcgagaatagtccagattttaaaatgacaaaaataccccttagtgattttatgacttttagtgtgggcaagggcattatggtcttttcgccctaagttagttttgtcttctagtgggattttatttgtattataatctgaatattaagttagataagtagataaacattaggtttcatttattgaaaccaaaattagaaattaaagagaaataacttctctctctttactccccccctctctctcgaaattccttaaagaaccagcaagaattggtgtctcctcagcttgtttttggtgatttgttgttggttcttagagattcaatccaaggtaaagttcttagacctaatctcttttgttttcttaagctttaagtgaagagattttgcatgaattgggggtttagggttctgtaggtgccattgatgcttgttattattttttgaagtttatttatggtgaaatatgttgttttgagctgattttgagagttgttataaggtttgagcaagctttgagtttnnnnnnnnnnncttggctctttaatggtgaatcttgattatgagcttgtttagttattttgctgcttggaatatgtttattggggtatattatgcagctctagaaggtttggtaaggtttggattcgaattggttaggtttttgaaatttttaggttacctgggtaaaaccggttaaccggttttacaggccccataaaaccgattaaccggatcagaaaccggtttcctacactttttcgtgttttcgatttgtgttagttccagagctttagttggttgattccctgctagtttagggtattgccatgttagttttcagtaggaaaacttttggttcaaaacctaagtccctagttgtgatttagcgtgtcacttacccatgttatgaacgatgtgatttaggggcctgtaattcaccgagcagttgttccactcaggttggccagcatacttgaattcagaaataagataagattagtataatgatatgcatatatgtatacatgtttagggtacatgctagttgccgtcagaataacatatcagggtatcagtgaggtgaacataaagttgcaccgagataccaacatatatatgttaggcaaatctatagacatcagattagcatatttgggcattagtgaggtatacatagagttgcactgagatgccaacagatatatgctaggctatcagtagtatgagttatctgctaccac

SEQ ID NO: 151471 - DNA, 700 bp, Cannabis sativa
  modified_base (278)..(278): a, c, t, g, unknown or other
ttcaagaactcaaagcttgctcaacaatggcactttttgattcttggtgcaattattgtgtttgagttgtaaaatatgtttaatatgttatatgttcattctctggaaagttttgtgatgattggggaagatttgagtaggttatggaggcttaaaagttaagatttttcgtgtttttctgcctagacaaccggaattcaggttggttaagtgttgttccaaccggaattccggttagactgtatcggggaaggctgaattttgttttggccataacntttgactcgggactccgttttggatgttctttatatcgttagaaagctcgtttcgagctctatatgtttatctgtattttgaatgccaatgttatactatgtgaaagtggatttaagtattaaccctatacttgtgaatcccaaaaattgtgactagaattatcgacactatgtcaggaacactcgagaatttggaatctccacgtatgcgggacatcacgtaagatagtagttgcacatagagatatgcgcggtggcacttatattgaatattctatttatgataatttacaaaaccgagattagggttattaccctagtaattattaatgtgtaaatgctcactttaatggcttagggtgtaacaccctaactaggatagccatgtttacgtgatttaaacgtactatgcagctcgttgc

SEQ ID NO: 151472 - DNA, 616 bp, Cannabis sativa
  modified_base (34)..(36): a, c, t, g, unknown or other
  modified_base (237)..(245): a, c, t, g, unknown or other
  modified_base (294)..(309): a, c, t, g, unknown or other
  modified_base (405)..(451): a, c, t, g, unknown or other
aaatctaacataaacctaggtggttacctataannngatagtgatggcttacacttaaagattgatgaaatttcttgtcttcagaaaattgagcctcctgcctatagttgaacctataccctctcttttcttcttcaaatttttgaaccttgagtgatagagtgagtgcccacacacatcaagtagtatctcaatcatagtgtgtaagactgcgaagaatccaatcaacaagaaggnnnnnnnnnctcaagaaggagagaaagagatcatggttcagatattgataatgctctnnnnnnnnnnnnnnnnaagggctagagatctgaacggaagcagtcattatattccgctgcaatcagtgtaaggttttcttaaacacttatgtgttatttcattgttttagannnnnnnnnnnnnnnnnnnnnnnnnnnnnnnnnnnnnnnnnnnnnnntcttggtaaaatatttccaacaccgacgtatgagacggagatgagagggacaccgacggaaggcggtggtggtgttggaatttattttaccatgatcttagatctactcacaagtatgttgttcaacaccctaaatatgaactttctaaaatgataaataaacac

SEQ ID NO: 151473 - DNA, 599 bp, Cannabis sativa
aaacatatacaatcataaacacaacatgcatatatatcacatattatacacagttcttacctccttttcgaattcaagtgagtttgctgacctgaacggaacgtcttgtgcgggatggaggccctaatcacataacataactaggtaaatcacatgtcaaacccctaatccgagaaacctgaacctacaactcaaggttctattattatcacaagggactacaataccctaggaaacaaggaaacacccaaataaggtaccgaaatgggcaggaattgagaaaacaagtttttcggagaatatgccaaaaccggtttcgattttatagaacttggcaaattggttaaccggtttgcaccaggtttcctcaaacaacttctaacttgcttaaaacttatccaaatgccaccaaaccttccagagtacctaaaacaaccttccacaatatattccaagcaacagaactaagaaaaaccctcagaattaaaatattccattaaagacctaaggttgagtttcaaaatgcaaacttgttcaattccatcacaatacatcaaaatcagcaaccagaactaaatattaacttaaaatgaacctaa

SEQ ID NO: 151474 - DNA, 522 bp, Cannabis sativa
cttccgatcttcttgtctcagtcctggtccttgccctggtcctggtcgtagtcctagtttccttccagttccacttgcaattgtgagctctagtttgggttcgagtttgggtcgtggttcgtgttcgtctcagcgtttgagtcgttgtttgagtttgggtttgggttctgatcttgttgtaggtctggatcgggctccgggtgtgtgttagggtcctgggtcttggtctaggttcgggttcgagtcccagtttttgatctcgatatgagtctgggattagttccaggtctaagtcttgggtttggatcccggtcagggttaaagttcagatccgggtgcagatcccacgttcgggtccaattttgggtttgagtccaggttcgggtttggtcgtggtatgggttcgggtcagccccagttcttgggtcttggtctaggtcttggtcccggtcttggtttaggtcccaagtcacaggtcccagtctgggtccaagtctcagttgttgggtttaatgccctaaa

SEQ ID NO: 151475 - DNA, 504 bp, Cannabis sativa
ttgacagtgttggagttgaatgagatagacttggatacttgttgctcatttagtagttttccatctttaaaaacttggtcatttgtatggtttaaggtttcacattgacaaaagtaacactcaagaaataagtggtggtgattttacacttgatcattgccacaaattaaacaaacaacattagaacaaagtcgacctctctttgccaagaaactgtcgtccaatttgcttccaataccagctgctattctgtggtgccttaagaatatgtttaatataataaaaattggattgattaatcaaatgaatataattataggaatatcaatgaaccacataaacacatgtacacaaaaaaaaaagtttaaagctcagaagcacttgatttatatcttaaagaagataatggtgaaggacccctccaacacagaagtgcaaatatcatcacagctaaatttgcaccagccgggaatcgaacccgggtctgtaccgtggcagggtact

SEQ ID NO: 151476 - DNA, 540 bp, Cannabis sativa
tacacgtgtctgacatgcaaattcttttgggagtatatgtcgatatgatgtcgatggtgtatcgattttatatcgatgaggagcatgcttggtaaaattatcgacattatgtcgatattatgtcgacaaaatgtcgataattcgtgtcatattttctgctgttgttgttatcgacattatgtcgattgatatcgattcgctgtcgatatttattttttttttgtgttttttcctttactcaccttgtttgttttgtttgaaattgcaggagacaaagtgttccttgttgtatcgtacgatggtgtttggttatgtgagaattataattggatttacaaagaagatagcagcttgacgttgacagttaaaactgagacaaccctacaagaactgcgccaaattttgtatgaagagttgaaagttgatcctgtagcatatgatataaagttggagatttgttccttgtacatgaagggacaaatggttgcgccagaggttattaagagagaacgccaactgagaacgttcttagagatgagg

SEQ ID NO: 151477 - DNA, 849 bp, Cannabis sativa
atttttacttattatgtatatacaaattaagcaagcacatattagtgtaattattttatttaaactaaattacattatttcaatatgaaaaacataaagaactcttctactagagagcaaaatgaaaaaatattcaataaatttttatatattatatgattgcaacattcaaatttatacatcaaatatccaaaattattgaacaaaaccccgtatctataccaaaacatacataacaatataaactcatcttaattttaatatttaccattattatctcatacttgctagctccaattagttagaaagtgacttccaccaaggacatgctaattaccaaaagaagaattcttatctctgcatttttttagcgttaaattagctaaatgacatatatgtatatatatgaaagaattaatatggtatagggagaaattaaataattaaagaaaaacttaaaagtctcaaataaaataatctattaatatgcaatggcgattaatgtatttgactattatgattagtcttgatgaagccttctctcttatataggaactacattgtatattgagtattattaagtatttgttttattttattattatgtattataaataataagaagtttattcaaataataataataataaggttaatggttaacaaataatttataattaattttaaaaaaattatattaattttttaagttaaatatttttctctttctaaatgaatttatatataaatgtaacatatttgtttttataaaaatcaaaacattaaaacttgacaaataaaatacataaatacacaaatctattagaaaaacgttatagtaacaaaatt

SEQ ID NO: 151478 - DNA, 623 bp, Cannabis sativa
cggtcatgatactaataagtgtaatcagttgtgggacgagatcgagttcattatctgtcaaaaacatgatgccctccagcaatatctatggggttattcgcggtgcgaatggtgcgggttgtaacttttttttcaaaccaaactccatatgtggtttttgtaatttctcaaaccgcaactgcactacgagatcttaaaaccacacagtgaaaatacagtatagtgcggtgcagtttgagcaatttacactatcatcattatcgaacattataataaaaatttaaaaatcaatctataaagttttagcaatccaaaaaaaaaatcttaataaaattttaacattataacatatatattaatcatcaagttattatattaaattgtctctaaaaaataatgtaagatatacatgtattacatatatttgttcttatatgaaaaaagaataaaaatcatattataaaaattggtaactttacaatgtatagtgcggtgcgatttgaaccgtaattactaaatttaaaatcgtactgcaccacactctacgatttggggaaaatgtaaatcgcagctgcactgcaaaagatttcaaattgcattttttatgcagtatggtacggtgc

SEQ ID NO: 151479 - DNA, 702 bp, Cannabis sativa
gtacatatcagccgcagtggcacggcccagtgaacaggatctctattttgaatgtattttgggaatgcaaagtttatgttgtaaaaatactattaaactagtttgtaaaatactttgaaaacatgggaaccccatacttaatattacttatcttttaccataaagcagttttatatgtctgtatttaattatcaaaatttaattacccacactttttgttaaattatatagtatataaaataagaattttgtaaaaaaaaacaaacacgtggcgtccctgttggatagggcgttacaacatggtatcagagcgccaaggtttttaggtcctgaagacgggtttgatatgtacatcggctggaagactcgtttgactcatggttcagtaagcttttagttaatagataatttgttaattatctcattgcttgattatatgaattgtgttaatagttgaaatgtgttggaaggactatgatatatggaaatacttatcggtattgatattatctggaatgtgactgtaggtgtatagactcattatagtaggggtaaccgcgagctagctgggctcggggttgctggtgagggtgagaaccctcgatcaccaccaacctgggaagagttatatgccactatgtaagagactatccggcagcagggtgaacaaattagaggattgagggagcagcgagctcagcc

SEQ ID NO: 151480 - DNA, 523 bp, Cannabis sativa
  modified_base (407)..(412): a, c, t, g, unknown or other
tattttttttttaaattaaattgtaaaatcagaaaaatgatattaaattatcattttattttattgaatatttaatttttaaaataataaaaaattggaaaagttgttaacattttttttttgaaaaagattcatagattagttcaaacctaatttttcaaatttataggtttaattttatttttttttaaatttttttatttattttatttcgaaaaaaatattttttttattatttacttatttttttttcaaaattattaaattaaattaaattaatttaaaattaaataaaccctatatccaattatccaacttgttgcaggtgtatgtgttttatattgtttgattgtctaaacaagttttataaaatctattattgtttgatctaaatttccatggttaannnnnngacagatctaatgatctgattttacttcttgattcaattgtcaataggtcaaaccaatagtttgtagcaggtaaattttgcattctcctttcatctgtgtataacctagta

SEQ ID NO: 151481 - DNA, 534 bp, Cannabis sativa
  modified_base (471)..(478): a, c, t, g, unknown or other
taattataattattaaataaatagttttgatatttataggattaaaattggaaaatatggcataagtgaaagaaaagatattattgaataaaatgaccaattttaactagtggtgtccacttactatggtgagccacttaatgattattttgctattattttatcttttttattccatataatttaaatcttaaaccctagaaaaagtcctatataagaaataagatgactctcattctcataacctacataagactattctctcaaataacaaaaagagatcctccttctatagttatttcaaaattccttctcttcttcttcatgaatttttgaactgatggtgaagattacatgcccactcgtatcaagttaagaactcaatcatagtatggaagattgtgaagaatctaacactagaaggagatctaagttcagattttgttattactctgcgacagaaaggaacannnnnnnnagatctgaacggaaggagccataacatttcagtgccaccaatgtaaggtttactaa

SEQ ID NO: 151482 - DNA, 654 bp, Cannabis sativa
tatactttgggtccgatcattcctagtagggggcttcgacaaggtgacccaatttctccctatttgtttcttgtttgtgcggaagggttgtcagctcttataaggcggtatgaggaaaggaagcttttacatggatgcaaagtggccaatggtgcccctatagtgtctcacatgctcttcgcagatgattgctttctttattgcaaagctactgaaagagaggttgctaatgttcagcaaatgctccaaacgtttgctaatgcttcggggcagagagtcaactttgggaagtcttcagtttttttcagcactaatacgacacatcccatgaaagagactatacgtaaccgcttgagtattagagaggctgaagaaaatagcaagtatttggggcttcctagttcaataggaaggaataagactgtggcttttagctttgtggtggacaaggttcagaaaagaattcaaacttgggataataagtttctttctagagctggtaaggaggtccttattaaagcggtagttcaggcattgccggcctatacaatgaatttgttccttcttcctgtgggcatttgtcaacaaattgagagtgccattagtagattttggtggaagtctaatagctccaaaggcattcattggttaagt

SEQ ID NO: 151483 - DNA, 930 bp, Cannabis sativa
tctcttagtgggacactattccttagatagccgcaaaccatgtctagaagtcataacaacccctttggtactgctcattgagaaactctagcaccttatcaatgtaagctgcttgcgagagagcaagtgatctatttttccagtttctaattataatttgaatttcgagaacataattagcttcacccaagtctttcatttcgaattgagtgtctagccattcctttatgtcagtcattttattgatattgtttccaatgatcaaaatatcatcaacataaaggaccaagaatactaccacttgattatccttaagttggtaaacacaagcttcatcttcattttggtgaaagtcgtaggctttgattatttcatcaaactttttgtttcaagagcgagaagcttgcttaagtccataaatggacctattcagcttgtaaactttctcttcttgtcttggaagtttataacattttggttgtttcatatagattatctcgtcaagaattctattaaggaaagctgttttgacattcattttccaaatttcataatcaaaaatgcctgctatggagagaagtattctaatagatttgagtatggcaactggactaaaagtatcctcatagtccacacctcctctttgggcataaccctttgctacaagtctagctttaaaagcttcgacttttccaccaacacctcttttcttcttgtagaccctttacatccaaatggatgataatcatcaggtgtatctacaaattcctagactttgtttttcttcatggaatctttttctaaatccatgtgcactgaccattgtttctattctggactcaccattgcctatttataggttaatggatcgtcatcaataccgtcagcaataaccatattaattttaccatctaagccataacgagatgg

SEQ ID NO: 151484 - DNA, 701 bp, Cannabis sativa
ctgcaaagtcacaagttctctctggttctgatgtctcctctttacaagatgtgtttactcgtgttcttcgcatagaaactacctcttcagctcctcttaatagcgtcttgctgagttgtaagaattctacagggggaaaaaactctactctaagtggatacaaaggaggtaattcacaaggacctgataatcgaacaccagattctgggagcatcatgtgcaactattctaagaaaccaagtcataccaagtttgagtgtaggaagttacagttcaaaaatcgacaacaacacactactaatattgcaagcactagtgatgcatctgacaaatcagtccttatttctgctaatgaattcgccaagttctcaaggtatcatgaaacacttaagtcttcatctccttctgtcactgtgattaccgatttaggtaactctaatgcatgtcttctttcttctttccaaatcctcaaaatgggtcattgattgtggtgccacagatcagatgacaggtacttccagtctcttttcaacttttcagtagttccacgtctattgttaccttagctggtggatcaccatcttctattcttagatttggcactgttattcctacacctctgctcactttgtcatctgtcttacatttacctaatttgtcttttaatttgctttctgttagtcaactcactcgtaatctaa

SEQ ID NO: 151485 - DNA, 609 bp, Cannabis sativa
gtttatatatgcattaaacattctgaatcaatacattcatatattaatatagattgttctaagcatgaaaactcattttgaaaaacaaagaaatctcaaaaaaattctggaagacgtttttcggaccagaagatttttggtgattttaaagactttgtttcacgtgttttcgatgcatgaaatctatatgaatgtcttaattttttcacttagattttttggaattgatttggagtctttcggttgtcagaaacgcatttttcgatcgggtttgggtcgggtccgtcggacccgcgtgactgaaaaacgggtcaaaacgacccggtttgactgttgaagacgacgcaaacgacatgtcgtttgttaaaaaagatgtgtcgtttgttaaaaacgacgtgtcatttgcaaaaaatgacatgtcgttttcaagtttattcatgcagttgtcgttgtgttgaaacgacatgtcgtttttcgtcttatgaagcagcccttcaggagtgtaagcgacgtgtcgttttttccccttgtggacgtttttctatgcattttcagtccccttcaggttggcagaaacgagtgtcgttttactttttgcaaaaacgacat

SEQ ID NO: 151486 - DNA, 751 bp, Cannabis sativa
  modified_base (49)..(60): a, c, t, g, unknown or other
gcatcactatttatagggctatgggcttggagaggaagtatttcccttnnnnnnnnnnnngatataagcagaaagattgcatagtaaatacaaaatacactgatcgttggatttggagagcctgccatatctctccaatctgatcgccaagttataggaatttctttgatgactcacgatgcgaaagctaaattcgctaagtgttgatcgcgatgtgtggatagttgattgctttgcttcgagcatgcatttgaggtatcctgttcggactgcgaggagatactcagagtcaattccacgtgtcaccatcatgtgaggcgacgttagagtgtgaaaattgggataacaataaggatccaaatttgggacttagacaaggacccgaacccggactagcaccaaaacccagaccctgacccagacccgggacctaaaactggaacctgaacaagaactgctagactaggaccctcgaaaaagactaggacccagacctagaaccgaagtcggacctagccgcagcccaaaaagagaccggaactcgggtccagacacggtcgtgtacccagaccgggaccgagacgaagacccaaacctagacacagacctagacatgggacctgatcccgacccagagtcggacctagatagggattcagatacgaacctggacttgaaccaagacttggatctagaccgggatcaaaactagggacctagatcttgaccgagatcctaacacagacccaaa

SEQ ID NO: 151487 - DNA, 507 bp, Cannabis sativa
  modified_base (56)..(57): a, c, t, g, unknown or other
gaatctccagcaatgtgagggcctccaataatgacttgcagatgtccatctactgnnggaggtagcaaatcttggttgttgtctgtcctctgaccttggtcggtcttaacatacttttgtaggtgcagattgtttttcattattaggaatccaatttcccccttcaagttgtagcattcattagtgtcgtggtcgtagtctccgtggaaccgacaaaactttgtcatgtcctttttgtttgcatctttcttcatgggcctacgctttttatacggggccagccactgagttgccatgtatacactttctatatcgtcagtcagaatagtgaacgcagtgtatttggaatgattctcccggggagcttgttcggatttgccagtaaactttcctttcttcgcattcccttccttgtggttattactggagcgcttaccacctgagcttgaattgtttgggtattggggaagttgggcggatgttctagtggaaggagcctttgacttg

SEQ ID NO: 151488 - DNA, 827 bp, Cannabis sativa
aaagtgcaagattgaatccgccaacaagatgaagaaattaagagattaaggaagcagggtcttccttccgtgcatcctcagaaaactcaggccgttgttgctcctgcggtgctagcagaacagcctgttgctggcaaccacatggagccattatatgaaagattctgtaagcaagcacctccagtgtttttgggaggtcttgatgtaatgaaggctgagcagtggctcacagtaattaaacaaattttgaattttatgggggtggttggtaatgatcgggtgacctgcgccacttttcaattctaggaggacgccctcgtgtggtgagagtgtataaccttcactcgagatgtcactattatgacctgggaagaatacttggagttgtttaactccaaatattataatgaaatcgttcgcaatgctaaccgaaaagagttcactaagttattacaaaccgaggggatgttggtcctagatatactacaaacaaagtttgatcgtctggccaagctcgccgtgggtattgtgccaaaatattttattaagaaagaaaagtccctggtcggtttgaatgtggagattaggcatgctctggtgatcactaccaatgaagcaacaacttatgctgaaatggttgagaaagccctgggagctgagggtgctatgaaattccttcaggagcccctagtgactccgagtgttggtgggacccccacccttcctactttgtttatggtaaggattgtggtgattccacccctgatcagaaaaggaagtcactcctacatctggtggctcggggcagagtaagcggtttcgtggga

SEQ ID NO: 151489 - DNA, 757 bp, Cannabis sativa
cttccagtttctctttcaattttggcatgaagttctttgaaagcatcgagcacctggtctttagatttcaaagcaaaaacccaaatttttctagaattgtcatcaataaaagtaacaaaataaagtgcacctccaagagttctagtttgcatagtacagacatcactgtgaatcagatcaataacattagatcttctacatggtggacgtgcatgaaaagaaactctatgtgtttttctagctaagcaatgatcacaagttttaagaggcgtaccttgcaaattcggtaagaattgctttctagcaagagtttgaagtcctttctcgttgatatgactaagcctctggtgccaaagatcaatgtttgcatctttttgaactgcattaatctcttctttgtgtagcttagcttccatgacataaagagtattcactttctttcctctcgccactacaagagaatcattagtgagcttccatttactttcaccaaaccaatttatgaatccctcatcatcaagtcttccagtagatatcaagttaaggtgaatgtctggaacatgcctaacatctttgagaatcaatttgctaccaacactggtttctaagcaaatatctccaatacccacagtctttgatgcacaattgtttcccattctaacagtgccaaagtcaccagtagtgtaagaagtgaagaaatcactacgagcagtaacatggaatgaagcatcagaatcaatcacccaactacaatctt

SEQ ID NO: 151490 - DNA, 976 bp, Cannabis sativa
tatatcatgttaacaaaattatgtatactactattaaaatatgtatatatacaaaaaataaatatcatattaaataaatgatataagacaacaaaaattatatactatacaataaaatatatatacttgctataaaaaataaaataaaataatatagtattattaaataaaattgtatatgctatattaacaaaattatatacaaccataaaataattatgccatacttacaaaattatatatcacatttgtatataataaaataaaaattaaacatgcatgatctaaaataaaatgatatactatataataaagcttatataccatataacaaaaaatatatactttaaaattgaactaaatataataacaataaataaaaataaaaattttaggatgctaataaaattatatatcatgtcaacaaaagtacaataaaaaacagaacttaaatactatttttaaaaaaaataatatatcgtataataaaaaatacatatatcattcaccaaaacatatatacaaccaataataataaaaaaaatatatattactaatatatatatatatactatactaactaaattatataccataattgaaatatatatcatgataataaaattatataccaccattgtatataataaaatagaaactaattaaatattggattaattacacaaaaacactttaattatattttatttatggatatatgatgacttaattaatttaggtatatgcccaatatcattttacttttttttttttatggataaaaaacttttaatgaaagcaaaagacaactaatagccacaagagggggctacatcccttaagagacccgaggcctcggccttatgcactctcgcccaacgggaaagcacatcattttacttaaattgatatgcggtacatttaaattggtatgaaaactgcttagttgttgtgaattattttaccaggatcttag

SEQ ID NO: 151491 - DNA, 792 bp, Cannabis sativa
  modified_base (321)..(323): a, c, t, g, unknown or other
tttttgaaagctctatcggcgtcaggggtacgacattccaaaagttgccgaaacggctttcctttcgccgtgttattcagatggaactcctcaaaccgagccttgattttcgcaaaagtcccggtgcctttgtaagtaacacgaccagtaaaatgctcggatgctggaattatgagtctgggagccatctgaaaaaataaaaaccaaaaaaatattactgtcaaaaaatttaagaatgtcgacatcaagtcgacataatgtcgatattctgtcgacataatgtcgatattctgtcgacataatcaaacagcaaacaacaannnaatttgttcgacaacatatcgacatgtaatcgatattccaagaaaaaggatcataatttgtagcaaatcaacattgttgacataaggtcgacatcatgtcgacatgacgtcgacattatcaacttagccatgtggacaactcattgtcgacattgtgtcgacagaaggtcgacatcttgtcgacatgatcaacttagctataacaactcattatcgacatacaatgtcgatataccgttgacaaattgtcgacattaaaggtcacataaagcaacaaaactattgtgtcgacatcctatcgacataccctacgacatcctatcgatatacattaacaacacagagtcaaagttcacataaaacggagtcaatgataagtccatcgatatcatatcgataaattatcgataaaccatcgacaaaccctgtacatacatataattttgccataaacaatccacagaatcaa

SEQ ID NO: 151492 - DNA, 1064 bp, Cannabis sativa
agctcctataggggccatgtaccaagctacagctaaggcaaagttccttacaggttccaagccatgttgagtcttaagttgaacatttgactataatagacccaccattaaatttcatacaaagttttcaaggaaaccacgtatgagaacaaggttgtatatgcctacagagccagattcttgccatcttgccaaagttaaaagaggacataaaattggaaaattggctactggctacccacttggaaccaaggcccatgtcggccaaggttcttaagcatcgaaagggtcagccagggtcccatgacttagccaagaactggctagggtaacctacactaggcatgaacatgatagctttatagggtaaaacccaaaagctggtcaactcccataattaagcattagggctagccaggtctcaagcaagacctcctaggccggccaaggtaagttttgaatcccaatgtgtgttttcctttcaaaactcgaatatgagcctcatattattgatgactcagagagtcaagaatcacaacaaaggccaaaatcgaatctttttcatcaaaaagtcacacattacacattccaaaactatcatgaggatcaatataccaaagagattacaaactaatatgagaatcaaaaagtttccaaaagcttaaaaagcttgaaacttatggcaggtacaaagaagagatatctaagaggagaagatgagagtatatagagagagcagatcaaagatccaaatcatgccatgcaaaaagccaacacttggctagacaaggctgctcaatagagactactacagataagacaagagctagaaaatccctatccgaacagctgtttgaacagggacttggggagcaaatgttattccaaaatttgtccacctgatgttgcatgtccacgtaagtcaaagatagagtataggcggagtacaaccctgccagtagtagaacagggtctccatgcaagatataccaaaaccgtgaagcagcaaccgaatggagtgaagcaagccctcaaggagttgtactaacatccctcgccgatca

SEQ ID NO: 151493 - DNA, 579 bp, Cannabis sativa
ataagccacaaacaactcataacagaaattaataaactcaactaactaactgtaaaaagctaactggcacatcccttaacaactattaacaatattaataactagaaaactaagccgcacttcgcgcggtgttatctaacttttctaatcttttatttacatattttttgtatttattaagtgatataatctaaaatataacattttgatgtatgtattacaaacaaagtaatagtattgaaattagacacataattttctatttttatgatatatatatatagaaagatggtaattttgtgacaaatattaaaaattgtagaactaaaaagaaattacatgtattttttaataaaataaatgaaaaagagaataacattgggcttgtgattgatgatgtagttatttttaagagactatttagactctttttttctttatttattagaaagaaacaatttaacaaatattatgaaaaaaattacatttcattttgtggtatcgatggaatgtcatttccccaaaagtgaatttggcatgacaactataaaatagggcatcacaatattatttgttttt

SEQ ID NO: 151494 - DNA, 651 bp, Cannabis sativa
ttccggttaatcatacataaatgccccttgagtaattttaaagaataaaactttgtaattacttaaataatataaatgattctttttattgataactgaagttaaaattttacattagtaatgcgagttacatcatttatttattggtagtagggtcgcaaaaattccacgttccagtagttctttattagcgagccattgagtcgagccaatttgtaaactccaattctaactactacttcaatgacatatggaccctcacagttcgggttgagcactcctgcagatgcatctctcgtatttgcgaatactcgccttagcaccaagtctccaacattgaatagtcttttcttgactcttttgttgaaatatcttgtaactcggtgttgatacgctgtgttggtgatttgcgactcagttcgtttttcatcaagcagatccaaggacaattttagaagttcctggttctcttcttgattataaaactctcttctgtgaggttatatgttcacttcaacaagcagcattgcttccgagccaaatgctaacaagaaaggaatgtgtcccgttgccgtcttttcggtagttctgtgagcccagagaacctaaggtagctcgtcgacccacttgcctttggcagcgtctaacttc

SEQ ID NO: 151495 - DNA, 926 bp, Cannabis sativa
agtccagggttgggtctgggtccaagtcctgatccctgtcagggtcttggtttgggttcggccctggtttttgggtctggtttttgcttcaggtccaggtcctggtttgggtccaggtcccggtcttggtttaggtcctaggacaaaggtcctggtctgggaacaagtctcggtatgggttctggcctgagtttgggtttaggtttgggtcctgttacagtcccatgtccgagttctagtcccaatcctggtccgatcacagtccgggtatgggttctagtccagtttcgtatctagatccatgtcaaggtccgagtctgggtctaagatcgggtcctagcttcaggtctgacccgaaatcggacccggaaccgaaatcggaccaagactggcacaagaacccagacatgggactatagcaggacccaaacctaaacccaaactcaaactagaacccataccgagacttggacttggacccagaccgggacttgtgtcctgggacataatccaagaccggaacctggacccaaacccgaagccaaaactagacacaaaaactggggccgaacccaggacccaagaaccatactcggacgttggacccgaaacccggacccagactgggactgggacccaaactcggacccgaacccaaatcgagaccaggactcagatcggtcccgaacttgaaccggaacacgaactttgacccagatcgggacctaggatccaaataaagatgggggacccagagctgggaatcgggcccacgaactaggacaagaacttgggcctcagatcttggatcgggatccgggactcgaccccagacccaaaccttgacttaggatccacctaggtgttggaacttattttaccaggatcttagatctactcactagaatggggaccatggatctata

SEQ ID NO: 151496 - DNA, 571 bp, Cannabis sativa
  modified_base (384)..(386): a, c, t, g, unknown or other
agagtatggagagggaaagatgtctcatatggtcatttgagagtctttgggtgcagagcatttgttcatattcctaaagatgagagatccaagcttgatgataaggagaaaccatgtattttcttgaggtacggtcatgaagagtttgggtacagattataggatccagtgaacaagaagattatcagaagcagggatgtggtgtttcttgaagatcaattgtttgaatagagtgacaaagttcaaaagcaaaagttccctcctaatgttcgtgtgagtactagctcagttccttcacccatagtgcatgatgatcatgggggagatgaacaggaaaaccatgaagtgtcaatgaagaagcagatgaacaagaagatcgtggtnnnaatattgattatgatgttcatgatgatggtgagccaactgaataggatcaagaagaacctccaccatcaccagttcagactccagtaaagagatccacaagagagcgtaaaccaacttcaagatacaatccttatgagtatgtaatgctcactgatgggggagagccagaaacttaccaagaagc

SEQ ID NO: 151497 - DNA, 532 bp, Cannabis sativa
gattggggaagattatgtttatcagtcacccaaatataaaataaattatactaattttgaataaataatagtaaaatatatattcaataagtttaactttcacgatagtcttatatcactaaaagtatttttaaaaataataatattatggagacttattattcttaattcttgtcttttgtttttctttttttttttttcctttttttttaaaaaaaagaagccttattattctaataaaatatgatattaataaattactataattttaattatttaaatacaaattaaaacaaagaattcaagaaaatactttctaaatattttaaacttgataaagattgaaaaatgcaaaaatttaatttgaattcaattttttttaaaaaatttaaaactaattgggtaagattaagttcatcaatgattcatataaaaaaatgaattatactaactttgtgacaaaccaaaataaaagaatattgatctatttaatgtaaaaatatatcattcacaataatttctaaaccatgtg

SEQ ID NO: 151498 - DNA, 603 bp, Cannabis sativa
  modified_base (565)..(577): a, c, t, g, unknown or other
actttaagcagtccttcaaattcgggaaggagggttgaagacgtatcatacccctagtgatctttcctgcacaaatgtgcatgcgatagtcacgttgaattttaatgtaacaagcttcgactttcaagaaggaaggctgaagttgtataaaaattcaagcgtagacttcgcttgaaaaggtcaaagaggaaagcatcacgaggggtaggatagacttcatgcagtccttcaaatcttggaaggaaggttgaagacacatcgtacccctagtgatctttcctgtacaaacgtgcatgcgagagttgtgttgaatttttatgtaataagcttcgacttccgggaaggaaggctgaagttgtataaaaattcaagcttagacttcggttgaaaagatcaaagggaaaagcatcacgaggggtaggatagacttcaagcagtccttccaatctgggaaggagggttgaagacgtatcgtaccctgagtgattttgcctgcccaaacgtgcatgcaagagtcgcgttgaatttttatgtaacaagctcctgttggaaatattttaccagnnnnnnnnnnnnntaccatgtatgtttcattaacatcct

SEQ ID NO: 151499 - DNA, 565 bp, Cannabis sativa
taatggggtggctctacggatccatgactgaaagtatagccacagaagtgatgggctgttcttcttctgcagaagtgtggactgcacttgagtctctatttggtgctcactccaaagcaaaaatggatgagtacagaacaaagatacaaacagtaagaaaaggatctatgaccatgcccgattacctcagacagaagagacaatgggcagatgttttggccttggctggtgacccttaccctgaagctttacttgtatccaatgtgttatctgggttagatatcgagtatctacctattgttttgcaggttgaagcaagggataaaacaacctggcaaactcttcaagaaatactactgagttttgatagcaaactcgataggctgagcactctctctggaaacagtaagtcctccaacaactcttcccctactgctaattttgctaacaagagtggttcgaatggtcaatacagttccaaccaaaccagtaacagaggaagaggaggctacaatggaggaaatcgaggtagatctggtggtggtagaggaagaggaggcagatc

SEQ ID NO: 151500 - DNA, 525 bp, Cannabis sativa
  modified_base (31)..(39): a, c, t, g, unknown or other
  modified_base (98)..(123): a, c, t, g, unknown or other
agaaacccctgttgcaactagcgctgcaacnnnnnnnnnaacaaaaaatcgtatagaaacttttattgcaacttgcgctgcaaccactttagaaaccnnnnnnnnnnnnnnnnnnnnnnnnnnttaaaaaaatagtatatggggtaaaaatttattataatctaatcaaattattagaaataaactgtttaaatttatcatggtttcaatatttaaaattcttgcaaaagttcagaatctatttacatataatttgcaatagtaaattgtgataaaataccataaccaaacatcaagactcaatcaccataaaaaaatagaacatgaaccaacaaatcaaagattaaaaattgagttaaaaataaagtaactccaaggattttaagtggtttaaccacattcttttcaacccagatttagtccactataaaacaactttcaaattcacacatgctttgataatctttgttcaatctttgtaaaaccagcacaacgttttttcaaaaactttacaatcaaaacact

SEQ ID NO: 151501 - DNA, 813 bp, Cannabis sativa
agcacatcagaggaagacaagtgttgagctgggaagaacgaaagactcaaacatgcaatcgtaagtacacttggcatggaacaactcgttagaaacacaatttatagagtatgtttataacttatttgactaaacagtcttctgcgagacagaatcgtacgaactgctaacttaagtatcgacgagaaaccatgtgagtgcaagtgtgtacaacgaggctttaacctcgtcgcgtggaagagaaacgataacgataaaaacacttagcgtatattacatggtatacaaactaagtataaacagtttggtgaatcaagatgacagacagcgaggtgtctatctcgctggaagatggcatgcatgcgagaaagatcatctcaacattggaaaatgtagttatcaaaattaaagcaatattaatctcgggaagtaatatgacgagccacagctcgccatcaaagttaaatcggctccattcctagcgaggcatccccatgagataagtcttaccatatatctttaaatatgcattcatctcagcccaataaaagcgggatactcacagctgtgtggattctaaataaaaaccgcatttacttagcataatttgtaatcaaatcccatgatttgagggaataattgttgtaaagattacaatcaaattttgtaatttactgcccactatgtaattataaatagtggcagacaagatgaaaaaggggacgaaagaactcatatgggagagttcctgaaaaacaatcagaaatccgaataagattgactcgtggactatgcaaaattttaactgcaaaa

SEQ ID NO: 151502 - DNA, 574 bp, Cannabis sativa
agattagaaaaatatcagagaaaaaagatcggaaaaaaaatactattagtccaattccgagcaatatcgagagagttatggtcaaaatactatcagtcaacgcagcaaaaaactcacatcctcttctaatcctaagtagaataggttttttcttcagcgatttttatcttattttataattttttggctataaaagagggggacttcaaaagttttggccaaacaattcagaggaaaataaacagcagaatatagagcacaaattttagagaccgaagtcaatactggaggcattcttcagagggttttcaacatttttttcttctctattttcttctattttcttaataatatatgtgattttgcttccataaacatgtgtagctaaacacttgattagggttagatggatattgtttaatattactttatggtattaattaatatgatttattttcccccaaatttctatgtattctatttcactcgtgtttaactactttgaattgcttgatcaccaattaattgtctatgattttgatgcgagatctgagaagtaagtgtcaattatgct

SEQ ID NO: 151503 - DNA, 1105 bp, Cannabis sativa
aatatctgaaactgatgcacacacgcgcgcgcgcacgaggtgattcactcggcatccacgcggtttcagacaagcctgtctgcggaaactcggacacgggctatctaaaacagtgtcacgctgacttccctcgaccgttgaggctgcgtgcaaccttctgtctcggtcaggtcccttcatccgcgcgtgaaggggtatgcattgcatacccctatgcctcaaacttgtttttgtcatatttttttattcaaaaatcatttttcattgaaacaaaatttaaattttggtagaattttgtgtagaatctaaatttttaattaaaaatataattatcagaataaaattaatttttaattaattaaaattagttttagatattagtagcctttgaatttgaaattttgatttttcaagaaaaatagtcttatggttaattttgaaatttttgattattttatttattttaattataagatgagatattacttattttattattaaaattttaaatgatcttattttgatattaaaatattaataaaagttagaaataatctagttaaaatttcaaatttgctaaccatatcagattttcaaaatttgttatttttgaaatatattttattaaattaaatataagataagaaaaatgttagttttgaaattttatcttattagatatttattttaattaaaattaatttttggcaaaataacatgaaattttgaaaagtttgttaatttaggtttgaatagaaattttaggatttctaaccatgaaattttcaaagttaggatatttcgttttatttaattattaaataaaattgataatatcctaaccattaaatatcttatatttcaaattgtttatttttgttatatttaattcattaaattataagcttgagaatataatattaggaatatctaaattttaaattcaagatattatatcatattatcttattagatatttaattaatttaaattatttaaataaattgataattaaaaattggttagatatttgaatttaagttagaatttaggatgtttaggaaatttgttagattttaaatattttttcaaatattctctaaca

SEQ ID NO: 151504 - DNA, 613 bp, Cannabis sativa
ttcctccaccttgttgtttctccagagtactttgaccaaagctatggtcttgttccgaaggaacttatcctttctgtctaggatctgaattggatgttcttcgtatgtatgtctggttgcaggtcaagattttcataacttagtacatgaacagggtctgaaacgtatttttgtagcatagaaacatggaatacgttgtgaactgctgaaagagctggagccaaagctaaacaatatgccatttgtccaaccttctcaaaaatctcgaatgctcctgtaaatctagggcataattttcctcttttactgaaacgtttgatccccttcattggagacacccgtaggaacacatgatctcctacttgaatatttacattcctacatttcagatctgcataactattttgcctactttgagttgcaagcattctggctttaatcttcttgaatgtttcattagtctgttgtacttattctggacctaagtatttcttatcgcctgtctcatcccagtgaatgggagatctatactttctgccatataacaattcatagggagccattcctattgtactctgataactgttaatatacgagaactctaccaacagta

SEQ ID NO: 151505 - DNA, 771 bp, Cannabis sativa
acccaacacccaagttgatgtttcgaactagggtttcagctttcgggatggtcttagggaaaatgggtcaaaacttgcattagaacatcaactagacatttcacggatatatttgaggcattagaatcaaaatcatagcaagttcctttttagcaccggggcccttaggcccttagcaacctagcgcccaggttgagaatttgtcaatctaggcgccttccaagtatcaaatcgacgatccaaaattttcatcttcgtaatcttcatcaaaaatggggaaatatgtccttttggggaagaaacagcactttctaggtgccagaaacaaggccaagtgcccagattgacattttgtcaacctgggccgatgtcaataatttttatgagaactcttccgagtatcttctccgttttcagaaaatattaagattcaactatttttgggaaccaaacaaaacttctgaaaggccaaaagggggactcagcgcccaaattgacatattgtcaacttgggctttttccaatcaagttcactaaaaagtgtttcagatatttttttcgtcatcagaaataataaagattcgagcaaactcagggagaaaaccacaaacttgagcccttggaagtggagcccagtgcccaagttgacctagtgctgcgcctagtgcccaggttgacaatcaacctggggtgctaccttcgattgctcaaatgtcaaatctaattcgaccaatgaatctggaatgataaaaaatggggtaggagacctca

SEQ ID NO: 151506 - DNA, 566 bp, Cannabis sativa
tcatattgctgcctcgtatattgagttgtctgctttgcttcctccacttttttctgtaaagccacagtcggtggggctgaagaattttagtctggggagatggccaaagcctctgagatgtcgagatcgttcctcgagtacttgcgtcataacaggtaagtctcgggagtactgtgttggatcgacagcaggctcatcgggctgatcttcagtgggcgctggttgagttgccgctatttcaaccatttgctcctaaaacaaacaaataaattaaatggttaattttaatacaaaataaattgaaagaaataaatataaatgaattaaaatgtaaacttacgtaagcttgttgtgcgtactcgttgcgccaattgttgccttcatggtgaaacttttgaaaagtttccaccgcagttggtagttcttctgtgtcggggctagcctatttttaagagtaaatatattactattgttattttactagaaaaattaaatcaatgataatgtaatatataaaattatcccctcgacaacatgtgaaaaataggctttgagccccagcctcc

SEQ ID NO: 151507 - DNA, 921 bp, Cannabis sativa
  modified_base (749)..(749): a, c, t, g, unknown or other
agagcttaagaacagcaacatacaaaaataaaatcctctaattttctgtccaaacttaacccaaacaaactcaagaattaaagctccaagcatgcataagacaacccaacaacaagaacatgcattcaaatccaattttacaatgtcacataaacccaaatatattttcagattattcaccaatatttaaaatgtcactaaatcaattccaattgcattttgggcccacacccggttgtgactataccgcgacaaccggtcagaacacacccgaaaagacaacacaagcatactatacaataataataataataatatggtcccataagcacgtaaataaattaatttcactgttttacccttctcaagtcaaaattactaaaatgcccctggctcaccaacgggctcttaacatagtataaatcatatattaaattatataataatataatttttcaattatttataattatctagttagggttttgctaatccatttcataattctagggtattacacatactcatttgtaaagactaataatatgaagtctttcataagagaaatactaaaaacgcacctgaggtacacaagacaacacactgagatactatgttggttattatagttaggggtgtacataaatcgatctaattcaatgagaaccgatcgatccaattacaatcgaccgccaaacattagatatccaattgtgatcggatcgaattggatgttatttttaaatatncaattggatcggatcggatggtggatggagtatccaaaaatccaatacatccaacatccaatcaaactaattagtattttcctttatttttgattagtaattagattttatattgttatacgtaaaatatatatattagcattaaaattttacttttttttttggattggat

SEQ ID NO: 151508 - DNA, 728 bp, Cannabis sativa
  modified_base (504)..(505): a, c, t, g, unknown or other
ttgacgacattagaatcccaactatgagtatccacggaaaagagagaactcacattattctccaagagagctggatgtgttgaagtaacaagcttgttgtcagtattaggcagccatggagttgaaagaattctggctatttcaccatctccaataatacgaacagccccttgtcgaactaccttttgagcagcccagatactaagccagacaaagatgggattattttccagctgagaggtaatcgctggtagggaaatatttagctctgataatttgtcccaccaaagagtctggtttacacaagagtcgccaaccttgtttagccagcatagcaatattaaaatcatgaagatgtcggaatcccataccgccttctagttttggagttgccattctttcccaagacatccatataataccacgacccttgcttgagctggttttccaccaaaaacttgccataagcttctcaatatcctcacaaatgccaagcggaattannaagacactcatagcataggttggcaatgattggatcacagtcttgagaagaatttccttgccagctcgagataaaaatttaccatcccgactattgattcgagacatgaccttattctttaagaatctgagaatagaattcttgtttcgaccaataatattaggtaaaccaagatacaggctgccatccgacgcttcaaccatcccaagcacagaacaaatac

SEQ ID NO: 151509 - DNA, 616 bp, Cannabis sativa
  modified_base (576)..(583): a, c, t, g, unknown or other
atttttattatttaatgtttagaaaagtaatcgcttccatccatgagttgggttttagttttgataggttgtgaattctgatttcatttacatttatattgttttcttattcatatctatattttttttgttttgtaaatgtgaggtattttgttggttggtatacgactatttggatcccactactaataaagttagtggacttatttcactatatgtaatattcttggttttgaaggttttagcttcatacggatgatggtaatggtgatcaggtgatgtgatgtccgaaatggagaactttgaagttatgaagcagattggaagaaagtaaaaaaagaacataccttttagtttttgggagtacataatcttttttatcaatgtttttaattattaaattttagagaaaatttatttacaaacatgagatgcccaatcgatattaaatttccaacaggatctttatattgaatttggcttcattttcaataaacgggttgtgattccaatctcttaggatgcagccttggcgcttttaaatttttagcgtagttgtaaagtccttttttggcnnnnnnnntgacaaaataatttttccatttatggtaagatt

SEQ ID NO: 151510 - DNA, 1030 bp, Cannabis sativa
  modified_base (30)..(37): a, c, t, g, unknown or other
tgaaaattgttatgagaactgatttttttnnnnnnnnttgaaacaagtagcatttagtttctgatatgaaaaatattaacttttaaaataaagtaaaaataaatatattgcatatgaaccctttacgtgtccatatttatgagttagcgaaagtggtagtaacggtgtaagagaattgtaacattaggtattttttcctccaaaaataaacataaagtatttaagtgtataaaatctgaaacattacatatttatgctgcaatttacccttaatttttgataataaaatttaacacaagaaaggacacattgctacaaaggttatattttaaaagggcatgataggatatatttgaggcattatttggtagtaacgtagtgtcataagtttacgaggcaaaaatattaattattttaatattctttttataatattttgaggtttttatatcatatactatttttttttttaggaaattagactctatatccattttatattgtccttttttattttactcttttttcaagtctatcatttttattttttttaagcactttattaatttttctcccgtcacttcaatatactctctatgtgactcccttatgtcaaggtattttgggcacagtgcatataaaaagaagtattttcattataaattagaggtagatttggttaattgataaataaaagagatattatgtattttttatactatatactgtgttaaatttttactgttattctattgttattttttagttgttttattgttgtttttttttttttttgaataaaacttagcaattttattaactagcattcgttaataacaatagaacgccctacgttggaacgatcctctaactgaagcacacgacctgtagagaaacaagaatccctggctaaagtatgagttaacttgtttgcagatcgtttgacaaaagacaactcaatattatttaaggataagagaagagtacgaacatcatgaactaaaaaactaaaagaggatgacaaagtaat

SEQ ID NO: 151511 - DNA, 507 bp, Cannabis sativa
atctccaaaatatgcatttcataaatattaattaatctcatacataaaccctaatcatttaataattcaaagtattaatcatatgcggtctttacaattaacattgtattattatattaaataatgaatacccatgagtgtgaatgttcttctttgactgaaatattttcatttttttgttgtttgactgtgatttctatcagagaacaatatcattcattccatgaggatgattaaatgcaaaataagaacatgtatatatataattaaggacatgtagatcggtaaggcggccacgtcaactattgacaatggcatctcttaaatcatcattttaattatgacatgttccaatatttattactgatgcaaatatattgtcatcgtcatttttatgaaaattgcatccttatagttattatgaatattttgtttttatgctatttcgatctaatttgtttctttgaaggattttaccatttttggttgtgcttcttatggcaaata

SEQ ID NO: 151512 - DNA, 568 bp, Cannabis sativa
cgtagtgaacgtttgggtttctatggaggacgagagacggaggatgggctttcaagacagaggtttgggcttcaatagacgaccaaacagggtagagggcaaggactccttttggcagatgagatggatctagagagagaaataaagggaggaggaaggcagtagttccttttggttgggttaatgagaaagccgtagagagaaagaaataagttttttagatttttaaaatttttgaaataaaataattagaaagattttttttttgaatgtaatgtaaaattattaaaataaaatagtataaatttattagggatatattttttttgtaataagattttttttttgagataataaataaaatttcttcactatattaagtttgttccttttttatgagattactactaagaatacatatgtatatattactaattacataagggaaatttcattttatacctttaataatatatctcatatcaaattttataccccttactaatttatacaaaacaattccactattttcaaattctacccaaaataccccttacatttaattttc

SEQ ID NO: 151513 - DNA, 650 bp, Cannabis sativa
aaaaaaaaaaaaaaaaaacctacgtttaacacttacatctaggaaaatatatacatatccaattggaggtattctataaaattagtaccgatgattcatgtgaattccttccccatacgaggtattctaactgcaagataacatatctaaaaaatgttaggcgacatgtttagaaaatgtctaataacaatactttttttaatgagaaatattaaaagaaattagtggtgattagcacacatctagtgtttatattgttattggtccaattaagtattgtgtcttatatagtttaatataatattttttatagagtatcgctatccaattgcaaggcaatatatttagaagatgctaagtgttaaacatttatatgtataaactgaaacatatatgtttatgtataaattaaaatgcataattaaatcaaacatatatacactatggataagaatcgaaataccttcagccattgatctttgagcttcaatccctgtgatagcttcagtattaaagttcgggcttcctcgctctctcaactctcattagatagaatttgcttaataatcagaatgagtgaaaagttcggggaccaagaccctatatttataggtgagatacttcatcagtatctgcgccacattaattgt

SEQ ID NO: 151514 - DNA, 1050 bp, Cannabis sativa
  modified_base (435)..(439): a, c, t, g, unknown or other
ttatatcatatataatataataatgcacataaaagttataacatatgaggagttacaaatctgaaaatagattgtaacttaaggatcacatgtaattaattaagttagttataacatatggaagttatggaatcaatgtgataagtttcttgctattagaaactattacaatactcaattatatcatttaaatgagtattgggacgttagaggaagatttaattcggagacaacttacaaaaactaaattttgagttttctggaaaccgttgtttaatgattgttaatatgttgttttacggttgttttttgaacacctggaacaagtattctgaaaatgtccataattaaacgtacatgaattgattgagcatgtttccagctctcttgtccaacgtttttatctcattaaacaccaattaaagtgttggtaannnnnatgtggtgaagagactttaatttttatatgtgatcctcaaaacactataaatagaagtactcttgggttcactttgtaagacaacaaatttctatcaagaaagcacattgctagaaacattttaggcttcataaatccagaaagctatttccattcttttctttccctaagtagtgcttgtttggtttgttttgtttgtaatatttagttttgatttcaaatcctaaatttttttgttcttggaaaatactgggttcgtttaggttcgatggatgtattaaacaaattttatatagtttatgaatattttcggtagaagaatttggatttgttttgggttaatatttgaaaatataattcacttttgattttagtttgttcaatatcttaatttaatttgtttaattggtttcaattcctgagttttagtttgtttatcaattcaaagaaaaaaatgaaaagaaatcaaggtaaaaaataaataatctaattatatatatatattttcaaattgtaacaccctaactagcataggcgtgttagtgtgatttttaacgtattgtgcagctcgttgctaatcaacgaggttatttgaaaaacgtgaataatta

SEQ ID NO: 151515 - DNA, 906 bp, Cannabis sativa
  modified_base (136)..(147): a, c, t, g, unknown or other
aattaatagtatagtattgattcaagagaaaatagtggagcccacacaaattagaaagaaaataataagaaagattctcccatatttttatagaaaatacatttctctttcttaacttaatttattttaattttannnnnnnnnnnnaaaaataaaaaagacaaatatgtcatttaaaaatctataaacataaaacaattacacattctaataatggcaattttgtcaaattaaaatatttcgattaccttttctagttatgtaaacaaaataatataattctatttttctttctggatagtttagtaaacaacatagtataatattatttctgattattttctattttaaaccaattcatttctcacattgattattttgattccagttacaatttaataaatgcgccataaatgataaaagaaagcaagtaaaatgtataactaattttaaaagagagaaagacttaagaatcatccatttagttatttaatgcctttcaaatgatgtaacattcaagcctattatatttttgagtatacaagttttttaaaataataaaaaaataaataattttatgtagaacataaaaatgacaatatacatcaagcaataatacaataaaagattaaacataaaactagacttcaatattttttttactaattagaagcatataaaaagagcatgactaatcctatataatattagggaaaataaaaacaaagagatagagatggtggtgataatgatagtgaagaaaataaatattaatattacttttataaattttaaacatataggaagagcatgattaaacttataaattatttaacttattaattcctcctaactccactatagattcaaaattgcactcttaaatatatagaacgctctatatgt

SEQ ID NO: 151516 - DNA, 547 bp, Cannabis sativa
  modified_base (248)..(261): a, c, t, g, unknown or other
  modified_base (488)..(490): a, c, t, g, unknown or other
cagttagacatagatgtgagtgtaacatgcaggtctatagcaaatagacaaatagtgtagtggcactattattgatgtgttatacatattgagattaagggttacgttcaaggcataatcaagttggactcagtaactagaaccgagatgaactattctaaggccttattgtatttagacatgtgagagtaacacgtggatctacgccacgtacacataaatacacgtgtgagcgcaacacgtaggtnnnnnnnnnnnnnncataaataggcatgtgagcgcaacatgcaggtttgtgtcacacgggaaaatatgaatggcattactgttcatatagtaagataaacatgttattgatatttcatactgtcttgctaggcttgtctcacgggtgctctactgtgtaggaaagggtaaagatgtttttgatcagccatgactgttggagctagacgaagaatgtatatgttcgggccacactagaccannngggttggggtctaccagtgatgtaatttttgagactctattttgccgcataggtcgg

SEQ ID NO: 151517 - DNA, 506 bp, Cannabis sativa
cagtgatctcaatagcgatctggggccatttttccttccgaggttgacgatgcatgccttgtgacgatcacggttcttattttcaaagagttttttgaagctgattttaatgttagcttatggctggccagggttgtaagcctcgctaacgtgactggatgaagttataggaagtcttcccatagcgagacggacaccttacttacttggtcttgagtcgatttgactgttacacttagtttgtacattatacactaagggcttttgcaattgatatgtgtcgctttcatcttcctatgtgtactgtccttgatgcctcgctatttgcattcaatgatatatggtttctcgctaatatactaagcgccagtttgtatattgattcctcgcctaagactttacaatcagcaggtcacacatatactctgatacttacgtaattaatgagttattccatgaaaagcgattacatcgatccatattccctttatcttgacacgtgtcct

SEQ ID NO: 151518 - DNA, 596 bp, Cannabis sativa
ttattgaaccaaactacaccatgttactatttctcagtttgggttttcttattagttgcttttaagttttaaaagtgttttttttagggtttattgtcgtttttgttctaattttttgtacgaaggttttgtgtttcataacattttttccttatttttaaatcattttttgattgttcttttagtgttctattgactttttttaaacagttattttaatgttatttttcagtagttttattgttgtttaattttattttacagttaacaatttttgtagtaatttcatgatttacatattgttgttaacatgtttttttttcggttgttcatcttttatgctgtttatgtctgggtgtttttaaaatgttgttttgtggttgatttttgggtttttcggttgttcatataaggtgtgtatttttgtttttgtgtttttttagtacatttttgtttttgttacttctgtagtatattgtattttagctttttcgtttttttttattatttttatgatgtttttgttggaactgttgtaggaatgggattacatatatgaccaaaagaatctgtttcttgcaaaagccgtctccact

SEQ ID NO: 151519 - DNA, 715 bp, Cannabis sativa
tttgacctagaagttgatcaaatggatgtaactactgcatttctacatggagagcttgaggaagagatctacatgcatcaacctaagggatatgaggaaaaaggcaagggagacttggttcgcaaactgattaagtccctatatggacttaaacagtcaccaagacaatggaacaaaaggtttgatgagtttatgatcaagaaaggattcactagaagctactatgatacctgtctatactacaagggcactaaaattgatcaagtcatctacttacttctgtatgtagatgatatgctcattatgagcaaggaaaggaccagaattgacctaatggacggttggctaagggaagaatttgagatgaaggacttaggcaaggctgctaagatcctagggattaatatttctagagacagggagcatggaactctaaggctacatcagaagaactacataaagaaagtcatagaaaatttttctatgacaaatgcaaagcaaactaaacaacctatgactaatcagtattacctaagcaaagaccaatgccctaaaactatagctgagaaggaagctatgagtgaagtgccctattcaagtgcagtcggatcagtgatgtatctattgggattgaactacaagagaagggacaatagtagaatgatcactgggtacagtgatgcagactatgcaggtgacagagatagtagaaaat

SEQ ID NO: 151520 - DNA, 638 bp, Cannabis sativa
  modified_base (102)..(104): a, c, t, g, unknown or other
atcacaccaaacatattatttattgaaataacaaaatactgtatcatcaacactactaaagaagctacctttagtgacaatgttttagtcacaacataattnnnttgtgactaaatgtgattttagtcataacaaaaaagctacttgttgtgactaaaatatactattttgatacaagttatcactaatttaattttagtcacaatatattgtgactaaaaatacatttaatcaaaagaaattataatttttgtgattaacctttagccaggaaccttatagatacaacatatgaatgatgatttataattagtgacaagttttatactatgactaaaaataagatattttatatagcgaggtatgatcatgaataatgattatagtagttatgagattattacctctagtatatctcctacattgacaatgaaagcatttggaagaggctttacaagtacccacttgccatctttcttaacttggaggccttctacttggttggcttgaaggagaatggtgagggccacagtgtcagaatgtggtttgacacctataactttctctggttgtgggcatggagggtaattgatcatgttgattgattgcattccatcttcaaataacttggaaatttc

SEQ ID NO: 151521 - DNA, 562 bp, Cannabis sativa
ctacaactcttttgttgttgatgctcatcaatattatcatcgtcagaacgacgtcgttggtgaagattttgatcatgcggttgtggtgtagtgatgatggaagaatcatgatcttgatgaggtgaggggaatgataatttcttaggcatagtaatggtgagaaccccagcagagaatctagctcgaatgccgtagtcagtgcaatcttcagggagttttagttgtttggtgaatcggctccatgttttggtaccttcgtccacaagtcgttgcccacttatggttactattctttcattgtttatttgaaccctcaattgctctttttggaaacctaccttatgcatattgtatgtattaggacaccaaaatcaatacatatatatataatataagatggagtgataccctcaacctcttattataatttaatctccatacttgaaaatacatgttggactattttttagaaaaaaaaaattataacggtgtttgttatagttataacatcttccttgtaaaattttgaaaaactttgaataatttacattgccgaaaatag

SEQ ID NO: 151522 - DNA, 873 bp, Cannabis sativa
tgtaagtttttaagacttttttacgtctttggtttttaaagactttgtctaaatttttttatttaacctctggcatattttattttcatgttttagcatttaggtgcgatatttcatttgatgaggaggcaccaaaacttttattcagaggtgtacccaaatagatgtgtcgtcatgcctcacattttcccatcaggagttaatggtcggtggaaagctgcgggtaatgaccactctaactttcagtgggatgacggcatattggatttgattcgaggggatgatgtccaatacttggagagttggaagaataacgagagaatatatatggccctcttcttcgacagtgcaaaacattgggtgactttagaggcagacattgatcgttggatgttgaccatatttgactcgagccttggattgattccccagcatgaattgaagagtcacttaacattatgggaagagttattcccaaatttattgttgtaatctggcatattcaagaatcatgaaatgatcgtcatgcctcaattgacagtctcagagagtcaggtcaaaaatttcagtttagaagtcatcgacgagaagattgtacaacaaacaaaatcaaggtaacttaattacaattgattttttaataattaacttgaatttgatttgcatacttatatttaattattttttattgtctcatacatcggtgattgcaggatgtatgtaatagagcatatcgagcataaaaggctagagctaccgtttgataatgtaaatgatgacaatatgaagaaatttagagagcggtggtgtgtagatttgttttaccaaaatttagcatgaacttctatgtttttttttcttatatatatttat

SEQ ID NO: 151523 - DNA, 781 bp, Cannabis sativa
  modified_base (428)..(437): a, c, t, g, unknown or other
  modified_base (738)..(752): a, c, t, g, unknown or other
aattagaataatttttagagtatattttattttattttaataatcatttcccacctaattttgattgcatttattattttcaatgtagatattttgaaattttttaatttttgaaaattagattaaagtttaaaattaatttattaattaatttagatcatcttaaatcaagtaattttcattaattatttaaaataaatagactataatatattattttaattaaaaaataagtaattactttatgaattatctagataaattttttctagatagactttttggttttttttctaaatatatttaattaaatggaaaattaatatttaagttgatttgttctagacacttaaatatttgatatttttcttaagatatttaataaaataggaaaattatatttatgttgaaaattaatttatttaatnnnnnnnnnncataaattagaataatttttctaaatttattttattttattttaatgaatttcataaatgtattttttaaatacattggattttgaattcaattatatattcataaaaaattaaattttagttgaaattaattatttaattttggaccaacttaaattaagtaatttttataatatttatttgaaaattaatactaaggatggaaaataatttttttttttcagatcttcctagggtataattctctaaatattaaattacaatttatatttagagtaatctaaattagtaattttaattnnnnnnnnnnnnnnnaaaataaatagattaaaacaagtatcaaa

SEQ ID NO: 151524 - DNA, 687 bp, Cannabis sativa
  modified_base (26)..(31): a, c, t, g, unknown or other
  modified_base (60)..(65): a, c, t, g, unknown or other
  modified_base (92)..(97): a, c, t, g, unknown or other
aaatgagcagacttagtcaaacgatnnnnnngagcagacttagtcaaacgatcaacaatnnnnnnttagtcaaacgatcaacaatcacccannnnnngtcatgcttcaaagttgtcaatggaaacccagtaaaaaagtccattgtaatcttgtcccacttccattttggtataggcaaagattgaagtaaacctgaagatctttgatgcttagccttaacttgctacaaactatacacttagctccaaagctagcaacatctcttttcataccttcccaccaatattgtcttttcaaatcttggtacatctttgtacttccaggatgtacaaaaaacttggatttatgggcctcaatcaaaatggactccttaagatcagggatatctgcaacaactagtcttcccatatggtataggtacccttcaccattaactgtccacctatctagtttctcaccatcttggaattgattccaaataagttttagtttttcatcttgccaccgacgttgcttaacttgttgaagtagtactggtgtagccactatgctagatacaagctactttttccccttcatagaattgcaacttataatcacccattgtgattgtccttttccagtcctcaagagccaaacatgccaaagtaccataaggctttctacttagtgcatcagctactacat

SEQ ID NO: 151525 - DNA, 616 bp, Cannabis sativa
ttcaagctcgggcggtaaacggtctaataacaacaaaagacaaggcaatggtaaaaagggaaaatttgctagcaaaaccgaacaggcccctagggaaaatcctgtcgagtttactactttttctatattgacagaagatctagagactatttacatggctactcagccattagctccgtacaaaaaacccgctcctatgaaaaaggatgtaagtaagagagacatgaccaagttttgtcattttcacgaagattatggccatgaaaccaatgaatgcaacaatttgaagcgggaaattgaatttttgataagaaagaataacccgcacatgtaaaaatatgtcaagttctatcaaaataaaagggccgatgaaaaccaagatttgctcccagcactagtagatggacatttgcaagtcaatatcggaggccctcacatagctggagattcaggcaaaaaccgagagaggtatgcccgaacattacaacacgagcaagaagaggtggttttggccatcgaagaaagaaagccaaaactaccacgggtaggggaacccaccataacattcaatgatgaagatgctgtcaagatcaatttcccacacaacgacccgttg

SEQ ID NO: 151526 - DNA, 1604 bp, Cannabis sativa
  modified_base (77)..(80): a, c, t, g, unknown or other
  modified_base (526)..(526): a, c, t, g, unknown or other
  modified_base (962)..(966): a, c, t, g, unknown or other
  modified_base (1276)..(1284): a, c, t, g, unknown or other
caaagttatcctcaaaggtcaaccggataatatttcggtcttcccccagaagccgggcaagtttttgagctctatcnnnnagagcaagagtgaggggagggcggttataggtcagaatctgctgaaaccgagtgcgggtgatacccgttccatccaccatgaagtactcatcagcaaaatgcccaatcttgctgatggtcgtatcgttcgtgcccgtcaaccacttgaaacctggttgagagaagtagaagtaccccgacttgccttgcttaggggtggacttcaaatcaaagaaccaagcaacctcgtggggagagggcataccccatttccgagaggcatagaggacgaagagggcagacagatacttgatgcccttaggagtgaactagtcgggtagaggccgaagcagtccaccgtattcttgaagtattgatgcaaaggcatcaatgccccttgctgaccatgggcaccctaccaggcgcacatccccctttcagggtttgtggcacaattgttgtaggcngaaatgtagcaatccaagtcgcccaggtatcaatcctggtcgagagcccacaagcgcgccccagtaaccttggacggagggcttacccacctggcacccaaggaactttgccttctatgaggaaccgcagcaccaagttcctcactgacgtagtccaagccctcaagcaggacgtctccgtcagcatcgactggctccccagcctcgttgtacaccccgtagtttaggggttcaactctgcctcttcctcctcgaaggaggaactgccaggacgtacatcgtcctgcccctcaaactcttggacctcagcgtccccttcatgatccccctccatctggacggctagatcttgttcggcgctgggcaaagtggcatgccgagccacttgagggtcagatgcgtcaaccagatgcgtggttttctttgtacgagccannnnnctatggctgggtacagggtttgaagaatgtccttcgctaaaggaaggtgggctagaacaaagacgaggatgatccttgtgcagaagttgaagcaggtcctggtcgatccgatgtccgttttcccaagactcacctgagttcatctacaaaagacaacgcacaagatgagtgtttggtcaaaatatcaaacgataaacaagcaaatatgccgaccaggagtacttaacagactaaataacgattatgtctgaagaaaagtcagaactcaagaagtcaaaaaatttctcgagttagggcaaaaaagttcatnnnnnnnnnaataagcaagatgaaagatagacattacgcagttcaaaaacaagcattatgactgtaaaatcgcacgaagacatgataaagaagaatcacagaggtttttgggcctagggtttcctaaacattttctatagcaaagtagaaggtgcatctgacatataaacaagaaaagataagcataaaggaaatcagaaacttactcgagagtcgaatgtttaggttcgagcaacgtcaatccaacaagcagtttgtatgaaggcacttcggcaactttgaagccaagaatctctcttttcgctctgaagcttacttagcaaagaagg

SEQ ID NO: 151527 - DNA, 784 bp, Cannabis sativa
tttggtgaggtgagggagttataacagtttgacccctcttccgtcaaaaaggttttgtcgaggcccttggaaaagcttttcaaattttttttttgaaactatgggtttgcatgttactatgtatttccagatcaattccagtttatcatacatatatgcccctcaagtaattttaaagaatatacgctttgtaattacttgtttgaaagaaattattattttattcacaactggaatgcaaaatatttcatcgataatgtgatttacaatcattaatctcaaaagaacttccccagttcaattgctcattttatcaatcttccaggcgcatctggttttaataaaataggttttgatgtccagggtaaatccccaacattctcccacaattgtttcaatattcagggtcgattcctgacatatactggggtttcaggtagagtaatcctggttttagttctatcttcgacaaccaatgttgacttccagttatggcaaccatagcgagacaatatctacttaggtcgcaattcttttacaaatttgttttaccggagtaactcccccttgtattctagcgactcgctccctctcgagataaccaaagtgtcccttctactcgcgaaagagggttataatctttagtcgctcgagttactggaaagatcgaactgatcataggcatcttcctgcccctttgtatatcattgaaggtgtccttgcgatatgagactttctatctcatctttcaactgacgacactcttctgtggtatgaccaatat

SEQ ID NO: 151528 - DNA, 574 bp, Cannabis sativa
ctaattaataaattacatttacatatatgaaaattttatttggtatttggtaatttttttttttttgggaaatcagcaagtgttcttcattactccaataaactttatatttttacatcctaaacatcactcttttgaaaagagcctgaaaagtttctatacaattcacaaactcacaatgtgttaaaccaatatagatcttctagtgatactttgttaggccatacactatgtattgtatttttacaagtgtttttcagttgctgtataagaacattcgaggtttcctctttttgctgcccaaacttcatgtttctagccttccaaattagatacaccaatgcagcaagtgcagctgccataactctcttttgaaaggtagaaaccttcctccgctcaatgcttctcaccaagctagtcaatcgggttactggagccttccatcccagccatgtttcatttgttgtagacaatcaatagcaaaggggcattcaaagaataagtggtcacaagtttcagctcctttatcacataatagagattgtacatctatttgataattaattataattat

SEQ ID NO: 151529 - DNA, 712 bp, Cannabis sativa
  modified_base (419)..(425): a, c, t, g, unknown or other
aataaaacttagcttttctaaaataaatttcagctaagataattaataaaaaatcaggtcattactaataaattaattcactaaggacaaaaagactaatggccaaatgacttttttacccttttcccacaaaaataacataaaagggcacttataggtaatttgggaaactctaaaatcacgactattcccgacattctcaatgtctaaattattgtcccactatactaaaaatactaagatgtgattctaatagccatacaccgtgttccgatgttgtcgggcacaaaaaatacaaaatcataaaatttctatatgtgacataaaaatgcattctgagttcaaataaatcatcataaataattaattcaatattaataaatagttttcataataaaaccctaattatctgctaattnnnnnnntaaagctaagcggtctttacatctccttaattatttacccttcttctaactaaaggataatcaatatgtataaactatacttaataatatctagcttagcttaatgagtattttcttttgtaatcgtttgaattgaatgaaatctgtttaaaataaaaaactttacttaattaatattagtatatatataaatttggcaaattatgatttttgcccttaaattttgacatgtatcaaattatgttccctgaacttttaagatcgttaaaaatgccccatgaactatt

SEQ ID NO: 151530 - DNA, 664 bp, Cannabis sativa
tagtttgttccacaatccttttgtagtcttttcttggattagctttcttctaactccattgaacatgtacataatgatggtgtagtatgccatctcttccatttctacaatttcctctgtcttcttctcagccagtaactttttatctctgagtacctttgccaccttttggtgcacaagtatacccttcaaactctctcgccatagtgcgaaatcagttgatccatcgaacttctctagttcgaacctagccatcgacatcctccttcaatttgtgttcttatagaattccttgatgaattcttgatgagttcttgatgagttcttggtgcggaagtaagtgatctttgaatctcccttgatgatcgaagaaccaagctctgatttgtagaaaatttagctctgatacataggaattaacctttgtaattccaagtttaagatcacacttaaacaaataaaagttaaatcaaaacaaacaaatcaaaaactaaaaactagcaaacacgtattaaaccagaaagataaatacagatgaatctagtagcttccaaacacaacaacacacgagagaattacactagttccaatcctaagttcaatgtgaacttggtcatactctagtttgaaagcattgccatcaatctttattgataatgagaat

SEQ ID NO: 151531 - DNA, 722 bp, Cannabis sativa
  modified_base (75)..(80): a, c, t, g, unknown or other
ggtgtcgctcgcggttcttatttaaaaagaaccattctaactcgccagggttgtaagcctcgttaccgttagctnnnnnngctataggaagtcttcccatagcgagatggtcacctcgcttagttgctcttgagccaatccgacttttacagttagtttgttcattgtacgctaagcatgtccatgattgatacaggtcgctttctttggtgcctcactattcgcatttagtgacatatggtttctcgctaatatactaaatgccaatttgtacattgattccttgcctaagaccttatagtcagcgagttacaaatatactctgatacttacgtaattaatgagttattctataaaagtaatggcatcgatttacattccctttattttgacacgtgtcgtgcattgaggtggcagctgaattttgagtataacaatttctccttacaaagttcttttttagtaaaaagagctttttaataattacagagggtatttttgtcaaaatattttcttagaaaaaacgcatcctttgattctggtgtttgtacagtttcgagagtcattatgaatcgtctcttcatattttgcccttcttccaactatttgatttcccaatctttagctttattgtcactggactttgtgtataaaaggcggctcaagcttgttatttttcacaaacctctggctttttggtgagatccattttcagaatggat

SEQ ID NO: 151532 - DNA, 582 bp, Cannabis sativa
gtttgaggacgagatgtggaaccagaatctggtttcttgtgattgttggagtcaaatcttggttttccatatccaggtggaaagccatggaggaaataacacttgtccttgtaatgcccttgtttttttgccatgagtacagtgagggcgaggccgtttgttcttggatgtttgatttgcagctggatcagtgctaagtgtggatgttgtagcagcaatagaagggatgttgcgattacccaaagttctttgtctttcttggtggatcaccatagaaaagactttgttcaagggtggacatggatcaataagtaaaatttggtctctaacagcatgataagattcatgtagacctttgagaaattgcaaaacttgatcatgatttatgtgatcatggttttgtgcagcaacagcacaaacatatgttattcttggcctgagttgattaatctcatcccaaatagccctgagtttagttaagtaggcactaacagattcatcaccttgatgaagataaagaagagattcattgagttcaaagattctagggccattaccttgattgaatcggttgttgagtac

SEQ ID NO: 151533 - DNA, 775 bp, Cannabis sativa
  modified_base (709)..(713): a, c, t, g, unknown or other
tcggacttaagctgtaaaaaattccaaacttaatttctaactcaaaatcacctcaaattcaacaagaaaacatcgaaactagtcccatgactaccccaggacaattctataaggtcaagttctccataactattctaattcacaaaaatcctatatgaaaccaattgttcttagctaaaaacaaaattaaactatatcttaagtttttcggctttgaaaatttgttatctcgctactatcggagcttagattgctaggctttgggctgaaaatagaagaaaatagatagaagagaagaaagtttttgtcgaagaaagaggagggtttcgttctgtttagttttactgtttataaatttatattatatatataaatattaaacttagataagttattataaaaaaaaataatgttataataatataataataataacagttataataataatgtaataatattaataaaaattttattattaataattatcttattatttcttaatcactaagaaatctctacttctagggcgctaagtcaacttccacatattcctaattatcttaatacctacattattaacttatcacaatattcccgtcaaatctaataattacaactgttatgatatttttggcccccaattgagtctctaaggtcgccaaaccagaaaatattttaattctacatatagctcatattacattcnnnnntgctatataaatctccgtaattaataaattatgcttatttactcacttataacaaatttaaa

SEQ ID NO: 151534 - DNA, 512 bp, Cannabis sativa
aaaacctggacactacaaaagtaaaagtcacagcagagatcaccacaaaggaaagagtcacaacaagggaagatcaaactcaaaagaaccacttgatcctacaagatgctacaaatgtggcaagccagggcatttcaagagagattgctattttctaaacaaaggcaaaccaaataaatataaaggtcaggaagaaaattctaactctagacgtaatttttctaaaaataatcaagccaattatggtgatggttatgaaactgttgatactggtgaagtatatattgctgcatcatcttttaaagatgattggattttgaattcaggttgtacttttcatatgactaatgaaaaaatttatatgtttgattacagggagtctaaaggaggaaaagtggtcgtagggaacaattagacctgtgagattaaagggtcaggatcaattagatttaaaatgtatgatgggataataagaaccctaacaacaatgaggtatgtgcctaatctctcta

SEQ ID NO: 151535 - DNA, 523 bp, Cannabis sativa
tgttatttgtgaatacaaatgagagattggcaatgacaacaacctcttttaaaaccattagatgagattcaatcttaagatgaaagcataattagaataaaaattaagaaaaagatttgtattaatctcatctatttcttttgatagcatatagggaatttttgtaaagcttgtttggtatgtcgtataataattgtattgtattaaatttggactcgatcttagactccagacttggacccccacgtagaatcggactcggacttggattcaaattcggccactagccccaaatcagggtagggctccaaacatagtattgtattaaataatactaatacaattcaatacaatatataatacaagtattgtttggtatgtcgtataaggatcgtattatattaaataacaaaaaatattatgtttggataaaattttggatgcgatctcagactaggggtgttcatcaaatcgctcaaaccgcccgcaccgcaaaaaaatgcggtttgaaattctttgtggt

SEQ ID NO: 151536 - DNA, 906 bp, Cannabis sativa
ggacaacacttatcccaatgggaagtgagactaccagtcaccctgtgcccggatacccctcagagtacttttaagtactgcaccttcgtggtggtagattgcccaactgcatacaatgtcatccttgactgtccagccttggccgatttcggtgcaatcacatcgatccggcacttgtgccttaaattccctactcaggaagctggagtagggacagtgaggggaaatcagggagaggtcaggcaatgctataatgttacagcacacttgccggtgttggcagtccgtgagggcattgaatcagcattgatggatgaagatgagttagatccccgcatgggatctgaaaaaactgtagagcctacggaggacaccagggaagtacaagtatgcgaccttgaccccaccaagatcctcagtctagggaaaaacctagagccggaggaaagaaacaaaattattgaagcactaagggcgaccatagatgtttttgcgtggtgccaaggagacatgaccggcataagccctcacgtgattacccatgtcctgaacgttaacccagacatgccgacagtacaacagaattggcgtccccttgatccggtaaaagcggacgccttggaaaaggaggtagataagctgctgaccaacgacctgatccgggatgtgtactacccggaatggctagccaatttggtactagtgccaaagccgaatgggacgtggcgggtatgtatagactttaccaatctcaacaaggcctgcccaaaggattgcttccctttacctcgaattgaccatatggtagacgccacctttgggttcaagctactgtccttcatggacgcctacttcggatacaaccagattaagatgcacgtcacagatcaagagtgcactagcttc

SEQ ID NO: 151537 - DNA, 707 bp, Cannabis sativa
tttcacctatttgggtattcctattagccccaggagactgacttcaaaagagtgtagcttgctggtagacaagatgactcacagaattagaatatggagtacaagacatatttcttttgctggaagagcagttctaatcaactcggttctactcaccatacatacatactgaagtcaaattatgttgcttccaaagaagattatcaaagacatagaaggtgtatgtaaagctttcttatggaaaggacaacaactaatggctggctcgggtcaagttgcttgggaaaacatatgtcaacctaagggagcaggaggtatcggctttaagaaagtggctgaatggaacaaggcagctatgttcaaatatatctaggcaattgcaaccaaggaggacaatctttgggtcaaatggatccatagtgtctacatcaaatgagccgattggtggagttactcagctccacaacaaagtagctggtattggaggaagattgttgcattgaaaggtactattctaacattaacaactccttcctctttcattcaagatagatatcgaattgcagaaggatataagatgttatgtctgaatgagaaccgagtcaaatggagtaaggaggtttggggtagacttaatactcccaaacatagctttgtattttggctagcaattcaaaataggttgaagaccaaagagagactatttc

SEQ ID NO: 151538 - DNA, 662 bp, Cannabis sativa
gagttggctgttcacattcttgcataagctcgcaggcttaagatacattcgagactagtcaagccttggatgtctgcgtcctattcgagtcgcttatacggacatcttgtaataagctgataaactaagacatgcgagtttgtaccgatttatcaaggctgttgggtcaactggaccagctcgcagagcagagaatcgatatctatcatttcgcaaaaggatcttggagatactcgcatatatcctggtacatgccagttttaaaccgttccttggtcctacattatacgagccatacgattgcaactagactcagtcatggtcgcatgatctcgttgaatctggttcaggcgaggctcatattccagggatctctcatcgacatctcagctctcctcgaggaaagtgaatacacatgtctttttaataggagtctggtctcgagtttctaggtgagaaaatctcactataacatttaataagacaaatattttcatcattgtctaataagaccacttttttcatcatataacagtaataactgtattttaatctcgatataaatcaattcataacgataataattgtatcctaacataacttgttatgtagtgcaaaatacttttcttacctttaattcagattcatatatttcgaccaac

SEQ ID NO: 151539 - DNA, 510 bp, Cannabis sativa
gctcaaatcctttctttgtaagttgccttcttctccttcttcttagtcttcttctttgtactctcttcttttcctttctttttctgtacttagatttctttttttttctacaatttcgtaccagcctccttttctcaaagtgcagccaccttttgatttatcctccttctcttttgctccccaattagggtactaaagtttaccctaatcggaaatcacagtgatggtccacttgtccttcattttccacctattagttgagtcattggtcacattttcgccacctcagctcctttctttcttcattaatgctagttggacttctgccaaaatacacttattgggctgacaaattgctacgcgatgattgctatagcaatgccagtcagcattaagcatttttcttctcctttatctccttgtcccaaacatttccaaatacctattctttcatttttttctgcttaatgcacataaaaacaacaacataagtctatttaacacttacta

SEQ ID NO: 151540 - DNA, 538 bp, Cannabis sativa
  modified_base (55)..(69): a, c, t, g, unknown or other
tggtggtccaagaaagaattatcactcattgtacatttggtataaatttaagtcnnnnnnnnnnnnnnntagattccaaatagaaattttaaatttcagtttccataattcattggacaatatagtaaaactttcacaaggtgttattatcaatttttttgtcaatgggttctaactgtatgtttatgtatggaatatgacttttgtattctgtgacaagaatccacttaaactattctaagaactctttgttgtaactagacttaggaatccatcaatattcatcaaaccaccacatttatctatagcatttgcatcttgttcatagtagttttgacaagatcattctctggaaagagaaaatatgtctatctccacttgaaagtaggatcatctatatttgaacatatcgatgtacattcaggggtagatatgagttattgttaaattttttagacggtcactcttgattttaccttatgcaaagaaatttgaaatgattgaaaaattttatgaatttctagcaatggtgaaaaac

SEQ ID NO: 151541 - DNA, 954 bp, Cannabis sativa
  modified_base (201)..(205): a, c, t, g, unknown or other
  modified_base (895)..(896): a, c, t, g, unknown or other
aggtaaaggaaagacaaaagctgaacaggagtgagcttgagctgggatgaggttgtacatgtcaaagcagcgcgacctggagtgttcgatctcaggacatctggaaatatattttgtgtacgaaagattttaaacgggatcccggaacttgtaaataagtttgtatattataaagtttattaattaatataaaagttttannnnnacacgtttttcaagaaaattcttttattagcaaagatagcattgtaattgaaaaagtattgtaacgtgccttagcattagggcgttacaagcagtatcaagtggatgattgccttgcctcaccttgctttagtgagcgaggttcattaggagaggggggatattgagaagtggtttctcattcgagatggagttgtacagtttgggttagaggagtttattttgattactgggttaactccggaagagtcttccaattagaatgagtttaagcagaagatgtcgttcaagaagaagatgtttcctcacttgactattaaggtttttaaagaagaggttaggggtaggtttttgtctggtgattttgatgatgatgttgatgcggtgaagatgggtattgtttttcttttaagtcattatttatatggttatgagaatggaaagaaagttgataatgaattgtttggtttcattgatggggagctgtcagatttgagaaatattgcatttggaaaactgttgtgggacacgctttttcattacatgaacttggcttttaagaatggtgacaatatcttctataagattgagaaggccaaagataaaaaggataagtgtcattcttttaaattctaaggttttccatttgttataggcataaatctaccctccccgcgagaaagacttgtcnntagagaactcgctgtattgaaggtggctcgcaatattatagtactcgcagtaccgaaa

SEQ ID NO: 151542 - DNA, 507 bp, Cannabis sativa
ttgagagttcaagataaagtaattttcctttttgtgttaattgtattgcatagcaagttatatttcattgtaattaatattattgagaatggtgcatagccgtttttgtgctatggcaatagttgattgtatggtgcatagctgtttttgttgttaaagagtttcaattatggtcttttacttgtttagtaaagtgacacatgttatacatataattaatgatcaaatcggattttttgtttcaagaaattagaaagataaggtgcttaaataatgatgtattcttcgaagttttatccctattacctacaaagacattgtgtcaaattaaatgtgtatctaaatcttggaacaacctgatatctgattgttcttttatccaatcccaattacgaaggactaaactctccatctcagaattcatcttccaagacaagttcctatggctcaacaaagaaatcaaaattgtcacatacattcctcttgatgaagaaggctttcaattca

SEQ ID NO: 151543 - DNA, 563 bp, Cannabis sativa
acaagtagaacattattataaatttcttaaacatttattaaatgttgatatataaaaatataagaaattattcagcaatttcttttacaatatatgaatataatttttgcataatcttcaagatgtatgcaaaatctgatctttaatatatgtcacatgcaataatttttaagataaatattgtaagtaataacaatgtacaataacatgactaatatatagaatacgagcactctttaaaattaattgaattcaatttgtatcattctctgtcgagaatgatgaacaataaatacatgtctcaggtatttaaaaaacattagtgatgttcattgttattcttataatttgatctattttcttaacattcttttttgagtattcaaaactcactataaaattgcatcaataataataagttttaatgattctttagttgtattcacataaatacaacatttttcacaaatagaaaatttttactttaggaaatatttgccaaaatctatatatcgatattagatgcataatctttaggatatatgcaatagatcggaagagcg

SEQ ID NO: 151544 - DNA, 665 bp, Cannabis sativa
ggttgattgactttattttagacattaatctcaaaaaaatttttacagacacaactcacaaaaagagatagaaagagagagaaacaaaatatatatataaacttgggaaaaggaatcacgtgggtgggttgttcctaattttaaatttaagtaaaaaataatttatcacatcaatcaactaaatacatgtaaaaagtcatatatatataaacacatattacaatttttaagaatgtgatcactcacgttggacttaaattataaatttaagtttaaaaaataaataaaaagtctgacatgaaagtgacataaaatcatcaatcaacttttgaaaactttttctttacatatatacacatatatattattaagctaaattaaatagacttgcttaaaatttttaaaaaaatatatatatatacacacacagtaaaattgttataattgccgtgtgacagtaaaaaagaaataaaatggaaaaaatcaatatagggtgtaaatttccccttttttttcttgtagacttgcttctttcaattttactacttttatttcttttcctcaacaaaaatacactttaattcctacaaaataacaataaattaaatccaaataaaatattttcaacataaaaatatatctcattaatttcatgaaaatattaa

SEQ ID NO: 151545 - DNA, 545 bp, Cannabis sativa
ttatactaaaaatatattttttatcattataatatttaattagtagattatattattatataattatttgttttttaacaagggattatttaattattaaaaagtaaaaaaaaaaggtaaaaatatcgtggtctacagtacccactattataagtggaatactgtagactcccaccaaaatagtaatacttttagagttgggttggaagcttttagtgaaaaactacatatttgaattttcaaagttccattgaagatgcccttaataattaatatttggataaattgaggaaaaactcctaaaactttcatttcactagcaattaactcctaaaactttttttttttggcaataaaaaccccaaaattagtgttctgttagcactttactatcctatccatttcttagtgctaagtgctttgttggatcatctacgtgtacacagtatacacgtagcacaattatattgatcaaagtaattaaatatttaaaaataaaaataaaaataattaattaaaaaacaatttttacttttttttttctt

SEQ ID NO: 151546 - DNA, 558 bp, Cannabis sativa
taccactatcaatgtaatctaacaggctccgtaaacatacacactaaacatgtaaatacatatgcatatcattatacaattcttacctgaatgcaggagtgtcggtcaacctgagtggaactgctgctcgatgatttacaggcccctaaatcacattatttgcaaaactgatgagtgacacgctaaatcacttttcaagaatttagaattgaaattaaagtttctctatcgatggataacatggctataccctaactatcgcgaaaataggaaaaattaaggttcccgaaattgccccaaccggaagactcgttctgtggggtttcctatggaccaattggaattccggttcctacaggttccactaaaccgatagaccgattcagtgcaggaaaccccaaaaacctcctaaacacctcaatttgatcccaaatgctaccaaatcttccgaacctcctaattacatcacaataaacaaaattcatgcaataaaatcaagaatcaaccacacaaacacaaatcaccattaaagaccaaagtttgagctctaaagctcaa

SEQ ID NO: 151547 - DNA, 869 bp, Cannabis sativa
agtgctaattgcccttactaatccaaattactagagcggtcattacaataaaaatgtaaccattgaaacttcttccatatatatatatatatattataataaataaaaaaaaaatttgagagagaactagagtaacattattttattctctctctaaaaaaaagaagtgttttaatttagtatttttattcaaaaaaaaaaagaaaaaaaaagaaaagaaaagagagaaacattatatttctttatatataaataaataaataaaaaataatatacatacatatttatcgttatacttttctattttagtagttagttctttggctcttattttgtaagtgtttcacataaatcccaaaggttatttgtcatttgaattctaatggtttgatgtgtctatcttgtgatcaattcttattcaaattgtttatcctaaaaaatatttatcctttatcatttgtgcgttaattgctacatatccaactccaaaaaaagagtgtcactctcccaatacaaatactttcaatacccgtgaggaaattagagttgaggtctttacacttttgagatttttcgatactatttgtgttaatgcttaaaaaatagataaaaatttggtgcacacacacacacaactctggaattacaactgaaataacaatgatagaaatttttgactctctaccaatattttgaaaatgcttggatggttttgcttagtttgacttgtttattcaactcgattattatttttcttcgcttgaattgttaggtactagcaataagctagttgaggattgtgattaatagtgaaaaatatacatttagtaagcttaaagtataagataaattaatattttcatgaaatt

SEQ ID NO: 151548 - DNA, 682 bp, Cannabis sativa
gaagtaaatttttatatttatcgaaaaaaatgattgtattcatgtgaatacaactaaagaatcattaaaaataattattatcactacaacaatttcctctccgccggtattaatagcccagaccgtcggcaataattaataccggcgaaatctgttggtaattatccgtcggtattaattggtcgctaaaagtgactattagcgacgaaaatgtcttccaccggtaataatattaataccggtagattaaaaaagcggtggggtccgccggcattaatgtctgcacaaaaatacgcagatacattaatatcgacagaccacaatcagtgttccaccggtattaatatttttaattttttttttaaaaaaacactatcacaatatcttaaataaaattagaaaattgtctttaaataaactttaaaacataaaaattgacataattaaaaaacctaactattattgttcaaatcagtatattctagaaattcatctgcattcgagctaagtcttgaaccgtcgagattatcacgggattgagctggcggggtaggataataaggttgtccagtctgcggtgtaggtaagatctccacaaatttttgagtctgcgggcaaaccaaaataggttgttgctgttgttgctgactctgcgcactgaaaagctgaccatacataggct

SEQ ID NO: 151549 - DNA, 865 bp, Cannabis sativa
tatacttgcgtatataattttcacaacacattccaaagaagtagtaggtataagctcaaaatgaatcctcttaaatgtacctttggtgtaagcactgggaaatttttgggatttgttgtacacaaaaatggtataagcatagacgaagataagactaaagctatactggccatgaaggtaccacaatcagccaaagaattgaaaagcgttcttgaaaaagtttcatatctacgacgttttataccagctttagcagaactcacaggcccgctccaatcattaatgagaaaaggtatgtcttttaattggggagaaaaacaacaaaaattgtttgacaagattaaaaatgtattgtcttcctcccaagttatgatatcaccagtaccacgagtgccactactgttatatttggctgttaccgaaacatgcatcagcatattgttagcgcaagaggttgaaggaaaagaaaaacacgtgtactatctcagtagacaaatgaaaggagctgagactaattatccctatgttgaaaaacaatgcttggctttggtgtacacagcacaacgattaagacactacctagtggcgcataaggtggtggtaatgactaaagcggatcacataagattcatgttgagttaacccataccttccagtagaatagctcgttggatattgatgcttagcgagtttgatataaccgtcatgtatcctaaagcgcaaaagagtcaagccttgtctgatctactggcatgttcaccagacaaccatgaagaatcaatcatagaggagatccctggaggattacctgaagccatgatttgcgatgaagaaacacaaaaaagatggacaataacatttgatg

SEQ ID NO: 151550 - DNA, 1470 bp, Cannabis sativa
  modified_base (909)..(912): a, c, t, g, unknown or other
tacagagaagttagttagaagtaagtttctttcttaggtctagctggttattatcgtcggttcatagaagggttctgttaaatttcaacacccttaaccaagcttactaaaaaaaatcagcgttatgtgtggacggataagtgtgaagcaagttttcaggagttaaaatagagattaatcacggctccagtgttagccctatcttctgataaagagaagttcatggtttattgtgatgcatccaaacagggtctcgggtgtgtactgatgcagattgatcaggttatttcctatgcctctcgttagttgaaagaatatgagcagcggtacccgactcatgatttagaactttccgcggtagtgtttgctttgaagatttggcggcattatctctacggagagagatgtgaaatttatactgaccataagagcctcaaatacttctttactcagaaagacttaaatatgagacagaggcgttgattagagtcggttaaggattacgagtgtgagatcctttaccatcctgggaaggccaatgtagtgtctgatgccctgagcaggaagggtcccagacaggtaactagtatgattcagatttcacctcagttagcagaggacatggtcagatcaaacatcgagtttgttgtaggtaaacttcataacttgacgcttcaatctgatctgttagaacgaattaaagctactcagttaactgattcagagttagtgaagatcagggaagaggtttcagctggtcaagccagagattttacagtgtcagatagtgggatgctgttatttaagacgagggtttgtgttccaagtagtgcagaacttagaaactaaattcttgaagaggctcataccactccatactccttgcatcctggcaccaccaagatgtannnngatcttaaaccctacttctggtgcagcgagatgaagaagaatgtggtagaattcatatcgcgatgcctaacctgttagcagatcaaggctgaacaccagagactggcaggtttgttgcagcctttgacactttctgagtggaagtgggaagatatcaccatggactttgtggttggattacctagaaccacgggtttgtttgattcaatttgggttgtggtagatcgattcacggagtttgcacattttctaccagttaaaacaacatttacagaggatcagtatgcagatttgtacgtcaaggagatagtaagattacatggtgtaccaaagtctatagtttcggatagagatccaaagtttactctaaattctggcagagtttacattgggctatgggtaccaaactgaaattcagtacagctttccatcctcagactgatggacattccgaaagatcaattcagatactggaagatatgttatgagcctgtgttatggatttcgagggctcttggagtaagtacttaccactgatagagttcttgtacaataaca

SEQ ID NO: 151551 - DNA, 560 bp, Cannabis sativa
tttcagcacatacttccaaccacttaccaaacattaccttgtaagattcaaccatagagttctcatcaatttctgactcatctgattcggatccagcttcttccttgtggtcattgatcaaggtattattcatgcaaatgaattttcctttttcctacaaatttcttgacaaaacacttgttagagcaaccttttctttttcatcttcactactttcagaataagcactccaagtaacattcaatccctttttatttttctttaaggtattggcacattcagatttaatatgaccatacccttcacactctctgcattgaataccttttttaatgttagatcaaaaaattttagagggattgttacttgaaatattaccttttggagtttttgaaaaattctttttatttccaatagatttcatgtatttttggaaatctttcatcaacaagcccatttcatcatcagaaacaacatgttcagaaacattaaaagcaatacctttgcttttctcatttaaggaacttttcttactctttttcttgatttcttgatttaac

SEQ ID NO: 151552 - DNA, 565 bp, Cannabis sativa
tatgtatgcatataaacaaaattttcgatttattatatttgatttaagttttaatatttttttttaatttattattttttattattttcaaacttttttaaaaaatattttatattttttatagaaaattaaaataatagtaaaatatttatgcttttttatagaaaaattattaagaaaatatgacgagctatagaactcaatttatgatcgcgttaaaaaatctttagcagactaagttgctagagaagcaattgcatgggacattttaagttgaaaatataggcatcacaatatatgattataatttaggcatcggattttagcataaaaaatgatgaccaaaacaggatatacaacatagcacacatcaaaataaagaaattaaagcaataataaaattgtttacaatcactgaacaatcaacataataagcctcacgctgaccaatttgccaaagtagcataatctcaggggacatttaagttcaaaatttaagaagggaaatttgattttctatacttaaaaaactcaaaaaaaaaaaatttaaaccaatacattttac

SEQ ID NO: 151553 - DNA, 734 bp, Cannabis sativa
tcttgagtatagctaattggaacagagctactttaatcaagaacatctggtcaattgcaacaaaaaaagacaatctgtgggtcaaatgggtccatagtgtctacgtcaaaaataaagattggtggggatacaatgcccctctacaaagcagctggtattggaggaagttagttgagcttaagaatgagctcaaaaaccgaattgatcttgttacctttatcaataataaatatatgattgctgcaggttacaaaatgtacaatcaggctgaaaatcattaccattggagcaaacatgcttgaaatagactcaatattcctaagcattattttgtggtgtggattattttgctgaatagacttaaaacaaaggataggttgctcaaatatcatattgtatcagatgatagatgcttattctgtcatgggaattctgaaaactgttgaacacttgttctttgactattctttttcacaggaatgcatacatattttagagcagtggttcggttggaagatggccctcactctattacaggggctgcttcggaaattggacagagttaagggatataaatttcgaaagagagtgatcatgccaggtatagcagcattggtgtacaatatttggctgaccataaatgatatattgtggaatgaggcgactgctagtgtccaaaaaaaatttcagcaaacaaagtggcaagttaagaatagaatttcttttgttatgcc

SEQ ID NO: 151554 - DNA, 724 bp, Cannabis sativa
  modified_base (598)..(621): a, c, t, g, unknown or other
aaccgataaatcatgggaattaaacttttgaacatataatcatgattatatgtaaagttttttttggcaagttagatgccaaaatattttttatttatggtgatatttccttgtattcataaaccgattttatcaccttaattatatgtttttatttctcttttctatcttaggaaagaatcatttttcagttgtccatttttcttgtatggaaacttcttgtaggagaagaaattctcttatggaaagtttactttatatggaaactttgactaatcttatttttctttaatgagttcgattgtatcttaataagatcagatcaaacacactgctttttgacaggtattaagaccaaatacatgatcggacacgtttttggtaagtttccttttgtagtctgatttgctgcaatagaatctgtctttgatgctgcaaatctggattttctttaggaaagttttgtacagctgtagattcgactttgtggctgtctctagggtttctatgttctacaaatagaacctagagaacagtcattcgaataaactcttctagctttcatgttttgccttttttctcatttgtgaagagagannnnnnnnnnnnnnnnnnnnnnnnttcatctaggttctagtattttcatattcgttcttactctgtcttagggttgattagaataacttgattgaacaagagagaggtcttcgggagaagacttgtt

SEQ ID NO: 151555 - DNA, 708 bp, Cannabis sativa
tcagcagaggcttgctgggctcgagtgtgagtagaaggaccgattggagtggtagcaggaactgatgcagcaggaggaaggactgttaaaggtggaggagattccttcgaagatgaagatgatgaagaccaggttcagtaaggacacacagattttcgagccacttgcttaggaatgtgttttggcttctcgagctgagatttacgctagggaagcgatgaatctcctgtttttgcagcagcaggaggcatggttggagcaacagggggtgcattggaaggggttgcatcggtttccaccaactttttgggatgccctaggttcttagttctcaccatttttgatatgaaagggaagatgaacagtaacaacaagagaaacaagaaaataggttcgggtaggtggtgagataaatgacacaaattggtttaaataaatatggaagctagaagagaaaagcaaaccaattttgaaaattcgaacaataaccgccagcccatgaacaaaaaggaaaccgcccactctcttgcaactcctttccctttttttttaaaaaaaaaataaataaaaggaaactagaattaccaactttatttccaaagataagacaatctttcaagattaaaaacacattaccatataaaagatcaatctttaaaaggaaacatatcaaaataaatcaagcaagaataaatattgatacttacc

SEQ ID NO: 151556 - DNA, 583 bp, Cannabis sativa
tgttttttcatttattaaatattataactattataagaatattatagaagctgtaattaaggtaaacactaaataaatcaatcattcactacagttttcctcttcacattcttatttaacattgatataatgtatgaggatatacattataaattgttgtattacatttatatacacatatatatatatatatcctaggtttttttttcttcataagaatatagaattaatctcgcacactatttttttcttctcacaacatatatatatatagttattttaatatatttcaattattttactactaaactactagtaattgtcttattataagttacataccaattttagtgattattgtctctttcaaaataaaatagtgtagtgcacctacatgatcagcttttacgtacacattatttttgggaagttttatttacattcaaaaaatataaagagtattacattttaataatttttattatatatataatatgggtgattattcaatagttacatttttattgtaactatatggttacatttttctttgacctggaatagcaggttactaataggtaga

SEQ ID NO: 151557 - DNA, 727 bp, Cannabis sativa
aggacctggacccagacccaaaattgtaaccggactattacccggactcggacacagacccacccacggattgggtcccaaaattgaataaaaaacttgaactaggactcgagacacgaacccagacttgaactcagacccgaacaaggaacaagactagggacccagaattgggattgagacccggaactgcacccaagtctcagtcccggaactagaccgagacctagaccgggaccagggaaatgaatcgaaaccagattgggacccgtgattggcatccagatcttgtctcgggatctggaaattgggtcttggacaagacccatagtcggtgtcttaatctagtactcagagaaggacccgaagctggactaggacttgggattagagaaggacccgaagctggactaggaccaagacctaagacacgaaaccgaaacttgtactagaacgtggccaacaccctaataggactggggtcgtggccaagacctagacctagaccgggacctgaaactagaccagaacccagccccgaaactcgggctcggacccagacccagacctatacctagacccgatcccgaacccagactaggattgcaacttgaacttgatcccgaacccgaactcgagacttgatcccagacccaaaccaatcccctaacctaaattttgattcagaccatgacatggacacgaacctagacttggacccgaatac

SEQ ID NO: 151558 - DNA, 796 bp, Cannabis sativa
aaggacatgtggaccgttaagggagacttaccggattcggatgtgctggcatcaggagccccagtattgggaaaggagagcagcaagttaggccgaggaggcgcccggtctttacccgcttctatctgaagggtcctcccagcagcagcttgagccttaatataggctaactcatgttccctcctaaagaggcacttctggtaccggttctccgctgaggcaataatgtccgcccggagtgccttttcagcgttcgggttacgaatgtttgggcagaggaccttagagaggttaaagtcatccatggattggctcctcgagataagctttcccttccggcaattctccgttgtgaccaagtctcccacgttaaggccatttttgtcatcaatggagaagaccttagcgtgcgagaggaaaagctgggtaggagcagtgcgatgcaatggagggatcctgacccactctgtgagcagttttgggcgatcaacggcttgaaagttgaaagaaaagaagaaacggtggcggtactccttgacattcttttgaaagttataagggaccggacgctcatcggtaggatgggcccgaagtgtgaaaaaacagtccttaaacttatcccccttcttggggacaaatacaagttcataaaaatataaaatctcagtcgggctaggtgaagccctgtcgcgtgctacataaaaaataaacaagcctgagagcaggcggtaagcttgaggaatgagttggtaaggcacaaggccgacaaaaataaggaaatttataaaatagtctt

SEQ ID NO: 151559 - DNA, 1085 bp, Cannabis sativa
  modified_base (290)..(290): a, c, t, g, unknown or other
ggttatcctctgccccttggtctgcgagccgtgaggtttgccttgtgaatctcttttcccaaggtcaagttgattttgtgttccatcttcccgcgttgccttcactgcagctatttctcgctctaactcggtattacgccggtttactccctccaatcgacgcctaagatggcagttttctaattccacgattgttatatatctggttgggtcgtaagcgccatcctcatcaacctggttagggagcgatcgattgttgctcatcaaaggtccgtcaagccaggggcccnaatactgggtcttcctggggcttgcattttgttcatgcgatgacttgatagatccctaaggactcaatggttctttttcgggacgatgattgattccttcttgaggattattatctttggtgtcatccatcacttttatgtcaggaggcttttttctaagcttttgtttacagaggctctcaatgaacaccgagttttttacgtggttttgccgttaaaattctgcatagtccacgagtcaatcatattcagatttctgagtatttttttcagggcctctttcataagactttttttgtccccccttcttttgatcttgtcttacactatttataattgcatagtggcagttaattgcaaagctgaccaaaatatgtttacaaccattatccctaaaatcgtgggatcttattacaaatcaagtcaaataaatgagattttcacacagctatgagtaacccacttttattgaatcgagatgaacgcgtaatcaaatatatacggtaagccttatctcataaagaggcctcaccgagaatggagctaagataaccttgacagcgagcagttacttatcattttggcttctcgagactattattattttaagtctgataactatatcttttggagtcgagatgatctccctcgaatgcatatcatcttctaacgagataaacacctcattgtctgttatcttaactcgtcccactatctatactcagtttatatatcgtataatatacgctaagtgtttttagtgttgtcgttttctctttcacgcagtgaggttga

SEQ ID NO: 151560 - DNA, 759 bp, Cannabis sativa
  modified_base (463)..(468): a, c, t, g, unknown or other
  modified_base (611)..(612): a, c, t, g, unknown or other
ttctttactcagaaagacttaaatatgagacagaggcgttggttagagttggttaaggattatgactgtgagatccttgatcatcgtgggaaggccaatgtagtggttgatgccttgagcaggaagggtcctaagcaggtaactagtatgactcagatttcacctcggttagtagaggacatggtcagattaagcatcgagtttgttgtaggcaaacttcataacttgacgctgcaatctgatctattagaacgaattaaagctgcttagttaattgatctagaattagcgaagatcacggaagaggttttatctggtcaagctagagattttaaagtggcagatagtaggatgctattgtttaagaccagagtttgtgttccaagtagtgcggaacttagaaatgaaattcttgaagaggctcataccactccatactccttgcatcccggcaccaccaagnnnnnncaagatcttaaaccctacttctgctggagcataatgaagaagaatgtggtagaattcgtatcgcgatgcctaacttgtcaacagatcaaggctgaacatcagagattggcagttttgttgcagcctttgacacttcctgagtnnaagtgggaggatatcaccatggactttgtggttggattacctaggaccacaggcttattcgattcaatttgggttgtggtagatcgattcacgaagtctgcacattttctaccagttaagacgacctttacagtagatcagtatgca

SEQ ID NO: 151561 - DNA, 763 bp, Cannabis sativa
  modified_base (453)..(457): a, c, t, g, unknown or other
  modified_base (525)..(525): a, c, t, g, unknown or other
taattttttatttaattaaatatagctagaaaaataattcaagcatacagaaaataactatctagatttttcaataactaattacttcattttctaatgaaaatataatatattttagtctatttattttaattaatcattaatgaaaaatttacatgatttaagttgatctaaaattaattaaaatgattaatttttaactttaatctgttttttttttttaaaaaaatcagaattcaaaattatctgcattaaataatgcaattttgaaattggtgagaaaaaatgattaatgaaataaaataaaatacgttttgaaaattattctaatttatgttgttctgaaattaaaatttccaacttaaatataattttctatctagttaaagattctgaaaataactaatatttaagtgtctagaataaactaaacttaaatatttaattttcaannnnnttaaatgtattaaataaaagaatcaaataattaagcatcttgaataaaataaacttaattattaattntaatttaatactagaaaaaatattttaatttaaattggtccaaaattaattaaaataattaattttcaacttaaatgtactttcctaaataattaaatattagaaaatataattaattactagaaataactatttagaatatatctcagtaattaagggttttttctaaaattaactttaaaataatccaataaaaaataaaatgatatgtttttaaagctaatagatcggaagagcg

SEQ ID NO: 151562 - DNA, 753 bp, Cannabis sativa
ggaataggcatcgtatttgacgtgactgcaccaaagtccaccaaggtcggtcggccgagaatcgcgttataagcggttcggcagtccaccaccacaaatgtgcagtacttgaaagtgctctggggtgtgtccgggcacaaggtgactgggagcctcacttttcccatagggataagcagtgttccattgaaccctatgagttgggaaccacttggtgataggtctcggtccgttaggcctattgcagtgaaggcctccttgaatagtaggttcacggaactcccattgtcgatcagaactctggccacgatcttattggcaatgggggtctctatgaccaacgggtcatggtgaggaaaacacactgttttagcgtcttcttccgtgaaggtaatgggctgatccattagccgaggcctttgagctcggagttgagtaacttcccaaacttgatcgtgtttcacggcccctgcgtaccgtttgagctctttgcggttagttcctccgatgtggggcccacccgagatcatagccacttcccgtttggtctagatggcaggacgggaatatgctgggcatctccggggggaacaactgaagccaatactcctgctgcaccccctggtgcttcttgtggaaaagctccagctgcctgacctgggttgagatggggcaaccagtttttgatccactcgtagaggtgtcccaatcggatcaagttctcaatcccgtccttgagatttttgcattcat

SEQ ID NO: 151563 - DNA, 726 bp, Cannabis sativa
aaatgactttcaatataatcaattatttttttcttattttacatattgtgtattgggacacaattataaatagtgagctaaatgtaacacaaactcattttttgtgtcaaatttccaaactccaaaagtagaaaattccaataaatattaatcatgtttattatgaaaacattatgattgttatatatttggtgtaactattaaataaatgtagaggaatgcagagctcttcagaattatatgtgcttaaaaggatctaaattttcagtactttataatgatcaatgctgatttctagatctttaattcttcaaatttatcgttgagtcgttcacttaaaaatttgagcatagaaccatgcacagattcattgttgtcattgctatagatgaaatacacattttaagattacttgaatgatatgtattctttcagttaaaatttttgaataaaaactaatccatgatttcatcttattaggattgggagtcatcaacaaccacttttcctgtttctttgtataatttttaatcttttaaggcaactggacatgatttgggttctttccataattaaaaacgaactttacaaaaatactaaaaaatacgagaaagtttacaaaaatactgaaatacgaaattttttatatttttactgtattaaatttacaaaatactgtgttaaagtttcaaaattacaaaaatactgtgtttcagtaaaataaaa

SEQ ID NO: 151564 - DNA, 866 bp, Cannabis sativa
  modified_base (512)..(514): a, c, t, g, unknown or other
aaaaaaatattttttttcggaatacaataaataaataaattaaaaaaattaaaattaaacctgtaaatttgaaaaattaggtttcaactaacctaagaatcattttcaaaaaaattgctaataacaacttttcaaagttcatgttattttttaaaaaaatcaaatattcaataaaataaaatgataatttaatatcatttttctgattttataatttaatttaaattaaaaataacaaaatttaaaaattagcataatttcctatttctatttaaaatatcatgattaaaataatcttattttaaatttgaaataaggtcaattaattaaaaaaaaaaattaaaatattaaatgtttgaccttaaatataaaaataaggtaaaataatcaaatttaaaaaataagataattaattaagccaaaaattagattttttaacctattttcaaggttcaaatttcactaatatcttaaattaatttaaaaaatactaattaatttaattctgatannnagatttgaaatatgaaaaacaaaaatttaaatacaaaattacacaaaaaatctgaaattaattctatgaaaaagcatgaaaaaatgaagacaattgaaaaaattgtaaatggtacagatggtatgtgttgcataccatccgcgcgcgctacctcggatgcacggctgagaaaaatcagttagagaagctgcaagcagcctcatctacacgccgtgcctataattcagacaaaaaacgaggcatccgacagagaaatctcagacaacctcttgtttgaggcgcgcgtgaccgagtgatcactcggatctgcgcgcatatggggtgtcaccacccctatcttttttcaaaactt

SEQ ID NO: 151565 - DNA, 652 bp, Cannabis sativa
  modified_base (33)..(36): a, c, t, g, unknown or other
tatatatataaattaatttaaaataaataatannnntatttatatatttataaaactaatcctactaatatcgttaaatgtaacgaaatattcgtataattcttgaaatattctattaaaccaacaaaaaccgttaaataatcacattttatatataaaggtataaatataaattattgtattcttccttttaaactatgactcttgtagagttttaccttttgagtttttctttttatgaaaatttctttctaaacataaatcgctgcaaatattctctttcagttacattttgctcatatttaaaaaaaaaatacttatgtgggcataaattacaagtataaatatagtatataattaatagtctatttaacaacttttagttactcaaattccactttattaatattaaatatatatacaaatatttattctaagaatacttatatattctcataattcaatattaaaatattatttatgtatttatttttttgtcaaattcttaaatcgagtcatattattatgtcacattaatgttatataaataaattatttaaaaaaataagcaaaatattactgaaaaagaatatttataatgttttatataattaaaaaaagaaatttttacatgaaaaatccattttacaca

SEQ ID NO: 151566 - DNA, 1257 bp, Cannabis sativa
tttagaaaatcattgtcgatcaaactcatataaagtagcttttagtaatattagttggtaaaatactctaattagtgtgtgatacaattatttttctttttctatttatactaaatttcaaattttgacacggggccctaccatgtcaggggtttgttccatccgtcagacttaaggagtgcgtgcacatcaaaggaaaactatctttttgttaacagaactcatatattaatttacctaatgactatttataatttttaattaattatttttcttacatatttacttgatgaatatttataaattttaattaattattttttaattttgaatttatatattaacttttaattaattttattttccactcaacaataattgtagcaagaaaagtataaaatattcaagttatttaatactacaataaataatacagccaacaatataatcatggtgtaagaccatcatcaacggaagcaacataaattgttattgggggacccacataaaaagaagtaatcaatcaatacattttttttaattaaaaaaacaaaaattgttgggcaccatagatagacagtagctacgatctaatattaactcactaaaattttaactctctctcctccacctcatcctaaccctaagcccaaacctgacaagcaaccaataacacacccatcaaacttgtctaagtggtaaagttatcttacatcaagtacaatggcatgagtttaatcatttgaaaatgcatgatttattttgttatttttaatttaaacttttaaattaatttaataatttgaatttcttcttcttttttttctaaacaataatttaaatttttttaagatttattaatatgaaacaatttttatattacaaaattttaaaagtttataattattgtggtagaaagtcttaaatttttattgggtaaattgcggcataaatacttaatgtttgagattttatacacttcaataccttatctttatttttggaggtaagaacacccaatgttacaattttcttatacatgttactaccacttccattaactcataaatatgaacacatgaagggttgagatgcattacatttatttattttattttaaaacttaatattctaatatcggaaactacatgctactttttttaaaaaaaaaaaaaaaatcaattctcataataatgtttacatatactacactggttcactcagttatggtaatttagttttgcatctctttttttt

SEQ ID NO: 151567 - DNA, 505 bp, Cannabis sativa
tttaaacactatcaagaattaactaaaattttcatttttatgttgcttttaaattacaccactaagtcgaaatgattgtacctataataatgttgacaggcagtgcaaagacaccaagagtaattgatattaggacatcaagcattaagccaccaatgagaatggaaaaaaccacccagagcaataatacctaagactccaagtttatccagacagacaaagttgacataataataataataaataataataataatagtagctagtaagataagcctgaataaaccagtgcaaagtaattttcctaaaaggacctattgaatcaaaatgaataccaaaaggaaagattgattagaaagggtacctaaaaacatatattcaaatgggttttggagtaatagcatggcttgataaagcatgagaaatctgtgtaagattgtaccttttttttgtttagttttgtttcagcttttacagtataaaactcagaccaatttcatttcct

SEQ ID NO: 151568 - DNA, 520 bp, Cannabis sativa
ccgaacccgaacccaaactcagataagtactcgaactccaacccgaactcaaacccaaactcgaattcagaatcacaaatggaactagaaccgaacaagaactaggacaaggaccaggacctaaacctgaactggaaccgagatcaaaacccaggcagagacctaaacccgaactgagactagtactcgaacccgaacctagaccgtgaccaaaacccacacaataacaaggacctcaacccagaatcaggatagcgacctgggaaacagaactgggcccgggacttagtacccaaccgagacccgaacttgaacctaggacccaactcgtgacgcgacaccagaattggaaccagacttggaaccaagattgggatgcggatctggacccagggcttctacaaaacccgtagtcggtgtttggatttgggaccaagccctggacgtagaacctaagaagggcccgaacccacacctggacctgaaccagtcccaaacccaaaagtggacccgaacccgt

SEQ ID NO: 151569 - DNA, 532 bp, Cannabis sativa
  modified_base (265)..(265): a, c, t, g, unknown or other
aatcattagagataccataaaatttttcatgaggattagaaatttttgcctaagtcattcgaatagactatgcaaaattctactatcttattctcaaaattatgttaagttaattttatccatatgaatggttagatttactttcttagttttattaaaagttcctatcacaagtgtcatccaaatgaagatgggtttataattttaaaattctcccacctaaataaggtactatgatacaatgtcaaagaactttattggtatnaatttctattacaacagtaaatattaattggaacataaattaagatcaagaatagactctgataattgactaatttattacattacatccatgtttaaaaatatgtgtgtcatagagtattctggtgttttgaatatagtctagaactcaaaatacatatttcaatagtatagtccacccctaagtatatagagatcatgatccacccctaagggatatagagatcatggtccatccctaagttatatagagatcatgtggagttat

SEQ ID NO: 151570 - DNA, 849 bp, Cannabis sativa
tggccttttctatcggttctctaattgaactatcttattagattgctagcctcccgactgcggcaatctcattctgcatggtgagatcaaaagatgtactcctggtcatccatccatcttaggaattcgcgtctcttctgagcgaaaacatcacaatcatcatcgtgttgttcttcagttaggcctgcacgacctatagcttccctgattttgtccaactcaaggtcttctcaaaagtcgaggtgaggctctccaattgcttgctctcccactctcgggcctatctctccagcgtagaactagagttgaggtccagttattgttccaaggggttgttgtaaagaccgcttagtttaaatttggaaattagcagatatttagggtttaattatgaaaattatttattgatatttgaataattatttatgttgatttatttgaattcagaatgaattttatatgtcatatagtgaaattttataattttgcattttcggtgcccggtaacatggaacgcggtgtatggctctatagaatcacaatttaatattttagtatagcggggcggtattgttagacattgggaatgtcagaattggtcgggaatttagagttttctcaaattacccctaagtgatttgtatgacttataatatgggcaagggcattatcttttgcctattgagtttttgtctttagtagggatttaattttaagtttgaatgtgatttttattaatattgttggctgaaatgggtttttgaaaggttatgttatctcattttctaaaattaaggaaaattggaaattagaaaaaaaatcaccttcttgcaaactctctctctctct

SEQ ID NO: 151571 - DNA, 1647 bp, Cannabis sativa
  modified_base (190)..(192): a, c, t, g, unknown or other
  modified_base (1277)..(1277): a, c, t, g, unknown or other
ccattcttggtctgggcttcgagtgccaagtctcagtctggttcttgggtcctgagtttggccccgatgtccaggttcgggtccgagtaccgtgtttcgatttttgtctgggtttcgtggcttaagtccaggtcccccatccaggtttaaatcataggatccggtttgggtcctagtcccagtttcaatnnngattcagtgtctgggttcgagtttgggtctgggtctgggttgaggtctgattcctggtccgagtctaagtctgagtctgggtccaggtatggatcccgatctgggtctgggttaaggtccaagttcaagttcgagtccaggtctgggtctatgtcagggtctcgttccagatctaggttccgagtttcgatcctggtctggatctgggttttggtcgaagtctcagtcttggtctgggtacacgatgtgtcagggcccgacttcaggttacggtttgggtctggggatatgttcgagttcggttctagggtgggtccacgtcctactgacggtcctagtcttgttcgagggtcgcggtgttgcggttcttattcaggttctagttttgggtcaggggtcgggtttgggtcctggtttgagtcccaaatctagttccggaccgagattggggttcggctctaggtccaacccccaattgtgtgtcccaattgtgcttccatgtttgggtctgagttcgggtccaggttcggcatcgagtctatgtctgggttgggatccaggtccgggtttcggttcgggtctacgtttgggttggagttcgggtcctagtttagttacggttctgagtctaggtccaggtctaattaggtttccaggtccaggtccacgtccacgtccaagtccttgtttctaacctcgttctgggtcccggtctacttccagtttcggttctaatttcggctcacaaggtacgtgttcgggtccaggttgcgatttgggactgggttcaagtctgggtctagtttcgggtactgttctaggttcgagttaagggctaggtccaagatccaaacaccgactacgggttcagtccaagccccaagtccagatttagatcccgatcttgggtctcggtctggttccatttcgtatgtcgagtcacgagttgggtcctagaattaagtccaggtttgggttcgggtcttgggtcccggtcctagttccgttgcccaagtctgtatctcgattctgggtccaggtcttgatttgggtcccattctatgttcgggtttgggtcctagtcnaggttcgggcttaagtctcggtcgagtttgggtcctagtcgaggttcggcttaagtctcggtcgggtttgggatctgatctatgtcttaatcttggtccttgtcctagtcctagtctagttccagttccaattgcgattccgagtttgagttttggttcgagtttgggtcagtgttcgagtcctagtttgagtttgtgtttgggtcccgatctcggtctatgtctgaatcaggctccgggagtgggttatggtcctgggtctggatcaaggttctggtccgagtcccaggttttgatctcgatctgagtctgagtttagttcttggtctatgtcctgggttctgatcctggtctgggttcgagttcgggt

SEQ ID NO: 151572 - DNA, 523 bp, Cannabis sativa
tttgagttcataaactctaacttttctcaaacctcaattcaacccataatttcagttcaaaatagctcaaacaacatcaaacaatctccagaataccaaatcaaaccaccatagatcatacagcaatataacacccaaattccttcaaaaaaacctaacttaggctaaagaaagcttaaggaagaagagtaagggaaattaccttgaattggaaccttagtattcagctagaatccttgatgatagattgaaaattcacagcccttgctgctcctaagaaaatcgagagaaagagaaagagaggttgtgaaaaagtgaaggttttctaggactttctaattttctcaagaataaaagggtaatacctcttttcttattattaatattcttaataagctgaaataaaggaacaaaagaataaaagaataattatcccttaattaattaccaataacttaataaaagggtttctaaggcattttaatcaccaaaatatcccaactaataaccaatactattaaac

SEQ ID NO: 151573 - DNA, 617 bp, Cannabis sativa
  modified_base (137)..(141): a, c, t, g, unknown or other
  modified_base (360)..(363): a, c, t, g, unknown or other
gagttgagtagctaagcatggaccaaaccatttccaaaagcgtgcgatttcttctttctgaaactccattttgttgtggagtgttaggggaagtcaattgggattgaattccaaattcaattaaatgatctttgaannnnntatccatatattctccacccttatcagttcacaagatctttaaagttttacccaattgattttgagctaatgctagagattcttgaaacttttcaaacgtttcaaattttttatgcatgaggtaaatatgactatatctacagttatcgtcgatgaaagtgacaaattactcataacaaactctagctttgacattcagtggtccacaaagatctgaannnnctatgcctagtggttccttggcacgctctccctgtgcagcgaaagaacattttgtcattctgccttctaggcaagattcacaaacttataattcacgtaatgtgacattttttaatggacaacctttggttaacctgtgaagtccatcatagcctatatgaccaagacgtaacttcattatcgttctttttctttttgtggtttctaggtttagctaccttaattagtttgttattaagcgcaaatagttcatc

SEQ ID NO: 151574 - DNA, 545 bp, Cannabis sativa
gactattttattttatatgcgtgtaaaatagattatttgaacattgtattctatattgtaaattattcagaatatctctaaattttgtaagttatatatcttaaatagttataacgtacatgaatatgaaaaaaaaattagactaaattttttttctagataccaaaacaagtcaagagtgtatcagtacatctctttttaagaagtgcattgtagaatcatcttatatatttatatacttatcagtactaatcatgagtatatctaactaacattatagtagtggtattatattaaaatccttttgaataataaacggtatgtatatatatgagcacatgaatacgaaaatggatataataaatatatatatctaactaataatagtagttgtattacaatattaggaggttgatgtggccaagcacttagagcgtggaaaggtaccaacagtgtccatgtataaatatcaacccctgggaagggtatagaggcaccccaaataatacaaactctctatctctctcttcctctctttgatctca

SEQ ID NO: 151575 - DNA, 567 bp, Cannabis sativa
atatatctaatattgttatataatgaaatgattgattggttaagcaatgataatataatgatactatgaatgtgatatatggactcatctgattaggtgatgcgattgctggtgacgtatcgagcgtaggtatgggcattagtgacatatgagtaccgagtgtagatacaggctcacccgattaggtgatacgacactcctggcaacgtgtagatacaagcgtaagtgatatgaaaattatgaggttatggcatagaatgaaactgttgtagggtttcctcttgacgacgtgtagatacgagcgtcagtgacacatgataagtaccaggcgtaggtacaggcttgtctgattaggctattactcatgatgacgtgtagatacgacgtcagttatatgaaaattgccaagctatggcatagaatgaaaccgttgtagggtttcctcttggcgacgtgtatatacaggcattgatgacatatgataagtaccgggcgtaggtacgggctcgtctgattaggagattactcttggcgacatgtagatatggcatcagtgatatgaaaatt

SEQ ID NO: 151576 - DNA, 506 bp, Cannabis sativa
ctcactctctctctctctctcatatttcgagtttcataagtattgagtgtaattttccataaaattcaaggcaatactcggatcagtgtagaagattatgtagaaagaacattaattcatcagacaaaggaagcaattactcagtagtactttgctacagacaagtattaagggttagtgtactgaacgaaaggactcgtataattatgcagggtcggccatttagctgagcaagaagtgctaatgcacatggcccacaaattaaaaagacccaatatgactttttaggattttttttaagaggaaattacactttataccctttttatattgtcctcttttatttttacccttttttttaaagtctatcatttttatctatttttttaaatactgtaccaactttgcccctatcatttcaagatactctccatgtgactctcttatgtgacagtcattattcacgtgatccgtaagggaaaataccgggtaagctgtgcaatccc

SEQ ID NO: 151577 - DNA, 631 bp, Cannabis sativa
atttaagtaatcaattttattaaagttaattattagtataaaaaaattgataaaaaactttgtaattaaaataatttttaaaaaataaatacttatataaaaatagttcaaattaagttttaaaaaataataataatttaattaaaaataaataattttttaatttattaatattattttattttttaaaataaatatatttttttaaatattattataatatgaataaaattttgattgtatataaacagttttatcataagaatatacaccttacatcataataaccacatgatctaaaatcaatggtcaaaaaagcttctctaccggtagggaacttttgctaggttctaccatagtcttgccctatatatatatatattacccatatatatttcaaaactcaccattgattttgtgaaaaatcatattcagttttatccttttactatgatgttattggattgttgtaatagacaattttttttttttgggtatgttattcaaagataatggagaattttttttttttcgttttctttgacacccataagggctgaaaatatacaagatttttttttttttttttatttttgagagtttcaaaaaaaactatatattatttcaaaaa

SEQ ID NO: 151578 - DNA, 955 bp, Cannabis sativa
  modified_base (182)..(182): a, c, t, g, unknown or other
  modified_base (307)..(320): a, c, t, g, unknown or other
  modified_base (889)..(892): a, c, t, g, unknown or other
ctcacgatgcgaaagctgaattcactaagtgttgatcgctctgcgcggattgctgatcgctttgcttcgggcatgcctatgaggcttcctgttcagaccgtactctccgagcagatactcaaagttgattccatgtgtcaccatcatgtgatggtttatgtgcttatttgatgattgtatgnaaatcgcaatgtatgttgtaaaaatattttttatttcgttctagaaatattttgactacaaagtagacaaaaaactaatgaatttaggcttttacagaacttaatttgaattttttatgaattannnnnnnnnnnnnnaatttggatgaaaatatctgaagttgatgcacacacacgcgcgcgcattaagggagacactcagcatcatcacgtggtttcagacagcctgaccgaggaaactcgaacatgggctgtctgaagtcgtgtcacaccgaggtccctcggccagacaggccgcatgcagccttgtccctcggtcagctccccacttccgcgcgtgcaagtgtatgcaatgcatacccctgtgcaccaaaattgtttttgtcattttttttattcaaaaatcattgttcattgaaacaaaattcaaattttggtagaattttgtgtataatctaaattttcaattaaaaatataattatcagaataaaattaatttttattaattaaacttagttttagatattagtaggctttgaattttaaagaatggctgaatttggtttgtgaagaatggctatggtattttcgaaaattcaagaggaagaagaagtaggaagaggtctcatcagaaagctgagtttttagctttggaggcattagttggatggtaagaccttagctatccttttatactaatttccannnngttagggttgatttatttagaataaaaaatggataaaaaatggagcataaaacccttaagtgg

SEQ ID NO: 151579 - DNA, 510 bp, Cannabis sativa
  modified_base (46)..(47): a, c, t, g, unknown or other
attagcaacgagctgcacagcatggttaaaaatcacgtaatacgcnnatgttagttagggtgttacatgtagggtcacagctatactctacatcatgatcaggaggaactgcgtgccgcagtaaacctcgcatttctcgaacagcggcgtatgtttgccgaatggagggacaaagagatggaggcgttaagggctcaccatgtagagatcgaagatcgtagtcggcaagctactgtgctgatacggagagcctaccaaactgcaggccaacaaacgccgagcgtcattcccttgggagaaatggaggacgacccaacggtgaatgcctcctagacaaccaacggtcagccgtccaatccccggtcacgagttccactcctgggccaagacgtaggcgtgcagaccttattcgggaattcattaggaggagtcatacccgacgaatccactcagaataatggagccattctgcctgtcaaccaagccatcaatcgttgaggcaaccaggct

SEQ ID NO: 151580 - DNA, 686 bp, Cannabis sativa
aaccgtgactggttggagggtgtgtatggactaccggaagctgaataatgcaactaggaaggatcatttcccgctgccatttattgaccaaatgttggatcgtttgacgagtaaagagttttattgtttccttgatggttattcgggctacaatcaaatttctatagcactggaggaccaagagaaaacaaccttcacttgttcgtatggcacatttgcctttaagaggatgccatttaggctatgcgactctcccgccaccttccaacggtgtatgatgacaatttttcagtatttggggaatcttttggcacgtgtttggctaacttagagaaagtgttaaagaggtatgaaaaaacaaatttggtactcaattgggagaaatgccattttatggtaaaagaaggcattgttttgggtcacaaggtttctcacaagggtattgaggtggacaaggctaagttgtcattgaaaagctaccgcctcctaccatagtcaagggtattagaagcttccttggacatgtggggttctataaaaggttcatcaaagattttttaaagatttaaaagcctctttgttcattgttcgaacaaaatcgaccatttgagttcactaaggagtgtcatgaggcttttgtgactttgaaaaaggcattggtgacagccccagttattgtagctccg

SEQ ID NO: 151581 - DNA, 929 bp, Cannabis sativa
ttgcacatattttgtaattaattaaaataatgtatagaaaattgtaaaatgcccaaggtttaatatgatgagaaaattcaagtaagaattaatttctatgagaaataattcttaagggaaaatagtaatttatgaaaattataattttaaataattataacaattatgaattgtgtaattaaatagtatttaactattttattttctttgataaaactatattaattagcagttaaatataatattattcttaaatagtataattgagaaaaatatattattttactgaatataatatttattttaatccttgtacaataagagattaatgaaaattaatcaattattttattggcaaataaataataaatcttatttgtagtaaaattaaaaaactaattttggaccttaaaataggacctacacgtgtagggtgtcatataaaggctcatgttaattttgtttgattattttattatgaaaataaatcaaatgaaattaagtattatcttttaattatttaattaaatatattataaagtaatgtacttaataaaaagattatgttaaataaaatgatataacaaatttcagttaatcagttatatgatatttatattgaatttgaattaaattaaatattatcttttattttaaaggattaaataaaagttttgtttacaacatctattctatataaaatgtggctatataactgaatttttggtttatgagaaattttatgagaaattagtgggtgaaaactttttttaaaattttttattcaaaaataacaatctttttgcctgaggttaaattcaaaaaagatatttttggctgaagttaaattcaaaaaatatatacgattgacattaccctacatccgattgccaccaatatttagagtcttggtttggtttgctgtgttt

SEQ ID NO: 151582 - DNA, 784 bp, Cannabis sativa
gacagacttcaagcagtccttcctttctggggagggttgaagaggtgtcataccccgagtgatctttcttgcacgaaaaaaattgtgcatgagagagtcacgttgaatttttatgaggcaagcttcggcttccgtgaaagaaagttgaagttgcataaaaatttcaagcatagacttcacttgaaaagatcaaaaggagaaagcacaacgaggagtgaggaatacttcaagcaatctttccattctgggaaagagggttgaagacgtgccatacccccagtgatttttcttgcatcaaaaacagcgcgtatgtgacagtcacgttgaatttttatgaggcaagcttctgcctccgtgaaggaaggctgaagttgcataaaaattcatgcttagacttcggttgaaaagatcaaaaggaggaaagcaccacgaggagtaagacagacttcaagcagtccttccattccaagaaggatggttgaagatgtaacaccctaaataattagaaaagctacctaatatacttatgaaaccataatcccctaatcaggattactaataatgttagtgtggaaattaaactttattaataaacagaatgaaaataacttgtaataatttaaactctataatttaaaagttacaaaatttaagatccgaaaaatatttacaaaatactattacaagttcttttccattggccgagctaagcggcgaaacagagtctcaaaatacatcactaatagaccccaacccgcttggtctagtgtggcctgaacatgta

SEQ ID NO: 151583 - DNA, 593 bp, Cannabis sativa
ctttgtaaatttatctctaagtatacaccataggggagagtctaatagatacgaaaaacttgcaaaatacttatctttcgagatctttacggtgttaaatgttcaatgtaagaccatccatatgggagacaaagtctagcgtcttcaggtcccattgaaatattaaccatgtaagatcaacaatggagatcgaatatccttatagctaaagctcattattttaaggagttgtatttttatttgatatgtattttaatctatttattttaatattaatatatttatctaattaaatttaataatttagataaatctaaatataaattttaatttaatatttataaaattacaccctaggaagatctaaaaataaagaattattttccatccttagtaataattttccaataaatattatgaaaattacttaatttaaattggtctaaaattaaataattaatttttcaactcaaatttaattttctataaatgtatataattgattttgaaatccaatgtatttaaagtaatacattttcaaaattcatcaaaataaaataaaataaacctaaaaaaatattctaatttatgtt

SEQ ID NO: 151584 - DNA, 580 bp, Cannabis sativa
  modified_base (26)..(39): a, c, t, g, unknown or other
  modified_base (174)..(177): a, c, t, g, unknown or other
tcttcaatcatcgttggccagaagtnnnnnnnnnnnnnnattttcttagataagctttgcccagcggcatgatttccaccaaacccgtcgtgcacttcagagaggagtcgtgcagcttcttcttgagtaacacatctgagcaatggcatcaagaatcctcttctgtacataatnnnntctactatgatataccgtgcaactttccttctcattttttgagcttcattgtgattatctggcagtttcccagagttgaggtaggatgctattggtgtcatccagtttggggaagtatcgatcatttcgatatcttccgtgccagtgatgctaggctcttcgagaaactgaataggaattaagttcgccttatcacttacattgctgctggccaatcgagctaacgcatctgcagttgtattttcttcccttggaatttgtctgaggccgtagcttttgaattgtgcgagcagatcatgtattgggatcagatatgctatcatcttttctcatcgagcttcgtattctccagatacatgattcaccacaagctatgaaccactgcagatttcaatgtgttcgg

SEQ ID NO: 151585 - DNA, 523 bp, Cannabis sativa
tcccagtttgggtctgagttttggaacgggtttaggttcgggtccatgttcgggtctaggtctaggtcagagtctctggttttgatcctaatctgtgtctaggtctgggtttgggtctgagtccccggtgtcatcccagtctgggtccaggtccaggtccctaaaccgtaaaccctaattcctaaaccctaaaacctaatttgtaatccctaatccataaaccctaaaccctaaactcggacctgaaagaagaacagggactcggactcggacccgtcctaggacctaaaaaaggacaaggaccgggaccacacccagacctaaactgggacctaggacccagacactgactcggaccccgacacaaacacggactcggacccggacagagacacggactcgaaccaagaccagaacccaaacctagacttgtataggcctggacccaaacttggacctagacctagacccggatccggacccgaacctgaactcagatcgaaactcggatcaagactcagga

SEQ ID NO: 151586 - DNA, 550 bp, Cannabis sativa
ccgtttggctcctcctctcgaccgggctcccaacgcgaaggggcctcccggaagccgcctgggccttagtataagctctcttctgggccttccggtagagataatcttggtacttcttttccgcggtggcaatgatctcatcccggaaggtcttctccgcagccggtaccctcacattcgggcagatgaccttagaaaggttggaatcctccaccgactggtgcaccaggatcagtttggccttccggcagttctccgtcgtgaccaatcccccgacgtcgagatccgccttatcataagtcgcaaagatctgggctcgctgaaggaagatctgagtaggcgcggtttgctcgtacggagggaacctaacccactctgtgaggagctccgggtgctccacagctcgaaacctggaggagaagaaaaagcgatggcggtactccttgacgtgtttttgctggttataagggaccacgccgtcattcgaagggtaggcccggaagccataaaaaccatctttaagtttgtcccccttcttggggacagaaac

SEQ ID NO: 151587 - DNA, 954 bp, Cannabis sativa
cctccctcgaaacccaaatcaagaattgaacccaaactcggactgaaactcgacccgaacccgtaccccgtgacttgaatttagaatcaaaaccagaagcggatcgggactcaggagcaggaccaggaccaggaccaggacctggacctagacccaaaattgtaaccggactcggacacagacccacccacggattgggtcccaaaattgaataaaaacctgaactaggactcgagacacgaacccagacttgaactcagacccaaacatggaacaagactagggactcagaattgggattgagacccgaaattgcacccaagtctcagtcccggaactagaccgagacctagaccgggaactggaacatgaaccgaaactagattggacccatgattgggatccagatcttgtctcgggatctggaaattggggcttggacaagacccatagtaggtgtcttgatctaggactcagagacggacccgaagcaggactaggacctggaccaagaccctgacctaggacacgaaaccgaaacttgtactagaacgtggccaagaccctaataggattggggtcgtggccaagacctagacctagactgggacctgaaattagaccagaacgtagccccgaaactcgggctcggacccagacccagacctatacctagacccggtcccgaacccagactaggattgcgactcgaacttgaacccaaacccaaactcaagacttgatcccagacgcaaaaaaatcccctaacataaattttgattcagaccatgacatggacacgaacctagacttggacccgaatacagacccagacccagatccagaccgggatcgaaacaccggacctggaccctgtcctagccgtagatccagacccgaacctaggacccagacccgaacctggaacccagacccaggacccgaacctggacc

SEQ ID NO: 151588 - DNA, 528 bp, Cannabis sativa
aaaaaaaaaaaaaaataaaatctttagacgtaaaaatgtaatttttttgtcataaaaatagtatttcatataattattcatttgaggcacacctaaaagtaatatatatgcgcttatttgaattttggttcttgttttatccacttgtattcaataaaaaattgagtaatttatggtataaatacttaagtttaattttttacagtaataatacctaagttatatttttaaaattctgtatgtatctaaccggtaaatgttaagccattatatctacgtgtcattttctcattggtagatttgaacaaatttttttaaattaataaaaatttaatgacttggaccaatcagaattgtcacgtgccaataaaattataacttaattattattactagctatttatttgcaactgagaattaaaattaagcatttatgacgcaaattactctaaaaaaaataaaataaattaaactttaataataaaaaagatgagataggagagaaatttgttaagtaaattttaatgg

SEQ ID NO: 151589 - DNA, 767 bp, Cannabis sativa
taaaataatttccaacatatacttgctttcatatttgacagttaagttagttaatgaacaactaactaactaactgaatcttaattgggggtttaaggaataatacaacaaattcaaccttatttcttcaagccccaacaagctaagcatatctatccaatggagggggtagtgatttcatgtgttgctacttagcaactaaggctgagtaagtccaagcaatgcttgaacttactaatatgtaacaccttagtgccaatatcagcagggctctcttctaactttactttctccactcgattactgcttcttctatcttctcccttatccaaaataactgaatatcaatgtattttttttttcttcttgtgatatactggattattgcacaaatgaatcaaggattgactgtcaaaatatacccttgcctttccaactagaaacttcaactcctttagaattcattgtagccatattgcttcttgaaatgcctttgtggtctccatgaattctgcctctgtagttgaaagtgctactacagattggagttataatttccaactaatacaatctccattagtttgaaacacataagaggtagtagacctcctagtatccttgcttgatgcataattagcatcaacatatcatttcagtgtttctttctctgaaactctcttgtaagtcaatccaatatccgatgtccctgttacgaaaattgtaaatagtatgcaagtgcacgtaatcaagaagtaaactcacacagg

SEQ ID NO: 151590 - DNA, 1195 bp, Cannabis sativa
tgcctttcggactaaagaatgctggtgcaacttatcagagaatggtgaaccggatgtttaaaggccttctggggcgaaatatggaggtatacttggacgaaatgctgatcaagtcgaaggcatacgcaagccacgtggatgacctagaagaatgcttcgaagtggtccgaagatacagaatgaaacttaactcgaagaagtgcacttttggggtcaaatcgagaaagtttttgggcttcattgtcagccagcggggcatagaggctaatccagagaaaatccaaggtctcctaagcatgccttcccccaagaaacacaaagatgtgcagagcttaaccggaaaagttgctgccctgagccgttttatctcccggtccactgacaaatttattcccttcttcaacatcttgaagaaatgtcagaaatttgaatggtccgacgagtgcgaggagaaggaccacatgtccaaacctccaatcctattgaaacccattctcggagaggacttgttcctatacttggcggtcttcgagaatgcggttagcgcggccttagtacgggaagaggaaaaaactcaacatcccatgtactatgtcagcaagcgcatgataggggtggagacgcgatacccagtgattgaaaaactagttttttgcctcctagtggcctcgagaaagttgagcccttaggttcaagctcactcaatcaaagtattaaccaaccatccgctctggcaaggcctacaaaagcccaaagcgtctggaagacttctcaaatgggagatggagctaagccaatttgatctacactacattactcgtacttccataaaagggcaggcgctagcagacttcatcacagagttccacgaagcagaagctaatgctaacatacccacaccgccagtcttggcatggaaggtatttgtggatggcgcctccaacgagaatgggtcggagtgggggtggcgatgatatccccgaacggacttcgactccaggcggccttacggttcgaattctcggcttccaataatgaggccgaatacgaagccttgatagcaggactaagattagaaaaaaccgtgggggtcgaaagagtggaagtctacagcgattcacaactggtagtaaactaggtgtcgggagaatatcagacgtgcggagaaaagatggctgcatatgtagcaatagtc

SEQ ID NO: 151591 - DNA, 949 bp, Cannabis sativa
  modified_base (37)..(46): a, c, t, g, unknown or other
  modified_base (785)..(789): a, c, t, g, unknown or other
ttttatatatatttagataatccttaattacttagannnnnnnnnnaataatattgatgtaatacataggatatatattgttgagtgttgtgataactccaaatgagctgattcaagatgagttggatagataaaaaagagatctaaaacttttatgttttgactttttctaaaatatgatcagaacatagtcgaatttaggcttcaagtttcagctttattctattttataaatcactgtttttcgaaatttatccaatttatgccttccaagtatcgaaacctgaaactgaagaaaacaagcgtaattctattccaaaaataataattaagaagaaaaataactataaaatgtgacccgaaacttgggctaaaataagcctaacaaattcccccaaactaaatccttactcgccctcgagtaagactaaaaactgagataaagaaaaaaaaacacaaactagcacacaattaactaagccttcatacaatcaaaccgctgctgcaacctgtgaaacttcaatcaattatttaaaccagaatttcaatcccaaaactctaaaattaattcagatgcttactctgaaaaataatgtaaagatgtaaattaacttcaatatttgaaaaacatcatatcaattctactctttttaacttttcacaatccaatgatcaatatgcttgcatgacttacctctctccactaatgtcaacaattcttgttcagaatcacaagaactttcaaggttgtaatgtattagcttaggtaataggtagatgaaaannnnnttaggctatattataccataagcatactataaaccatcaatcacctaataaattacatatgtaataccctagaattatgaaatggattaacaaaatcctaactagataattatgaataattgagaaattatattaatatataatttaatatatgagaatt

SEQ ID NO: 151592 - DNA, 735 bp, Cannabis sativa
ttgggaagttccttacttggaaatgttttttcccttgtctatgctctggctggaggatgcttccttattagccttggccactgcaaggttataacaatcctgagcagtctgctggtttcgtcttaggcatcctaccccattctttgttggaaatttcaggcacgaatagaatatcgatgtgacagcttttaagtcatacaaggctggtcggcctagcattacgttaaatgcttaaggaacatgtaacactaggaattatgccatgatagtcatgcttatcggagcttgtccaacagtgaggggtagacgaatttgtcctataggtgccactccttggccaaaaaaaccatagacaggcaggagacatggggctagatccttgagttggagtcccatctattcataagcagttttgaacaagatattggaagaggctccgttatcaatcattgttcaggccaccatcttattagctatctggacctctacgacaaacgggtcattgtgtggaaatctaattttgacagcatcttcgtcgctgaaggttatggtaggccttcctgctcgtggaattttgggcttcctttcttctatggccaggataacttcttcttgtttgtgctgagccgttcgggcatacctttcccgaactttacccaaatctccagctatgtgcgggcctccaacgatgacttgcagatgtccatctaccagtggaggtagcaagtcttggtt

SEQ ID NO: 151593 - DNA, 634 bp, Cannabis sativa
tgagttgttttataatggtggtgaataaaaattatgagggagctctagagagtggactatgaatagttgcagaatagtcgtattgtaacaatactctccctattaatgattaattgtttatgagagagagagcacagtgtgtgttttcgtgattgtgttggtaatggttcctttaagttggttaacattaaccacagataaaaaaaaaaaaaactgtattgaataagataaaatagtatatatatatattagggatattttaaaaaatatgggaaaaatgagccatcttatgataaatatgacaacaaaactaaatgacacaaaatatgacattaactaaggaggcaaactacaaatatgtttttttttataaaaaaaaaaaccatataataagttaaaaacagaaactaattttaaatgaataaaatttactatttttaaccatatataaacaaaagggatattttaaaaaatatgggaaaaatgagccatcttatgataaatatggcaacaaaactaaatgctacaaaatatggtattaactaaggaagcaaactacaaatatggtttttttttttaaaaaaaaatcatataataagttaaaaacagaaactaattttaaatgaataaaatt

SEQ ID NO: 151594 - DNA, 500 bp, Cannabis sativa
aaaaatctaactagaacttggttcactttaagtgtacgacctagtgtgattttttgcccaatattttattcttttttaattcatataattcagccctaagtcctagtcgagacactataaaaggaaccaggctcggccctagacataggcgggctaggcccgtgcctagggcccactctttctaggggcccatttaaaatttttaaacctcattatttaattactatatttatttataaataacatcatatacaattaaaataggtcaaacatagtggtagcctaaagagcgataaggtttatgttttcttggtggaggacttgagttcgataccaccaaacttcactttttaatattaattttttgaaaataaaattatttataaagcaactacaagtgcatataaacttaataactaaatcaaaaaaaaaaaaaaaaattcattttaaaaaaaagcattttataagcttatctatttttttattttctttttgtttct

SEQ ID NO: 151595 - DNA, 645 bp, Cannabis sativa
ttataaataaagtatttttaatcctttatttaaaataaaaataaatatctaatttgatttgaattaagaattcaaatgaaatatctaataaatgaatttcaaatagcagtagatcttttattttaataagtacatatccttttaattaaacaattatcaaataattcatttaattaataattaaaaatatttaacttaatttaatttaaataattttaactaataaaataattaaactaaattagtcacgggcctttatatgtcaccctacatgtgtagaatgagcctacacgtgtgggtcatattttaaggtccaaaattaatttcttaatttttccataaataatatttattattgagtaattagcaatttttgctctgaactttcgacaatattaattttttctcctaaaatatatggcttgttaagaatcttccctaaacttttacatttacaaaaatttagtccttctgttaggttctatcccattattctgttaaaatactaacgtgtcattataaattagcaactttgccccataaacattgacaattatcaaatcgtaccccctgaaaataaacatgagaaaaatttaatatttttttagtaaaacttaaaaaattaatttagatcttttaaaaaaa

SEQ ID NO: 151596 - DNA, 547 bp, Cannabis sativa
  modified_base (239)..(241): a, c, t, g, unknown or other
attcacctagcactagtgaggcaaggggaaaagagcaatgtcaagcaatttccttgaggagtggaaagagttatgagggacctagtggcaagcaaccagtttaagatgtggtttaagatcaacatgcacagacacaggcacaaaaggaaaagaacaccactgagggtcttgcaccgaaagaagctttggctccgatcagcatagatcaccatattaaaattccttacccttaaagactnnncaagaacaacctcgacaagcagttttcaaaatttcttgaaatattcaagaagctgaacattaacattccatttgtggaggccttggagcaaatgccaacttacttgtgaatgaaattttagctaagaaaaggtagtttgaagaattcgagacagtggcactcactgaggagtgcagtacaattttgtacgaagaaactaccgtccaaggttaaagatccgggtagtttcaatattccatgttctatagggggttcggtggaaactaaagctctatgtgatctaggagcaagcattaatctaatgcc

SEQ ID NO: 151597 - DNA, 664 bp, Cannabis sativa
aacttatattttaaatcatgttccaagtaaatttgttcccaaaacctcttttgagttgtggattgggagaaagtctagtttgaattattttcatgtatggagttatcccgctgatgtaagaatttatgatcctaatttgaaaaaattagattttagaacagtttgttgttatttcattggttattcaatgcactcaaaaggctatcaattttattatcatactcgtggtacgcaaatttttgaatctcaaattgctaaatttctagaattcattgttgcttaaaatattccttcaacatctcttgaaatgggagagtgatttaaaggattttttttattcctatgtcttttcaagagatgataataatagtagtcttattcttactctagttgataacgctcccattgctgatgaatatattgctcctaatatctaagatgacgagggtcctattgttgatgaggaacctatatttaaagaaggtttttgttgttgatgagggtcttattattggagaaatccaattgtggaatatgtcattcaaaatgatgatcaacaaatagaggttattctagaaagtacctcttctaaggagatctcaaagacaaaagaagtcaacaaagtgtcatactaattttgtttaccttggagaaggagaatatg

SEQ ID NO: 151598 - DNA, 598 bp, Cannabis sativa
tgtgctgtcttttatgtttaagaacactcttctaaggaccctatctcctatgaagaactttcttgccctcacttgcttgttaaagtatcgagataccttttgttgatgagcgactagctttagatttgccaaagctcttttttcttcaatttcatcaagtgattctgccaagagggcatgattggtttcttgatcataagttagtctcttgtgggatgggggctctaactcaacgggtagcattgcttcataaccataagccatggcaaatggtgtctgcctagttatttttcactctattgttctgtacgaccacaatacttctggaagttccttcagccagttcccttgagcttcttcaagtcattttttcatggtgtctttcagtgtcttgttgacttctttgacttgtccatttgttcgagggtatgctactatagagaaactcttgattattccatgtgtcatacaaaagtctttgaacatttggctatcgaaccacttaccgttatctgagaaaatcttgtgcagaagttcttgttggaaatattttaccaggatctagatttactacagtgtatgtttcattaacatccta

SEQ ID NO: 151599 - DNA, 558 bp, Cannabis sativa
  modified_base (68)..(77): a, c, t, g, unknown or other
taataattaagtatataactttatcttattatatatttaatcatttatattatatataataaaaactnnnnnnnnnnaaaaaaaaattaaaggtgtaaaatcaggttgatcgcttaattgggtgggttggacctattttcaacccgcccaattaacaaattggacggtttttaattttttcggattatttcggtttgtaatttttatcagttttttcggttcggtttgggcggattattcggtttgggcggtttacaaatttttttgtacaaccctaataaaaagggtttctaaaagattcacataaaaaaaagccctaaagagaaattagcccataatcttcattccaacaaacaaagaattcaattacaagcatgaaaaagtaaaaatagaagataaaaaattcaaaaaattcaaatcccatctcccttaacctagcttcccccttcattatgcatgaaaaaaaggaaagggaaatttgattttctatacttaaaaatgttcaaaaaaatttttttgaaccaatacattttacactatgaaaaatatgactctttt

SEQ ID NO: 151600 - DNA, 548 bp, Cannabis sativa
tttatttttaatttaattatttgattattttttaaaatattgtataaaatatttataaaatttaaaaatcataatattttccacaattgacatacattcattaaagatattttagtcactaaaatttaaatttgttgtatactgcgttgtccgatattggccccccaactatttagttctggcttcgcccttgtggaccagctccgaccttgtctgccacgaactactcgcccagccgccgctttttgtacattggagcaggttatcgactctattccctactttccctctcttcagatttcgtattttttttagatccacgatgatggttgctgtttgggatgagtgattgtgggtgtttgtagtgggcggtcaacaccgattagtacgctcattgctgggattgaaaatgagctaaaatatttagattttgataatttttttttaattttttgtcatatttattttgggtttatattatgtattttggtttgtatatatttttttattattggtattgggtatttttctttgagaagatctgtaca

SEQ ID NO: 151601 - DNA, 584 bp, Cannabis sativa
  modified_base (311)..(316): a, c, t, g, unknown or other
gacaacgttggattcttatattgatcgaggaaaaggttgctagaatggtgtccattttagatgagttggcaacgctattcaatgaatgattactttgactctcgcctatcgggacatcgttggattcttattttaatcaaaattatcctttatttttcctcttaggttattcatttcgaatttgcttaaatagtatatcattggatgaatggtttgtaaatcatttgctcataatgtcattctgttttctcttatgaaattgaatggtgcatatgattatattcccaacattctatcccaaaatgatatannnnnncaatcttagaaatctcctacttttgtatgcttactataggcaatttaaacttagagttagattagtagtggtggtccaagctagaataaaactcattgtacatttggtataaatttaagtctttgcctttaaattttagatttcaaatagaaatttcaatttcaatttcctagaatacaatacaattcaactttcacaagttattaatatctattttctgtcaatggatccaaactgtatgttaatgtatagaatttgagtttagtat

SEQ ID NO: 151602 - DNA, 666 bp, Cannabis sativa
  modified_base (81)..(82): a, c, t, g, unknown or other
aacatacattgtattaaaaaaaattggtcgtaataattaatataatacattgcttaatccaaacatagtgttatttattanntaatacaatacgacccttatacagtgtaccaaacgagttgtaaaagactctattagtacatgccatgataccatattatatatatgtgtgcactcttaatgggtattacccatgaatgggtaacattagaaaattttgagtttttatgcttaatttttctatctaatatattaaaaagggaggttttttaatattatacctaaaattgattttatttacaaaaatacctttaagaaaattatttgcacaaataccgttgtgccacgtcagtatacatactgaaattcaaaacaattaccgaaaataaaaaaaaaaatagaaaaatcttgtttccagaaatttttcgttttttgggagttttgaaaaaaagcaaccatttagttgcttttgatgtgaataagatatcaattggttgcttttcaattaaaaaatgtatttcataattttacacatatataaataataaaataaccattttaatatgtgagaaacatatatttcaatatccaaaaaagaacgactaatattaaaagaaacttttttatttcttttttatatttttaggttatattatgttattttat

SEQ ID NO: 151603 - DNA, 510 bp, Cannabis sativa
  modified_base (180)..(189): a, c, t, g, unknown or other
aaataagaatccaatgttgtcccggtaggcgagagtcaaggctattcttattttatgagcttccaccattgtttcatattttacctaatacaaatggaccttcacaattggggtggttcatgtgaggggagttgggttcagtatgtcgtacccattactattggccccctaactctcacnnnnnnnnnnaaggagaggaatttaaccattaaataaagtaaaaattatatgaaatatgggattttgtaaataagttacaaaagtatggcatttataggtttgccactcttctatggtattttttcacatttaagattttttatggtatttgatatgccatattattgtaaacctatttccaaacccatatttcatgtttttgtttctaacttaattagttttattatttttttagtttattttacatttacatgttaaggtttctttctacttagaaaatttacaccacatactaacttttattttttttcaaacattacatttataatt

SEQ ID NO: 151604 - DNA, 625 bp, Cannabis sativa
tttttagtaatttaaatcatataatttatatctatttatattatatttatatagttataaaatattaaatggaggttacattctcaacattttatttttcttttaattactatatctaattttcttttttttttctaattaatttatagtttttttttctattttttcatattatttcaatttaatataatcaaccaaccaattaaattataaatataatactaaggatacaaatgtttgtgttttataaaattctcaacaataattttgttcattaaattataaaaccttctaaaaactaattataaaactaaaggcccatcccaagattagttatttctctatttgtaaatgttgagaacgttcaaaagagattatgtggcaatttataggagtatttttgcctattctttgttttctctatttttctaatttacttaatattttcattaatttttatcatcactattaattagctatgtttaactatcataaaaaaaatcaaaagtcatgtcattaaatattatttgaggctcttcattatcattttatatgtaagactactcactagggattcacatttccctcacggggatggggcccgtggggacccgcctctaatggg

SEQ ID NO: 151605 - DNA, 912 bp, Cannabis sativa
atggcaataccctaaacaacataaaaatgggaagaactagggttcctaatttttccccaaccggcagacctattctacaatcggaattccggttctggaaattcctggaagccccaaccggtagaccagttgttgatggcttccctgaaccgaaattccagttcagtacagaaaacaaacaaaatttcatatctcaatcaaatcatacccaattcacaccaaaacttccagacctgttatttagaccctaaggaacatttccaaagcaacaaaaccgagtttcatgaataaatacacaaactaccactaaagctccaagctttgagttcaaaactcaaacttggttaaatctaataaacatgcatcaaatatgctttaattcaccataaacaaccaaattataaccccagaaaagaaacccaaacataatcaacaaccacagcaactaatttcattcatttcaccattaaaaattaagatttagctcaaaacttcatacttgtttaaaatcaactaaacaccaacaaaaacttgcttgaatccacatattaaaacctaattaagctagagaaaatacaatcaaaacctagcaacaactacaaccacaatttctcaagcatgcaatactcaatttttccttaaaatccaagaaacacaaaaagaagttacaaggaccttaccaacacttgaattacacttagaatggctgaaaatgcctgaaatgctaaggaaaactcccagccctagcagcccacaccaagccgagagagagagctttgaatttcttaaatttttccaattttctaacttttgaattaatgataaaatgtataaaactaatctttatttcagccaaaaaaggtactacataaatcatattcacaacaaataataagtccactaaaggacaaa

SEQ ID NO: 151606 - DNA, 807 bp, Cannabis sativa
agatgctgatgaattatgcgcaggatgttagggacattcacctccgcccaggtatcagaaatgtgagacatgtgtcgctcgatcctcttgccacgtcaatgtgtaaaaaataggataataggcttcaaaaacccacaaaaatagggggaaaatattatatattctcatattattgtgggacaattaacctatttattatttattattttattatgcaaataatattttacagttcctattttttagggaagttaggttattatcttgatgtaagctcttttatataaagagcattagcctaatcctaatttctctaagtctaaaaaggttctagctccctaaagctcttaactctaagtctggaactctaattctctcttctcttctctcatacacaccgtaggatctctcactctcttacttgagatttgattacttggtatatattgtaatcttaagagagctgcttcagattcaacaacccttgtgatctaagttgtataatctcttttacttttctattcttattgtgtaaagtagtaagcatcagtaataaatacaattccgttgtcgatttgccaaatctgagatcaataggtaatattcattaaaagtgcacctatatatacatatatgtaaaagtaaaagaagaaataatcatagatagtataaatgtaaagataagtgtatcaccgtaataatgtaatatctattctatgaaatttgtggctatgtaacagaattcttggtttaacgataatttttgggtttttctacgttaacttaacagaatatccaattacttaa

SEQ ID NO: 151607 - DNA, 945 bp, Cannabis sativa
accgaattctatagcaacatggaccaatttggcaacgaagtttctgtctatgttctttcctccagcaaagtctcctaagctgggaggagaaattaataatttatgtcagctggataatgaagctctccatgaggcttgggagaggttcaaggatctcatcaggaagtgtcctcatcatggtattgagaagtggatgctggtccacaacttctacaatgggcttgttggtaatactagaacacttataaatgccacagctggtggggcatttatgaggaaaagtgcaaatgaagcctatgaactgctagaagagatggccctaaataatcagcagtggccaactgaaagaagtcagacaaagaaggtggctggtatgcatgaggttgatgccatagcaaaactgacagcccaggtagaggccctaacaaaactgatagttgtgcaggcaaaacaagctcaagttgattgtgagctctgtggaggccctcatccctatgaagaatgcccggtagatgtgaatagtttgccaatggatgaagaaaaagccattgggaattactctcaaaacaacaactatgggttcaatcaaggaggcggtcgaaggaatagtgggttctatcagcaaggaaattagaaccaaacgcagatgcaacaacaatcactgcaacaaggctctagtgggagttctactcttcagatagatttattgctatagtttatgacagagactagatcatccataaaagacttacagactcagatggggcagttggcaactcatatagcaacccgtcctcaggggaacttgcctagtacaacagaggtcaatccaaaaaaaaactgcaaggcaattaccctgagaagcgggaagaagtatgaagggcctgatggggggcgaccagcggaagaagagactcaggatcaacctgttggaaattattttac

SEQ ID NO: 151608 - DNA, 583 bp, Cannabis sativa
  modified_base (528)..(538): a, c, t, g, unknown or other
atttttagtaattgtaagtttgcgttagtgctctggtatgggtatctttgcccttgtgtgatattttggcaggccactactcttccagttttggaatagagtgcacactctttcaaattaatattttgtaaggaggcaatggccatctgtatatgtaacttaattccttttatcactgatgtttattttactcattcttctggcttttgatgagtgctgttattatggatttcaaacttgtatggatttttacttttggcgttgtgtgatttgctttctatgcatgctttagttgctgtttgccgtcttatgttttgtgaacgtggttcatgtattcttatatagattgccttttgtaaaaggtcttagttatgtatgcctttcgtgaaaggtcttaggtatccaagattttgcctttcgtaaaaggtctttaagcaattatggttccgcctttcgtgaaaggtcttaggaacatctggtcttgccttctgtggaaggtcttaaatactgttgcccctgatttcgccnnnnnnnnnnngaccaaccggacagggacacgtggatcagataatttataaatatt

SEQ ID NO: 151609 - DNA, 591 bp, Cannabis sativa
tattttcacggaatatattgcgtgatgtacggacccatctaatatactacgaaagaaagtacatcatcacaggacaaaattgtgttcatatatataatattaggtaatttaaagtacctaattttttactgatgtgtcgtgttgtgagaagttagtgatttttaatattatttatttaattaaaatatataaaacttaatattaaattatacttttctttttcgtaattaattgaggtagtgagtgttatttttctcaaagttaaactatcacatactattttaagtaaataatatttggaccttatgttttgcaaaaataatttattagattttttattttgttaaatgataatttagatattgtatgttttaaaatgataaaaaatagtactttcaactcgttcatcaaattaaaatttaataataacttgatttttggaggtgttatcactacaagaaaatatagcaataccggcggaattaataccgacggagccaaaccgcaggtattaattaggttattaccggcggaaatggtaatccgtcggtattactttttaaaaacaaaaaaaaaataatatttaataaa

SEQ ID NO: 151610 - DNA, 778 bp, Cannabis sativa
aaatatttaggaaaccataggttcagaaactctgcgattcttctttgtcatgatttcatgcgattttacagttcttaatgcttgctttctgaactgcataatgcctgtgtttcatcttatcctaagcttcatgaaatttttttgccctaactcgagaaaatttcaaacttcttgagttttgacttttctttgaacattcttgttctgtaatctattgagtactcttggtcggcatatttgcttgtttatcgctcgatattctggccaaacactcatcttgtgtgttgtcttttatagatgaacccaggtgagttttgggaaagcagaaatcaaatcgaccaggacctgcttcaacttttgcacgaggaccatcctcgtctttgttctagcctaccttcttatagcgaaggacattctcctccaaatcttatatccagccatagaatgatagatcgtacaaagaaaacaacgcgtttggctgacgcatttgatcctcaagtggctcggcacgccactttgcccaatgcccaacaggatccatccgtccaagaggagggggatgcatttgattctcaagtggctcggcacgccactttgcccaatgcccaacaggatccatccgtccaggaggagggggatcttgaaggggacactgaggtccaggagattgaggggtaggatgacattcgtcctagtagttcctccgaggcgaaggaagaggaggaggttgaacccccaaactacggggagtacaatgaggctggggagccagtcgatg

SEQ ID NO: 151611 - DNA, 676 bp, Cannabis sativa
tcttaattaaagttttataagaaatgaattatcaggtgactatgaggttataagttaattattatttctgttttatttaatttctaaattaatcacaatcatttaatagtaatacaatgactaaaaaaatgtaactatgatggttgtacaggaccggccctatgttaatttggtccttaggcaaaaataaaaattaaggcccaatgaaaaagtgagactattgagatttgaactctctacctcttaattgttaaactaatcaaattaccactagactacaatacatatttagtattaaaagtattaatatttattttattactaactatattttaatttttttttttcgaaatggggtcctgagcggtggggggcctaaggcagccgcctccttcgtcttagctcaggactgaccctagttgcatatttaatgtaaccattaaaacctcttctatatattatatttggttaaaattttgtagagctttaaaaaataatatttttttgggttttaaaaaataatttttttcgaggttaaaaaaaaaattcttataagatggttataaatatataatatattttagttaattaattaattattaaaaattaaaaattaaataaaaatattttgagtaatttcaaagtgttattttattaatttaaatgagagaattaa

SEQ ID NO: 151612 - DNA, 533 bp, Cannabis sativa
tttttcttcagcgatttttattttattttatcatattttggctataaaagaagtggacttcaatagttttggagcaatttaaagggaaaaaagagtatgaatttatgaaacagaagtcaatactagtggaggtattctacagagtattttcaacattattttattctctatctacttctctttcttaaagttaatatatgtgattttgcttccataaacatctgtagctaaacactttattagggttagatggatattgtttgacattgttttatagttttaatatgatttatttcccactaatttctatgtattctatttcattcaagcataattacttacttttaattgtctggccatcaattaactgtttattgatttcgagggcgagatctgaaaagtgagtatcgattatgctatagtgaaatagaactgaatttcgatataggacgagagtatttgtatggtttagatagcttatatggtttctatgttcaatggatgttgcatgttaaatttatcacgagagtaga

SEQ ID NO: 151613 - DNA, 877 bp, Cannabis sativa
aaatcaattatgaacaataataatgttaaaaaaaagttacgaaaataataaaataataagtgtgtcagaaactggttatttaaaataaagcagacatttttgttcaaatatcagacaataataaaactagttttatacaaactaaaaaatatacaataacatcataaaaatagagcaactccattacagaacacttaaaacctgtgaaaccagttttgacgctgaaaaatcataacaaaatataaatgttaaataataaagctagttgaaaccagtttcatcaaacaaccaaataaaaaaacacacacacaaaaatacaaaaaaaaaaatactaatcaaataaaatcaaaacaacacacaatacatatcaataattttaaaactaaatataagtgtaagttcttaacctagaaacaaaataataacaaagtaacttaaaattaaaaatatgcaataacataataaaatagagcaaccccattgcagaactctcaaaacatgtgaaaccagtttcaaacctgtaaacccgatgaaactagtttcgactctatgaaaaatcatagaataccttttaaatctaaacaatttttaaacataagaggctagacctggttcattttaagtcactaaagatacagacatattctactatatgctacaggcataagtaaatatatatatgtcttaaaaataaacagttgttttacagttcatggtactcatgatatattttattagtttgactagctcaatcaataagttaataagataaaatatatattttaaaatgggaaagatattatgcactcaaaaatttttggagtaagaattgaaattctcttaagatttttctaactttgttctaaaactatcatta

SEQ ID NO: 151614 - DNA, 518 bp, Cannabis sativa
ttatattgtgactaaagagttatcactaaaaatagcagttttttgtagtgagatagtgataaagctttctatatttctactagcaaaaaaaattaagtagcatatgttccaataatagtttcacaggtatataatatatagtattatgattataatatttatatatatttaaatatttaaaataaatagtattaatatatatttataaaactaattttattaatactcttaatttaacaaaatatttttattttcatgtttttaaaatattttataaaaccaacaaaaatccttaaataaacatattttatatataagatttaataattatatgtacttctttttatagattgttttgctagtaatgagaaaattaaaaagtggaaagtgtttgaacaagaaaatggtccaacacatgcagaattattggtcaacaagtattgtgttaatgaagagaacaacattaataatttttatttcatttcattttctttccttttttttttttttttaacttt

SEQ ID NO: 151615 - DNA, 749 bp, Cannabis sativa
tatatataataatattataaaatattaaagaatattatgttaagtaattgggatactgttttaaagttaacgtaaaaaactgaaaaacactgttacaccaagaattatgttacataaccacattttatagaataggcatataacaaaaaaaaaattatcttcattaaaatttagaacaattcaaaattcgacaaataatagtaaagatcagtcaatatacactgagaattagaattaaatttaatattattacattagaaaaggaaattgattttgtttttaatgatttttatttggttggttaagaaatattatatttaatgtcatatttatataaattttccattttttccctaaatagccccttttagaattgagacgtctaatttaggtgtcgtttggtaacaattttattttttaaatttttaatcacaaaacgaaaataaaaatttttttaaaaaagaatatttttgaaaaataaaaatgcgttctgtaaccacttttgtattttaattttagaaagagaaaacaaaagtgtgttctgtaaaatttatttttatttttattttattattttatttaagtcgagtctaagtccggagtcggattcaacttcgtgtcagaagtcaggttcagcgccagggccgtggggggatttggatccgggtctaatgggagtccagaatattgattaagaaaaaaactgtttaaaaaaatattgaaagttactatttttatttttaaaattt

SEQ ID NO: 151616 - DNA, 520 bp, Cannabis sativa
gtcgtattgaagatttcttcttccaacttactcagagttcagagatgccaccatctgatacttgctttggagcttctagccctagggatgaacaacttatcgactttgaagggtctgatgattatattaacaaaggatttgagagtgaggcattgcctgcagagccaaccattctgccagaaccaattgtctcaacagaggcgggtgttccatcatcagttgttccttcagatttgcttgttcctcaaccagacccagtattgacagtgtcagcttcagcaattaccaactcagacttgaatgagcataccaagaagtttgtgattaaatgcatgaaagacattctttgtttgttatcttctgctttgacaacaacagacatctcataacatcgtgcggacgtgggtgtgtaacttgacgtgttgagttttctttgtgggcattataaatgtggcttagcagaggttgcatggttcactgactctgtcaatgatttgctcaaggcccaagaaaagtctct

SEQ ID NO: 151617 - DNA, 605 bp, Cannabis sativa
atccatacaattctccaaacaataaaaaaaggaaattggcaattttatccctcaaaattaaatgtcatttaaaaacaaaaaaaaataaatcaatataaaaataatttatttctcaatataactattgaaaacagtcaccaaacttgttataaacggtcaaaagtaaaaaattaacctgaaactatagtaaataaaatttgtcttatgtgagggatctcacacttcaaatcaaaagtgagggattacataaatccccttatttaaatatataaaaaaaatgccgtgcctacattacactgtagcattaatctcaaaatgtcatataaaatggtgtgtctttggagtgcaaaatggtgtgtccttgaataagatactcatggatttcaaaaaaataaataaataaataaataagatactcatgacatatatataatttgtctgtctctttggagttgtctttgttcttatatttatttagagcctgtttcactatgttttcagtttttagtttttaaaattgtgtttttaaaagtgagaatagaaaacagttttttatcattttaaaaatttaatagtgttttgcataaattttttaaaattatttt

SEQ ID NO: 151618 - DNA, 582 bp, Cannabis sativa
caaagttcatccaactattttttttagccaatttgtttaattaataatatatcaaatctttaataaatatatataggtgattattgaatggttacgtcaaatatacaattacgatggttgcactaattttgactattggatcattattgaatgattatgaataattaaaaaattaataaaaaaataacatattagttgtaacttgaaactaccttttatttataattatgttttgtttccttataaaatactaattaagtttaatttttttttattaaaggagagattttattaatcaaaacagagtaaatgctacaaagaccagcattttcaaaacaacaaaagatagacttatttacatgttacaaacaaaataaaaaatctgttggtcccttttagagagattcctcctttcaacaattaataatctcgctttaagagcaactctaatcaaattattcacataagaaaacataaaaatattttgttcaataatacaagtattttgatttcaccaaataaaatttattacagctgcacaaactaccacaacaaccctatgaagaagactacgatctcggt

SEQ ID NO: 151619 - DNA, 775 bp, Cannabis sativa
  modified_base (389)..(409): a, c, t, g, unknown or other
  modified_base (600)..(604): a, c, t, g, unknown or other
tacctagaaaatatctatctatatcattcttaaactaattacttatcttcgaattaaaatataatatattttagtctatttattttaataaaatcattattaatgaaaattattttaacttgatctaaaattaaataataaattaattttcaactttaatctaatttttaagattgaaaaatttcaaaatatctacattttaaaaaaatataattcaaaattctcgagaaaaatattattaaaataaaatagaataaattctgaaaattattcttatttaggttaatctgaaattaaaaaatttctagcttaaatataattttccatttaattaaattcattaaaatagaaataattaggtatctagaataaaatcaacttaattattnnnnnnnnnnnnnnnnnnnnnaaaatattctaatttaagttggttcaaaataaattaaattaaattaatttttaacttaaatatattttgcttatgtaattaaatttcatgaaatagaaataaattattaagtatcttaaataaaatcaacataattattaattctatttaagttctaagaaaaatatcttaatttatgttggtccaaaatnnnnnaataaattaattttcaacttaaatctatttttctacataactaaaaattaaaaaatgtaaattagttactaaaaatcaatatctagaatatttcattaaactaagtgtgttttttctaaattaattttaaaataatccaatgaaaaataatttcatttatttcaaaattaa

SEQ ID NO: 151620 - DNA, 503 bp, Cannabis sativa
tttatttttttgtataaaaattataaaaaaatttagtagaataattactcatactattaaaaaaaatatctttaatatatttttataacttaattatcaatagacaaaataaagcgcggtttgtttcctagttattatcaaaagtaacaaatttcaaaattatttcccccacattacgattttgatggtttaaattaattacttaatttgttaatattattgatattgatattttatttgatagtaattattaatttgaaaatattaataataaaaattaaaaattaaataaatatagtagttttgaagattttaaagtgtcacatttaaaaaaaaattatcacacactgttttagtctttttagtctactttctctattaatttttttagcttaaaatttctatacattataatatttttttttatggatgtatctcatattttttctgtatctaagcctaaaagcaaacatataggctcacacatgtcaaatgatttggat

SEQ ID NO: 151621 - DNA, 983 bp, Cannabis sativa
  modified_base (394)..(395): a, c, t, g, unknown or other
cgtaccccttttgcaaatccataaatccatttatccatttgcatttgcattttgaaattttgaagtacttgagatgggaaaggggatctagtctccccgtgtacattttccacgtcagcattttgaacttgtgaggcagtggcaggagattgatctccggcgagaaaggagttctgcgtgctctgtctagctaaagatcattatttatttttccagccataccgtgaaacatatttttcagttcgtctagctgagcctgtacggctgggctgacctgcttggcattctggtcaatttggattacgtcagcatctttctgagcggggatttgagtacgggctccgagctgcataattgtcgtaacattctgattgtctgctcccctccttctgtnngatcattccttaggtcatgggttttccctaaactttcgaacaccgaagcgcctggctgccttagcagttgatttgcttggttgacaagtggaatggaaccattgatctagttagaaccatcaggtatgactcctcctgatgaattaccagacaaggtctgctcgcctaccgctgggcccaagagtggaactcgtgaccggtgattgggcggctgaccatttgcagtctgggaagtattcatcgttggatcctcgtccatctctcctaggggaatgacattcggcgattgccgacctacagtttggtaggctcttcgtatcagcagagtagcctgccgactacgatctttgatctctgcatggtgagcccttaatgtctccatctctctatctctccattcggcgaacatacgcatttgttcgtcgaacgcgagatttacggcagcgcgtagttcgtcttgctcgtgatgtacggtattattatgaccctgcacgagtctgagcgtgtcacgtagattttgtaatttagtggcatctccgatagtcgtctgggcgttggttccatgcgaaacagttgtgttatgaatgc

SEQ ID NO: 151622 - DNA, 672 bp, Cannabis sativa
ggctggctagccttgtacagtctagaagctggccggcaaggggtggccgaccagcccctttgaggtggctagtctatcacctgtcgttccgttttacccccgttggctaaggtattgacttgacttccttgttggcgagctgtactgctacgtgactctgatactactcaagctaaaatagtagtggtggtccaagctagaataattactcaaaaaatatttggtataaatttaagtctttgacttaagattttagattctaaatagaaatttaatttcattttcaagaatacattgaacactacgatataaatttcacaagttgttaatatccattttatatcaatgaatctgaactatatgttaatgtatggattatgagttttatattctgtgagcaaaatccacttgaactattctaagagctctttattgtaactaaacctaagaatcatcaaaagacaataaccacaataatagatctatgacatttgcatcttgttcatagtggttttgacaagattagtgtcttcaaagagaaataagcaaatattcatttgaaggtaggatcatctgtattctaacatatggatgtacattcaagagtggatgtgagttatcgttaaattcttaaaacgatcactctagatatttaccttatgcaaagaaatt

SEQ ID NO: 151623 - DNA, 500 bp, Cannabis sativa
cgaaaattatcatctttctgctattgttgtaattcgttttctttatatttccagaaaaagtactttcacttaaaatacaataactctatcaattctcatccatttttcatgatctatatatggttttaaagcttatttgatttcccataagttttatgaagaaacgttttgttaattcgaagtcatactacgccaaaaaagttagttttcttcaatatcatgtgattcgtttcttgaatcttgttcctgcaaaactgttttggtaaaatagtaatatctctttgaatataattccaatttaaaagattttggtatcaatagaaagggaatttaatttcctaaaactttgataaatatgttatcttttatttctgaacaatgcaatgtaaaaagtttatatttttgctgagtcgtgtaattcgttactccatattccttctcagaaaaattttcagtaaaacaatcataactccctgaattttaatccatttttaatgatc

SEQ ID NO: 151624 - DNA, 559 bp, Cannabis sativa
  modified_base (37)..(48): a, c, t, g, unknown or other
  modified_base (503)..(515): a, c, t, g, unknown or other
ttcatcgttttagaaatttcatatttagggtgttaannnnnnnnnnnntgagtagatctaagatcctgttaaaataatttccaacaaagatatcaccaccttggttgttaagacaagagataacacaacctgtgttttagacacaataggttgtgtcttcactgtgtaagaacaatgataggtgcctacaaactgatggtggacttgttatggtttatgccctgaaaagtctgtaaagatatttctaattattaataagagttgaacactttgatatatgcatgaatgttaaattattgatattgaatattgaatattgaataatttatatatataaatatatgaaaactccctactcatacatgaggctctgacttgtagttgtacggagaattaagatcacttagtcatgaataaaatagacaacaatatattaaagtttatgaatctttaatcaatagtttctagtgtgattctgttggaaaatattttaccaagatctnnnnnnnnnnnnnaagtatgtttattaacatcctaattatgaactttctaaaacgat

SEQ ID NO: 151625 - DNA, 914 bp, Cannabis sativa
ttattggaaactggaagaatcaaatcatagaattactaaaagaatatgtccaagtatttgcatgggatccctcggacatgcccgggatagatctgacgataattactcacagattgaatgtaaacccgaactacatcccggtcaaacagaagaggcgaaaaatgggaacagatcgaaataaggcagtaaatgatgaagttgcaaaaatgcttaagaacaataccattgaagaggtacaatatccaacttggctcgccaaccccgtggtagttcccaaaaaagaatggaaagtggagagtatgtatagatttcactgacttaaataaagcttgtccaaaggacagtttcccgctaccacacattgatatgataattgacgccaccgcggaacacgaactaatgagcttcatggacgccttctcagggtataatcaaataatgatgcaccctcccgaccgagataaaacatcattcatcactgagagggggacatacttctacaaagtgatgcctttcggacttaaaaacgtcggggcaacgtaccagcgaatggtgaacaaaatgttcgcccaacagttaggacttactatggaagcctatatcgacgacatgttagtgaaatccaaagatggcgctgaccacgtcgatcatctgcgagagtgtttccaaattctcctcgcccactcgatgaagctcaacccagccaaatgcacttttgccgtcagatctggaaagttcctaggtcatctagtaacacgacgaggggtagaggtgaacccggatcaaatcgaagcatttcaagcgacaggacaaccctgcacaataagagacatccaaaagttaacagggaagatagccgccttaagccgcttcatctcaaaactctcagacagaagccttccattctacgactt

SEQ ID NO: 151626 - DNA, 525 bp, Cannabis sativa
  modified_base (38)..(47): a, c, t, g, unknown or other
tattcatcaagtccataaaagttgcaggagcattggtnnnnnnnnnngacataaccagaaattcataatgtccatacctagtacggaacgccgtccttagaatgtcctcctcttaaattctcaactgatgatagcccgattggagatcaatctttgaaaagaccgtctttccctgaagttgatcaaaaagatcatcaatcctacgtaatggatatttattctaaactgttagcttatttaactctcgatagtcgatgaacattctcaaaggcccatctttcttcttgacaaacaataccggagctccccagggtgacacactaggccgaaaaaaccctatgtcaagtaacccctgcagctgaattttcaattctttaagttctgctggagccattctgtaaggagccttggaaaccgcttcagtaccaggtgccaagtcaataacgaaatcaatttcccgctgaggtggtaaactcggaagttctttaggaaaaacatctagaaatttccgaaccaccttgatgt

SEQ ID NO: 151627 - DNA, 789 bp, Cannabis sativa
cttacaagattatactttctccatatgaataaggaatttttagatatttaataattatactcttattattaatatataatttatcttgtaattgtatttcatatattctctaatatattattcattaattacttgcttttagggcataaatcccaacatgatcaactaaaggaaacattactcagttcgaattttgaaaatcttgagctgacacttcattgctcctgctgaaaacttccaatggtgttatcattgtgtttatttatgttgatgacatatgtgatagttagagtcccatgatccgtaaagagaaacactgggtatgctgaaaaatcccacatcacttggggaaggtcaagtgtgatgattcttagactgtgcaggtatgagaatacacatttgaagaggacttaaatagattgatcggtactacctatataaaagatacgtcttttttttcggtagcccatcacctaagaacttgatagttaaatattattggcatggatcaatcttaggatgagtgacatcctggaaagtttttccaagaagcgtgcaagtgaggataaaatacgttggaaagactcatgttggtttgcaggaccaatcgtcattctaggatgcatccaaagtcatgtacccgtgtataagagcaacaagtttgtggcgtggatgcccaatggaggctttaagtgggaacattataaaatggtatcagaattgtgatccagcaaggagtatggtcgataaggacgttagacccaataaaaaagagtgattgtacagtca

SEQ ID NO: 151628 - DNA, 889 bp, Cannabis sativa
aaaatggatttcactaaagaaccagaggacttgtgaaaaatgacaagcatgagttgtccttttatacatgaagttcagtgacaagaaagccaaagattgcaaaatctaacggttgggaatcgtgcaaaatatgaataggcgattcataatgatcttcaaaactatacaaccgccagaatcaaaggaggcgtccattccaagaaaggattttggtgaaattaccctccgtaattattgaaaagctctttttactaaaaaaaactttttaaggggcaattattatatccaaaattcagttggaagacacgtgtcaagataaagggaatgtgaatcggtgccatatctttttatggaataactcattaattgtgtaagtactagagtatatttgcaacccgctgactgtaaagtcttaggcgaggaatcaatgtacgaactggttattagagtattaacgagaaaccatatatcactaagggataatagtgaggcaccagagaagagtaatacatacctcaacttgtaataagctgactaagtataaaagtcaaactagcttagaatataacaatgcaagatgaccacctcgctacgaggaaacttcctatagtttcatccaactaacggaagcgagactcacaaccctggcaagtcagcagatttccttatatccacgatcgacgtgagacacatcttgtcaatctcgaaaagaagagtggttccagctcgccattgagatcactactatcaagtttctgtcgagacctttccagaatcgataattaaaggcgtgtttaatacacgatatttatgacccagtaaaagtgggaaaatcatagttgtatgactttcaaaatcatgcacaacgtttacattttgtaatatgtaa

SEQ ID NO: 151629 - DNA, 530 bp, Cannabis sativa
  modified_base (477)..(477): a, c, t, g, unknown or other
gctaaaagcgaagtcaacattttgctgctttcattgagaggagaatcgcagatcgctcttttcgacattcgacacgatggtgcaaactcatagatgcttgtctgaccaagcaaactcatagacgctggatccgacattacaggaccctaagagttcaagggttccacccgctgtcaatcctggatagacgggaaacacggtgaatggtgtgacaactcctgttactgaaactgcgcgtggtgtgcaagagactgggaataacagttccgcacacagccagtgcgttcataacacgattattctaccaggcatcaacgcccaaacgaccatcgaagacgcaaccaaattgcaaaatctccatgctgcgctcggactcatgcagggtcatagcaatactctgcatcatgattaggaggaactgtgtgccgcagtaaatttcgtgtttgacaaacagaggcgtatgttcgctgaatgganaggcaaagagatggaggcattaaggcctcaccatgcagagatcgaagatcgta

SEQ ID NO: 151630 - DNA, 940 bp, Cannabis sativa
  modified_base (76)..(76): a, c, t, g, unknown or other
tcatgtgttgataattgagccgatatattgaatgaaatgttgttgtttatgtgtgcaatggattgaaatttaaacngtgtgcttaattcataaactcttttgattgaattggatgccttgtgaaaattttcttttatatagatgtaaattattgatttttggatagtatcacttttgttctacttgggtttgtggaatgtttgcttgacatggaatagaacttgcgtgacttactctcttgtagtgaaatccttgatgattgttgcttggaaaataatttaggcaattttctttggaccgactgagcctttcaagcttacctgtaaaaaaatttccttagtatactcaaagttgagccttagcctgtttcaaaatttaaactgcttaattgagcctaatatgtttcctttaattattttcattcccaatataccctattatgccatatgcttttaattaagtttgggtggaatgaagtgttatgagtgggtattattttagaagtaggagattgaggaaagttatgtggaagtgtctttatcatctctagaaaaaaaaaattgctaattcttctccaaaaaaaataaagaaagaaaaaaaaagcatcaatgtgtaaaaaaaaaagatgatggtaggcacataaagtggaagttctcatctcttacaagtttcattgggtaaaaatgtaaatttataggggttcttggttgggttaaaatatgcgtatggtataatgtagcctaaatgactttttatctacctttcacctaagccatgacaattcaaccgaaaaagaccttttgattctgagcatggattgttgacattagtggagagaggttagtcatgcaagcatattgaacattggttggcagaacgttggtaagagtagaatgattgtgatatgtttttccaattgaagtgttttgcatctatacat

SEQ ID NO: 151631 - DNA, 589 bp, Cannabis sativa
  modified_base (201)..(203): a, c, t, g, unknown or other
gaagatgattcttacaacttctattttgggaatctaataacatggatggttgggaacgtgatgtacaattatggaatcctgcctttcataacagattgaatgttggttccatttaagtgctaattgtagaactggaatgttgtgcacaaaattcagatgggatcttgaattatagttctactagtgaattaatggtactannngataaagaagtaattagaaggataaaacggtattttgaccaaaactaatcacgaaccaacacatgtagggctaatcactagaattgattatatcaatggatactgtagttaaattcgataaatataattctacaattacgaatattacaatttcatatttatagtggactaatcatggaattaacaaacaaaggattgtttggttgatgacactcaataaataatctagtttattggaccttagaattataggtccatggtcctcgaatcgctaccttcaaatactgtcatgttgggttttgtgccctaaataaaacccatttaaatatattcagatttactaattaataaagatcagaaatcacattttatattgcatggttcac

SEQ ID NO: 151632 - DNA, 840 bp, Cannabis sativa
  modified_base (226)..(230): a, c, t, g, unknown or other
ttagtgaccgggattagggttattaccctaacatgagcggtttatcggcctagggttattaccttagtgatagaatatgtgtgtatgctatgccatattaattacatgaatatgttaagatttagggttatgtgtgcaaggcataaccgggttggacttggtaactagaaccgagatgaaccattctaaggccttattgtaattagacgtgtgagcgtaacacgtnnnnntatgccacatagacataaataggcatatgagcataatacgcaggtctgtgtcatacaggaaaatatgaaatggcattattactagtgatgagttaattataattattgatatattgtactatcttgctgggcttggctcacgagtgctctactgtgcaggaaaggataaatctgtctctgatcagccatgagtgcagaagctggacggtgtatgtacttgttcggaccacactagaccaagtgtgttggggtctatcaatgatgatttctgtaactctgttttgccgcttaggtcagcttgtggaaaaagacttgtaataatattttgtaagatatttttgggatccagagacatgtaacttttgttggtttgtaaagttaaaattattacaagtttattttcattccattttcgtttaaagtttaattttcgtgcttattttattagtaattctgtttaggggattagggtttcttaatcatcttgggtagcgtgtctaaatgttagggcgttacaatataccggctgagcatgtacattcatcgtcaaagacaagctcgactcatggtgaagtaagtgttgagagtaaatactttactgcttatgtga

SEQ ID NO: 151633 - DNA, 514 bp, Cannabis sativa
ttggtggttcctggatgcaatgagtaaggggtagtatgagcttcatctaaattcttcttcttaagctcaatgttattagggacacatactcgtgctttgaataacaatattccattgttggaaatcaaaaagtccttagctttgcccgctaagacatcttctcgaatcttaaccaattcagaatcttctaattgagtcactttgattctttccaacaagtctgactgaagtgtcagattatacaatttctcaatcactaactcaatgtttgccctagacatttttgaggctaactgaggagaaatcataatcatattaagtatctgatcaggtccctttcggcttaaggcatctgctacaacatttgccttcccaggatgatacaagatttcacagtcatagtctttcaccaactataaacaccttctctgtctcatgttcagatccttctgagtgaaaaagtacttgagactcttgtggtcagtataaatctcacacctttcaccatataagt

SEQ ID NO: 151634 - DNA, 706 bp, Cannabis sativa
  modified_base (265)..(266): a, c, t, g, unknown or other
tacttagattgcccaatgttatttgtatatttaaccggtttctttccagtttttaaggttattatttaatgttgatttgtttttaaccaattatttttttagttatgttatatattttatttatttattaagttgtttgtgttgtatatattaggtttttctgattcttctttttgtaatacatatttttatggtttttacattttccttgtgaagtattgttgttacaatgtgttttgtttttatagttttttgtttaattttnnccggttttttcatgtttacttagattgcccaacgttatttgtatatttaatcggtttcttttccagtttttgatgtcattatttagtgttgatttgtttttaaccggttatttttttagttatcttatatatattttttttgtttattaagttgtttgtgttgtatatattatatagaacctttttttttatatatagaacatgtatttttggttcatgtttaaatataaccagtttcattttctttgttttcttttgttttggggcatgttgaatataaccggttttttgttgttttttttacaaggcaattctatattatgcaaatttttattttttttcaaaaccaattatgtttgaagatatatttcatgatcaacaaatattgaaacaattattggaacatacaaaatcaaatatattgtttttttttattgtaa

SEQ ID NO: 151635 - DNA, 815 bp, Cannabis sativa
tcactttcttctgccaagataagattgcctttaattaattggtgacctgaccggctttcctatgctgcaactctatgcgatagcaattgcgagctagcatctagttgccccgcaccactcccacaccttctggtgtttagaacttcaaggggtgattgatcgaactaactgcccctggtccgatcaatgctagacgacccaacaatatgttgtaagccgatggcaggtcgacaactaggaagtcttgcataatagttgcggataggggtgcctcgcccaaggttaatgtgagcttgattatgcccaggatgttattgaatgttattgaatggtgagtaaccttgttaaaccttgttaaaccagctaaccagctgcttagctgcttgctgctccaacaagcgaggtggggaacaacatacatcgtaaattgtttatcacattactgcattattgtgttaaagttgttcagatgcaagatcgaatcggtggttccatcatacaatgagacatgcgggtttttaaatcttgaaggaaaacgggtattcatgaaatctgggtgatatggctcaagctcttcgtctgagttatatccagattgtctccctaattcccccacttgatatctcctgaacttgtcctcaaacttgtctattcgcaattgaataggatcctcttactttggaccaagttgttgacgaaggtcaattttctttcgattcaagtgctctcgcagatccggttgggagtaatttctgacagaccttgttttactcatagattgtgtcctactaaacagacctcatcttgctcatgga

SEQ ID NO: 151636 - DNA, 671 bp, Cannabis sativa
tctttattgatattgaataatacagattacattgaaattgagttttatttggggcataaaacccaacattcattccatgtgcgaatgaacgagttagagagtaagttcagaaggcatcaagtcatgaaacccagaagaccaccggggcatgatactgttggagaacttgattcggaagcctcaggatcaaagaggaaaaatagttctaaaaggctgcccaaggataagaaacccaacagttatatccctctttatgatgaatatatcgagctcaatgaaactcaagaaaatatctaccttgcacatgtacagaagtcatttttagcgaaccaaagcctatgaaacatgcgaggcgtaaaagggatccaactaaacggtgtgaatatcatggagatataggtcataccatgaaagaatgtcatcagctgaaagatgagataggaggtctcatatcacaaggacgctttcaacaatatataaagaggcaggacgatgtccataatcagctcgatctacccaataactcgagcaacccgaggttataaccttcctctttaagaggaagggacacccagttatctcaaaagggagtgattcacaagaatacaaggggcggttactctgataaaacaaatttgtaaaagaattgtgtgttggaatttattttacca

SEQ ID NO: 151637 - DNA, 651 bp, Cannabis sativa
gttttgctcccaaaaaattgatttttgtggtaagtatttaaaaatttaaagttcaggtagtttagccgccaatatccctaaaaaaattacataaatacttttttttttttggttatttttacatttttatagtcatgtattttttttttttttaatattttgactatactttacaaaaaaaaaaaaaatgatatgtttcagtaaaataataaaaagccaactataaaacacctaaataacaacatgaaaataactataaaataatataaagacatctacaagaaaacataacaataataagacatcgatctcattgcaatatgtaacacaatatcaattccttaacatgtttttgttttacgaattttttttttcacttaattttaacaacttgatttatttttattactactacattatttttttcattttattgttacaacttcatagtttcaactattttttctcttacttttgagttagtgatagtaaaaatgataatttattttttaaaaattaaattaatagttacattaataatagaaatattaaaattcataatttcaaaatagggtatataatataatgagtaatatataattaaaaaacaaaaaatataatttaatatgtcaatatctactagtgcacatt

SEQ ID NO: 151638 - DNA, 527 bp, Cannabis sativa
attacaacatgttttacctgggactcgaacccaggacctccaacactcacacacccacatatggccacttgagctagcctcaagtggttaattaaattttgtgtggctgctgggaaaaaataagatatatttgatccacagattttaacggaagttacgaggtacatgttcttatgcaatgacctttataataattagtatttttttttttcgacataatgctgttattggtatagttaagtaacgagtgtcatataatttaagaaaataattgtagagcaccacctatcgaaggtgctaggtaccactagtactcaataacaatactcatatataaatattgagaattgctatgtttaacactctcatcagtattatattgttattagtataattaagtatatcgggtttcaaataacttatgaaaataatttttaaaaaatattactgtgtgtttggaagtaactgtgtaattactaggtagtgtaattactagggtagtaattacacaatttagtaattacact

SEQ ID NO: 151639 - DNA, 550 bp, Cannabis sativa
  modified_base (62)..(65): a, c, t, g, unknown or other
agagaatgagtgaaattttattttaggggtattttaggaatctttttgaattagtggtatcnnnntgtacaaaaaataaaggggtctaattttttatataaggtattttattaggggaaaaatatgaaatttcccttttactttttgaacctctaccaataagacttgtatttagtgtcttaattattgaatctactattttaattgttacttttttttttcctttatactatatttaacactaaaatataaatttgcattaatttttaatatgttatacaatgtagaagaaaaaaaagacgcccctcacttacaaaaaaaaagtgtcgccctcccttaacttatatcttgggtccgccacttctaggattgaatttgttatatacatgatcatgttttttacaagttgtttttttttttatagagagagggagagtgtgtaataccctaggattatgaaatggattagcgaaaccctaattagataattatgtattattgagaaattatatcattatataatttgatatatgagaaattatttaattaa

SEQ ID NO: 151640 - DNA, 516 bp, Cannabis sativa
  modified_base (131)..(144): a, c, t, g, unknown or other
  modified_base (331)..(336): a, c, t, g, unknown or other
gaagccacctgggagttagagtccgacaagatggctcagtatctagagttgttcgggttagatttcgaggatgaaatccttttaaccgcggataattgtaaagatttcttaactttaatttggaaattagnnnnnnnnnnnnnnttaattatgaaacttgcatattaattatgaattatcattttacgaagatttatttgaattcagaatgcattttatatatcatatatggaatttcatatttttgcatgttttgtgccctacaacattggaacgcgacgtttggctaatagaatcatattttagtatttttagtatagcggggcaatannnnnngacattgggaatgtcgggaatagctgagattttagaattgaccaatttacccctaagtgattttatcacttttggtgtaggcaagtgcattatggtctttttgcctttcgggagttttgtcctttagtgagattttatttgaattattaatctgatttttgtctgatattacttagataa

SEQ ID NO: 151641 - DNA, 791 bp, Cannabis sativa
taattttaaaatgaattttgaataattttaaaataataatattaggtgtatcaatataaatgtgtcacgtgtacaagagtgtatacataagtagtctatgatggccgttaacagaatgacacctaaaatttgctaacagtttagttagttgaaaatttttaccgtcaagattaagtgtaaatcaagaagtttcaattttgagcccaaactactattattattgtagaataattattatgatgcccactgcgggatatttgtggcgaaattcttaacatttactattattacacatattactctaataaaaaaaattgacgacaaaagtattttatcatacgattttaatataatcatattattttttggccatcaagtatcagctcagaaatacgggacgacatattattagactatgtattaaataaactaaaaaaacatgtcaccacatgtttttaagctgacacttaacgaaattaattaatacttaacagctaaaaaataatacaactacaataaaattataaaataaaatattttaatgccatatttttttattagggtcatatgtaatatctctacccactacctacaaataagtggtaactatggtatatgttccttttctcttttgcttaataaagtggtacaccttccatattgttggattcttctctctatcacaccctcttttcactctctagtttatttaatgacaaatgttatcttttaaacaaggcttaattttacttaatagctagtcataatattatacttttatttcaactatg

SEQ ID NO: 151642 - DNA, 729 bp, Cannabis sativa
aaaaaaacagtttccttctatatcttttaggagcatgcgagacagatgactgacttagtcaaacttgatgattcaataaattaaaaaaaaaacagttttcttatatattaaatcaagatcccttgtccaagtttggtatcccatggtatctctaactaatataattatgccacattatttaattttattttatttaagtttgcacaataaattaacagagttagtgagagtcccgttaacagtaacaagtagcagtttctttttttgttgtaaaaaccttttttttagttttttttataatgagtagagtcccgttatttcctcttttaaactaatgtacattcctattatataaactaaatcaaaatgcttagaactattttttaaataaataaatagataataatagaagattttataaagcaccctcctaattatggcgtattttggaacgatcctacggtccgatcgaatttcgaagacttccggcttagtctttcgctaaataaataactatagtattcggtaagacattcggtaaaataagctacatgatacgtcgatcgtcgcaataagtggtaaatcatgcgtaccaaacctaattacggcgtattttcgaacgatcctacagtcgatcaggtttcggagactttcggtttagtctttcgctaaaataaataactatagtattcggtaagactattcgataaaacaagctacatagtggcg

SEQ ID NO: 151643 - DNA, 536 bp, Cannabis sativa
tttttttcttttcttcttttttttctctttccttttttttttcttcttcttcttcactaaaaatccctaccaaacccgacccccttgtgcaatgtcgaccaaccccggcgaccaccctcgaccccttgtgcgatgtcgaccaaccccggcgaccaccccctaccccattgtgcgacgtcgaccaacccatatcacatttttggctactgaaaagagtaaaaaacataaaagatccccaaccaataatatccagaaatacaagccaaaccccataaaatattcacaatcaaataagtagtatcatcttcattgggaggcagcagcagcagcaacaatagcagaacgttgggtttgggcaaaggggtattaatttggattctaccatcaatataggaagagcagttggtttcagcctaggtctccaagtcaaaatttccagagcccataattctcttacctgagcacaaatgacccaccattactgccattgccccttgtgcgtcgttgaccaccacggagagagagagagagagaga

SEQ ID NO: 151644 - DNA, 572 bp, Cannabis sativa
  modified_base (205)..(221): a, c, t, g, unknown or other
gccaattatggtggatgcaatcactaagcaaagagataaattggctttccgtcgagtcttaattgaggtactacttaaccaacctttgcctgatctgatttggtttgaggatgaatttggatccaatgtctctgttcaagtgaaatatgagtgaaaaccaagtgtttgtgggcactgttctggtttgggacatagcacggaggannnnnnnnnnnnnnnnngaaagaagcaacagtgggtggtcaaaccaatagggcagccgtgtgctgaagtgaaagttgcagaggaaaaagccactgcaattgatcctgatggtttccagctgttacaaaaaattgtaaaacagtacacaagtgcacgtaatcaagtagtaaactcacgcaagtgaggtcgaaccacatggaattggattaattaccactaaattatacttatgattctattcggcaaatcaataattttcaagatttaaataaagtaatagtaattcaagaaacttaaagaaacaagtgaatattaatcaagatgagaaaatagggaggagaatcctgttgtttgtttacccaattgtt

SEQ ID NO: 151645 - DNA, 542 bp, Cannabis sativa
ggttgaaaatgctttttctttatagatttagggtctgtgatttagggtgtgatttagtgtattttcatcagggaagatgaaggcccgatgtcgggcctgatagtcggttcgatgcaccttaattggtgaaattcttttgtgggtctgatgggcccgatagttgggcccgatgggttggtccgatgcaccttaagtggtaaaaattccttttgtaggtccgatgggcccgatagatggggctgatagttgggctagatgggtagggtcagatgcaccttaattggtgaaattcctatgtggttttgatgggcccgatggggtccgattgctttgtttaattttgaaatttttattattaattattaaatttgttattaaatttgttttattttttattcttttattaattattaattattattttattttttgttattttattaattattaaatatatggttttattatcaattattaattattggtttacttttaattttttattaattattaattatggttttattattaattattaatta

SEQ ID NO: 151646 - DNA, 612 bp, Cannabis sativa
tttttgttaaaccgcccaaccccgaacaactcgtccaaaccaaaccgagataatctgacgaagataaaactcgcccaatctttataatgggcgggttgaaaataatatcaacccgcccaatcaacccgaactaactcgactaacctgattaaaagagttttatatatatatttttattatatttaatctttatattatataatttatatacatatttataaaaacaaactactatattttttttatgatggatgatttgaactttaaattcaatctttctatttatttcattatcacaataactaaattgaatgtgaaaaaaaaaaaaaaaccgatctttatattgggttaaataaaattaacctaaaccgacgaattcattaagcgggttgaaaatttattttttcttaattgggcaggttgcacttacatttttgtaaaccatgtttttttttttttgaaaacatgtaaaccatgtttacattgggttaaataaaatatatcctaaaccgaccaaatctactcacatacacccctactattagagcatgtttgctttggtgtaatcaagattggaatggaatggaaattacaattacaatgtttggttgg

SEQ ID NO: 151647 - DNA, 640 bp, Cannabis sativa
aatacggtctttttatattgtaatcttgttaatttgttgttgattttttgttatctgttattttttattgttagtttgatgttacttttatgtcgttttcatgttgattttatgttgttttcgtgttgtttctcaaaaaaccgtaaaaatgtaaaaaaaaaaaaatatatatatattatttgaacgtaaaaatataaatattttacaaaaaaaattgtgtcttatgtaattattccttattataacttacactaaacatgaatttactcttttaaaacagtttcaggcactaaaaaacaattttagtttcattaatttgggggaatatatttattaaaaataaaaataaaacttgtctattttaacaatttcactaaataataaaaatatattttaacttatctggaaaaaaaaaaaaaaaattgaaatgtactcatacagtcatacctattttttagtcttaggtattttgagtgtaaatttaactcccatttttctatattctttttttttttgtaaaaaaatttccagaatttttttttctttttaaaaaaatacatatcttatttttgtaaacctaaccttattttttttattgtaacctatacctttaaacgacttttcaaaaaaaaaaaaaaaa

SEQ ID NO: 151648 - DNA, 664 bp, Cannabis sativa
  modified_base (262)..(264): a, c, t, g, unknown or other
aacacaaatttaattttctataaatatatatatatatatatgtggcgaaattcgaaatataatgttttttaaaaaataaatacacttttgaaatttacataaaataaaataaattttaaattttttttctaatttatgttggtccaaaattaattttaacacaaaataattttcctatttaattaaatttttaagaaaaatatcaaatatttaagtatcttgaataaatcaacttaagtattaattttctatttaattaaannnaactagaaaaataccacaagtatacagaaattaactgtctagatacttcattagctaattacttattttttaattaaaatataatataatttaatctatttattttaataaatcattaatgaaaatttacttgacttaagttgatctaaatttaattaaaattaattttttaactttaatctattttcaaaaatttcaaaatatctgcattaaaaaaatgattttcaaaattaattatgggaaaaagattaataaaataaaataaaatatatttggaaaattattctaatttaagttgtttagaaattaaaatttccatcttaaatataatttcttctccatataaattttctaaaaataactaatatttaagtgtctagaataaatcaacttaaatatt

SEQ ID NO: 151649 - DNA, 607 bp, Cannabis sativa
cttcatctgttggcatcctcaacaagatgcccacacgtgaatgcttgacaacctaactcttcatgacaccatgccatctataagtgcatcccgcaggatgtgactctcaagtcaactatcttaaatatcacccctatcgatttctatatgcatccactttccactcaaccatccaactgattggcacgagcatcacgcccttctagctcccttgatgcactaagttgcaatgatgcaacgctctggccttcatataaaactctatcacccttcttgacctttgcaggctcacatgactattaagttccactggcacagccctctggcctccactgaaactctagcaccatcttaacgtttgcgctcagtcttcttagccctgttggcttctttgatgcattcattccgcaactccatatctctatcaatgcctttgtgtgatttatgcccactgggacttttacaagccaacacaactcgctcgactatctcagggcttctcatctagatcaaataaaattcacatgcaaatgcctcaaagtacgatgatcctctagcggtcgcgacattttcccccttggtctccatgtgcatccctcttcacatg

SEQ ID NO: 151650 - DNA, 953 bp, Cannabis sativa
  modified_base (803)..(808): a, c, t, g, unknown or other
ccatttttcagccatggaaaactaccaagaagaagtgctaaaaacttcattaaatttaaaatttcaagcaaaaaaattcaagagaaagtgtagagaacttacccactatgacgatggagatctcgaagcttccaaggattattataatgctacaagtaatttatttatttttttctttgtaaatatttagattatttcctttctaaatactttatttttcttgtaattaatttttacttgtcaagggaaaaattatcattgggatatgttgtaaaaatatgctaagtaggagaaattatttcttgggtttgaaatgtaattctagtataagcatggcattcttgacaccgtactactaagtcatcaacaactaaattgaagcgctggctgcataggaaaatttctaccgtatagtcataccgctaaaaacttggggggcaaatatttacccaaattttgacaataatgacgtgacaaaaatgatgacacgtggcatgatgatatcgagactgaattgataaagaatgtgtaaagtcatgatcgttggtcatgactgttactcatgaccggttgtcatgaccattggaagagaagtttgacggtcatctttcccctagcttgagaaaggtgactatccctagggggacatggactagcagcctcataatcgggataaacgatcaccacacacctacaggaatcaaaccagtctagggggtatatactactacccctacctcaaatgcaatgatctacacggggttcgtctaagggtacaccccttaccccctaaagggttagtnnnnnnggtacaccccttaccccctaaaggtttagtctaggggtacaccccttacaccctcatggttagtctaggggtacaccccttaccccctaaagggttagtctaggggtacaccccttacccctaaagggttagtctaagggtatac

SEQ ID NO: 151651 - DNA, 551 bp, Cannabis sativa
  modified_base (287)..(292): a, c, t, g, unknown or other
ttttcagcaaaatgatagtttttaatttattgttaggtaatttgcacattgaaattataggaaaaattttaaaaatatttttttttatgatttatttataattttacaccttaaagtttttaattacaaaaaatattttcataaacttttaaaattataaaaataaaatttgcttagcaataaattaaaaaataacgagaaattaatctcacaacaactataaataaacaataaaacaaccataaataactagaaaagtaacctcataacaactataatacaactannnnnnaactataaaacaactaaaaaatgatatattattttcactaaagatgcatttttgtaaataaaaaagatcaaagagtaaatatgaaaatttttccatgttgacgtatttttgtaatttttttttaaatttttggtctattatgtaattttttttcaaagggattcttttataaatataaacaaaacaacaaaaaaattacaaaaatatggttgtacaaaattttaaatatttttttacgatttttattattttatttaca

SEQ ID NO: 151652 - DNA, 922 bp, Cannabis sativa
tttttggttcagtcggccagtgtcgccgatcaacgacggccggcttcgccgagcagttgacttcagtcatctgagagtggttcggctcagtcgtatttgaacgttctacctaccacgtgttctctatggtggctatttgattcaatcactcttccaattatctcatttattaatttactattattaggttgagaaaaacatacatgcagtttcttagtttttgagtcctactctgttttagttttttatttcatttattaattttctattattaggttaattccaattagtatttttggggttagaattataaggagtactttctttaattaattttaaggctgagatcgtgtttataagaagtaccgtgatgattccgagctatgcttctaccaaagttcggaatcatcatggtactatggtagaagcattcaagaaggagaagattggatgtgtttaactcgaaattgctgagataataggcattaaagaagtcttgagttggattgtaactcattcgtgggatagagtcatgttgaaacagatagcttggtgtgtgtcaagcgattcagagcggtatttttatgccttcacaatttggtcttatcgttcaagatgttcgaaatttacttttggctttatcttttattgatttgtgttttgtaaaacgatatgcaaataaattggttcattgcttggcaaaagactcttgtttgtctacaggtcgtgtgcttcagttggaggactgttcctctgaagtgcgttctattgttttaaatgaatttattaattaatagatcttatgatttttttttaaaaaaatataattacaaaaatattattcttaattacatgatataaaaggacaaaattagtttatatatatatactagcaaaaaattacgtgcgaggcacgtatact

SEQ ID NO: 151653 - DNA, 526 bp, Cannabis sativa
  modified_base (38)..(44): a, c, t, g, unknown or other
  modified_base (474)..(485): a, c, t, g, unknown or other
ttcttgttgattagattcttcacagtcttacatactannnnnnnggaccaacttgatgtgtgtgggcaatcactctatcactcaaggtaaaaaaatatgaagtgagaaagagagagatagggtttcggctatgctatagggaaggaggctcaaaattttactgaacgaatcagatgcatcataatctttccccttaagccatcactacctatttataggaaaccacttaaacaggttaagatttattaggcattaaaataatgaagaaattaaatggaaaatactttccctaatggccggccataggatatattgggccccacttggaattttccattttatcacaatctttccttattttctcaaaaatgccatttttccaattctaaccatttaaataccaaaactatttatttaacaattaaaataactatcgaataaattgtcatttaataatatttattaattagactnnnnnnnnnnnnttaattaataaataagacctatgatctcttttcttcacatt

SEQ ID NO: 151654 - DNA, 661 bp, Cannabis sativa
acactggttgagtttttctgaaataagattagcagcccccaagttccaactgtttttgacaatttcatagcacataggttcctttaaccaggcattctcaaacttaaatttcttattcggatgaaacacttgcttaacctcagtttccaaccataatggacaatgatcagaagaagaaaattcaagattgaaaagagatgcaagagaaaaaacctgggtccaaagagaattcaccaaagcacggtctaggcggctctctatccaattatctgtacctctacccttctcccaagtgaacggatgcccaaccaaatccatgtcttccaacccgcagtcttccatagcttcacagaaaccatcaataagctgttgaggataccttcgaccgccctttttctcctcatgatgagctatgttatttaaatccccaagaatacaccacggaagagatgaatccctcgccaagaaacggagcaggtcccaagtgtctttacgctgagcacgaacgggttcaccatagattcccgttaaacgccacctccctttctcagtcgactccaccacaaagtcaatgtggtttttggaaaacccaacaatactaccataatcttgatttttccaaagaaaagcaagccccccagcactaccttgggcttcaaca

SEQ ID NO: 151655 - DNA, 997 bp, Cannabis sativa
tattgcgtgttacttgtttgtattcattatgttatacaaccagttttgagttatttagtgttattagtttttattcattataacaatgttataaaaccgattctattttaattataactggttgttattttatattatttatttttgtttattatattacagaaccgattatatttcaattataactggttcgagttattaatttttattcatagaatcagttatatttttagttatatcagagacatctacttctggtgacttttctagttacttttctgacgacgatgacttttccgtcgacagtgattttccggcaacactaacttttccagcaattttttcgtaccaacgacttttccggcaaaacttattatttattttacaaatatgagatttgtatttttttttataaaaacatggtataaaaaaacccatataaatataaaaaataaaaaaaccataaacctagtattatttatttatgacataaaaatgtaactataccctaaattctcacatttataaaattccccaaaacctaattaactctctctgaagcgtgaaactaaaacccattgaagagtggttggctcacctcctcgcctttcctctctctcttggtcactggttcaccggagctacctcctcgcctttcctctttctctctctctctctccctctctctcagctgtcctgttcctgttcgcattggtaagttctttcgacttttgtctcagttggtattttgagtttcactgttatatacatatataattgtttggattttctcacgggaatgggttttaggggctgtttggtacacagtttttcttactctaccctgggttacccttacctttacacaataggaaaattaacatctctgaaaatgatgtgttttatttaccaggaaaatcaaaacctagcttgaagccctagccgttctccacagttgttcccttccacgtcacttcactgaaccaggtatctctct

SEQ ID NO: 151656 - DNA, 877 bp, Cannabis sativa
atactctattcatcaagtccataaatgtcgcaggagcattggtcagtccaaacgacataactaagaattcataatgtccatacctagtgcggaaaggtttcttcggaatgtcctcctctaagattctcaactgatgatagcccgatcaaagatcaatctttgagaagaccatcttcccctgaagttgatcgaaaagatcatcgatcctaggtaatggatatttattcttatttgttagcttatttaactcccgatagtcgatgcacattctcatagacccatccttcttcttgacaaaaaatatcggagctccccagggtgactcactacaccgaataaaccctatgtcaagcaatccctgaagctgaattttcaattcgttaagctcagctggagccattctataaggagccttggagaccggttccactccgggtgccaaatcaacaataaaatcaatttcccactgcggtggaaaatccagaggttcctcgagaaaaacatttagaaattctcgaaccaccttaatgttttctggccgaatagagtctggccgagtggtgtctactaccatggccagaaaccctagacaaccgtcacacaacaattccttagctaataatgctgaaatcaccagaatccgagatccctgaaccgaaccaacaaaaacaatcggttcttcaccttctggttgaaagattaccatcttcctcttacagtcaatactggctgaatatttggataagaaatctattcccagaatgatatcaaaatctactaagctgatttgtattaggttagcactaaactccctatcatcaattctgattggcatagacctaatcaaccttttggagataactaactctccgccagg

SEQ ID NO: 151657 - DNA, 612 bp, Cannabis sativa
tcctaggcaatccaaccacgaagtacatggaaatatctttccatttccattccagaaggttcaatgggtacagcaaacctgcaggcctttggtgttcagcttttacttgctgacaggttaaacacttagcaacgtattttgcaaaatcattcttcaatataggccacaaaaacatggcattaaggtcttgatacaactttgttgtccccggatgaacaaaataaggagttgtatgagactcatttagaatttccttcttaatatcatcatccataggcacacagatacggttcataaaccataacatcccagtactatcgaatgtaaagtcactagtcttgccagctgaaaccctatctcatgatttcattaagtccagatcttgcaattgcgcttctttaattcgttttaaagagtagattacagggtaatgttagccaactacccacaaaaaactcaattttagctcaagccatctaatttgctagttgcctggagatttgcttcattgtattcatctggttctgacatgtcctacttaagcatcagctacaacattggccttcctaggatggtaaagaatttcacaatcataatcctttaccagctcaa

SEQ ID NO: 151658 - DNA, 512 bp, Cannabis sativa
aaatgatgtgaaactcttttcaactaaatgatttccaatacttaaaaattatacgacaacacttgcacagccaaaacaatgaacaaaacaaaataacacaacacttgaaacaaaccaatctcgttaccttgtacctgttcatttcaattgcacaaatgctcttcaagttggtaaaggttttaataaaacaattcacaaaacaacacttaactactaactcccataaccaaaaagtggtacaaacgagttggtacaatccgtgagaaccaagaacataaagcacacacatgaatagacaaaatgcccccaaagcttaaccaatctgggtaccttgtacctcttaattcataatgaacagagtacaaaaccagttggaaaacatttaatatcagatttaacaaaacaaagcttaactactaactgtcataaccaatttcaataacttctccaataattgatatatacaaaaaatcaaaactgccatagtttttatcaatagtgtatctcattaa

SEQ ID NO: 151659 - DNA, 560 bp, Cannabis sativa
aagagtgttaaccctaactcatgctttcactggattcacaatattctagggtaataaccctagaccgcattaaaattaaactcaacgtactagcttaccgagtctagtgtaattatgccttaagcacataattcataatcctaatatatttatatatctgacatggcatagtattacacaatatatatatatatatattactagggtaataaccctaggctattataccgctcatgttagggtaataaccctaattccggttacaattactcacatatatcatattcaacataaacgccatcgcgcatactctacgtgcaaactactgtcttaccttttgtcctgcaataacagagattccaaacccttggggtgctcctgatcaggtgtcggtaatcctagtcacacaacccgggatttcacaactagggttaatccctaattccactttcataatatataatcacggcattcaaaatacaaataatcatatatatctcagaacgagctttccaacgatataaagaatgtccgaaacggagtctcgagtcaaaagttat

SEQ ID NO: 151660 - DNA, 761 bp, Cannabis sativa
gctgaattagaacgtgatgcagctgcggccagggagacacaagggacggatgctcaaactcaaccagaacttggagtgagaagaccaggaggcagacctcgtggctcacaaactaggagacaggaaaatgctcgggaagaacaacttggggaaaatgagataccccctaaaaattagaatgatcagccagaaccctctcactgaaatgaagatgggaggcaactgaaaacggatgaatgagaaattcctcatgacaatgagaagaattttaagactcaaatgggagaacataggtcccttgcaagaaatcaccagagttcttcccaaatccatagaggactcgtacaaaccctaatgggggaaatacgacaaaccacacttaggggaaaagagcatagcgtgaagaagcaagcgtgacctcgaggaggtcaagaacagacattcgtccaactcaaaggggagaaagtactcaacgaggtaatgattgagagggtatgggaaccagtaaatccgcgagttactcaaagacaaagtgtatgagtgggacgcgatctgtgagtaaaacgaggtctgtaagcaatcactcttgttatcccaaaattggtactctgatgtggcgtgacatactggtgacacgtggaattgaattcacatgcctgctattgtgttatttttcacacgcaagtgcacgtatcgtgacaagtagtaaactcactaagagtgaggtcgatcccacgtggattgtagttaagtacgttaaa

SEQ ID NO: 151661 - DNA, 532 bp, Cannabis sativa
tttgtgtattgatttggatgtatttatattggtttatgtgttatttgatgaatgtatgtgaattacgaaatttttctatgaaaataattttattttcattctgaaaatattttatttggattaatccttttgaaaaaataagttattttggtttttacggaattcgattccgataaaagttgagaaagtcatggttgtttgaaaatcggatgccatgggtgtcgaagtatggtgctcgcacgcaccaggtacttcgaaaaaggtgggagacacgcgcggattcagacatgcattatctgaattcctcgatcaggtgccttcagacacaacgccatgcgcccaagaccttgcaattgccgagaaaactcagcgcccacccttgccatctctcacctacgcgcgtagaacaagctgcttgtagcctgtttctcgcccaaggtgatttttttgcctcgaaaaatccaaattttgtgggatttttccccaatttcgaatttttgtaattttcaaaccctaatttcaaaataaaata

SEQ ID NO: 151662 - DNA, 633 bp, Cannabis sativa
gctcttttaatactctattcatccctgttttctcctattacattttgcgtctcattattcttgtcattgataactgatttgtgattaaaattttagttgttttcgattctacacattagttctaatttttccacaaatcaaagcttagtatcgatcaagaatgcagaatcaagattctttttgctgcaattcttgaagaaatagttagtcatcaatggcgagattcgaattagagaaatttgatgaaactggagactttgcgctatggagagaaagtttgaaagggatcctagtgcaccagaaggtctccaaagttcttggagataatgagttattggctaaaaaaaaaactagaagaaaaagcaaaaattgaggagatggcgtattacacgtcatgtatctatcaaacagtgttcgaagaaaactcatcacagagaaaatagggaaatgagtatggaacaagttggaagaattatacttaaagtcatcatttgctagcaagattaatttgctagaaagactatacggttttaaaatgatttattccctttctttacatgataatattgacaaatttaatgagattattgtagaattggctgatataaatcataaggttgatgaagaaagcca

SEQ ID NO: 151663 - DNA, 561 bp, Cannabis sativa
gatccggatctggacccagggcttggacaaaacccgttgttggtgtttggatttgggacccagacctggacctgaaccatgacaaggaccctaacgcacacgcggacttgaacctagtcccaaattaaaaagttgacccgaacccgtaccctgtgacacaaaattggaacaaaaactagaagttgaccaggactgtaacttggacttggacttgcaatcataaatgaaattggacatagatccaaaaccgtaaccggacaaggacttggactccaaattagacctagacccgaattgggagccacacccggatcccaacccaaacctcgacaagggactcgaacccgaacctgaacctcagacccaaacatggaagtagactagggacacagaaacagggtcgggacctagcacccccatctcgatcccaaacccaatctcagaaatggacatgggacctgaaccagaaccagaccgagacccgtcacagtgatccagatcttggctcaggcttcgggtaacggtgcctggaatagaccagtagtcggtgtctagatctgg

SEQ ID NO: 151664 - DNA, 549 bp, Cannabis sativa
  modified_base (493)..(496): a, c, t, g, unknown or other
tcagattattggatgaaatagagaagacttgtaaaaagaacagagaaaggaagaaattggaaagagcggcaatagaaatttgaacaagaagaagtcatggctgacaacgccaataatgacaacaatggaggagttgtagaagaccaggctaatggtcacaacaacaatgatcgtagcgtgagggactatttgcttcctaccttggcaggggccagatcctgtataaggcacctgctgttgacgccaacaattttgaaatctaaccagccatactgcagatggtccaatcttcagtccagtttgggggactgccatcagaagacccaaacatgcacctcgccaactttgaagagctttgtcagacattcaagatgaacagagttagcgatgacgccatcaggctgaggctattcccaaactcactaagggagggaggcaagagttggttggtatctttgccatccaattctatcaacacttgggaggaatttgnnnngaaattcctttccaaattctttcctcctacgaagattgtcaagctgagagctg

SEQ ID NO: 151665 - DNA, 537 bp, Cannabis sativa
aatacatataaaaagaggtatgtttcaaataaatataaaattagaggcaaatttggttaattgattaataaaaaaggcatttttcaactcacccatgaacaatcctaagtatgatatatatccaatccagctttatatcacggatttgtatcaactctcttttttttttttttttaagcaggctaatgtagaatatatagttaaaaacttaaaaggtaaaaatatacttaacaatatttacagctttaaaatattttaataactaaattaaaaatgctatttatatccttaaatttattttttatatatttaaaaatttacaaaaataccggcagaaattacttttatattatcttggttaatttttttttcttttatactgtaaacacacaaaaaaaaaatgaggccttctcatctacatctacggacagaactaccacaagaacaccagaacaatcagaaaacaaccattaattctggtgagattgagaaaaaaaaaagtgaaatcgacgccaaataaataatcatggcaaaaca

SEQ ID NO: 151666 - DNA, 602 bp, Cannabis sativa
tattttcttaaattatacgagatcgaatatataattacatcactaataatactttttaagaattctctttttccttcatctaattctaggctggatacatacaacaacttgttattcttttttcgagtagactactctatagagtatagtttatacaacgtgtaataatttatatttgatttgtctggcaaatggtggacttttagtattaactagctacattaatatgatgcaccagcctgttttagaatcccacgttttttaggaatgattttaaaaaaaaacaaaaataacaaaaaaattataaaattactgtatggacaaaatttttattatttttataattttatttacataaaatacagttttttgatatgttgtattcttgttattttattcttaattttatttgtatactttttttatattgttttgatgttgttttcttattactttcatgtaatttttttgtcgttttcttgtatttttatagaatactgaaaaagtatgtccaaacatatcataatgaataaaagtatacttagatcgaaatagttgaacaacaccaacaaactgtcaagtagtacttgatgtaaaatttt

SEQ ID NO: 151667 - DNA, 1488 bp, Cannabis sativa
tgggtgcagcggaatataatgtgtaaagactgcctaagatcaacagtatggattattaaataattagggtttaattataagatttaaatattaactatagtatgcatatggtgaaaatgagttgatacaattaattatgctactttgtatatattcctcgttgctctgttgtgttttgcaagcagtggaaagtgacgttgggcccttagagagttgtatttatatacttagaatattattatcggggtatcattgttgggtattggaagtgttggaatttttggggtttggaaaaaataactagtttacccttgggagttagtaactattttaatttagttaagggcaaataggtcttttccttggttatttatttggactctagtggactttgggggggctggttatatcttttagtaagataaatatgatttaaattaaattaagaaataagagtaaagtaaaaaaagttgaaggaaaacctagaaatttctaagtctctttccctctctttcgaacaccaaggggaaccagctgagaacttggatttttcagctcagttcattgtgattctagttgagttgtgagcttcaaccgaaggtatattgccctagccttatcttcctttgatttctttgcgtttttattagtctatgatgcaagatttgggttatatagtactgtggtggtaaagtttgtttaattgtgaattctaaagttagtctaggtttctaaatgttgttctaatctgtaatggtaggtattgatgtggtttgtacaagttagaggttagagtgttcatctttagtctctaatggtgtttttaaatttggagttgtttatgatgttctattgctttatttgagtttatagaggtataagtaggtattctggagattattgtagagtttggggttgaattggggtaaggggaacatttttcgggttccgagctcagaaccagaattccagttcttgggggcctgtagcaaccagtcgaccggttggtaccaggaaccggacttccggttgggaaccggtctgctgattgcggtttttttcccgagccctagtttttccaattgttatgtaatttagggtgtttgcatcctatttatcgatagggttatccttagttttaattttatatccccgatagatgttttagcgtgtctctcattgaattttaaatattatagtttagggccctgtaaagcgtcgagctacacttccagtcaggctgaccggcacccctgagcacggagcgaggtaagatagcataaatattacatatatgtgaatgaatgcttatttgtatgtttgcactactaacactaatatgtatgtgttttaagaatgttagtacagtgtagataatcagtagggttacagtaaaaaaggtcgaccctatactagtggatttgggcctcacttattgcaattttgcagttttatcttttctgcatctgattttctcaacaatgccaa

SEQ ID NO: 151668 - DNA, 914 bp, Cannabis sativa
ttatattgtggttagcctttcaaattagacttaagaccaaggacatattgtagaaatttcaagttgttaatgaggctgtttgcagattatttttgcagtaggatgagtcaacaaagcacctgtttttcagctgctcttactcactggtttgtgtggaaaaaataaaggaatggctgacatggagggctcggaccacaaaattatctcaactggtaaaatggattcacaaagcaaaaatcaacaagtttaaaaagaatgtgatggcagcagctatagcgaacctggtattctcaatttggtatgcctggaatgatcaattgtggaacaatcatgtagaaaatagtgatgtaattgtacaaagagttaaaaacaatgtcaaacatagaatagagatgttttggctaaaaaaagttggccaacaagatgctctttgtaatagattgtaaatgtttgtggaatatcaataaacttgctaatttatcaaaaaaaaaaaagcactaatatattttttcaattccaaccacatcactaaaaattacacttataaattttaattctttgttattttataattatactaataaaataagaatattttaatgttaaatatatataattatttagtttttcttcttaaaagtattatttaattattaaaaacttttttttaaaaaaaaatagtgtagtctacaatgggacaatgtagacaaagtagtttatgagtacaactttagtgtcccattggaataatattttgtgaaactacactctatttagtgttttagagttgggttagagatgaataatgaaagaaaggaaaaagaatcacagtaaagtaaaccgtggacagcaaaacacatggtcaacgtgaagacttagactataacttcattatgaccgcttgggcaacaagt

SEQ ID NO: 151669 - DNA, 763 bp, Cannabis sativa
cgccattttaggttgagtactcgcacattttccgtttatatctttattatattatttaatttggtgttgtctaaattccttcaacgacatcaacctcaaagtgtaggaacctttgtccctccacaaccacatggaaagggaacttcaaggcgccaagaaaagcgccttatgccacctatgccagaagatgagggacaagtccaagatttcctcatccccgtctagggagcggccaccattcagatctgtacctgtcgatgaggtattataagaaagtgaaactttgcgcgcccagttggcagaaagtttgagccacaacagagaactccaagagcaagcccaaaggcatggagaccaaccccctgtaccaagaaatccttctccacctaggagaagaaggggtcgcccaaggataagagatgctcccatgaataatccaacaaggaggggggaccatcaacctttacccaatgttggagcccatgcaagatatgcactagaaacccatgtaccattacatgggagtggtcatgaaactcatcggacacaaactattcctcctagttgtgaaaataataacatagataaagaggaaatgagagcccatccttctccaattcgagcaccactgtcacctataaggtaacccgatccaaaatttgtaccacttcggaagagccaaggcggtccacctcccgtggtaatgtgccacatgctcaaccacctagagggcataggcgacaagtatgtttattaacaccct

SEQ ID NO: 151670 - DNA, 592 bp, Cannabis sativa
  modified_base (369)..(370): a, c, t, g, unknown or other
atagactccctcttattatatgcctcaagcttgatgtattctatcttctaatcgaatcttgctgaaacttcaagtgctcgaactcccttcgatctccttgaagagcgcttgcttcctcgcgatgcaatacttaaaaagcaatctcccgaaagctttgaataatcttctcccgaaggtggcactgttgttcttcttctttgtacacttgaatacagactcaagacaatacaaaatacaaataaacagagtaagagtcgaaaaagctattctctacaaaataaagactctttttttttaaaaatatgagtgatgtaacaccctaactaatttaggcatgttagcgtaatttttaacgtactgtgcagctcnntgctaatcaacgaggttatcgaaaatcgtgattaattaaaattttacttatttaattaaaatcataaagttacataaatataaaatttcaggatcccgttacaaaaatatttacaaaagtttaactgtacatatacgaaagtctgtcgcctagcaactacacaacaaaagccctgatgtcccaaagatcgtacgctccaggcctaatcgccccgatatgtac

SEQ ID NO: 151671 - DNA, 882 bp, Cannabis sativa
ttgctgtcggtgtcaaaaaagtcgacaaagtagctgctggtgtcggaaaaatcgccagagttgctgacggcatcgaaaaagtcatatgaattggtattgtcgctgaaaaaattatcaagaaactgaattgacatctgaattggtaattttctagtaatttttcgaagaaatcagttttttagtgatttttccagtgacaatgccaattccgatgacttttctggcaccatcagcaactctggtgactagtctgacaccggaagctactccgacgatttttccggcgccagtaataaacttcagtaatttttttggtaccaataacaaataaaactgcctaaataaataaaaatattaaatatgagctttaaaaacctaatttacatatatatgacacatcaagtaccataaaatatctaaaattaaaaaaatgccatataaattagtcaaacttaaaaataccatatttaaataaataacttttaaaatcctatagtaaatataattttcttttttgttatatgatagtgtatattataattattgaaatattatatgaatttttgaaaatttataaataatttatattattaaaaatttgaatggattgtttttattaaaatattaaaaaaaaataccagtcaacccaccgtgctgttattgataaagcaattactattattttttaagaaaaaaaattggctgtaaaagaatatactaatatcatgtgtacaatttcttttcttaattcttattggcccatttaacatacccatgccatgaggtaaattgaagggggcgtatagtagatatcccctatatatatattaagttatcaatgaaatagaacagaacgaacgacgaacgaaatcttcgttctcc

SEQ ID NO: 151672 - DNA, 656 bp, Cannabis sativa
  modified_base (594)..(597): a, c, t, g, unknown or other
gtggaagtgggaggatatcaccatagactttgtggttgggttacctagaaccacagaattgcacgattcaatttgggttgtagtagatcaaatcacgaagtctgcacactttctaccggtaaaataaacatttatagtggatcaatatgcagaattgtacgtgaaagagatagttagattacatggtgtgccaaagtccattatatcggattgagattcgaagtttacttctaagttcttgtagagtcttcagcgggctatgggtaccaaactaaaattcagtacaactttccatcctcagactgatggacagtttgaaaggacaattaagatactggaagacatgttacgagcctgtgtaatggattttgagggctcatggagcaagtacctgccactgattgaattctcgtacaataacagttatcatagtacaatagggatgattccctatgagttattatatggctgaaaatgcagatctcccattcactgggatgaaacgggagaaaagaaatacttaggtctagaatcagtgcaacggatgaatgaggcaagttatgccctaggtttacaggacctttcgagattctnnnnaagataggtcaagtggcatatcggttagcattgcctccagcgttatcagcagtgcataa

SEQ ID NO: 151673 - DNA, 1063 bp, Cannabis sativa
  modified_base (602)..(629): a, c, t, g, unknown or other
tcatcccacaactcgccccctacggttaatggatcagtagagatccctgcttgaagggctgtaagttgcgtgctttcatccaaattcctaaccttagacagatccgtgctaaaacgacttaagtatgccttaagtgtctcaccgggctgctgctttatattggttagcgaggccgcttcggttcgtctatccctagtagcctggaattgtttcttgaaatccctagatagatgctcctaggaagttattgaatgatgagtaaatttgttaaaccagctactcgctgctccaacaagcgaggtggggaacaaaatacagcataacttgtttgtcacattacttgctcgcattcttgtattaaagttattcaaatgcgagatcggatcagtggttccttcatatgacgagacatgtggatttttgaatcccgaaggaaaaggggtattcactatttataattacatagtggtcagttaattacaaagttgaccgtaatactgtatgtttacaacaatcatccctaaaatcatgggatttgactacatatcacgtagtgtaaatgtggtttatgatttgaaaaccatatagctgtgattttctcnnnnnnnnnnnnnnnnnnnnnnnnnnnnttaaacacgtctttaattattgtttctggagttgtctcgacagaaacttagttccagtgatctcaatagtgagctggggccatttttccttctgaggtcgacgatggatgtcttgtgtcgatcgcaatttttatttacaaagagttcttcgaagctcatttgaatgttacttcttgactttctaaggttttgagcctcgctagcattgacgggatgaagttataggaagttttcccatagcgagacaggcacctcgcttactttgtctcgagccgatccaacacttagtttgtacaatatgggcttttgcaattgatatatgtcgcttttttcttccaatgtgtactgtccttgatacctcgcaattcgcattcaacgacatatagtttctcgctaacatgctaattactagtttgtatattaattcctcgcct

SEQ ID NO: 151674 - DNA, 1039 bp, Cannabis sativa
  modified_base (104)..(111): a, c, t, g, unknown or other
  modified_base (711)..(711): a, c, t, g, unknown or other
taggaatgaccttgactctcgacttaaacgaaactacgtaggattctcttttcaatcaaataaaaggttgctagaatggtttctattttagatgagttgactannnnnnnnaatgaatgatatctttgactctcacctaatatgaagcactgtatcagtttgttagaaaccttggaaattatttaagatgtgtttgttttgtattttcacatgtctttataacatgttatatatttgataaattctgaatgtgtatgaatttatattgaatcatgtattttctatttttaatgttgtagtataatttcgaatcttcattgttggtctaagttagcttgttgtttttaatgggacaaaccccaaaggactgtcctctgttagacaaacaaaaaagtgttagatcttgacagataagtatttgttaatgcaacatctagttgtacatccaaagatgacaacttagactagtgtatacaatatgaaacaatgaagagatttattaaaataagaataactttgactctcatctaaacgggacatcgttggattcttattttattcaaaatcttcttttagtttttcctgttagctttttttttaagactgcttaaatagtatatcattggatgaatagtttataaatcatctgtttataatgtcattttattttcttctatgaaactgaatggcacaaatgactatattcccganattctatcctgtaatgatataaatcctcaatcatagaatctcatacttatatatgcttactagaggcaacttaaacataaagttagattagcaatggtggtccaagctagaataataactgaagaattatttggtagaaatttatgtctttcactttaaattttagatttcaagtagaaattttaaatttcagtttctagaatacattagacaatatagaatgactttcacaagttgttaatatcaattttctctcaatggatccaaactgtatgtttatgtatagaatatgagttttgtattctatgaccaggatccacttggacta

SEQ ID NO: 151675 - DNA, 698 bp, Cannabis sativa
agggttgttgcaccctttaactctacctgggtagaagtgggaagatatcacaatagactttatggttggattacctagaaccacaggtttatttgattcaatttgggttgtagtagatcgatttacgaagtctgctcattttctacctgttaagacaaccttctcagtggatcaatatgtagatttgtacgtttgagagattgtaagattgcatggtgtgccaaagtccatagtttcaaatagagatcggaagtttacctctaaattctggcagagtttacaacgggctatgggtaccaaactacacttcagtacaacgttatgttacgagcctgtgttatggatttcgaaggctccttgggtaagtacctaccgttgatagagttctcatacaatagcagttatcaaaagtacgataggcttccctatgaattgttatacggtagaaagtgtagatttcccatttcactaggatgagacatgggagaagaaatacttaagtccgaaatcagtgcaacggactaacgaagcaatttagaagattaaagttagaatgcttgcatctcaaagcaagcaaaaaagttatgcaaattcaaaacgcagaaatgtagagttccaagtaggggatcatgtgttcctacgagtgtctccaatgaaggggatcaagagtttcggaaaaagaggcaagttatgcccta

SEQ ID NO: 151676 - DNA, 544 bp, Cannabis sativa
ataaattgcaggtaaaaggcatatataatccagacgtcttatgggaattttatgtgtagtagtaattctcttcattttagataaggatgtcttgttcaccacagtcaatggtaaaaaatagcctaataatttataatggctagattaagctaaaacaattagaataggccctaccacgaagtgtgcagatggagtagggctttcattcttcctatggaagaaggaagaagaagtactctgaaagatactgaacaaaggtgttgtcataaaatgaaagtaaattttttgaggagtgctaaggagactctcttttgtactctcttttacactctctctataaataagtgacaaatgtcatcttttgagattagtgtatatgtactaaataattagacacaatattattgcattattacatctatgccattacaataaaattatcctaaatatttacttagtgctaaatataaatatatattatcttaaacaaaattataacaccatttaaaataattataaagtatgattagaatttatttaacaa

SEQ ID NO: 151677 - DNA, 583 bp, Cannabis sativa
tttctaaggttcggttgacactgaaatagggaaaaatcataactttttgggtatataggtttaagtatcgaaaataggttcgtgaggaaggagatgaagaagacgaagctgaaaaagggtttttatataatcctatcctatcggttattaagaaataaccgacggcatagggtacacttgtcaattatcacgtgtatcctatgttgtcagttatttcctaataactgacgggatagggtaatataaaaaccttcagaaataaaaatctcccaaccgactttaaatggtatattctaattctatacctacgatttatatatatatattaaaaaaaaaaaaaacctacctctaaatgtcaattttcaatagacgtgtatttttacaccctttagcttcccttattataaaacttgtaggaaaaaaaaaagcctccaaaaggttgttttttagtagtgaagttgtccaatataccttcatcctctacttaagtctagcaaatagtttacattaacttaaggggtttaatggagacattatctataaaagtgggtatattcaaagaatatgaaaatgaaggtaaaaa

SEQ ID NO: 151678 - DNA, 560 bp, Cannabis sativa
aaatatatatatattttgtaaaggtattaattgtactctctgttttgttaaatgataaaatagaccatatatttctaaaattgtataaataggacttgaactgaattttgtcaaaattaaactgaataataatctaatctaaagatgttatgacaaaactggttatattttttgtacctgttcatattaaaaattgttttaaagttggttatattaacaaataaaattgttaaaaattaagctcatggtcctatttttatcattttggaaaatataggatatgttttatcatttaacaaaacagatggtctaattgataacttttgcaaaacacaagatctaaaatggtatttactttttttttttctaatggaagtaaaaacttcattaaatagctaaatctaatattacaaaagactaaagagtggaaggaatagtgctctcaataaaactacgatcaaaccaataataagaatcacgagccaaataataggcagccttgttaacaggtcgtttaacatgataaatattaatattattgaaagaagataataaaagtt

SEQ ID NO: 151679 - DNA, 501 bp, Cannabis sativa
tactataatttaataaatattataaaaagtcattaattatttacaacgcaatatatcggagtaatacttaatagtaatactcttttgatttgcatactcaaattaatattaattttttatttgaacaattaattgtggactttattaagattttttttctttctattatatctatctattctatataaaatgggactatataacataattcttggtttatgagaaattattgggtgagacttttaaaatatttcaaatcaaaccttcctattctcacgaaaacgattcagtttgttaattgtttttaagtattaacttaatttattttttattttttttaaaaaataaattctgaatcaatttgaaaaccttatcaagtgaataaatctcatttaaaaggctaaataatcaatttaatgattgacgttagctagccaataaaataaaattaatattaaatagcttacgatttgtaagctaatatataaatataaataataa

SEQ ID NO: 151680 - DNA, 833 bp, Cannabis sativa
  modified_base (802)..(808): a, c, t, g, unknown or other
agagtgtgtgtgtgtgtgtgttttatctaacctttttctattttttgaaaaatgaaagaaatgccctaagtgtttatctaacatcatagaaatcagattaatattttctaattaatcaacttactcactaaaggacaaaaaccaacttagggcaaataccattttgccctttgcttcaccaagaagcaactttgccgccaaagggcatttccatcaaatttaaaactaccaatattttcgatattcccaatgtccatccaagttgccccactattactaaaatactaaaccataaaaaatgtgactctatcggtcaaacgtcgcgttccactattacagggcataaaatataaaaaatatgaaatttcatatataacataaataatacacctagaatttaaatatatctccataaattcataaattataattaaaagtctaattcgaaattaaaccctaattatttgctaattttcatattaaaattaggcgatctttacaattatccctattaaaaggattttttcctcgtaatgtaacctaaacaactctagatattgagcccacatgtcagactccaactcctaggtggcttcctccaccttactatttctccagagcaccttgaccaaagctatggtcttatttctctaaaatctgaactggttgctcttcgtacgataaatcctactggagctctaggttttcataactcaacacatgagtcggatctgaaacgtatttttcttaacatggagacatgaaatacgttatgtgttggattttattttaccaggatctnnnnnnnactcacaagtatgttatttaacacc

SEQ ID NO: 151681 - DNA, 921 bp, Cannabis sativa
cgtggatcggggggttgtgttatacgaccataaaacttgcgaaagttcttctggccatacccccttacgctcttcgagttttcccttgatagtatgtttgattattttgttaactgcttccgtttgcccgttactctacgggtaggcgactgcggagaacgcctttttcatccttaactcatcgcacaactgtcgcatttccttacattcaaattgttttccgttatccgaaatgagcttgtaagggatgccaaatcgacagatgatggagttatagacaaactcgcacagtttagctgctgtgatggttgctaatgcctttgcttcagcacatttggtaaagtagtcgaccgcaacgacagcgtatttaactccgccttttccttttggtaattctcctatcaggtcgatgccccaaaccgaaacgggccaagggctcctgagagaatgcaagtgactcagaggttggttaacatacgtggctatccgctgacacttgtcgcatttttttacgaagttgaaagagtcttgtcgcagtgtaggccagtaataccctttccgcatgatttttaaggcaaaggaattaccaccagtatgattcccgtagataaccccatgaacctcgcagagtatataattgcattcttccccgtcaatgcatttgagtagcggctcactgaagcttttgtgatataatctcccatcaaagacgacatatcgagcagctcgatgtcgcaattttctcgcttctatcttatcatcgggcaagatatccttttccaagtaagtgattattggagtcatccaagtaaattctcgggcaacatctatctccatcacttcatctcgactcaccgtcgggtgagtcaacacatcaacaggaatcacatcaagcagttcagcttctctagttgaggccaa

SEQ ID NO: 151682 - DNA, 751 bp, Cannabis sativa
attggattggattggatttgagttattgtacggattggatgttatttgaccaaaaaagtgcgtattagattggatgaacaaccctatgtactatatatgtatttttttaaaatttacagttttgattgcttcgatagtttttatgtgggtttctatgtaaattttacttgcaatttaaattgtttcgttggttgctatgtaaatttccgtaaaaatacaaaagaaaaaaaattgcgttgaactgtaaaaatgaagatcttacaaaactaccaatttttttccatttttatatttttactatcatttatacatatatatatatatatttacatatttactgtatcaagttttaaaaaataatgtgttaaagttttaaaattataaaaatactatgtttcagtaaaataaaaaaaaacaactaagacatctaaaaattaattttagaataacttaacaaacatcatggcaacaattataaaacaacaaaaagtcaactataaaataatagaaaaataataaaatattgacttaattgtaatatgcaaaacaatatcaattcctcgacatatttttgaattacgaaattcttttttttttatttaattttgacaattttatttatctttttaaaatactaatttttttttatggaatttattattacaattttatactttcaactttttttctctctcttcctttctgagttagtgccagttaaaatgacaatttattttttagaagttaaata

SEQ ID NO: 151683 - DNA, 585 bp, Cannabis sativa
cactaagcctacaccttctagttccaccaggtcttccatagtgactgctattattcccaaatattctcacactccatgcatctactctatgtctgatctaatgagttcccataatgagattgatcaacctgttggcactaatactgtaccttctccactgcttttgccttctaacagttggtctcccagccaacattctgttttgcatacagatcaggtttctgcaccagatgaaatccctgctgttgctcttagttcacctcagcctactggtgttcacccagatcagtctctcgacttacaggttccaggcacatctgatgcttcagcttctcctaccagtcagtctcttcctggtatggttctccctactgcagacaacgatattgtttcaactgctgttcccacacacacagatgctactcagccaagcacctcaggtcctcatccacacaatgctcatcctatgaaaaccagatctaagtctggtattcacaagccaaaggcctttctagtcacaagggaaccatgctcccttcaagaagctcttagccaacttgtttggaataaagccatgagtgatga

SEQ ID NO: 151684 - DNA, 728 bp, Cannabis sativa
ttttttttttttttgaaaacttcttccttattcttcctttgctgagcttgcttcaaggattctaaaactccctagaaatccttaaatttcctatttaagatcttcacaactctaaaatactgttcttgaactgaaatttccttagacacacacataatcaaatcaatatatcactaacatgtttccatcatgcttttctaattataataagctactaaaacatgtaaagacttactgaaccgtgagtcgagcttatctctaatgatgattgtacatatcttgatggtgtagtagacaacctggcggttctgatactaaaattataacaccctactagtttaggctatagtacttttaataaaaattgtgcacacttttctaatcaaagagtttatcaaaagtaataaaatttaaactttaataaataaacatatattgtattacatttataaaatctgagatcccgtatctacatttttttaactatacataatgaaaagatgtcgcacagcgactacaaaattgtgagccctagttctcacgaagatccaacactccaggtcaatctgtctcgatatgtacaatcttcatctagctcaaaactcactaccgttaaacaatagcttcggctttacttgcacataacatagcatctttgagtcgacagactcagtaagaaaagcataaaacataaatatataaccgacctacgactaagtgcccataca

SEQ ID NO: 151685 - DNA, 623 bp, Cannabis sativa
ctaagtgttggttgctttgcgcggattactgattgctttgctctgggcatgctagcgaggcatcctgcttggattgtttcctccgtggagatactccaagtggatttcacgtgtcaccattatgcgatgccacgtcagagtgaaaaaatttggataacatttggcccccaagtctatacgagacttctaaagttgcgtgtagacttccttcaagctacttctacctttggatggggacacgtgtcaagcgtgactgtccgagactcgatgtgagggtgactgggcaacccttcagtttttggctaataaatgctctaacaattaatatttcgaaatccgattttctctcaccacgactgactactacacttgattattttttatttcccattttcacttttaaggagggaaactgaggcgtctgaggttcctttgaaatgatgacctcttttcgtgacttgcctataaataccaaccagcattggcacataaactcattttcactatccttcttatctaagtgagttcagagcgaagtgccttcatcaaaactgcttgttggattgacgttgctcgaacctagatatctgactcttgaataagttttcgatttcctttatgct

SEQ ID NO: 151686 - DNA, 763 bp, Cannabis sativa
  modified_base (718)..(719): a, c, t, g, unknown or other
tggaaaaataatggaactacaatgagtttgttcgaaaagaccctaatggatcatttttaattaagaaggcttctagggcaactccaatggagatgtagagttggtgatggttttcgaattaatatagtgttggatccgtggctgcggaatgaagataatctaagagtaacttcgaataatcctgctcttattgatcaaaatgttaattaaactacttatggaaactgatacgttggcttgagatattgacttggtgcatgatatgtttaatgaaagggatgctaacttgattcttagtatttccttgtcttctagtcgtttatgtgatgttcggtattagagctgggagagctcgggccatttctcagtaaaatcagtttataagttcttacaattaagcaaagagttgggtgcacatgatgataattccatcttttggaatactctttggaagctaagtgttcctccgaaagtgaaagacttgttatgacgtgctgccactaactgtctgcctacgaaatccagacttcgttctagacatgtgcctgttgataccatctgccctgtgtgcaaagtaactgatgaaaccatctaccattgcttggtggattgctcttttgccaaagtgtgttggcaatagttgactgctggtgttaatttgacggcaattggttcttttgccaactggtttgctacggttctacagcaggcggatggnnagaaaaggaggttgatcgcaatgacatgttgggcaatttagaaa

SEQ ID NO: 151687 - DNA, 526 bp, Cannabis sativa
  modified_base (229)..(237): a, c, t, g, unknown or other
tgtcataattaatcaaaataataaattttcaaattactatttttcccttaaaaatttattttccatagaagttaattctcactcaaaatccattcatcaaataaaacactcatgtagaatgttgtatagaggtgactcgaggatcattgacctacatttcaaagctctattaaatccaagattaccatcaaatctcatcagcagattaatctagtttattaattctatnnnnnnnnnactataaatatagaattacactcttttacaatatagaattatatttacgaaatttttacttgtagcctattgatataatcaatattagtagttctccatctaattattagttcaaaattaaagttggtcaaaatattattttacccttctaattatctctttattccttatgtaccattaaatcaatgtgaacagttaatcaataacttattatacatttggatccaattgttagcactcctagaattaacactctaagggattaatattcaatcgttaagatagctta

SEQ ID NO: 151688 - DNA, 532 bp, Cannabis sativa
agaaggtgaagaagagcaaggggtacttcctgaggaagtagaagaaggtgaagaagagcaagaggttgctctcatgcgcaagcgcaagggtaagattgtagaagaggagccttctaaacgcccccggagggtggacactctggccccgagtcatgactccgggatcccccccgaggcggaggagtatacagtgcctcttggcagtgtgttgacgccgatccccggagatgaggagaggcaggatcttcggatagccaaatataactacgcccttgacgagtatacccgggggcatgctgaggtggaagccttgaacagggtcttacgagaggagttgcaaaacactcttaacgaggcgaacttccggaatttgtgggatctgaatatggaccccctgactgactggttcaaccgtttcctcgggcccaccttggccccctttccctcggtgctgaccagcgagtatgtctcccatctgactcgattcccgcctaaacggtacgctgcctgtgcatccttgaactccgtctac

SEQ ID NO: 151689 - DNA, 556 bp, Cannabis sativa
  modified_base (256)..(264): a, c, t, g, unknown or other
ggcggaggcagacttggctaagaaggaagctgaagaagctagggcggaagctggagctgttcggttggagttgggcgaagccaacaagaagttgtttttcgctcagaagaaaatcaccgtgctcactaaggatctcgaggtttttgaccgttttgaggagaccatcgagatcttatctgctgaggtaaacagtcctcaagatgagaggacttctctgcgagaagttcttcatcggatgaaggaggagaaggatgcnnnnnnnnnggagctttcggccgaggtggacagtttgaaggagaaggtcaatgccttggagacagccggtcttgtgctcttctttgatttttggaaagctaatctccgggccaacttcgactacttgggcgatgctaaggacatgtaccttgagtcctgcgcggccaaagtggcttatggtggaaccgaggcggttgcttcaacctccggtcagactgctgatgctactcgcgttcaaacaataaatcctcctgctccagttggcttagaagaaccgaaccaagagcctgcgactccagct

SEQ ID NO: 151690 - DNA, 571 bp, Cannabis sativa
ttaaataaaactaacaatacgtggctcgcccacgtaacatctacctagtatatatatatatattttaaaaatatatatataaatatgtgtggattggattagattggattaattacttttatatttcaatcaatatccaatctacacaaatgcggttttagatttttcaatccaatctaattcccgcaagtacgatatccaaattaaatttcattggatcgtgcgagttgggtattttatgaagagcatttctattgggtactagtaacgattggttagcgatattccctaaaagttattttcttaagttatttgagacatgctacttaattacactaatagcggtataacaccaaggatagtgctaggtaccagtgatactttttagcaattctcacccctagcgccacattgcactacaaaaaatagctattttttgtgacaattttttagtcacaatataatttttttgtgagtataaatgtgaattttaattacaacaaaaagttatttgtaactacaatataatatttagctacaagttgtcactgatttagttttagtcataaca

SEQ ID NO: 151691 - DNA, 507 bp, Cannabis sativa
  modified_base (49)..(49): a, c, t, g, unknown or other
  modified_base (453)..(480): a, c, t, g, unknown or other
ataaaaagaccgtattttatataaataaaataaaaaaatcgtaaaaatntttaaaatttcgtaaaaccgtatttttgttatttttgtgcatttgtgaaattatcccaatgtaaaaatgataaaaggaaaattgaatatttttggaagatccccttataaaaaaaatattcatgttatgcatagagtttttataagaataatagatttagaacgaaagtttacaattttactgttacaaggatttttttttacaaaaatactatctttttataaaacaacaaaataaaataattaaaataatagtggaataattaaaaataaccgtaaaataacagtagaaatttaacataatacagtacatagtaaaaaacttacacaatattattaaaaaaatttcggcttcacagtacgtaaaaaaaattacaaaatttctagggaaacttacaaaaatannnnnnnnnnnnnnnnnnnnnnnnnnnntactgtcacacggaaatcttttcaaaa

SEQ ID NO: 151692 - DNA, 1220 bp, Cannabis sativa
gatctcaatccaaaatagtcttgcatgtagcaacttcaagaatatctgctttgttattgcctaatggtaagacaactcattcaagatttcatattcctttggatgttacagcagagtcaacttgtgaaattcgtcaaggtaccctattagctagacttcttatgaaaacttcattgatcatttgggatgaagcacctatggcaaataaattctgttttgaagctttagataagaccttaagagatattccaagaacaaggtttgaaagttgctctaaaaaaccttttgggtaacttacaatagtatgcggtggtgattttagacatatattaccagttgtttcaaaaggtacaagagctgacatcgttggtgcttctctcgactcatcatacttgtggttattttttaaaatatatgagctcaatcaaaatataaggttatataatggaagtttaagtgggtatgaggctgataaaatagctacttttgataaatagttgttacagataggagatggttcattatatgatgacattgacagagaattaattaaactttcttctgatatatgcaaaaatttatctcaagatccactgaaattcatagttgaagctatctacccatcgtttttacaaaactacaatgatcctgcatatttgaaagaaagagcaatattaacaccaataaatgaaatggtccatagattgaatgaaatgattatgaatattataccagatgaagagagaatatattatagctcagacactatatgcaaagcaaatataaggacaagtgatgatgatcttttgtatccacctgaatttttgcatagtttgaaatttaatgcaataccaaatcacgacattcgacttaaggaaggtgttccagtaatgctccttagaaatctaaatcaaacagaaggcttatgcaataacacaagattgattgttacacatcttaggaaatggtccattagagcttacattatttctgaaacaaatatcggtgaaaacgtcacaatcccaagaattatcatgtctcccaacaaattgaaatggtcattaaagcttaatagacgacaactttctttagcaccatgttttgctatgacaatatataaagtcaagtacaatctcttaaacatgttgattatatctccctaagcaagtattacccatgatcaattatatgctgctgtctctcgagtcactacaagagaa

SEQ ID NO: 151693 - DNA, 1400 bp, Cannabis sativa
  modified_base (298)..(298): a, c, t, g, unknown or other
aacaatgttcttcacaacaaagtcaaggactttcttgcaggttatggagacaagaggctcgacctcagtccatttagtgaagaaatcaactgctaccactgcgtacttaggtcctccttgccctatcaggagtgccctaattagatcaatcccccatatagcaaatgggtaaggcgaggtcatcatccttagttctgttggtggtacgcgaggtacatgtgaaaatctcttacacttatcacactttttgacaaactcataagtgtccttattgattgttggccagtaatatccttgnctaatgatctttttagataggctctgccaacctatatgatccccacaaaagccttcatgaatttctctgatgatctcgtttgcttctgtcggaagaacacaccgaagtagaggcatagaataacctcttttgtatagtttgccttcaattattgtgtatcgaggcactgaatacaagagttttcgcgcctcattcttgtcagttggaagttttccatcgagtagatagttgattataggagtcatccatgtaggtgaactatatatcatctctacgtcttccttttcctatatacttggctcgcctagcctctccattggaaccaattttaactaatccaagtcgttcttggaggccagttttactaaggcatcaacgttagagttttgttctcttggaattttctcgattttaaagttatcgaatctttccaagttcttccgaaccttctctagatacttagccattttcaggcccttagcctggtattccccgagaaccagatttacaattagttttgagtcattatgacatatgagattcttaaccttcaacgcctcggctatcctcaagccagcgatcaaggcttcatactcagcctcattgtctgacccgttgaattcaaatctaaaagtataatgaaacttaaagccttctggtgaaattaatattacctctgcacccgaaccctgctcgttggatgcaccatccacatataacttccaagtgtccgcgtctcggtgaataggcagattttcttctagagttatccttctattaagaagtctaccaaagcttggcccttcatggatgttcgaggttgataagttatgtcaaactgaccttgttcaattgaccattttatcaatcttttagaaccttctggttttgataaaacttgtctcaggggttgatcagttaacacttttattaggtctgcctagaagtaaggctgtaacttacgagaggcgtggataagacataaaggaagtttttcaagagggggtagctcgtctctacccctagtaaccttttactgacatagtaaacaggttgctggtgctttccctcttctcgtactatagccacactaatcgcgtct

SEQ ID NO: 151694 - DNA, 946 bp, Cannabis sativa
tatttaggatattaatcaacatactaggatattaatcaacatacttgtcagtattaatcaacatacttgtcagtagaaatcaacatacttgtcagtagatcatacttgtcagtagatctaagatcacttgtcagtagatctaagatcctggtaaaataaatttccaacagctggtgcttaccctcttctctcactatagacgcactaattgtatcttccgagatagccagatagaggagtaacgtttctccagctattggttttgccaaaactggaggtgtcgctagatgcccttttatgttctgaaaggccttctcacactcttctgtccactcgaattttttgttgcctcgcagtacatagaagaatggttaacacttatcagttgacttcgaaatgaatctgttgagtgtcggcatccttcctgtcagggcttgtacttccttaggctttgttggtgatggcatgtctagcaatgccttgtttttgcacggttttcttcgatacccctcgcgttgactatgaatcccaaaaattttcctggggaaactccaaaggaacactttttcagatttagcttcatattatacttctttaatattttgtagcattccgcgaggtctgtggtaggattcccactttttactgactttactaatagttcatcgacataaacctccatgtttcgtctgatctgatttgcgaacatctcgttcaccaatcgctaatatgttgccccagcgttctttagcccaaacggcatgaccttgtatcagtagagtcccatgttggttgcaaagctcgtatgttcctgatcttggacatgcatttttgtctagttatatcatgaatatgaatccataaatgacataaactcgtgcctagcagttgcatccactaactggtcaatcctgggtagtgggaaacagtcttttgggcacgcctt

SEQ ID NO: 151695 - DNA, 628 bp, Cannabis sativa
ggtaattaagtgcagccccacctagcttttcactaaagtatgcaaggggtctcccttcctgcataagaacagcgccaatacctataatagaagcatcagattcaatttcaaatgttttagaaaaattaggtaaagcgagtactgaggcgtgagtaagcttgtgtttcagcagttgaaatgcctcctcttatgcttcaccccattcaaaagcaacattctttttgataacttctgtaagcggtgctgcgatggtgctaaaatccttcacaaacctcctgccaaaactagcaaggccatgaaaactttgaacatgacctatagttgagggggttggccactcttggatggctttgatattttcttcatcaacctcaatacctatagcactcacaacaaatattaggaaaacaatcttatcggtgcaaaatgtgcatttactaaggttggcatatagtttatgttttcgaagcacatccaaaactgattgcaaatgtaaagcatgatcatgcaaacccttactataaattagaatatcatcaaaatacacaacaacatattttccaatgaaagcacgcaaaacatgattcattaatcgcatgaaagttaggtgcattagttagtccaaaag

SEQ ID NO: 151696 - DNA, 973 bp, Cannabis sativa
  modified_base (753)..(755): a, c, t, g, unknown or other
aaggaatggcttgacactcaatttgaaatgaaagatttgggcgaagctgcttatgttcttggtattcaaatcatcagaaacccaaagaacaaatccattgctctctctcaaatagcttacattgataaggtgctagagagattctcaatgactaataccaaacgggtagtgacgccttctagacctggtattcgtctatctaaggaacattgtcccactgatcctcaagagaaagaggacatgagaagggttccttatgtttcagcacttggaagtctaatgtatgcaatgttatgcactagactagacatttgctatgtagtaagaattgttagcaggtatcaaacaaatccaggagaggaacattggattgcagttgagcacattctaaaatatttgaaatttacaaggcattatgtgttactttacaaggatggtgctttaaatcctgtaggctataccgatttagatttctaggcttgtcttgataacaggaagtctacatctgggatggtatttactcttaggggtggagcagttgtttgaagaagtgctaagcaaactacaacatcagactctaccatggaggctagatacatagctgccgctggggctgctaaggaattggtctggctaagaatgttcttctcaagacttggtgttgttcctagaatggaaaaaccaatggttttactttgtgacaacaccggtgttatagccaacagtatagagcctcaaagccacaagagaagnnnacacatagagaggaaataccacatcatcagggaatatgttgcaagaggggacgtactggcggagaaagcggatactgaagaaaaattagttgatccattcaccaaaattttgactatagttgcatttgaaaagcactgactgaatttatgattaattgaaatttactgattgttttatgttagtgcaagtgggagattgttgggctttatgccctaaa

SEQ ID NO: 151697 - DNA, 754 bp, Cannabis sativa
aaatatatttaagttgaaaatcagttattctaactaattttggatcaacttaaattagaatattctaaaattaataattaagtagaatcttctatcaaattagttatacagatattcttttaaaaatatttttaaattgaaaatttgttaattttagatcaacttaaataaagatatttttctaattaaggtgattagttcaagatacttaatttgttgtttaattaatttttgaaaataatttaagttaaaaattttatcattttagaacaacttaaataagatattttttaagttttttttaattatattttaatcaatttttaaaattttataattatttataatggattttagaaaattatttttgaaaattgaattaaagttgaaaattaatttttaattaattctggatcaacttaaattatgtaattttcattattaaaatatatagattaaaataagtgattagataaaatatattttaaataatgagctttaatcataaagatattcgatctccattattggttctacatagttcttgttttagtaagattcatccctaatagatggacgttcattagcaatttaacgccgtataatctcgaaagataagtattattgtaagtgatttattcttagtaacgaccatccgaatagtgcctattaagaataggacttacaaggtatgaaataatggtagaagctcatgagataagaatgaccttgactctcgactaaaatgaagcaa

SEQ ID NO: 151698 - DNA, 674 bp, Cannabis sativa
aattttgtcaatatgcgagtattcaaagtgttcgtgcgagtattcaaagtgttcgtgcgagtattcgaagtgttcgtccgaatacccgcgagtattataagcatgaaacagtgcctattcaagtatttcttatacagtatgcggttacgccaatttactggtcattttttatgaaattacccagctttttacctaaaaaacgtaacctcatacatcccccttacaagcattcattcttaaaccccctcatgcatattagaaacccagaaaacagtgtccccactaaaaccgaaaacgaaacgcagaggagattcgaaaactgacctttttgattctgatgaaattgttcccacgattcgcccttgacagcactgtagaatcgacggaaaatccacggagagaggcggaaaaagaaaaaactgcgcaatttatggaagtatttttggtggtttctctgagagagaagaaacaaggaagtttaagggagttgaaggaaaatgagggaaaatggggattttcggttcgaatctggaggtttaaatacccaaatccctcattaattgggatcacgacacgtggtagttggaatacctagagtcacccaatccaacggccaaagatggccacgcctacacagaaaccgaagagttttgtgacgtggcaccataaatgca

SEQ ID NO: 151699 - DNA, 1059 bp, Cannabis sativa
cttactttaaggtctttagctaaataaatattaggtttcaatatattttcttcttctcactttttttttccactacaaattgtataattaccacgcgacaatccctgctatgacttgacatttaacggtgcggtgtggtacctacagagttttaaaatataacttaaatattattatcgtaaaaaataaaaacataagtatttatttataaccgaaaattattaaatttaaatatttatgccgcaaattactctataatctttagatttctttaactttgtgcatattttaatagaatttttttgtaaagactgcttagtttcaatttggcattaacagttaattagagtttaattatgaaattagattaataattacgatttatcattttatggagatttatttgaattcatggtgtactatatttgctatatataaaattttatattttttatgttttcgcatattgtgtgcccgacaatattagaatgcagtgtttggctattagaatcacattttagtattttaatagtagcgggtcaatatagataaagattgggattaatgtcgagaatattcaggtattaggtttgactaaaatacccctagatggctatgagacttttggtgtgagtaagggggtaaaatggtcttttttcctagaattcttttatcctttagtggactatattaagttagaatattcggttttatcttaaagaatttagtagataaacatttaagattatcatttacttaaaatagaaattagacaaaaaaacgtcactttccctctccaagtctttctctttctcgacctcctttgcaaccagttgaagttggggtttttcaacttcaattcagagtgttttagctggtgttgttaggatttctaattcaattcaaggcaaccaagttccctctcttttccctttagatttttatggttttaagcttaggttttcatgcatttttgaagattagggtactaatgttgtaagttttatttaataatattttttatgggtattttatggttaattaagctgatctaagtgg

SEQ ID NO: 151700 - DNA, 544 bp, Cannabis sativa
atgccttatgtttctagtgaagattaggtgacgggtattttcacaaaaggattgtgtaaaaaacaatttgattttctgactagcaagctggctatggagaatatttttagttcagcttgagggggagtgttggaagatcaacattcttaattattattattatacattatagctgtatataataattatgtttttattgtaccatatttttagggaattagtatagggattcattgtatcttcattatttgatatgttctctttataggattattgtacatgttatatatactgctttatattagaaataaaataatacagaaaaaaaacattttttccctaaatctatggactgcgtcactaatgtgggtgactggaaaaatagtatttagtgaccaattaggtgggtcactaaacccttttaatttcactccctgcgtcactgtaggattttaaagtcaaacattgtcagactataaaagtaacatctactctcaaaaagtatcactatgtgtatgcttttttatttataaaaaaaaataat

SEQ ID NO: 151701 - DNA, 601 bp, Cannabis sativa
ttctcttcttattgtcaacttaaaacttgtttgttattttaacatgcatcaatttctcttgagttgacacaactttaaaatttcctaatcacttacaattaactaccattataaagtgaatttatgtaacctatacagtagaggcaacattgctcatactagatacccataactaaattgaaaatacatatttcctgaattttcaactaatagcaattaatcaaagatcattccgtgatcatgaaatttcatttctatgtttggtagagatcttgatgatcttttcaacatacccaaaaatatacctacctcaagtatattctttgttatattgataacccattggtacaaattaccataccaacttatagtgagtctcccgttgatgatgctaatccatcaacatctaagactctcgtgttctttttccatcattatcactaggattttgctccctagttcatatgccaccatttctcccttgcaatcatcacctgtcttcctactgggttaaccactctaaaacttattttacactcaattatataactcgttgtttaataaacaacctactttgtgattcaacattcaccaatcactc

SEQ ID NO: 151702 - DNA, 556 bp, Cannabis sativa
gagaacgtacccctggatttagggtgaacctctataaacgttgtgtctgttttcttacatctctttactatttaatgtttaatctttgatgtgtatgtgtttgggataaatttctggggaaagtaattggtaagatcgatctggtttgatcgagaaggagacctagtttctagggttcattcgaagagaagcagggagagagagagagtttggtttcgcactctcgaaggttctaagggaaattctgagctagggttagctcaattgtcttggttttgtttctgggagaacgacaaatcgttttggtctaaacaatttgtcgtgtaggtggaaacgacttgatttctttgtcgtttgactaattgttgttttaattcttggtcaattttaaccctgtcgttttatagtgacattgagttggtgtaagggcattcttggaaatcaagaaattcctacactaggtaaaactgcttcctccaagtataagtctaactcagacttgtaagtatccacatttgaagtactactaacatacaagtcaaaaccagctaaatca

SEQ ID NO: 151703 - DNA, 1587 bp, Cannabis sativa
  modified_base (88)..(92): a, c, t, g, unknown or other
  modified_base (622)..(631): a, c, t, g, unknown or other
  modified_base (972)..(973): a, c, t, g, unknown or other
agatataaaagatcgttgaactgcacattattctaaactttttccacccctttcagatcaaaaagatctttctattaaacaaattctnnnnnattgtattagaattaacaattatttataaacatagaaatgaaattctaagtgattatgtagtattaactctttgaagagttgaagatactatagaatttgtgtcaataataaaaatacatatacatacaatcattaaaacatataaatataattggtactagcatacacaagataaagtaaatgaagctcgattcataaatgcaattgccaaaatagaaaactttattaataaaattctctaaaattaaaggaattgtctggaacaatatgaaaaatagggaataaattcccaaactaataattgaaatccaaattgttttgaaactaaaacaattaattcaaaatttaaaaaaaaaagacctttatctgcatcttggactatctccacccttctgtccaaccatccgaatcaactcgcaaagatagcatccgagttcaagcagctggagctgtaataagaagaaaaactaataaacatggttagtaggtccataattaataattcaagtggataataattcactaaaannnnnnnnnntataggaaaagaaataccttgtttgtttactagaaatttaggacattggggtttccagtgtcccttttcattgcaatagaagcattttccttttggtgtatcaccaggagtagcagcctttttcttttaactgttttcacagcttgaataggcttattgctattcttccatttcttcttgttcttgggttttgaagtagaggcaaagtttgcctcagctttaatcgccccattaccatttccagaattatgaggtttactccctttcttcttcggtcctccaatcaaattttcatatgtctgaaggtcattcactaacgtgtgaaagtcttgttccttctnnttcatgacataatttgaagtgtagggtagaaaagctggagtcagactattcaagataacacttacttgagttgtcagatccatttcagctccatgattttgagcttcctggaaataacttaccatctggagaaggtgatcacgcacgttctgatgaggttttatccgtgcattgataaatttctttgtcgcatcaaagcgagactgaattgatgccattccaaatagttcagttaactgtgtcatgatttctgcagccgtgatagtgtttgcaaaccttgttttcaaggtgtcaaccatgttagaaagcatgaagtatcgagctttgttgttagcaatctgccaatgctcgtacttctcttttacagctttggttgcattgtcacccgactgttcaggagacggttcagttaacacaaacaagacactttcacctataagagcaatgttaatgtactctttccatttagggaagttagatccactcaacttgttatcagtcaacattgacagcatgggattggtcattgtcatattgaatactacaaataacaataaatagaaatcaagtaaggtttaacacaaaatctcattcagaaattattagcaaatagc

SEQ ID NO: 151704 - DNA, 751 bp, Cannabis sativa
attgcttttctgctaagtgtatgccgtctcatgaatgtgctgacactttacttattttctttgttgctgcagccaggccatggataaactcttggcaactctcgctaaagcctacagtcctgacgcttctccacctctggctgcctcccagttggtcactcccaggaggtcctcctccaatgcccctacaggcaccatcatcttggtggatgaggaggaggaagttgaagaaggtgaagtggaggacccggccgcccttgagcgtaagcaaaagggcaagatggtggaggtggaaccttctaagcagacccgcagggtagacactctggcctcgagccatgactcccggattccttccgaggcagaggaatacactgtgcctcacggcatagtgttgactccggttcctgctgatgaggagagacagaatctccgagtggccaaacacaattacgcccttgacgagtacactcgggggcattctgaggtggaggccttgaagcagatccttcgagaggagcagcagaatactctctaggaggaagccttccggaatccgtgggacttgaacatggatccattgacggactggttcaaccgcttcgttgggcccaccttagcttcgtttgcctcggcgatgactagccagttcgtctcctatctgatgcaattcccgcctaagagatatgctgcctgcgcctctctgaactccatctaccaggtccaggacatcagctctgccatggctgcg

SEQ ID NO: 151705 - DNA, 526 bp, Cannabis sativa
atcttcttcattctctggcttggcttggctcgggccatcataactctttccacttctcaaagtaattgccttacagttctccttaggattcacttcggttgtactaggtaggttttcctaaggacgagttgctagctgagttgctagttgccccatctgagtttgcaagtctttaatggaagatctcgtctctgtcatgaattgcaataataaatctgtttgaagaccagaatttccactagagctttgtttctgaatctgttgttggttatgtgactggttcttatttctctgttgatagaaccctctattccttcgattacctccttgattaaacccatagttgctgttgttttgagagtaatttccaatggcttctgcttcatccattggcaaatcattcaaatcttcttgacattctgagtaaggatgaggacctccacatagctcacagaccacttgagcttgttttacttgaatagacatcaattttgttagggcgtctacctgagttgtcaacttggta

SEQ ID NO: 151706 - DNA, 1271 bp, Cannabis sativa
cgggcctccaatgatgacttgcagcctgtccatctaccaggttgggaggtaataaatcttggttattgtcgtttctctgaccctaatcggtcttgagatacttcagcaagtgtgggttgtttatccttattagaaattcaatttctcgcttcaggttgttccagtcattagtgtcatggccatagtctccgtggaatcgacaaaactttttcatgtcccacttcttgacatctttcttcatgggcctgggcttcttatatggggccatcgactgagttgccatgtaaacactttcaacgtcttcagtcaagatagtgaatgcagtgtactttgcttgattctcccggggagtttgttcggatttgtcggcgaactttcccttcttctaattcccttgcgtgtggtttttgttggaacatttaccacttgagtttgaattatttgggtaatgggggagttgggcggatgatccagtagaaggagctttcgactttctagggttttgttcaccttccgctcgttgaatggcttcttcgagcttgatgaagccttcagcacagtcaagaaaatcactcattgagtctactggcctattgttccttatatccttccaaagttcatcgaggacttcaatgccccccagtatcgcggataactttccatctttagttacccttgaaactttggttgccaccgtcatgaatctcctgatgtatgctcggagaggttcgcctagtctttgcttgacttcaaccaggtctccttgatgcaacagaagttggtgagaggaggagaactgtgcatggaattccgaagagaaggctttccatgaactgaactttccaggggcccacttgaaataccattgctgggtggcttttgacagggtagcaggaaagatttttcaacacacatcccctcgtacaccttgtaaatccatttgcatttcgaaatacttgaggtgggaaagaggatcttctcttcctgtgtacattttccatgttggcgttttaaacttgtggggcaacgccagaagattgatttcgagagagaaaggagtttcgcatgctcggtccagctcgagatcataatttctctttccagccatgtcttggaacatactttttagttcgtcagctgtgcctgtacggctgggttaacctagtcggcattctggttgatttgaatcacatcagtatccttctaagcgggaatttgagcacgggctccgggctgcacgatggtcatgataatctgatcgtctattcctc

SEQ ID NO: 151707 - DNA, 1037 bp, Cannabis sativa
cacttatgtggattggattgaaaaattttaaatccgtctttatacgaattaaatattgattgacatataaaataaccgatcaaatccaatttatacatatttatataaaagtttaaaaaaattatatatataattactattttagtgtaaaaaaataatagtaatttaaaatctaatctatttcaaaacttaatgtatatatataattttattttgtctacatacaattaattaaataaaattaaatattttttttctacatacaattttttttcttgatataaattttttattttatttattttaattttttattagaaacatataaaacaacaatggtttgtttattttgttgttagttatgttagataaaattatttttaataaatattaaataatttaatattgaaattagtaatcaatttaaaataattgcggattggaatgaatttgagttattatgcggatttgattcaaaatatgaaatttgcaaattgaatgcactatgagtaaaataatacaaactaaattagatgaatacccttaataaagttttgggtgattctacaatccactcccttaaaagggatatactgatgcactctctacttgtttcggcatccaaaaaaaaattttagtctattttttttttcatattcatattcatgtagattataactatttaagatattctaaaaaattttgaaaaattcgaaataatttataatatagaaaataatattcaaatagtttattttacactcgtataaaataaaatagtcacgcgtgaaacacattgcttaaacgcaattttcggcgtgttaaactttctgaatttaatttttaaaattttgcagaatgtcttaaataactaaaatttacatgaccattatgaagaaaaatttgactaaaaaaatattgggaaattctgcaatgcacccccttaaagtggatacattgatgcatccttatctgttttagcacccgaaataattttttagtcaaattttttctcatggttatgtacgttatagtta

SEQ ID NO: 151708 - DNA, 597 bp, Cannabis sativa
accaattacagcattgtatgccgattattggtcaattactgcaaagtcagccatcgatttagctactacgggtgcggttattacgacatctagaattagttacctgagggttttccgtgcgagtagctggtactcggggaggacgtcaagtcattttttttccatccacctcggcctgcagagcgcatagctggtcttggattgcagtgtactgatcggtggtcagttggataataccttcggacaccaccgctggagtaaaaggtggaaaatgtcccgttgtggctgccggtgtagatgtttccccggtgtgagggccagtagtttaagggaataggttgagaggtcttacattataccgacctattctgccgttgatgacatctacgggaggcaatttgcttcctgacagtggaacgttcatcattccgatactgatggatttgttgttaacacccccgtttgcttggtttccagccattatgattctctctctaaattagcaggaaaatacttctcgtttcccacagatggcgccaaatgttgttgtaggaatttcacaacaccaaaaataaataataacaacaacaacaataa

SEQ ID NO: 151709 - DNA, 532 bp, Cannabis sativa
aagttccaggtcgtgagttgggtaacgctgctcataatctttcaattatcgagaagcgtaagctatgactttatctgcctgcatcatcacacagcccaaaccctgccttgatgcatcacaatacaccacaaatttctcttgatcatatggcaaggctaaaacaggagctgtaattagtcgttgcttcagttcttggaaacttttctcacacttatctgaccatatgaaccgttggtttttcctagttaactcagataacggtattgaaatcttggaaaaaccctccacaaaatgccgataataactcgctaaaatgaggaaacttcgaacttcagtgactgttttgggtctaggccaattcttcactgcttcaatcttccctggatctaccacaatcccgtcttttccaaaattatgccccaggaaagacacttttgatagccaaaactcacactttttgaacttcgcataaagtttatgatctctgagtcgttgcagaaccattcggagatgttgttcgtgttttgcttct

SEQ ID NO: 151710 - DNA, 977 bp, Cannabis sativa
ctaaacaatcatacatatcattttcaatataagcgccactatgcataatctacgtgctaatcactatcttacatgttttcccacaatatcagagatttcgaatcactaggtgctcctgatcaggtaccgataatcctagtcacacaaatcggggattttaataaatagggttaaaccctaatttcactttcataaaatatttacatggcatttaaaattccaatattcacatagagctcaaaaagagctttccaacggtatatagaactccaaaattggagtccggatcacaaagttatggctatttgaagtttgcaaaaaggatctgcccaaaaagaaaagggcgcgccgcggcatgctaaaatcatgtcgcgacacctcggtttaaaacccagaaaaaccagcaataaaccacaaatttcagcccttaaatcacatccaaacaacactattcataaccaaaactcccaaaccataaaataggtttttaatcatcatacagagagtttaaaacacatacttcatgcataaaattcacaatttaactcaaaaatcagattgcataatcaacccaaaacatgcttaaattcacaaattttaagctctcaaacttgagcttcaactcaacaattttctccaagttatccagcaacaaaaacaatatttaacatgaattttccaactagagaatctccaaaaatctcagccacaacaccacaattaaatcaacaacaaaattcatgttattcacacccaaaccactaaaataaaacatcaaactcaacaacatgcataatcaagagcaccacaccctttttatgcttttctcacaattaaattcatccataaacaaagtttgaacctaagaaaattacctcaaatcccaattcaaaagcaagctcaagattaaacaacaactaagctccaaagcaagccaagatcaagcttttctctccaaaaatcaagtttgaagatca

SEQ ID NO: 151711 - DNA, 574 bp, Cannabis sativa
  modified_base (158)..(158): a, c, t, g, unknown or other
  modified_base (532)..(546): a, c, t, g, unknown or other
aacttaatctaaaattaatactaaaaataacctaacattatgacatggaagacagttgtgattaaaatccattattagtaatggatagtcagaataaggaactaagaagtaaagccaagagagctatggttaaaactattcatatggagtaaccaaangttttgtattacaaggacaagaaaagaaatcttgttaataaggctattcaatggacttaacaaaatttcctgatcctaatattataggtttgagattatctaaacctatggtttgtggtatgccttgtaatttattttactctagtgcaagtaacttactttagtaagatgctagaagtatttttctaatggctaactctaaaggaagtctttgactcctagacatagattttatttatttaaggaacaacttaaactattcaagaaaagataaaggtcaaggcaagaattttcttaggatcaaaaatgagtggtctcaagtatgctatagtatgcattagactagacacctactattgagtgggagtaatgannnnnnnnnnnnnnnatctaggaaaggaacattggaagaaaat

SEQ ID NO: 151712 - DNA, 701 bp, Cannabis sativa
ttttcccatattttgggtaatttttactttacattaccttcatcactacaagtctcttaaatcctattataagggattttttcaatattatacctaaagtagatttcatttacaaaaatacctttaacaaatttatttgcacaaatactgacgtgtcacgtcatctaattttattggttactacaataaatattataaaattgcatatttaaaaaatttctagtatctaagtaaatttactttaaataagtaacatcaacacatcctatacagcagagaagatgtcatttttaaaaaattagtttcttataagttattttataaattagttgatatttgaaaattcgattttttagtaaagaaactaaaagattactattgattttaattattttttctgaccacggtaaaaaacacatatgcttcccatatgttaaaacgattcttttaaaaattagattgcagtgatataatttttaaactcaaataattaccgatgtaacaaaaaaaaaattaacttcttttaaaaaacaaaaaggagaaagagttatttttttaatattaaacctactactttactgtttatggaatgaaagtggccaatgaaaatataattttttatatttttattaattaaataaatattatttaattattttttttaactttaaaatctatctatctatctatttatctatata

SEQ ID NO: 151713 - DNA, 689 bp, Cannabis sativa
  modified_base (239)..(265): a, c, t, g, unknown or other
  modified_base (381)..(389): a, c, t, g, unknown or other
  modified_base (646)..(653): a, c, t, g, unknown or other
gatatttattacttatataattaaattattatttcactaaccaactattttaaaaatttagggttgttaaaaacaacctaaaatatcttttcaaaaatgtaagattcaaactaatttaaaattatctaggtttatttaaattatttaattaaattaaattaaatatttaatatgataaataatttgaaaagaactaaatatatatttttaatataattttctaatcttataatttaatnnnnnnnnnnnnnnnnnnnnnnnnnnntttaaaatagatatggttaggcaattattattttaataataaaatataaacaaataacaattatccatatgtcaaaatatctcaaattaagccttttcaaatttctacaaaaatannnnnnnnntttaaatatttaaaatactatttaaaaatttctaataagtaaattgatataaaatatcattttcttaacttataatttataaacaataaaatatttcactatgttatccctatttttctactctgacgtggcatcacatgaatggtgacacgaggaatccacttggaacatctgctcaggaagcatagcccgagtagaatgcctcgctggcatgcccagagcaaagtattcagcaatccgcgcagagcgaccaacannnnnnnnattcagctttcacatcatgagtcatcagcacaatcc

SEQ ID NO: 151714 - DNA, 516 bp, Cannabis sativa
ggcctataaaagccaccattctcatttcatttggttactttcagcttttcaccaaattttctcaagttttccagagagaaaagaaaccctcgaacaccatagatttcttctttttcttcgtcgttgccaatcgacttttgaccgacgatcaacaccaacacccagttcccaagctttatgtaagttcttcgcatcttgtactttagttttgtttatcgtttacatagcatgcttttactgttcatctgcttttctgggttggatgttgagttttctgggaatttctgttttgagtttcggtctaacgcgttagattcctcttttattttggtgtttgaactatttcttttcatcgtattttttgtcgaggacccattttttctgtacgtaatgacattcaagggttgagagtagacttcgtctcctcgattcttacccttttttctttcttttctttgcttatccgtaatgtcaccatctgtgggattcttgcacccgattcttgtcgaggaaaac

SEQ ID NO: 151715 - DNA, 791 bp, Cannabis sativa
ccatcacttaaggtttatttgaatgaaagtcgatttaagaatcataccgaggagaaagaagtagaagatttcgcctcaatgtagaataccctggaacctacaggagaatttacaaatcgaacattttctttttaagtacaagagtatcagaaaatatgaatcaaacatccacttggttattacttgttgaaattacctgattgaagagatgatggaatcccacagcgcattgaagaataccatggatgagagttctagagggctcttcaactctgttccatagagtttcaagaaaatcatgtatctgtaatattctcttttgttgaaaagctctactgcctcatcgaagctgcgattctcgacatcctcttcatcgtggtcgttcgaaggagagaatcggtagaaagtacaaaaagaatcggtttgtattgggaaggaatgaattgaacctgatgcagaacctgatggaatgaactgaataagaagaagaagaagaaaataagttgggacgatggaatgagagattgagagaacctgatgcagggagaatcaaactcctagcgggtagtggtgcgatttgggatttgggatttagttagtcggttgagactggagaaagaggaaatgcaatggagataggacttgactattgagagaaagactaagtggagatagccaattgttgtctcgtaaagaatcgcaatagggttttcttaaagaagaaagaggaatcgcaaaatgtattttggtttttctccgttaaagttaacagaatattcctttatttttaa

SEQ ID NO: 151716 - DNA, 732 bp, Cannabis sativa
taatttaatcaattactcatgtaagaaaatacatattttgggacaaattaaaatgctatgagaaaaaatttatttatagtgtatatgtaatgttccactgtactttctaaacaatgtcggattattataaaaagtaaacttagttgaataatcatattttcttggtacattaacatggtactctcaaaaaattaaaaaaatatgaagaaaaaattatacaaagccacctatatccttgtgtgctttcctttatattaatatatagatttagctacgaacctttttgtaattataacattttttttaaaagaactttgcaattatattgatattgatatgatgataaaatttagtcatattttttggatcaaaactaattttataaaaaattatacacaaagatatatttgattaaattaaaactacacaaagaaaaggaagaaagtaattattatatatcattattatttaaaattattaatgtatttttttaacaaaatatttatacaattttagttacacttctccttataaagaagagatttcaacattaaatctcccgtcccaatgtcaaaaaaaaaaaacatttttaaaaatagaatattttgtattataacatggtgtatgaaattaattttgttatattttttgttgggactaaaaataatttaatatatagatatagggaaatttgattttctatgcttagaaaatcaaaaaatttgatttcta

SEQ ID NO: 151717 - DNA, 655 bp, Cannabis sativa
ttatgagaagctattggggagcacaatgagaaatcggaagagggtgagcaaaactgtgatggcgactggtccattactctcagaggaacacaagcacatcttgaatcaaccgtatactagacttgaggttaaagatgcaatttttgctatcccgagtttgaaggctcctggcccagatggatacggtagtgcattttatcatgataactgggatttagtgggaactgaagtggaggatgcagtgattagtttcctaaacactgggaaattgcttaaagaaattaatgcaacaaccattacattaattcctaaaagcaaatgcccagatagtgtgaaggactaccggccaatttcatgttgcaatgtgatttataaggctgctacaaaggttatttgttcaagattgagaagaattctgcctgagatcatagctgataaccagagtggatttgttcatgggagatacattgctcataatattctagtgtgccaagatattgtgagacattatgggaggaagaactgtaaaccaagctgcatgatcaaaatcgacttgaggaaagcgtatgacacagttgattggaactttcttgaagaaatgctaactgccttccactttccgcaacagttcattgagcttatcatggtatgtgtc

SEQ ID NO: 151718 - DNA, 636 bp, Cannabis sativa
gttttaggtttttctttatcttaagtgccttgtactattttcatttgaacttaatacaattgtgtttgcttgcatttttattcacaatgtaaacaactgtatgttgatcaaatctatagtacttttgggtttttccattgctcgtaatcttcctatttaagtagttagcgatctaccaaacttttgattttcgagcagttgtcaattttgcctcgttatagcagtaacaatctgcgctgagcaaacttaaatatactttaatgattctatcactttttatatttttaatttgcgtgtatgaatagttatattatctatcaattttctaggttcaagtacttttatcaatgcatcgtgatgcctcgttttgtactttctaaactcgcgagaaccgttagtattcagttttatatgcgagttataactttttattttcctttcccgtcagataggttataaattaaaaattatagttgtttgatcccttcttcgtcaaaaaggttttatcaaggtgttataacgattcgacccctctttcgtcaaaaaggctttgtcagggagttataacggttcgactccactctatcaaagaggtttagtcgagaacctttgaatttaaaaaaaaaaattgaaatg

SEQ ID NO: 151719 - DNA, 852 bp, Cannabis sativa
aaaacacttttattgctggcttgggtaaccattgaatgtcaacttttaactcatgaaagttcttttaatataagtgatgaagaattttctaagaagctaaaaacaaaaagtattaactttagccaaatatgaccatagtgttcttaatttatgataagtactactggcgatttccaatttatgatagaaataggtagaggaaataaagctacacttattagattaatacaaatgttagaattctaacgtggttagaaaaataaccaacttttagaaaactgctatatttgaatgcattttaaaatttaaagaatataatatttggtgtgaaactaaattttttaaaaatatatgtcaagtatagtaattaatcacaatatttattaattaatttctaacttttttttttttaatgtgtggtggattttttttttaaaaatactgtattttttttttaaaaaaatactatatactgtgttaggttttcactgttgttctatgattattttttagttattctacaattttttaattgttttacagttattttataaaaagacagtatttttataaaaaaaattcgtatgacagtaaaattgtaaatttttacacaaagtccagtttttttataaaaatctcaatataaaacaaaacaatcccaacaaaaacgagggacatcaaggccaaaatgttgcccaaaccaggtgcacatattattctataaaaggggcttttctgtatttttatggtttttaagtacaagtttgtaaaaatatggttttttctcaaaaaaattattctatatgaaaaatttagaaaaagttaaagaaatatgaaaaaaataatataaag

SEQ ID NO: 151720 - DNA, 543 bp, Cannabis sativa
acgttccatactagggtatagccactgtaccacatgcactacgtacctcaatgtacgggtgttggtagggtttgttcataccctgagtactctagagtaatataccacgcactcccagtacctcaccgtacttatgctcgtatcacggtactctcagataacatccactataccaatgcactctataccataaccgtataagtgttgatagtgcaaataacattttaagcatgcatatacacttagcatatacatacactcgtatattcatatcatacattatatagagttattacctgttttccgaattcaagtgtgctggccgacctgatcggaaatgcttgtgctagatggatgccctaatcaaattaattgtaacacagatgagtgactcgctaaatcactttccggggacttaaacttgaaactaaaaattcccttatcgataaaccacatagtaataccctaaatatcttaaaattggaaaaaactagggttccaaaaattcccccaaccggtagatcggtcccaaccggaagtcca

SEQ ID NO: 151721 - DNA, 593 bp, Cannabis sativa
agatcctggtaaaataacttccaacaaacgcccctagagcaacacatgtcgaaagcatcgccagtacaaccagtacaatctgacatcggtaaaggccacatagaaaatgtgccacctaccaatctaatggtggggattatcgccatgaagatccatcaagggcattccgtgcgagaagatctgcccataaataaccccaaagatgcacaaggcagagagctttggattcagaggcttggcttcactttccattgtttggctgttaaccttgagaccaaagactaaccctttgtaaaaaaaaaaatgctactgtaaccccattatcagctttagaatacccctactaagcttcctcttcttcaaggggaacacggggattggggtaaaagtccacactttttgtatttgtataaacaacaactggtcgatgagcctaatgaaatggactcgtagactaaggataattaacacccgaatcacgtaaaaatccctcgtttattattttattatttataccatcatcactttcttaagctctaatattatgtggtttccaaaaagctgagtaaatattttggtgctttcgttgagag

SEQ ID NO: 151722 - DNA, 708 bp, Cannabis sativa
  modified_base (294)..(303): a, c, t, g, unknown or other
cgggagccatgtgccaaacacatcctggaagtagagctccccaaaaactttaagatgcccgaaatggaagcttatatcgagaactttgatcccagtgatcacttgtcacggttcaaccgggtcatggcagtcatgtgagtcagcaatgacgctaagtgtctgtgcttcccgcttactctaagcgggtttgcggaagaatggttcaagaaattggaaccaagatccgtgggctgctggaataagttacaaaccaatttccagagacaatttgtcgccgcaaggaaagtcaacctnnnnnnnnnngccttgactaacatcaagcagctgcctacagagacactaaaaaattacataaagaggttccgggaggaagcctcaaaaaccaagaaagtagatgacagacaacagcttgcccttctacaagcaggcatccgtatagggactccattctggaacgaactacaacaagaaggagcttcaaaccttcaggacttccagaagagagtccagaaatacatcaaccttgaaaaggcccaaatagtggcctatggaggatattatcctaccggggtaacaggatatgtgcctggagtccagctctcagatactgtgccagcagtagctccaccgatgaacggcatacagttttctgcccctcccggatatagccaaggccaggccctcgcccccgcatcgtcccattttgga

SEQ ID NO: 151723 - DNA, 602 bp, Cannabis sativa
atggaaatgagaatgggaatgggaatgggaatgggaatggggataggaatgggaatgggaatgggaatgggaatggcaataggaacaacaatgggctgggaatgggaatgagaataggaatccctttcttttctcccttatttaatcaagttctccatttcctaattttagtaatgtaagtaaacaattgtaagggaatcattaacttaccattgattcccattacttattagtttgcatgccattggggttttgtgattttggcgtttggggttttagggtttggggaatgggaatgggaacggacttggaatggaatgagaatacgaatgggcatgggtcggggaatgggaatgggtatggggattgggaatggaaatgggctggggaatgggaacggaaatgggttggggaatgggaatgggttggggaataggaatgggaatgagccggggaattggaatgggaatgagtacaggaatgggaataggaatgggaacgggtgagagaatgggaatgggaatggctcagggaatgggaatcggaatgggaatggtcgagagaatgggaatgggaatgggagtgggaatgagaattggaat

SEQ ID NO: 151724 - DNA, 779 bp, Cannabis sativa
  modified_base (53)..(55): a, c, t, g, unknown or other
  modified_base (199)..(212): a, c, t, g, unknown or other
  modified_base (556)..(558): a, c, t, g, unknown or other
  modified_base (747)..(754): a, c, t, g, unknown or other
caataactcaaaccgattacaatttaaaaaaagaagaaatcagttcctaaaannnctgaaatataaattaaagataaaattagtttcacaataaaatgcttcataacatataacacctcataaaaccggtaataatttttttttaaaaaaaaagcgaggattaaatgtctcggatataataaaaatagaaccggttctnnnnnnnnnnnnnnaaaaataaataacacaaaataactaaaaccggttataattaaaatataactgattttcttatattatatttttagttattgtgtgttattatttgtgttatttattttgttacggagttggttcttttcatatttatgcttcagtattttttaaaattgatcttcaccttttaaaaaaatataatcgattttatgaggtattatgtgttacgatggagaactagttttgtttttaatttatgttttagtgttttaggaacttatttcccctttattttttaattgtaatcgatttaaattattgtgtgttacttgttcttattcattatgttatataacctgtnnnattttagttataatcggttttgagttatttcgtgttattaatttttattcattataacactgttacagaaccagttctattttaattataattggtttaaaatattttgtgttattttatttttattcattatgttatagaaccggtaatatttttattataaccagtttgagttattttgtgttattnnnnnnnnttcattatgttatagaatcggttct

SEQ ID NO: 151725 - DNA, 517 bp, Cannabis sativa
aacagcatgccaacacttagcaatctcgacacttgcatcgtgaatcacagaggaaatccctattatcctgggatcatatcacatagatatggcaagctatccaaatccttaatcagtgtattctgtatttaatgtgtaatcttgccaattatatctatggtaaacagaagggaaacgttttcctcaaagcttatagccctagaaatagtgatctattctcactgggcaaagggatcaaaaaactaatctaagagatatactcagagatatcattgtaaaagatctaagagaagaatcactgcattctttgttcttaagtcaatacaaatcaaggggagtaggctattaccgaactgatcggggctgaacctctttaaaaactctgtgtctttatttatgtcactatattatatccttaatcgcttacaattaagactcattgtcgttagtcaaaagcaaggtcaacattttagtactttcattgagagtgataatctcacaattttaagagagagaa

SEQ ID NO: 151726 - DNA, 554 bp, Cannabis sativa
taacaaggttagacctgtttcagtaacatctctatgctttctctccactctcccattttgttcatgagtgtggggacaaggatgactaaacacaataccctgatcagaaagaaatctagcaaaaggcctatattcaccccctccatcagcttgaacagctttgattggtaactcaaattgcttttcaaccatgcttttaaatttgacaaacatgtcaaaagcttgagatttgacagtgagagggtaaacccaagaaaaacgactgtagtcatcaatgaaaatgatataatatctatagccatccttcgaagggacatgagaaggcccctataagtcagtgtgaactaactcaaggggtttattggcacggctagtagatatgggaaatggcaacttgtgatttttccctaattgacatgcattgcagaatgtaatgttgccagtatgaggaatttgttttaacactctgtttaggaccatattgccaggatgtcctaacttgcaatgccaattatttatatcatttgtattgtgggaaagaaaaacagtaggag

SEQ ID NO: 151727 - DNA, 811 bp, Cannabis sativa
attaaacaaaatcttaataattgaattaacaattattcataaacattgaatttaaattctaagtgtttatgtggtattatctctttgcagagaataatataccatagattttgcatcaaacataaaatacaaacacatacaaacatgataaacatataaatataattggtattggcatacaagttaaagaaaacacgaagctcaattcataaatgcaattcataatgaaaatttcttaaatagaaaactttattaataatctcaaaattgtcataatgaattgtctgcaataatatgaaatagggaataaaattccaaaccaataattgaaactaaattgttcataaattgaaacaattaaatcaaaaataaaaagtagatttcaagcttcatcttcaatcttggacaatctctacccttctgtctaaccatctgactcaactcgcaaggatagcaatccaagtttaagcaggtggagctgaaataagaagaaaataaacatggttaatggatctagaattaatagcccaaggggttaatagttctctaaaacacatgagtttatagcatagacagaaataccttgtttctttaccaaaaacttaggacactggggtttctagtgacccttttcattgcaatagaagcactttcctttttgctttgcattgggattagcagcctttttcttattatatgtgttaacagctttaagaagcttcttgttattcttccacttcttcttttgttgggtttcgaagcagaggcaatgtttgcctcggccttagtcgtaccattagcagtgccagaa

SEQ ID NO: 151728 - DNA, 707 bp, Cannabis sativa
gatttttaaataaagacaaatatagagacaagtcataggtttaagacaatgttttctctaaaatttgtgataataaatttagttttaaaatcttttaattttaatttaatgtttgttcaagttgcttttttaataaattatgcaaatcttttaataacaataagttattaaaataatacgttgcattctaatcgagacatctactttgttggaaacacgattaagatttgaattagaaaaacgagtcaaataatcaactacctaatttctagagcgtttgacaaaaaaaataaaagtaagatcagattaaaaagattgcagcatcaccgttaaccttaaaatatcaatattcagtttcatttaccgtttggaagacacaattgtaaaaattgttgcaacaggttcatttaatctcgtaatttgaacactcaactattgtgcaaagtgcctaactacactaataacaaccccttcagtcgcaagaacaaaattcccaaacatcaacaacgatttgatggcaaaccatcgaagaacaaataagaaccaacaacgaaacaaatcaaaataaaactatgtcacacaagcaagactaaaacatataaacttatgtcacatagataagactaaaacactcaaaattatatcacagagacaagactaaccgcagtagaaaaaattgcatcacaatagcaaaacacaatcccgac

SEQ ID NO: 151729 - DNA, 617 bp, Cannabis sativa
aaaaattaatccaaatttaaattacaatgtaacatgatataaaatttcatcccaataaatgtactattttaatattttattattaatttaattattatattaaattataaactttatattttttttattattttatataataaaattattactttttatattcttaatataaatatttaatttttcatccaattttataattatatctcgcacaatactacaattgatacaaatatatattaaaaatctagtttttgtgtcaaagataacacaagatgttgcatctgatctttattagtaaatttggaaattatttacaaaaaataacttggtttttgtgagtaaaagggatttttacatattatacctttctttctatcttaatatcaaatatatcttgctcaatttaataagttatttctttgccttttatacatattaataacggtttttttttttcatatgtgtatttgaaattttcttttttcctctttttctcactctctctttttattttatattttcttttaggcttacctacttttctttcttttttttatgccttcaccctatgataatttttttatttatttgttcttcttatttttttaatcatt

SEQ ID NO: 151730 - DNA, 578 bp, Cannabis sativa
  modified_base (84)..(86): a, c, t, g, unknown or other
gtcattttattgtgtgagggcaaagaggtcattttgccatatgtgccttgtcatttataaattttatttaaagtttataatctnnnttttattagttattttatgctgaataaaagtatgttaaaaccattttaatatttcttttgcaaaattaagaaaaaccaaagaaagaagcaatttttcattttctctcaagggctctctccctctctcttttcggttggattttgggctgctagggctgggatttttcttggaaattcttgtattttcagcaaccctaagtgttattcaagctaaggtattagttcctttagccttcttgtgttcttgagttttaaggagaaatatgatgatttgcatgcttggttttgtttgttgttgctgttgttaattattgatgttgtctacagaagtttaatcatgtttttttgaatagaataaagctggttgtgatgcatgctaattaacttgttcaagttaggagttttggctcaaaaactatgattttcaaagtgaaagtgaggaattagttgttgtggtggttgtttgttcgtgggtttgatttctgcagttat

SEQ ID NO: 151731 - DNA, 554 bp, Cannabis sativa
ctggagcccgtgctcaaattctcgttcagaaagatactgatgtgattcaaatcgaccaaaatgccgagcaggtcagtccagctatggaggcacagctagacgagctaaaaaatatgttccaaggcatggtcggacagagaaacaatgatctcgagctggaccgagcacgtggaactcccttctttcctgaaatcaatcttttggcgttgccccacaagtttaaaatgccaacatggaaaatgtacacaggaagagaagatcctttttcccacctcaagtacatcaaaatgcaaatggatttgcaggggtacgaggggatttgtgctgcagaatctttcctgctacccttttggaagccgcccagcaatgctatttcaggttagcccctggaaagttcaactcatggaaaaccttctcttcggaattccgtgcacagttatcctcctctcgccaagttccattacatttgggagatctggtcgaagtcaagcaaagaccaggtgaacccctccgagcatgttgggttttaggccctaaataaaactccatttcaa

SEQ ID NO: 151732 - DNA, 984 bp, Cannabis sativa
  modified_base (741)..(745): a, c, t, g, unknown or other
  modified_base (818)..(819): a, c, t, g, unknown or other
aatattttttattataaaatacaccaaaataccaaaatcttagggattataacttgatagttaccaagtttaatgtaatgaaaaacaaatacacaagttttatttttatttttattttttgaattccctcatatactgttttcttaattttcttttcaaatttacagtttgagtttataaggtagttgcagggataagtaaataactcttttttgtattcattaatcaaaaatactctcatgtagtttttttattaaaatatacccacttttttgagttatttttttattaaaatatacccacttttttgagtagattgtctaatatacccttactctctacttagcatataatttacataacttaaagggtctaatagggacatcatctctaaaagtgggtatatctaaaaaaatataaaaaatagaggtaaaaattaaaacaagttaagtaaaatgggtatacaatgtaattgcctcatttgggtttgcaatatgggtttttattttgaagtgtaaaaataaaaaatcttatttttttattttgacttggtaactagggccggccctgaaaatatatgggtcaaagacgaattaaattttggggcctttaaaaatatataaaaaaatatatataaaagaagagtgttatgggctttgaacccatgatcgacattatgtcatccacctcaaccaactaagctataaatatttgtagcttataatacacttaaattttacnnnnntaaaagcctaataattttttttttattttttttgtgggcccccgaaaagtgtgggccctaggcacgggcctannccgcctatgcctagggccggcccctgtaactagcaagtgttatgtacaatttttttttaatatttttttataattttaaacttttaaacattatttttatattattgttatattaaaacaaagtaaaaacaatattattttttgaaaaaaaaatacaaacaaaaa

SEQ ID NO: 151733 - DNA, 642 bp, Cannabis sativa
tatggccttaacatgtaagtatctagatttacttttctttatgttaagctaaagtatgcctgcacttcacttagaggcagatttagtagcttattctaagcgttaaaatttctcagcataagttttttatgctagtttgatacattataaggtgtgggtgccccccaagtgaatatgcagacttacagtctcttggtcacttataattcaccatgtttcttaaaccttgcatgggacttgtcttggggtgctgcctgttgtatgcatgtggaactgaaaaaagaataactttgagaagttaatcttgttagcaagtggtttagacacaataaattgaacttaaagattattttttattcattaattggtctttatttctatgcaacttatataaatttaatctacaagcttacattacacatttttgcttctagatatcaagtggctacctctgctttccttgcatagcagaggccaccattgaagaacagtgagacacctcacccaaagggtcgtgattactagatcttttgcactataatgttgaatatgtagaactgttactttggtgtagtgtttgtaaggtggttactgatagtatttgcaaaggtgctctccattcgagtatcttggtaggagaac

SEQ ID NO: 151734 - DNA, 725 bp, Cannabis sativa
  modified_base (47)..(53): a, c, t, g, unknown or other
  modified_base (686)..(699): a, c, t, g, unknown or other
ctcttggtaagcaaattctcttcttttcctttgaatttttgtaattnnnnnnntgttcatgaaattgttgatgatagcttgttgtaggtttgtgttgctgttatttctgttttttgagatggttttaaggatacttatgtgaaattaagttgaattagaggcttgttgtgaggtttggtcaaggtttgagctttagagctcaaacttggctcttccatggtgattttcatttcagaggttatttcttgactttattgcctataatatgcttattatgatgtgtttaggtattctggaaagtttggtagcatttgggattgattggagaaagttatgggggttggaagattggaatttttcatgttgttctgcctagatattctagttggttcaaggctgtaaaaactgcaattccggttggactgtattgggtaaaggctggtttaagtcttttcgccataacttttcactcaggtgtcgttttagacgttctatataccgttttaaaacttatgacgagctcaacgatatggtatataaattagagaaaaattgtgtattttattttatggtgtctccactacattgtttggtagaaaaaccctaggttctttttagacattagaaaagtgttctagagtaaacacttatctgttgtacgtatgttgttggaaatattttaccannnnnnnnnnnnnntaccatgtatgtttcattaacatcct

SEQ ID NO: 151735 - DNA, 525 bp, Cannabis sativa
tgatctattgacaagttaggcactaggatacaaattctaccatattcttcttcatcccgctccaccaaaagtagggtttaagatcttggcacatcttggtaatactaggatacaatgaatatggggtggtatgggcctctttaagaatctcatttctaagttttgcactacttggaacacaaaccttggtcttaaacaacaacatcccactatctgatactgtaaattctttggcttgaccagaggaaacctcttctcggattttcactaactctgtgtcaattaactgagcagctttagttcattcaaacagatcagattgcagtgtcaagttatgaagttttcttacaacaaacttgatgcttgatctgaccatgtcttctgctaactgaggtgaaatcataatcgtactagttatttgcccaagaccctttcggctcagggcatcaaccactacattggccttcccaagatggtaaaggatttcacagtcataatccttaaccaactctaaccaacgcctct

SEQ ID NO: 151736 - DNA, 841 bp, Cannabis sativa
taactagtggatcatcagtgaatctgcaaaaataccaaagtgaagcaaagcaaagatcaaatctgaaagttgttatcaatgaaactgaacaaaataagagataagcctaacaaaataaaggagttaataagatgagacaatgaaaaaaacctaccagatatggatgatcggcggcacgatcggtgatcggaacctaagcacgaataggaggaggcaaggagaagaggagaccaagactggatctgtgtatactgaataaggcctcattttaagcccaaatactagtatcatcatatataggcccaatattaattttaataggaaaattacaactacataacaaacaaaaattacaaaaatacggtttcacgaaaatttaaaaaatgcagtctttttatgttgtaatcttgttaatttgttgctgattttttgttatatgtatgttattttttgttgttattttaatattattttcatgttacttttatgtagtttttttgttgattttatgttgttttcgtgttatttttggaaaaccgtaaaaatgtaaaaaaacattctttgaacgtaaaaacgtaaatattttacaaaaaatggtgtcttatgtaattatttttacataatatacggtttttacactacatactaaaattttctatttttttttattgtggaacagatttttttttaaaaaaattattatgttttttttttcaaaaatactatatatttttattcctaccatcggactggggaccattttttttttctgcgatttcagagagagaggaagagagagtgggtttcggggtgcgatttttgggcggtccgagagagtggg

SEQ ID NO: 151737 - DNA, 517 bp, Cannabis sativa
ttttctagggcatattgtcgggaaagatggaataatggttgactcgagtaagattgaatcagtgaagatttgccgaggcaaaagtctatgacagaagtttgaagttttctcggtttagcagggtattatcgatgctttgtcgaaggattctctaagatctctatgccactaaccgagctaattaagaaaaatcaataattcatatggtccgataaatgtgaagcaagtttccaggaattgaaacagcatttgataacagctccagtgttagctttgccatcagatcgagaaaagtttgttgtttactgtgacgcatccaaacagggtttgggatgtgttctgatgctctgacaaagttatagcttatgcctctcgtcaactgaaagattatgagcagcgctatccaacacatgatttagagcctgctgctggggtatttgctctaaaaatatggcgacacaatctttatggtgaaaatgcgagatttacactaatcataagagtctcaagtactttt

SEQ ID NO: 151738 - DNA, 580 bp, Cannabis sativa
  modified_base (507)..(512): a, c, t, g, unknown or other
ttgagtttggaaacattttgattaagggtttgatttttgtgggatttctgggtaaaaccggctaaccgattttacactgcctgtaaaagcggttacacggatttggcagcagggatgaaaatcggtttttctcagcttgttgtttcgtgctagtttcaggtttttaggcagtttgttccctgctagtttagggtatttttgtattaagttacagtaggtttagtttggttttaaaacctttgtctcggttatgatttagtgagtcacttatgtgtgatgatatcgttgtgattaagagcctgtaattcgccgagcagtttgttccactcatgttgaccggcacacctgaatttggaattgaggtaagattagtataatagtatgcatatgtatttacatgtttagtgtgcatgttagggagcctgttagattacattagatatgtatgtttgcttcgtaccatctgacagtgtcacatcagtatggctagagtatgactagcgtacnnnnnntaggctgatattatggttgatggtactgtactgttttgctgtatcacatcggtaacgctagagtatga

SEQ ID NO: 151739 - DNA, 546 bp, Cannabis sativa
gcttccctaataattggataatttcttagtcgttggaatgaatggattacaaagtgtgtatataatatatatttaatggaaatacactcatcatcataaatatataaaatatctacgtttgtaatgacattaaatcattacataatatgagaatggtgaccgtcattaaatgagaatggatcatcttaaaaacctttctctatattgaaatgtgagattgattttaatatgagcttaattatatatatatatattgaacatgaaatatcaacttcattgacataaagcattcaaattacaaactggcattataatctgccaggacatcaacatcatgaatgctacgatcagaatagaaacaagaacgtctagccacaaagtgggcgaccttatttgatgatcgtttaacaaaacgaagactaatattaggtagagaggataaaaaaagatttacaatcatgggtaatcagaccaaaaacagaagtcatctgttgttgactgaaaactgcttggacagtgagtaagctatcagtttcaacctctacc

SEQ ID NO: 151740 - DNA, 790 bp, Cannabis sativa
agagaagttttctcaaaaaatggagagaatgatgcctcacctccgagctaagtttggagatttggtgggtgagggagattcagatgatggccactcagtggaatgtgttggacaaaataacagggaaaaccctactaatcctatagcctctgctcctgtacaggacaagggaaaagcaaaagtaggtgaccctcaaaacccttcagctcccgtacctcctcgaaaaaatgcaaatccagccagtaggcctactcaggcgcagaaggccattgactcttctgggcttggatgcccttctgctgtgaaaggtcatgctgcgtagaaaaggattggtacaaaagtaccaaggcccaagggaaggaaaaactgccccactgattctggaaaccaggacagtgggaccaaggaacaatattctgatgacagttggtccatagtagatctttgaaggcatcttcacaccatgtatggaaaagaaaaaagtgaaaaggtgaggccacaggggaatgacctcagattctttcttgccacgtctcaaacattgatgtccatatcatcagggctactttgggtgtaaacgtttttccctcaagtcaactttacatttgtgtgaggtttacttaatgacgtgaactaagccagtttctctcaaaactaccaggtgggcatcaatcttggcaatcttggataattacttctattcttcaagcattcctaccgagagtaggattttgaattctcactccctctgaatagtagaattcaaaattctaagtataaaaggagaaga

SEQ ID NO: 151741 - DNA, 570 bp, Cannabis sativa
actaggtgtttgaaagaacactaataccatgtataattctcttatgtcaaatgatttaatttttctgctggtattttatttctggttctggtttgtttttgcaaaactgtgttctatagtgacagaattacattctgctactatagacttttacagttgtgtttttatttttattgtgtaaaaatttattggcttttgcaaaaacacgatttttcagttggtaacagagcaggacactaaactcttagtgtggtccattaacattgtcgtgtgtttttattcaatatgtcattttttgcagaaggaagttccatttctcgtccatcgttgctcaatgattctaattatccttattggaaagttagaatgagggcttttatcaagtctcaagatgagaaagcatggaggatggttctttcaggatggtctccttctgttgtggtagatttcaaaggtaattctaaattaaattctgaactagaatgatctactaaagatgataaattgtctacgctttacatgcaatatttaatggagtaggtgaaggttatattaagcttatatcttctt

SEQ ID NO: 151742 - DNA, 2010 bp, Cannabis sativa
tctattattatattatattctttgttcttttattaattataaaatcattattattgtattcgtgacttcgtgttgttggctaaaaactgagtcacaaaacatcatattttataagagagaaaaaagttagctggcactaatgtcaaactttatgaaaccaaacaagaaaagttaaataaaaaagtaaaagacatttgctgctataaggggtgttcaaatatctgatatacgatgatccaaattttatagcaatacaaattttctttattcctctcttttgtacttgtttttttataaattctcttttttatagttgacctaatgcaataattagtatagactaacaaataatgatgtaagactaatcaccacaaaaattacaaactcctaaaattttcatttaatacaagaattactcaattataaaaataataaaaaaaaaattattttcactctattataaaataaaatcaattataatattattatagaaattcaaatttcctaaatttaaactaaaaaaatgtaagaaaaatatgtcattacaatactttaaagtaatagtatacttaccaattatactatgataactttgttgtttagattaattatattaattactattaggctaaaccaatgattataattgatatttttttatattgataaattattatgtattttataatatatgttatgccttttcaaaaaaaaaaattaatatatgttatagaatgaaaatatttgttgtagtgaggtttgacgatgtaactggcggttgattatcgatttttcttttttatgaaaatatttaaattaccataattaaattgtacgacatgaatgtaataatattgagaaattttatttacactccaaaaatttttaaaaacacctcattttaatgatttttattttatataaaatttatatttttaattgtataaagttttttgaacttttttcttccaattcatattcttaaaaaattatacctagcaataaaaataaattatattttaaatattatgacaaaaaaattaaagtaaaaaattatattaaattttcttagaaaaaaaatatatatatacagagttagaaaaaaattattgaaatgaaatcaaaataagtattgaaattaacataaaatagtgtgagcaattttttttaaaaaaaaaaaaatattaaaagtaatttctaaaaattattttaagtttatatttttttaataatgggatgtatttataattttatgggatgcaaatagaactccccttaatattatatagggccattatatatacacctctaaaattataactacactccattactaaatttaccccattaaatattaacttttataaccacaccccactttatttgtaaaaatgtattatttagtacacttcaaaatcttctttaaagttctttttaagaaaaaaaaaacctcaaagactaagaagactttctatgatttacttctatgcatttagttgttttatgaaaaatgattcattatatatattgtgttatcaaaaaaaattaaaaagaaaaaaaatgacaaatgaaaagatctaataacaatatccagcatattatatattatgaatcattaaatttttgcaaatttaagcataatgtaaacataaacataaataataagaatcgatagaacaatttttcaaaggtattatttttatatttgataattactatgaaatttcaaaattatctattgatgaacgattttatagtttaaaagtttttaactaataattttttttaaaaaaaattgtaacaatcaaatcagttttttttagtagtggagtaaaaataattattttggttattttactaaaagttaaatatgttaatatattattaaggtgtagttattattattagaaaattatatttgcaccccaataaattataaatacaccccaatttaaataaaaatcttaattaaatttttatccttgtacaaaattaccaaaatatacaatt

SEQ ID NO: 151743 - DNA, 1083 bp, Cannabis sativa
aaatttttcttcaacccataaataagaaaataaagctaaggtattttttttttctttttgctgttgaatctttcttgataaacaaaggcacttgtaaaaaacatcaatgcaaatatttcattaaaaattttgtcagcaatatcttgtatataaaataaaaataaaaaagtaggacaagtggtaagtgtgtgcagcaaatatcgacacctattaagcgaaggagaggaagaaggtgaagaaggaagaaagtaaaattattgtaaagtccttatgaagtagttaaaaaagagggtataaccctccattaagcaggacgtgaataccactcttattatatataagatatacttacatatatatatatttgtatttttttttttaaaaaaatattacaataaatattgtcataatttaattaaaaaaacgaaaataatattgagactattaccattaaataacttgaattagttaccaaaaaaattggtaagtatttattaggcagtaacaaattcataagtgagggttatataacaccttctagtatggtactttcaacagccatcaaaggtatataagcattacagtaccacaagtccagtattaatatcaatcaaccaatttggcttgcatattggtgctaaaaatactattgaataaacataattaaacttgctagtatattaaagtaaattttcaagagtaatataaaataataatattgcaatgatgcatgtttatttactaatattttgaaaatgtaagccaattaaatagggaagacattcctaatatatagatatttcaagagtaacataggaagtaaaaattacatgatttctattgaaactctattatatattttaacataggaagtaaaaatgtaagccaattaaataggaatttaatttactatattttgatataatttcaacattttatattcaattataaatagattttcaaaattattgtttggaaattaaattaaagtctaaaattaattttcgatcaacttaagttgttctaaaataacaaaattttcaacttaaataattttccaaaattaaattaaatatcaaatta

SEQ ID NO: 151744 - DNA, 801 bp, Cannabis sativa
  modified_base (562)..(563): a, c, t, g, unknown or other
gcagtatagttagacattggaaatcccgagaatagtcgagattttagaatttcccaaaatatccctaagtgaccttttatgacttttagtgtgagaagggcaaaatggtcagtttgcctaaatgactttagtcctttagtgaacttattattgggtttaatctgatcttttttaattaaatgggttgagattaattttaataaaaccaatcttttatttcttttatcaaaaataagaaatttggaaaaaaaaaaagcactttctctctctctcaaactctctctctttcgaacccaccttgaattagctagggttcggattttgctcttcaatccttgtgaatttctagcagttctaagagaatctaagcgaaggtaagctccgagcaacttcctttttagttttcttgagcttcaagttatggtttttgcatgaattgggtttttagagttctgtagtggctattattgtttgatatttttttcagaagttaaattatgttcaaatatgttgaattggactggttttatgggctaatattaggtttgagcaagctttgagnnttagaactcaagcttggctctttaatgatgttttttttattatgagcttgggtagttttattacttggaatttttttattggggtataatatgcaggtctggaaggtttggtaaagtttggaattgatttggtaaggtttggaattttttgggatttctggtataaaccggctaaccgattttacaggacctgtaaaaccggttacccggatttgctgctaggttccccgaaaaattc

SEQ ID NO: 151745 - DNA, 776 bp, Cannabis sativa
tatcaatctcccaccgggaatcctgtccgttaagagcgttgatcaccactctcgaatcactttccaaaataagaaacttgaccccgcggtcttttgcttcttggagggccagacagcacgccatcgcttccccacagagagcatttgagaagtccagcttagaagtaaccacccagatcaccttgccaacgtgatcccttgcaaccactgccgcacacatgctatccaatcccactcttacatcacaattcagtttcacccaatccagcgggggaggacgccaaacttccttcggacacggaatggggcaagggagcaagtaagcatgatgatctgcaaaagaaaatcgaacagtgtcaatactttttataatatcagcaggacaattattatgtaccttttcatttcgagtcctccaaatcgtgtcaatgatgatcgatgcatagagaaaaacttcctgttcatttatacctttcttcccaagatcccataaaaattttacccaatcccacattcgaataccggtgtcacaaacagggaaaatgccccaaggagaggaccgccaaaggtggaaggcaaagttacaagaaaggaaaaggtgctccatagtttcagtttccgatccacatagaggacaacactcattctcaatcgggaacctcctacctattatcgaacgaattggaagagctttggatagaatacaccaccaaagatacttgagtttctcagggattttactattccacagtttgttccataaagagggggccacc

SEQ ID NO: 151746 - DNA, 662 bp, Cannabis sativa
aaaataatttccaacaatatattacatatttagaatatacagattgtgggatttggacagcttgccatatctctgtgataagattccaggtttatagggattgctcttgtgcttcacgatgcaaattcttgaattcctaagtgttgatgcgctactcggattatccactgctcggctaggaagacatcgtccgtgcaggtgtatgctgcgccctgctcgaagcatctatctcgagcaaatacggcgaatcaggtccacgtgtcaccagcaggtgccgccatgtcacagtgcaaaaaatgggataacatttgcccccaagtctgtatgggacttccgaagttgcgtctagagttcactcgagccgaccttacatctgaatgggtgactcgtgttgaatgagtctgttcgtgatttgatgtgattctgactaggagtcccttcagtttttggatatttaatgctatgattaattcgtacctcgagacgcgcctttcactcgcacacttttgacggttattcttcttcatcacttgattgctttttaatttttcaatatttacttttgggggggaaatcgaagcgtttgtgttttaattaattacaccctttcacaaattggcttataaatagggttgtgttatgaaataatataaaataatata

SEQ ID NO: 151747 - DNA, 594 bp, Cannabis sativa
taacattcctgggcaacctgttgatttcctcttaggcgccccaccccattctgtgttggaaacttaaggcatgaatgaaatatttacgtgacagcctttaagtcatataaggctggtcggcccaacataacattaaatgctgatggaacgtccaatatcaagaattgtgccattacagttatgctcttcggagcttgcccaacagtgaggggtaggcgaatttcccctagaggtgcaacactctggtcggaaaaaccatacacgagctgaagacagaggttaagtctttgaattggagccccatcttttcatatggtgtcttgaacaaaatatttgtagaggctccattatctatcatagttcgggccaccattttcttggttatctagacttccacgaccaacgggtcgttgtatgggaaattaatcttgacgacatcttcatcattaaatgttatggtgggtttccctacccgtggtatgtttggctacctttcttcgaaggccagaaccacttcttcttgctcgtgctctaatgttcgggcatacctttcctgggctttgcctgaatctccagctatgtgcgggcctccaa

SEQ ID NO: 151748 - DNA, 559 bp, Cannabis sativa
aaatgaggcccaaaacaaaatagcatttttgaagataaaaacaaagcccaagaaggagagcccatttggccaaagccccctcttcctctctccgctgccacgtgtcacgcgcagaggccgtttgcgcctgggccccacacggacagcaccaataggtgccttgtcccctctgcctcatccacgcgcgtgttgaatgcaccggcccctatgggccatgcgtttcgtccactcgccagccacgctgctggccttcgtttggttcgagccccatcagccaaaagccactttccacgtggctttctctcctctcgccacgtgtcaagttgcacaccaaagccaccaatccgagcttgacaagtggccctccgattataattttttgtatttacagttttacccacatgcaatttgtaataagtttaattgcgtattagtccttttacccttttgataaatagaagcttaggtttttagaattcagttacagtttcagagtttcagacagaaaaatccagagaaaacgctcgaggcggttagtgttagtttatcgcttttgtta

SEQ ID NO: 151749 - DNA, 601 bp, Cannabis sativa
ttatacgttatattattttttggtagaaaaaatactcaatatttttaaattgttggacttttatacccaaatttagttaatttactctgaaaaaaattaagtataaagtgaaatattttgaaaatatttggtatatctactccgaaaaaaaattatgtataaaagtgaaatattttgaaaatattagatattttaaccatactttaatcaaatatttattgtatattttaagctgtcaattatatttggggttctttattatacattttaaaatatagtttttttttgtatttatatggaaatacacagagtaaccaaaacagtaacctaaattgcaatgcacattcacttcgcaacccatgcaactaacagaacatcccaaatcgtaaaaaatattaaaaaaaaataatatatgaggtaatttattaaaaaatattaattatatatataaaaaatcaacaataatgtaattaatacttgttggcattctttttttttttttttttttgaaaatatacttgttggcaaaaatgacatcttcaaataatgtttctatgaattcaacagtaaaaaaatttcagttgacttgtatatttgaatt

SEQ ID NO: 151750 - DNA, 588 bp, Cannabis sativa
  modified_base (408)..(413): a, c, t, g, unknown or other
aaggcaaacttggttcctatccaaatcctcgaagagcctagcatcactggcacagaagaaatcgaaatgattgatacttccccaaactggatgacaccaatagccgcctacctcaacaccaggaaactcccagataatcagaatgaagctcgaaaaatgagaatgaaggttgcacagtatatcaagtagagggaattatgtacagaagaggattctcaatgccattgctcagatgtgttactcaagaagaagctgcacgactcctatctgaggtgcatgacggattttgtggaaattatgctgccgggaaaagtctatctaagaaaattctaaggcaagtttatttctggcctacgataattgagattcaaaggactatgttaagaaatgtgacaaatgccagagatnnnnnnagatacctcgagctccacctaacgagttaacttagatgtagagtccgtggccctttgccatttggggaattgacctgatcgaacaattacccatgggcaaaagaggagtgcagtatgcagtggtagcggttgattacttcactaagtggacagaagccgaaccactcgcaaccat

SEQ ID NO: 151751 - DNA, 599 bp, Cannabis sativa
  modified_base (429)..(445): a, c, t, g, unknown or other
ttttcctcaatttcctcaaacaaaaacaaacttttaaattaattcttcccaggtcattacactgacatcccgggtctaacccacaatgtctcagtagacgcgggcatggtcttgtaacataaaggctgcacaattcactttctcagttcccgttacccccatattatcgaggatacgggtaatagtgctcatccactgctcgacctttattttatcaatacctcccagaaaagtcggaggctacaacttcaggaaccgctcaaataccgagtctctatgcgacataacaaacccctggttacccaccactggcacaggtgctggtggtaacagttgatcaacagggacagccagtgctggttgcctcaatcatcacaactcttctgcttgagaaagtatgacacttcgcatttcttgaaacatctgctnnnnnnnnnnnnnnnnnttagcattgccaacccccgcattatcccccatattctacagaggtggaggcggtgccggtggatcggtttgggcagccccaggctctacttgctcgccctgcggtctagatgattgtagagggtccattactaatacccatgtaatcaacaacc

SEQ ID NO: 151752 - DNA, 944 bp, Cannabis sativa
ccgccttgggaagttccctacctgcaaaggttttttcccttgtctgtgctctggctggaggatacttccttcttagccttggccactgcgaggttataacattctcgagcagtctgctagtttcctagtagacatcctaccccattctttgttggaaacttcaggcaagaatgggatatcgatgtgacaacctttaagttatacaaagctggtcggtctagcattacgttaaaggctgaatgaacatctaacaccaggaattgcgccatgatagtcatgcttgtcggagcttatccaacagtgaggggtagacaaatttgtcctagagtaccactccttggccagggaaaccatggacaggcaggagacacggggctggatccttgagctggagtcccatcttttcataagcggtcttgaacaagatattggaagaggctctattatcaatcatggttctggtcacaatcttattagctatgtggacctctacgaccaacaggtcattgtgtggaaatctgattttgacagcatcttcgtcaatgaaggttatggtaggccctcctgctcgtggaattttgggctttcctttcttctacggccaggacaacttcctcttgctcgtgctgcgccgttcgggcatagctctcccgagctttgcccgaatctccagctatgtgcgagcccccaataatgacttacagatgtccgtctaccggtggaggtagcaagtcctggttattgtcgttcctctgattctgatcggtcttgacatacttctgtaaatgcaggttgtttttccttatcaagaattcaatttcccgctttagattgttgcatcgtttgtgtcgtggtcgtagtctccgtggaaatgacaaaactttgtcatctctctcttgctgacatctttcttcatgggcgcgagcttcttgtacggggctagt

SEQ ID NO: 151753 - DNA, 562 bp, Cannabis sativa
aaattgtataacatatattataatatatatcatacaaaatataatttcatcggcacaagtcgccgatcgacataagccataaaatatgtaatgcatatataatatataactataaaagtgggctgaagcaagaaaccataaaacaaaataattgaatataacacttacagatgctctaacaattttcagaataaatatacacgcaattgatacaaaagtaataaaatcaaaagcaattgataacacatatctcttcaatcaatcacatacatcattcattatattactgcataatattaataaaaagaaatcataatcatcaaccgcaaaacattctcatcacagtatatatataccataaagaaatatatatcatttgaagccaaaaactcatataattgaaacattcaatatatgtattcaatcaaaatagtgacgccgactgtgaattaaaattacttgatatgttttataaaaatataccgaaccatatatatatatgaaaattaaaaaaccctaattttcaaaatcttcaaatttcataaacaaaatcatcagatct

SEQ ID NO: 151754 - DNA, 569 bp, Cannabis sativa
gaagtactaggtcttgtaaattttaaatccatcatcccctgtaattgcattttaattctttcagctctgcaggtgccatcctgtagggagctctggatacaggctcttctcctggtattagatcaatctcaaaatcaatttcacgttttggtggtaaccctggtaactcttctggaaaaacatccagaaattctcaaaccactgggacatgctcgcttgtggttccctggtagcatcaactacatttgctaagaaaccaatgcacccctcacacaacaaatctcttgccttaagcgctgaaattaaggaaatttgggatccctgcatcttccccacaaatacaaaggggtcctcgccttcaggtgaaaagttaccatttttctcttgcaataaatagtggcatgtatttaacaagccaatccattcccaaaataacatcaaaatcctccagattcaattctgtcagatcaagtgataactcccttccttccacaaatattggaagggatctcacccacctgcaagagataaccaactccccagtaggcagcaaagtcccaaaacctcta

SEQ ID NO: 151755 - DNA, 562 bp, Cannabis sativa
ctgctacaaatgactgctggagttggaaatatgaaagcctcggacagtactcggttaagagtgcttataaatatttgcaagaaatgaaaggggcctggcctaataatggtggttcggatttttggaaggagctgtggaatctgaaggttccaccaaaagtcagtaattttttatggagggcagctttgggttttcttcctatttgttttcagctgaagaacaggcttgttcctattaattctatatgtcctttgtgtaatgcttcagatgaaacgatctaccatgctttggtggggtgtgattttgctcgtgcgtgctagcatagagttgtggtggacgtgggcagcactttgaacgacacattctgcaattaattgctggttttgttcagccgtggtaggcaggaagagatggaggaagccgcagttgttagctggtcaatttggcgtgcccgcaatgactttgttttgcaacaaaggagccgtactgctgcaaatgtggttgattcagcaagaactctgcttgatcaatacaaatccgctcaaaaaagaaagggtctttc

SEQ ID NO: 151756 - DNA, 584 bp, Cannabis sativa
aataccctaaataacacaaaaaatgggaaaaactagggttccggaatttcggttctgggaaaaaaattcctagaagccaacccgaatttcggttcctacaggcctctctgaacttgaattccggttcagtgcaggcatgactaaaaatttcataactcgaccaaatcaaccccaattcacaccaaaatttccagacctgctctatacaccctagagaacaatttacaagcagcaaaaccaatacccaaactcagaaacaagaaatgtcattgatgagccaagcttgagttcaaaaactcaaagcttgctcctccaacaaaccaggcaacaaaacctgctcaaatcactctacaataccataatatagctacagaaaacataatcaaacaacagcaacaagaacaacaatttaaacaacatttcatgcaaaactccagtttcttataattcaagcaactaaaaagattgaagctaagaacttaccttggcttggatacacttgaattgagctaagatcacctagaattgatgaagaaaactccaaccctagcagcccaaggaattttcgagagagagagagagag

SEQ ID NO: 151757 - DNA, 775 bp, Cannabis sativa
cgcgaactcagaatccccataggtatccccactccttatcctccttactttatttggcctgattttttaaaatgtgctttaagacacttaaatcaaacacctgagccacttttgatagaatttcctgaggatcactcccaccttgcagagacttacccctgtcaccttcccaaaatgaggctgttcgagttgaccattgaggagattgaggcccagaccgcggcccgtcggaagaggcttatgtcgaagtcccctaagcgaaaaagcagggcaaagaaaagtaagggagtaagggttgacgaaaatgctccatcggaactcggcatgtcatctcagcatgactcagccactgatgatgccattggggccttacttagtgctctcctcgagatctcgtcaggctagggcctcctaatcaagaaggtttctctcaccctgagaacctcccggcggctacgctgggccataatccggggctttcatcctcttctcctgctcggactcctacttctctccttggagtgctgttgacttcccaccttgccctttctcctgctctgacacaccctacagccttctcttctggccggggctcctcgcctctacccagtcatcccccgcgggcatcggctgaatgggacgagatccctgccttccagattaaaaaggatgttccgttcgaggagtcggctgaaaaattatttcaaaactctcctggatgccgtcagaaaacctgacgatgatttctacgtctcccacaggcgtgattctattt

SEQ ID NO: 151758 - DNA, 577 bp, Cannabis sativa
aaacttaataataatccgatctaaaagtgttatgacaaaaatagctatattttctgtattcgttcgtattagaaattatcttcaagttagttatattaaaaaaagaatatcgaaaattgagcttaaggtcttattttttaccatcttagaaaatataggatctattttgtcatttaacaaaatagaaggtccagtcggtttgtaaaacacaagatataaaatggtatttacccatcttgtaaatctatgatcatatgatcttatcacatcgataaaaaactatgcaatagaaatcaaataatggctcaggatttttaaagaaatatgattaaaatattttcttcaaaaataatttagtatatattattttctagatatataaataaattcacatatatattcaaataaattatattagcaaaataattatcaataaaaatataatttgaatttataaacatgtataaaagaaaaactaaatgaaattatacatatattacttttataattaaaaaatattaaaatatactttcactttttctatgtgcaaaatatatgcacattcttcttttgagcc

SEQ ID NO: 151759 - DNA, 854 bp, Cannabis sativa
  modified_base (119)..(121): a, c, t, g, unknown or other
  modified_base (518)..(522): a, c, t, g, unknown or other
aatttctttgattagcaaagattgcacattaattgaaaaaaacactgtagcgtgccttagcattagggcgttacaatattagtatagttgtcaacactaaataataataataataatannnataataataataataaaaactaatgtaagttgccttttcattttttttatgtttttgtaatatatagataaatatagatcgatatttatgctagttaaaaaatttaaataattaatattacacacgtatatatataattgattataaaattataataatatgatgttgaaattaaattataagccttttcaggattttctataaaaaaaaatactcaaatataatcactaaacaaataaatttaaagacaaaaaatataagatatgttacttcatcacattaatatctaataattctctaggcttttaatataatgaatttctcaataaataaatattgagtaataactttattttttaaattataaataagtacatcaccacctttaagaattaannnnnaatatagttaaatattaaaaaaaatacaaatgtgtcgttaaataataaatatgaaattttaaaaatatgtatttataatttttttaaaggtaaattctatgtgcatcattatcaaaaatagttgtgaatagtgttaatatatataatgatatattacatcatgcaattcaacacaattttttatgagtgaataagcaatattttttttttaaaaaaaaaaagtatataaaataaagaaaatatggtgcttacctctaatccaatctagataataatagatatcatcaaattgatacaaaatagtaaaagctctcttcaatttttgatagaaa

SEQ ID NO: 151760 - DNA, 601 bp, Cannabis sativa
aacatacacactagcgaagattcgagagccttctcaacttttgttacttcagcattaaaatgcttaaaatagtcttgtaaagactcaccaggttcttgcttgatgttagctagagtggtataggacggcctctaggtcatcgtggcttggaaatgcgtgaggaacaggtcgacaaaggtctcccatgtcgagatagaagcctcaggcaattgactgaaccaattgtgggcattttcttccaatgtttccgcaagaatgcgacattttgcgagcagaggtacctgatccacttccataatagtattgaatttctctaaataatcaatgggattagaggtacctttgtattttagggatttggataaccagaatcccttagggagtcgagcttgtcgcacttccgtagtgaaaggagaggtcccatacaacttttatatgggctttctctgctgctcgagcattttcaaagcctgcaggagtatgctttggtcaatgcccccggctaagggagcagggactggtggggctgcaggggctgttgctattgcagcgaggttttgtgcgagtgtttacaccctgattgcccatttggggatcacgg

SEQ ID NO: 151761 - DNA, 608 bp, Cannabis sativa
  modified_base (312)..(317): a, c, t, g, unknown or other
  modified_base (464)..(476): a, c, t, g, unknown or other
  modified_base (534)..(566): a, c, t, g, unknown or other
tccactatgaaccataccgaatcatacattcccgtggttctaggcaaaccaactacgaaatccattgcaatgtcctcccacttccactcaggaaagggctgctagatgtctgcttggggggaaaacctcagtcaggaagggcttagtacagcccttatctaaataaactcggacacaggcttgtcagaagccgcgtgacccttgtccgcgcgcacatgcgtgttgctctatttaagatattttcatccaaatttagaaaaacataaccaattcataaaaaatctaaattgagttctgtaaaagcctaaattnnnnnnttttttgtctactttccagtaacaatattttcagaacaaaaaaaaaatatttatcaatgtacatagcgatttccataaaatcataaaatatgcacataaacaaacatgaaaccttccaaatcaacacaaacatcgttttaaatccannnnnnnnnnnnntaaatcattaccatggctctaagccaattcttggggattatttaccaggatctagatnnnnnnnnnnnnnnnnnnnnnnnnnnnnnnnnnatgaatttctaaaataatgtaatttaaatacatataaagttt

SEQ ID NO: 151762 - DNA, 863 bp, Cannabis sativa
gaatgagcacccgaccaggcacacatccccttcttcgggtttgtggctcggtggtttgaggcaagcacataacattccagttcccccagatagccagattggtccaagtcacttaagcgtgctgtagtgaccttggacggaggactcacccacctggtagctaaggcatctttcctactgtgaggaacaggagcagtaagctcctcggtgacgtagtccactgcttgaaccaggagatcgccatccgcatctactagctccccagcctcgttgtatcccctaaaatttagaggtgcagcctcctcctcttctccacctcggaagggctgctaggacgaatatcgtcctgttcctctatctcatggacttcagcatccccttcatgatccccctcctcctggacgggcggatcctgttcggtgctgggaaaagtggcgtgctaggccacatgagggttggacacgtttaccttacgcatcatttgctttgttcgatccatcatcctatggctggatggaaaatttgaaatggaaagcccgtcaattgaagagtttggactggcacgaagacgagaataatcctcgtactggagttgaagcaaatcctgatcaattcggtgtttgcttccccataactcaccagggttaatctataaaagacaacacgcgagatgagtgtttggtcgggatatcgaacaataaacaggaaaatatgccgacatggagtactcaacagattaaaagaatgaaagtgttcaaaaaaaagtcaaaacccaaaagtttgaagtttttgggtctagggccaagtttcacgaagctttgaataagcaaggtgaaaggcagacaatgtgcgataaaaggcta

SEQ ID NO: 151763 - DNA, 1570 bp, Cannabis sativa
  modified_base (552)..(554): a, c, t, g, unknown or other
  modified_base (722)..(722): a, c, t, g, unknown or other
  modified_base (783)..(790): a, c, t, g, unknown or other
  modified_base (1252)..(1254): a, c, t, g, unknown or other
  modified_base (1510)..(1521): a, c, t, g, unknown or other
caaaaagtctacctagaaaatatctatctagataattcataaactaattattgattttttaattaaaataatatattttagtctatttattttaaataagttattaatgaaaattacattatttaagttgatctaaaattaattaaaactaattttcaactataatctaattttcaaaattgaaaaatttcgaaatatctacattaaaaataatgcaattcaaaatttaagtgggaaataataattaaaataaaataaaatatattttgaaaatttttctaatttaagttgatctaaaattaacaaattcctgacttaaatataattttctattcaattaaatttattcaaatagaaataattaagtatctagaataaaattaacttaattattaattttagtttaatatctaagaaaatattctaattttagttggtctaaaattgaatagattaatttttaacttaaatatattttctaattaattaaatttattgaaagagaaataaataattaagtatcttaattaaaatcaacttaattattaattnnnatttaagttctaagaaaaatatcataatttaagttggtctaaaattaattaacaaattaactttcaacttaaatgtatttttatagttaattaaatattagaaaatataaattagttactgaaaatcactatctagaatcttttcgttaaactaagtgtgtttttctnaattaattttaaaataatctaataaaaaattaattccatttattttaaaattaattatgtnnnnnnnncaattttaattaggttaaactagcataattagcctaatataattatttaaataaggcaaataggccttcacagttagggttgttcatgtgagggagggatgtgttcagtatgccgtacccactactaatgactcaaaggagaggaatttaaccttaaattaaataattgttattcattgactaagctcaattctaatcgggcctaaataaaatcatcaaggtgatatttcattttagcaacctagtctatttgcatatctagaaataaatgggcaacctatatgtatctaagcccaaaagcaaacatataggctcacacaggttaaattgatttggatgggctctatcatatttctaggtttacatagatgaaagaaatacaaaatttacatgttacaaattatttatatgatctaatgacaattcgactatgattgaaatcagatcattggatttgtcaannngttaatcatagcaatttagataaaaaaaataataggtttgttaaaaaaaaaaaggttttgaataaaaaatttaaatatataacaaacaatatccatgtaacaaatgtgaagtaagatatttatagataattaaattattatttaactaaccaactaaatttttaaaatttagtgttgttaaaaacaacctaaaatatcttttcaaaaattttaaattagaactaagtttaaaatatctagatttatttgaattatnnnnnnnnnnnnaattaaatatctaataagataaattatttaaaaataaccaaatagatat

SEQ ID NO: 151764 - DNA, 781 bp, Cannabis sativa
tgctcactacagacaagacaaattacaacctagggcactaaaatgcatgttcctaggctatcctgagggagtaaaggggtacaagttatggtgtctagaaccagggcataagaaatgcatcattagtagagatgtggtgttcaatgaggaggaaatggctatgaagaagagtgttactgccactgcactagaaaccagcagccaaggtgatcaaattgaggtggacactactcaatctagttctattgaagattcagaaaccactaagaaagacaatattgagacaaacactcaaactagtctcagctcctaccaacttattgatggaacggttttgcctatattatttagctcagtgtccttacttgctcaagcatataaaccaggtggaattgtggggtttatatgttggtgcaagtatcaattttttaatattgaataatttatatataaatatcagaaaattctttattcatacatgatgttgtgacttgtattatacggagaattaagatcacttagcaatgaataaaatacttagtaacatattaaagttcaggaatctttaatcaatagttgttagtgccgttcattcatacccgttattcggtgcaagtaatcttgattcgaattactgatgtagcataacacacatctaagtgaagatgttgtatataataaagattatttatgacaataatcgatattgattaagttgtctttgttaaacatgtcgtttactataaagaccttcatatcataatgatgatcaatggtagat

SEQ ID NO: 151765 - DNA, 536 bp, Cannabis sativa
aaaagataaattaagttgtcaaaattaagttacaaaaaaatcataaaaacaaaaatatattaaggaataaggagttgatatattgttttgaatattacaataggtcattgttttgttgttatttttatgttgctttgtagttattattttgttgttttatagtgtttttattttatttgttaagttgttttatagttttttttagtgtttttaagttattttttttttattttttattgaaatactatttttttttaattttaaaattttaacacattattttttaaaaacttaatactataaaaatgtaaaaagaaaatgtgacataaaaatgtatttttttttttttaaaaaaaaagtatttttgttagatccccgtcttatttctaataacgatcatattaggttctataattaagttaagataatagttgtaatttattaatatagtcgcttttcgtgcaactaatttaattttttttagtattataataaataatttacttaaaaatataattctaatatataataaaatt

SEQ ID NO: 151766 - DNA, 720 bp, Cannabis sativa
  modified_base (502)..(509): a, c, t, g, unknown or other
tggttgtagtatagatcgggcagttgattccacagggaggtgattatggacaaaagcgttagtagaaaaataaacacaaaaggttaataaaaagtaacaaataagtaactatatgagtttgaggatttttgttttggtaataaatattaaaagaaagtcaatagaggtgtaatcaatagtaaaagaaagaaaggtttcaagaataaaaaaaaaagttaaaaacgtacacattagagttattattgttattatatcttaatttattttgtttttaaaaaagccaaaaacgttaaagtatatatattgattaatattgtgtaaatgtatataaacgaaatttatgatcaattatatttgaattaagttttaaaatttttggtgaaatttaatttttcattttctaaattttttagaatatttttatcaaaagattattaaaataatagtaaaatattaatttatagatttatgttttttttatagaaaaattattaaaataatnnnnnnnnatcaatttgtagatttatgctttaataaaatattaaaattgagagaactgaaaagagaaaagaaaaataattttagagtaattttgattttagaatgacactggctcatactactctttcatatatctattctatataaaatgtggctatataactgaattcttggtttatgagagattagtgggtgaatttttttcttttaattttttat

SEQ ID NO: 151767 - DNA, 1121 bp, Cannabis sativa
  modified_base (211)..(216): a, c, t, g, unknown or other
atacataataagaattccaaatataaattttaaatttcagttccaagaatgaattacacattacaatataactttcacaagttccaatatctattttctaccaatgaatccaaactctatgttaatgtatggaatatgagttttgtattctgtgaccaagatccacatggactattctaagaagtatttattgtaactagacctaagtcannnnnngaccacaacccaaccacattcttatatatttctattctatgtatgacaatttgcttgcatcttgttcatagtagttttgacaagatctttctctataaagaaaaagtatgcatatatccacttgaaagtaggatcatctatatttgatatatggatgtatatttaggggtagatatgagtttttgttatattcttaagcaatcactctcgatttcaccttaagccaaaaaatttgaaatgtttaagaaatttcatgatttgtagcaatgttgaaaaacattaatgtaagtggttaaagatcttgtgaattaaggtggagaaatattatgtagatatgcagttcaaagatcattaagttgaatttttgaattgtatccaaacttacctccctagaaattcggtttacatattgatgaaagtgaaaggtctatgattagtcacgaatagctgcctaagtccttctaggaaataccctagtgataggagattttagaatgatggaataattgtgtacttattgtaaaccattactagaggatgtcctgatcgtgaacttaagaaaagctaaaactgttaactaaggtttgcatatttgatagctattctaagtgattaggggtggaccatcctatgatcatttagataagaagtgtttgcttcaacaaatactacttttctaagaatatgattaaatctgaaaacaaagtagcaaagtagaggagacatttttatcttgattccaaattgttctatcatcttattctatataagatggtcccactgcctctattgtcttgacccaaccatgaggtcaataccacttatgttcttagacagaaagtcacggtaccttgacgtagtgagagggtttcaaggaactcaccctcttatgacttgggagacac

SEQ ID NO: 151768 - DNA, 622 bp, Cannabis sativa
tgattggatttctagtcgatctacggtactaatttcgggtattaatggctaaatgtgtagatcttatgtaaaaaaaaatccgaaaatttgaagaatataaataaattattgtaataccaatctcggtcaaatcacaaaataaatcatgtaagaacattcataaatagttgataatgagatattgataatcaatttcagatcaaaaataataaaatcaaaaatacaaaatataatttcatagtataattatataaaccctaaaactttaaatgtaaaattctcataatatactcaatgatttcatacatataatatatcaacagaacgagaatttaacgatgaataaaacccctaaagttttaagattcaataacaaaaatttgatcatttatttattacgaaaataatatgtaactattgatgatttacatatacaaattaattatacaaattataggtcctaaatcatatacaaaaggcaatctgataccacatgttagataaattaaccataaacccaagatctatttgtatataatataaaaaataacaacaatatataataattaagtatatgcgtacctgattgatccatagtaattaccataatttgatagtgcaa

SEQ ID NO: 151769 - DNA, 1295 bp, Cannabis sativa
  modified_base (479)..(486): a, c, t, g, unknown or other
tagggcataaaacccaacagacccctcaccggctttagacttcttggccggaggagaggcgctagagcttccgcccattctcttcttcagagcgtcaagcatctgtcaaaacatgtctgtacagaacgaaaaacaacattattagaaaaaatagacatcagaaacataaggcataatagtcaagaagctcaaaaacaacacaaagtagtatgcaaggtgactgcccaaacaagactcgaaagtccatcatcacctaacatcgctctcacttcagacataacacctttccctttaccgaacatgggagtggatggccaagcaggtgaaatgggctcccttatgcaaatggcatgttcaacaggcttgggcgggctcggaagtttcttcttcctcttgagcgaagtcacatgctcttcctcagcctcatcttcaagattcaagggctcgtgagcagactgcttggcccttgcacctccctnnnnnnnngcttcacgcttaagttgaatgagttcattctcctgatgagctcgttcggtccgtccagcactggattttctcttcttccccgtcatggacttaggaatgaagtccttgggtagagcccctacttaataaagttatcctcggaggtcaaatggataatattccggtcttcccccgacagtcgagcaagcttttgagctctatccctaagagcaagagagaggggagggcggtgatatgtcggaatcttctggaactgagtgcgagtgatgcccgtgccatccatcatgaagtactcatcagcaaaactgccaatcttgttggtggtcgagtcgtccgtgcccttcaaccacttgaagcttggttgagagaagtagaagtaccctgacctgccttgctttttggtggacttcaaatcaaagaaccagccaacttcgtggggaaaaggcataccccatttctgggaagcgtagaggacgaagagggcagatagatatttgatgcccttaggagtgaactaggtctggatgaggccgaagaagtccgctacatttttgaagtattgatgcaaaggcatccatgccccttgctgggcatgagcacccgaccaagcgcacatccccctctcagggcttgtggcacaattgttgtgggcgggaatgtagcaatccagttcgcccagatatctgccctggtcgagagtccactggcgcgcctcagtaaccctcgacagagggcttacccacctggcgcccaaggcacctttccttctatgaggaatcgcaacagcaagttcctcactgacgtagtcc

SEQ ID NO: 151770 - DNA, 557 bp, Cannabis sativa
caaatagggtggaacatggaagttcacgtcgatgatatgttggtgaaatcaacaaagagtaaggatcatacctcagacctcgcagaatgctttaaaatattaaaaaagaataacatgacggtaaacgaaaaattcctttggagtctcctcgggaaaaattttgggattaatagttaacgcaaagggcattgaggtaaatcctaaaaaaatcaaggcattaatagaaatgccatccccgacaaagcctaaggaagtacaggccctgacaggaagaatgcgagcacttaacatattcatttcaaagtcaactgataagtgtgtaccgttcttcaacatattctgaggcaacaaaaagttagagtggacaaaagaatgcgagtggataattaactagagagatgttatttccttatttagccatctcaaaagatgcgattagtgcagctatagtgcgagaagagggtaagcaccagcaacctgtttactacgtaactaaaaggttactagcgacagaatcaaggtatccccctctagaaaaactcgcgttatgcctagtc

SEQ ID NO: 151771 - DNA, 724 bp, Cannabis sativa
accacaataataaacttgtttattaaaagagaatgacaattaattgtatgtgattgattcttattcatttgtttactaaaatttagaatggaagaaactagtgaagcccacacaaattaaggagaaaataaaaagaaaaattctcccactattttcataaagaataccttaacttacttaccttgcttactttatattaattatcttaatactttttataaagaataattttctctttctttaatttactttatattaattatatttttattaattaaaaataaaaaatgataaatatgactttcaaaaatatataaataaaaaataattgcatattctaacaatgacaatttagtcaaattaaatcattccgattacctatcttgattatgtaaacaaaataaaatacattttgattatttcttttccgatcaattttgtaaacaacaaaataaaatattgttttcggctattttatattttaacctgattgattttttctattgattattctaattccaattacaatttaataaacgtgccattaaaaaatccaaacataatccctcctaatgagatgactcaaacaaggaaaaataacaaggcatttttacacttgatgccacatttgctcattggcattacacggttttttaaacttttttaacttttacatttttcaattttagttttcaaaaaatttcataattacaaaactaccttt

SEQ ID NO: 151772 - DNA, 1073 bp, Cannabis sativa
  modified_base (39)..(53): a, c, t, g, unknown or other
tcatgtgttaaatgaatattaaattaattaatatatatnnnnnnnnnnnnnnnattaaatatataaaattataaacgtattttaaaaatatataaatataattggataaccatatgatgataattggatcggtttggtcggttatttattggatcgggggacatccaaagcacgatccgatctgattggatttttaaaatttacatccgatccgatccaattattattgaatatctgattctattggatcggttgtgattggattggataattttttgcacacccctacttaatatgtattgtattgatattatttccaaataaaattgcatatttatgtgttggagaagattggtggttttgggaaataatggacagtattccaattccccttcaagatcaatatttgcgggaaagtataatggggactctgaaattccattctgatgtgaaagatcagtcacagctgtaaatcatagagcatattcagaatttttagatatcttccaatgtaaatagtactttacgaataataattaaagcaccaaaaatacgctaaaaaaattatctcgtggcaaataaaaactactggtaaaccttctactgtaacaataataatgtatacacaatattacactctaaaattttgataaatacttgagaaatacactcaaaactctcacactcactagtgtagtaatctcaccatctccttacaaaatatttttcacaattttgtaggaactctttttttttctctcttagatttctctcactaagaggtattttcactatttctctctcaagagcatcactcttcactcttggaataacttgtgatgggatgaacaagtgaaagggatgagctctatttataggtctccttggatgtatgaacaagacacaaaaaatcaatcttgcattaaatgcataattgaatatgtgcatgtagaactacccatcttcacatttttaacgtcaccagctttgtatgtggttaacatctctctattgggagtgatgtggaaagaggctcctgaatctaccacccactcaaccatgttatcttcgac

SEQ ID NO: 151773 - DNA, 559 bp, Cannabis sativa
  modified_base (391)..(391): a, c, t, g, unknown or other
tcctccgcctcggagggaatcccagagtcatggctcggggccggagtgtccaccctccgggggcgtttagaaggctggtcctccaccatcttgcccttgcgtttgcgctcgagggcggtcggctgctcttcttcaccttcttcaacttcctcaagaacctcctcctcgtccaccaagacaatagtgcacgaagggcactggaggaggacctcccgggagtgaccaactgagaagcagcaggaggcagggaagcgtcaggactgtgggctccagtaagagtggccgaaagttcatccatgggcctggctgctgcaacaagaaaataggtcaagtgttagaacatccgtgagaatatcatgtacttaacaaaaagcaatcaagctagtcctancctgactctctaattcggccctagaaaagtcccggatcatagcactggcttcatcatccccgagaaagctgtctgagggacggaaccaactagaggaaaaatgggctgaatggtccaagggaatgggcgccggaggtccagaacccatccgagaccgacctaaataat

SEQ ID NO: 151774 - DNA, 642 bp, Cannabis sativa
tttaaaaaaaaaaaaaaagttgggtcgaatcagatccgattcgtataaggcgggtcagagctgatccgatctaagtatctgatccagtggggtgtggcgcggcagatccttacataatccagatcaggttggatcatagccggatcagatccgacccgccccattgacattcctagtggtgtgatgcgaacagtttgagcagtttaatgaacacccctaagttatacatcaatcaacctcaacaataatatctacaaaatatttgtccttaatttattattaaaatctataactatataaaaatgagaatgtgggtttgggcttcttacaataaattaccaaattgtccttattttttttttgttaattactattaaatcatcacatcatttaatcataagaaaaaaattataatttagacaactccaattcttatatacaatgcatataaatacatcttgttatttctttttacttataatttttcatgatttgtttatataaaaaagactacaaagcatagattacaactaataaaaagttgaataatttttgggctttatatattgttgaccgaggtttttggcaaccactataataataataatttagagagctataaggaattaagagagagatttt

SEQ ID NO: 151775 - DNA, 696 bp, Cannabis sativa
aaaacaaagggctccacgtggagccctttgttttcggtaatttgttacttaccgaagacaaaggtcctccaaaatcctcccttcccactctacacaataaaacccattttgacttcgcttattaacaaagaccgaaaatataataaaaatttcactaaataagcgcattaaaatagttttatcttcggatttttaatttattaaagaaaaaaaacgaaaataaaagatatgtttgtagtagtgatgcctccatctctttgtccctccactctgcgaacatacgcctctgttcgtcaaacgcgaggtttactgcgacacgtaattcctcctgatcgtgatgcagggtattgttttgaccctgcatgagtttgagcgcatcacggatgttttgcaattcagttgcgtctccgatggtcgtttgggcgttgatgcctagtggaacagtcgtgttatgaacgtcctggctgtgtgcggaaccgttgtttccggtctctgcacaccaggcacaatttcagtaacaggagtcgtctcaccattcaccgcgcttcccgtctgtctaggattgacaatgggtggaacccgtaaactccctgggtcctgcaatatcggatccatcgtctgtgagtttgctgggtcggacaggcctctacaagtttgtaccatcgtgtcgagtattgaaaagagcgatttgtgatt

SEQ ID NO: 151776 - DNA, 896 bp, Cannabis sativa
  modified_base (348)..(351): a, c, t, g, unknown or other
gcaaccagtctaccagggatgacatcaacattcaatgacgcagcagcagagaaccagaagaaatccttgctgaaagaacggttagtgtgaagagaaagaagagaaaagagtaccttgtcaaatggaagtgcctcactgatgacgagatcaactgggagaaggcagaggacttacaacagtttttatagaagactgaagatcatgtagtaggttcaataaggacgccgaacaattaagtgggggagaatgtggcatgctgccccatggcacacccacaatggggccattttgtaatgataactctatggtatagagttattttttatgcttttaaactaaaagtattgnnnnagagtagtgaaaatgtgtttatttgcttaattttagttagttttagtttcattttctatttaataagctaacttttaagtcttgtaaaaattggtattgttaggtgtgtttttccaattaattgttgaaaaaggaagaattaaattgataggaaaaagaagaggaagtaaggaagaagtggaacacaagctgaaattggggcagattgctgaagcaatgctgaagcgaattcagcattctggcagtgacgtggaaacacgagtttcacttatccacatcagcaaatccatcccaatcactcaaaatacaccagctggctgctgtggaaggaaggggactaaacctagtgggccaaagtgcaaaaagaattgggcttctcattttgaggagtgtttggtaccctaggaacaaaacaactaaaagaggagaaaaaggaagtacacctccatcatcttccattatgtaatgaaggagggcagctgccatttttgagagaattaattgcagaagtacagaggaggaagaagaaaaaagggggaccaaag

SEQ ID NO: 151777 - DNA, 624 bp, Cannabis sativa
tcaaaaacaaaagtattaccttcattcgaattgtttagaagtctgggacatcgttcttccttatgtcccttctcattacaatttgaacattgaagtacattaccatcaattgtacttgaagaagcagcattgttagaagcttcatggttaattctcttcctcttatttaagtttgcatgactggagggtggcccccttgcaggtaagttccgttcataagctcgcaattttgcttccagcttatccatgtcggatgagttaaaattgttgatcatataagatacaacaaatgcattatactcaagagaagactattaagtatgaactgaacccattgttctctagataattcaattccaagcaagtttgctttctggaatttcagattcatcattaacaagtgtgaattaatgctctttccaggagccattttcacactagagttcatttgcaaagacatttactaggagagggtcggggtgtgggttgttcattttggcactacaaagatcaataaacagaagtatatcatttggttcaataaattcatacaaaagttcagaaaataacaagtatagcaaatatgtttataaaaatacacaaaatgaaacatattctttattt

SEQ ID NO: 151778 - DNA, 765 bp, Cannabis sativa
tccatgacacaagctcgtaacaaatcttcaagtatctgaataatttgctcagattgcccatctgtttgaggatgaaaggccgtgctgaatttcaagctagttcccatggctttctacaaactcacccagaattttgaggtaaatttagagtctctatctgaaacgatagactttggtaccccatgaagacgaacaatctctttcacatacaagtcagcatactgatccactgaataagttaccttgaccggcaagaaatgagctgactttgtaaagcgatccactacaacccaaactgagtcgtacattcctgtggttctgggtaaaccaaccacaaagtccatcgcattgtctttccactttcattctggaagcgtcaatggttgaagtaatcctgcaagtcgttgatgctcggccttaatttgttgacaagttaagcacttagtgacgtattccactacatccctcttcatcccataccaccagaagtatgactttaaatcttgatatatcttagtagttcccggatgcaatgagtaaggggtagtatgagcttcatcaaaaatttctctcttaagctcggtgttattagggacacacactcgcgctttaaacaatatcgttccactgtcagagattgagaaatccttagctttgcctgctaagacatcttctcgaatcttaaccaattcaggattttctaattaagccattttgattctttccaacaagtctgactgaagtgtcagattatgcaatttctca

SEQ ID NO: 151779 - DNA, 523 bp, Cannabis sativa
aaattatgatgtttactaataatgaaaactcaatattgttattaaataggattttaatatttcattaaaatattattcgttggaataaatattacaataattttgttaagtttacattaacgtattaatcgttggaataaagattataataaattttttgaatactatacaaatatagctatttaataaaaaaaaacagtttaatgttatgaatacagtagtagtttgagacagaaagtgattccggtattaaagtcaggagaatattgactccggtatactactgatgatttgattacatactgaacccataaacaccgacagcgacagtgtgagtactaccaacggtggagtgccactcagtagaaccctagctggactgggttcagtgagttcattaggaggatagtgactccggtacactaaagctaacctgagtacctactatgtctcacgggacccataaacaccgccagtgacagtgtgagtactaccaacagttgagtgccactcagtagaaccc

SEQ ID NO: 151780 - DNA, 612 bp, Cannabis sativa
ataccaatcgttcttactcgtcgatctcaccaaaatgttggcgccactgatcccaatctggtacttaagattgattcaaagaacatcaaagttaaaaaacacagcagctaaatttgaattaaaaaaggaaacgaatagcataagtgtacagaatacacaccacacaccaaagacaacaaaagaatactaaaagaaatagctcaatcacctagaaaatcagtcactaaaataaaataataacaacaataaaataaattaaagtaggaaaagaaaaactccaagataaacagagcattgaatacggaggcgttggcatgaatcgtgtcagtgtgaatatcaggatgaatcacccatctcgctaggatccatgagagaaacagcgaccatatcagagttggaaaacttatcgggtccttgtaagggaagcgaaaacgtcatcggaccaaaacaacaaacccaatagatcgtatccttcgtcgacagttctcataagcctcaatacgctaaaggcgattccagaggaagcaacaacacaggtctgaataacagtgtactcttgtctagtaaagggttgcttcaatagaccagatttagaagcgattttggtccaag

SEQ ID NO: 151781 - DNA, 673 bp, Cannabis sativa
taccaacaacacctaaagtaggaaacaagaaacaatggtgagccatcccatggcaaaaggcatatctccgatatattcattaaacaaaaacaaacctttacagaactaaataaaaaaaaatatatacaaaccatatataatagtgttgaccgaggttttcggcaaccaataaaataatagtagttgagagagctataagaaattaagagagagattttacgtggttggggcgttaatgagccttagtccacgagtctgtgtatttatgattgtatttaatacagagaatgttcttggtgagtatttactcttctagcacttatgcaacccataattctcgactcccattaatgagctttgagggggtatttatagtgtcttcgtggggtgatccccagaattaaggtacatatatttttgtaactatcagtaaagttgtatattcccaatgaatataccacgggtaatgtatcatctaatccctaggtgccttagggattttatgagggcagtccttaatcccttttgattgatgtgattcttcacagagcagctgtcactagactttattggtcgtagccttgtaggtatagatcgggagttgtgtcgtcagactttattgcatgtggcagttccaacacgcctcctcccatgcggcattaaatgcgagatg

SEQ ID NO: 151782 - DNA, 530 bp, Cannabis sativa
  modified_base (191)..(207): a, c, t, g, unknown or other
  modified_base (363)..(378): a, c, t, g, unknown or other
aattagttttggcatttaagtggttagaattggaaaaatgatatttttgagaaaataaggaaaaattgatagaagtgggaaaaataccccagtggggcccactaactatggacggccacttgcaagggtttttccacttaatttttctattattttaatgcctaattaatcctaacctaaacctaggtggnnnnnnnnnnnnnnnnngtgatggctcacacttaaagatgaagaaatttcttgccttcagaaaaattgagccatttattctatacctatattcgaaccagccctctcttcttttcttcttcatattttcataccttgagtgatagagttagtgtccacacacatcaagtggtnnnnnnnnnnnnnnnngtaaggctgtgaagaatctagaatcaagagaaggacattcgatcagatcttggtgatactctggtacagacaggataccatgtgtagagatctgagcggaaggagtcattaatgttccgctgcacccaatgtaaggttttttgaaactttat

SEQ ID NO: 151783 - DNA, 637 bp, Cannabis sativa
  modified_base (26)..(26): a, c, t, g, unknown or other
ttgtctgtgctctggctggaggatanttccttcttagccttggccactacaaggttataacattcccgagcaatctgctgctttcctcacagacaccctacccaattctttgttggaaacttcaggcatgaatggaatatcgacgtaacagcctttaagtcatacaaggctggtcagcctagcatgacgttaaaggctgatggaacgtccaataccagaaattgtgccattatagttatgctcataggagcttgtccaacagtgaggggtaggcaaatttgccctagaggtgcgactccttggctagagaaaccatatacaggcaggagacagggggttagatctttgagatggagccccatcttttcataggcggtcttaaataagatgatggaagaggctccattatctatcatggttctggttgttctggccacgatcttatttgctatctggacatctatggaaaacaggtcgttgtgcagaaacctgattttgacagcatcttcgtcgttgaatgttatggtgggctctcctgcccgtgggattttaggcttcctttcttctacggcgaggatcattcttcttactcgtactgtgctgttcaggcatacctttcctgagctttgctcgaatc

SEQ ID NO: 151784 - DNA, 1422 bp, Cannabis sativa
ttccagtatctaaattgtcctttcggactgtccatcagtctgaggatggaaagctgtactgaatttcagtttgctacccatagcccgctgaagactctgccataatttaaaagtaaacttcggatctctatccgatataatggactttggaacaccatgtaatctcactatctctttcacgtacaattctgcatattgatccactgtaaaggttgtttttactagtaaaaaatgtgcagactttgtgatcccgtagttctaagtaatccaaccacaaagtccatggtgatatcctcccacttccactcaggaagtgtcaacggctgtaataaacctgccagtctctaatgttcacccttgatttgttgacaacttaggcactgggatacaaattctaccatattcttcttcatcccgctccaccagaagtagggtttaagatcttggtacatcttggtagtgtcaggatgcaatgaatatggagtggtatgtgattcctcaagaatctcatttctaagttccgcactacttggaacacaaaccctagtcttaaacaatagcatcccactatctgatactgtaaattctttggcttgaccagatctaacctcttctcggaacttcactaactctagatcaagtaactaagcagctttaattcattccaatagatcaaattgcagcatcaagttatgaagtttgcctacaacaaactcgatgcttgatctgaccatgtcttctgctaactgaggtgaaatcttaatcatactagttacatgcccgagacccttcctgcttaaggcatcatccactacattagtcttcccaggatggtaaaggatttcatagtcataatccttaaccaactctaaccaacgcctctgtttcaaattcaaatctttttgagtaaataactatttgaggctcttatggtaagtataaatttcacatttctctccatagagataatgccgccaaatcttcaaagcaaacaccactgcggcaagttctaaatcacgagtcgggtatcgctgctcatattctttcaactgacgggaggcgataacccgatcgacctacatcaatacacacccaaaaccctgtctggatgcgtcacagtagactacgaacttttctttatctgacggtagggccaataccggaatggtaatcaatccctgtttcagctcctgaaagcttgcttcacatttttttgtccacacaaactgctgattttttttagtgagctcggttaagggcgtagaaatcttagagaacccctctacaaaccgacagtaataaccagttagacccaggaaacttctaacttctgtaattgtcttcggtcttggccaatccctgacggattcaatctttcctggatcaaccttgattccatttttactgacaatgtgtccaaga

SEQ ID NO: 151785 - DNA, 553 bp, Cannabis sativa
ttgagcggagtcacgtgctcttcctcagcttcatcttcaagattcaagggctcgtgagcatattgcttcgcccttgcacctcctttcaacttagcctcgcgcttcagtataatcggctcattctccatatgagctcgttcaacccgtcgagcaccagatttcctcttcctccccttcactggcttaggaatgaaatcctttggataaagcccgtacttcataaagtcatcctaagaggtcaactggattatattccggtcttcccccggaagctgagcaagcttttaagctctatccctaagagtaagagtgaggggagggcggtgatatgttggaatttgctggaaccgagtacgggtgatgcccgtgccatccaccatgaagtactcatcaacaaaacacccaatttttcttatggccttatcctcagcacccgtcaaccacttgaagtctggttgagagaaatagaagtaccctgacctgccttgcttaggggtggacttcaaatcaaagaaccagctaacttcgaggggagaaggcatatcccacttct

SEQ ID NO: 151786 - DNA, 663 bp, Cannabis sativa
  modified_base (372)..(372): a, c, t, g, unknown or other
  modified_base (601)..(606): a, c, t, g, unknown or other
atatgaatatctctaaaataataaaattaaacacataagagtttaaaaaccttagattgtttgcagcagaataatatgactcctttcgctcagatctctaacccttgtccctttctgtcacagggtattatcaagatctgagtctggatctctttctctccttcgagtttggttaccactgtcgtccgcactatgattgagtacttgacttgctatgtgtggtcatgacattctatcactatgggcgagttggatgaagaacaattaaggaggtttcgaaattagtatagaaggtgtctctcatctactagttgtcagagaatgaaaactagatttggtaggttgaagtcaatagttggatgagatgagagnatcatgttccttttatagtgtatcaactcgggcttaggtttgaattatatggattagaaaaaataaaatattgggcaacaaatcactagagtggccgaccactaaaggaccactttctagttataattttgccactttatttcaaccagttattcttctttcaataataccatatttttaatttcaatttataaatgccaaaaaaatttatttaataattataattaannnnnnaataaaattaccatttatattatttattaattagaccatacaaagtctcttagttaa

SEQ ID NO: 151787 - DNA, 575 bp, Cannabis sativa
attgataattacttgtgtcagctcagtaataatattgaatagctacaaaggaaggcctgaatgagaaggatatgataatgagagtaaccaacctggttcaaatgtgctgcaacgcaaggaagaaccagcaaacccgactcaccaaatgcacctccaagcttctccacaacagccaccattacaggcaaagttttctacagcacaaatctcagtgtattattaatcttatcttactaattttcttaaaccagacatgttaaataaaggaaccttaaacatttaagacgatagcgataaatgtatcacacacctggcttgcaacaagtacaaaagcaatggaattttcttccttggcgaaaactgattgaccgcccccagagagtgttgaaaggctttttataaccataatattaaatgctaataggatgaaatgcagcaccctaaaatacaagaaataagtcaccttgctgtagatgaccacttatttgagattataacatcactactaagagtgatcaaactatccaaacagaccatgaaacattcactgatcgagagctattaaaacctcagct

SEQ ID NO: 151788 - DNA, 559 bp, Cannabis sativa
aatggaggggtcaaccctttcacccttcgaaaaccacatcctgcgcgttgaagcccctcagcgttacgtggcccctaaattactggagtataatgagataggagacccctcggaatacgtatgtcaatttgagcaaaaaatgttaactgtctccgtcccattagaggacttggaagcaatcaagtgcaagaccttcacgcaaggattgagagggcctgctctgcgttggttcaacaacctaccgtcaggctcagtaaattcttaccaggatctcatcctgagattccaggccaattttgcgataagtgtgcgaactgccaatgtggatacggatttaatgttaatacaccagcgcctcgctgaacccctggaacattttatcaataggttcagcgaggaatacgtcagtatcccgaaatgcaccgattcagtggcgaaaaaagcgttaatggagggattgatatatggttcggaattaaagaaggcgatcatagtggagcctggcttgtccctcacaagggccctgactatggcgagaggatacgtggccttggaagta

SEQ ID NO: 151789 - DNA, 826 bp, Cannabis sativa
gtgttcatatttttatttctataggttttattttttctgtgtgaaatcactactatgaagctcaaatttaattaacgaaaatctgcgttaacaaaatttaaataattaaagctattttttctaaaaaaaaattactaattaattgatatatagtggtgttagcttttactattaattttaacgaaaaagaaaaatcgttaaaagaataattacgtgcattgcatgtatacttaattatgtttttaatttttatttttgttatatgtattttaaagtttttaaattaaaaggaaactacgtattaatttttaaatgtttaatttaaaaaatttgagaaaataaatataaagtttaaaaattaaaatgaaacatactcccaatattaaaaataacatataaaaaataatgtattttgttgatacttttaaattaaatttaaatatttaaagctattttttcctaaaaaaaagataattaattgattgatttaatggtgttagtttttactgttaattttaacaaaaaagaaaaatcgttaaagtaataattacgtgcattgcatgtatacttagttatgtttttaatttttatttttgttatacgtattttaaaattaataaattaaaaggaaactatgtattaattttttaatgtttaattttaaaaaaaaatgcttaataaatttggaaaaataaatataaagttcaaatattaaaattaaacatactccctgttatcccaaatttggcactctgacgtggcatcacgagaatggtgacacgtggaatccacttggagcatctgctcggaacgataggccgagcag

SEQ ID NO: 151790 - DNA, 896 bp, Cannabis sativa
aaaaagttcaccatttctaaatttaataaactgatcttgtatctgatgatgtagttagttttaaaagactatctagattttttctgcttaataaaaataaatgattttactatcttttattaaagttgttatattttgttttgtggtgtcgttagaatattttctccacaaaggaatgtaatatgacagctacaaaaggagtcgtcataacattactatttttacctattagtgatagagtttttctatacgaaatgtatagattagaggattgattttaataaattttgtgaatgtgaaatttataagataaattgtagtgataaagagggagatcatgatacatatgtataattatttccacaataaaatatttatttgtcttattatcctacgataattaaaataagtactttataaaattagttgtgcaatcatgcgattgttataaatatcgtgtgcctagcgcgatcgttatttcttgaaaaataaattttaatttatgaatattttttattttaaaattcatattttaagtagctaattattagaaaataaataactacttataaaaaaaatgtataaaaaaatttattagataagacattaatcaatcactcataaaaaataatattttttagataaaagaaagtaaaataataaaactactacttataacttacatggataacatctaaacgtttttaaatgatgtgggacttttactttgtatgtatagtgtatttttcaaagaaaataaaagaatgtgtcataaaacaaaatgaaataggcagaaaaaaaatatgatttcctttatatatatttaagagaaaatattttagttataaaaaattatttttaactcgaatacttaacaatataaaaatctagaatag

SEQ ID NO: 151791 - DNA, 520 bp, Cannabis sativa
aaaataatttccaacaacgactccaacctttctaaagtcttttgcccaaatgtgagggtttcgaccgcggagaaggtactccgggaggatatcatcgccacggtagaagataagtaccagaaatacctcttctagaaggcacaggagcaggcttataacaaggcccaggtggccgccgggaggccccttcgtatcgggagcccggtggagaaaagaacccccagaccaaggcctgcagtccaagtgccgaatacgggggctcccgatgccagcagttctggttctggaaagtcccctttaacgatacatgacgtccctcctgtccgtgagtatgctagccttaggcctataaggttcgatgaacgtctccataggtttaagatgccctccactcggtgggggatcatgccaaagagtattatttctctcacttaggcggattatttaggccggtcccggaagggttctggacctccagtgcccgttcccttggactcttcagcctatctatcttctagct

SEQ ID NO: 151792 - DNA, 859 bp, Cannabis sativa
ataattttgcatattcggtgcccgacaacattgaaacacgttgtttggctattagaattacatcctagtattttaagtatagcggagcagtttagttagacattgggaatgtcgagaatagtcgggattttagaatttcccaaaataccctatgtgactttttatgattatatggtgttaaggggcaaaaagggtctttttagcaagatgtgttttgccttttgtgggttatattaatttgattttaaagtttaattaaaatgattttagttgaataaagcttatggagtgatctcatttttcaaagtttatcaaaaaaatcatttttgtctctcaactctctctcatttttgaacccatagaaccggctagggtttgggttttcttcatcaattctaggtgatttctagcagctctaagtgtaatccaagccaaggtaaggtctcttgtagctccctctttgatttcttgggttttaagttatggaagtatgcatgctttgtggtttttgtttctgtagctgctgttagtgtttgattgtgttttctgtagagttaaattatgtttggttatcttttggtttgagctggttttagtggttgttgattagtttaaccaagctttgagttttgaactcaaacttggatctttaatggtggattgtgtttatgagcatattagttagttttgttgcttgggatatgttctttgtggtctatatagcaggtctggaagttattgtggtgtttgggttgatttggttgaaatatgatatttttagtcattcctgcactgaaccagaattcaagttcagaggggcctgtaggaaccggaattccggttggtccccaggaaaccc

SEQ ID NO: 151793 - DNA, 1556 bp, Cannabis sativa
agcttgtcattaaaccctccttgatctatcaatgagtcttccttcgagtggatctctgatgaaatcttgtcctctcccatcagttctctagttgaactgccttattagattattggcctctcggttgcggcaatccaattctgcttggtgagattgaaggatgtactcttggtcctccatcaatctcacgaatttgcttctctattgagcaaatacatcgcaatcagcagcccatggtccttgagttaggcctgcttggcctacggcttctctgattttggccaacttgagatcctctcctaagtccacatggggctcgccaactcctggccccatttctccaacgtaatactggagacgagatccaattgctattcccgagggttgttgcccacaagtccttccttcagtgggaggtgccaatggtggatcttcccttggaggcaggggcctgctattcggatccaccaggatgcttttatcagtttggccagctgtagtggccagacttgtggcacctatcgtggtgataggattcaccacatctgtagtgttcatagggattccagctgtggctagaacctgagtattcaaatctgcagtctgtgggccttgagggagacccaaagatgcagagggtgtgattggagctcttctcgtgttaaccatggcatttgatcagatacaacattcacgctctcaatgaaagccccaaactattgacctcaaaaagtgatcaaccgacagcaaggtcgtatggatctaatgcttgtcacatgtacacaaatagaatgaaaaagtgataaacacacagattttttgtggaggttcggccccctgtgatagtgggtaataacctactctcattttaattgtattaatagtgagggttaacactattcagatcattataggtgggatctaatatagcacccttaaggatacaatgtatgaatcgtgattggcaaatctcaagtgatgagaattcttgtataggcgtgtgagagaggtagtgaaggagagaaaagttatcaaacttaggcttagagcttggaggctagtatcgggcttaaactgggcttaggttttctaggttagagttaaggcctatatataaactgggcttaggttttctaggttagagttaaggcctatatataggaagcctaaatcctagattacaacttgaaatcctagatatttatatatttaatcagttaattaccaaagaccaaaatgccattgaacttagatattattcggctattctattggacatttagggcccaatttgcagcccaaataaagttttccatgtgtagaaatgcacagaaaatcttacagagctcctcatggctggccagccaaggtgtagtccagaggctggccgaccctcacttgatgtttgtctgagtgttagggtctctgttttcttagatgttgacttggcgttcttatttgtgagttatactaccatgtggcactcattttgtccatgtaagcactgtcacgtcacgaggacaaaaattgggataacaatatgcatgttgtattat

SEQ ID NO: 151794 - DNA, 574 bp, Cannabis sativa
attgatcgcctcatgggaagattctggtggcattctaaggcctctcaaggtggaggaatccattggaaaagctgggataagttatgtctgcataaacataaaggtggtttgggcttttgaaactcgagggactttaatttatctatattgggcaagcaaggttggcgtctgttaaccaatccgacttcgcttgtggctcatgtttttcaagctagatattatcctcaatgttcttttcttgatggtgagttgggagctaatccgagttatgcgtggaggattataattgaagctcaagatgtggttaaattgggggctagatggcgtgtgggttctggttcttcgatctctgttcttaaccggtcgtggctcccttctatggacaatccctatgtgatttcttctcatgaggctcttcaggattgtcatgtctctaatcttcttcagactaattgaatatgttgggatgtggagcttttagacgatttatttgagcccagagatgtggatctcatttgtaaaattccactacctgcgttgccaaaactggatacatggtattggtcttttgaaa

SEQ ID NO: 151795 - DNA, 701 bp, Cannabis sativa
  modified_base (374)..(375): a, c, t, g, unknown or other
ttatttacttattttattgtttaataaaattagttagatatattttctaataaataaatttcaaacaagattaaattttatatattttagaaatattattgaatggtcacttcaaaaaataactacctttagtcacaatatatatttttttttactaaatgtgccttttagtcacaacaaaaagtcacttataattaaaacataatatttagatacaagttgttaacaagtattgtgactataaacacatttaatcacaacaaaaattataatttttgtgacaaatatttttagttacagactttttaatcacaacttttttacttttagtcacaaattatgttgtgactaaaagttattattattattattannattattattattattatagtaactctaataaaactttaaacaaatatacattgtacacctagtatacaattatacatatatataattttaatattgcaataaaaaagaaatataatcctttccaaatattattatgaatcagttaaatcattaaactcacaagaatgttgagctttccttggaaaattgatgaaacagcttccataagtttttctctttgatctccttgcgaaacatcgcacactgaaccagttaccttgaaacccttctttttccacttttccaaacacttctccaactcactttccttgcgacaacacgtgtga

SEQ ID NO: 151796 - DNA, 1129 bp, Cannabis sativa
  modified_base (1069)..(1099): a, c, t, g, unknown or other
aatacatccaggataacaataacatgttgggttagagggatttgcgatggcgtacaactcatctgatacttctgcaggattatctgctcagagtggattgatttatcattgagtaaatttttttaattaatactagattagtacaccgtattttaatcataaaattagtagaaagcaatacttactcgagacttgaaccaactaggaaactcattctcttgaattgtgtcaagattttgatgacccctaagttgtagctcgttcctatgctcactacactaaatcgattatggaaaaagtatcttacgtgatatacttctccacttcattacaattgttcagaatgtaccactctgcctttagtttatcttgcattggtaaagcaacaatagtcctctgaccaattgtcagttatgcattgtcatttaattgcccctccaatgtcattcttttcgatatgcactcacctctcaccttatatttacaaccccaaactatactctcacaaattcattaactatatatatacttccctaaaattagtataaaattagaaaaataataagaataattatagaagtaataattaatgtacaattaattaaagtggccatatacatagtttagtagttccacacttcacacaaagaggaggtttcaaatttgaatctagtggcggagccaaccacaaatattaggggggcaaaaaaaaaaattttggataaaaattacacttttaaaaaatattatttttactataaaaaatataaattttatagatattagagtagatatatgagaatatatatgaaaatatgtgaagataaaaatttaaaatacaaatttatatagacaaaattataacatgtgatggaaaaactaaaataaaaattaaatttatagggcagaaatataaatatataaaaaaaatacatacaaaaaataaattttaaaaaattgagtggggtcatgtgtgcccccacatgaccccatgtccctcggccactgtttaaatcctcccttccccaatgacaaaaaatactacaaaaaatcttatttttagtcacannnnnnnnnnnnnnnnnnnnnnnnnnnnnnntgactaattataaatcatcattcctatgtt

SEQ ID NO: 151797 - DNA, 663 bp, Cannabis sativa
ctaagcgggctttacagtaagtgtaaggaggttgtatgtagggtaggttatgtactcaactcctataaagagaaggttgaggacacataaagagggcatcagaagaaaagaagagtttttctctaaaaatctcagttttcatcattgctccctattctcttcccttacacacaaccatcccgtctcatcaattctcttcttacacacaaccatcccgtctcatcaattctcttcctacacacaaccatcccatcacctctgccaagaaccaggctgcttatctagcaagctcctataaaaaccaggctgcctatttaacaagctcctataaaaaccaggctgcttatttagcaagctcctataaaaattaggctgcctatttagcaagctcctataaaaaccaggctacttatttagcaagctcctataaaaaccaggctgcctatttagcaagctcctataaaaacaatgctgcttatttcatgacctttataaaaaccaaaccgttcacactacctccaacacatcagctcaccaaggtcactacgtatgcctgagattgatcattttttaagaatatagacatcatttgctattgatccttgtaatatttcacattaataaagatgcacaactgattgtttgctaccgtagacgtaggca

SEQ ID NO: 151798 - DNA, 684 bp, Cannabis sativa
actcactgtattgtaagttttagtcaatatgttcatggtagttttatatgttttatgttgcgttacatcttgtgtgtacgaatttagtatgactagagattttctagtgtgtttagaagaatatatcttagaatttgatgggtaggattttatcaatgagatatttttgaaaatttaaggaaatgattcaaggtgtagctatattacataaattaagtttgattttgataggttgtacttattttcataaattgtgactgaaatagaatatgttatggcaaaaacaagtttagtcgttatattagcatttctaacgagagtgtatgtttcaggtttaataaattaggcatatagagagttattggtacattcttaagtttgagtttttttatttaagtattaatggatagacaattttaagctctactattttattagaaataattaagttgaattttggttaagggtgaaatctaatcattaaggtacgttgtaatagaagaacagattgtgacagtcagtagtcccgtgatctgtaaggggatatattgggtaagttgtgcaatcccacaccgtctggggaaggagttaaatggatcgattggtacgaccagtagccagagtagcgtactcgtgtataagagccattcattctatgggtgtaaggacccaatggaggcttga

SEQ ID NO: 151799 - DNA, 1140 bp, Cannabis sativa
  modified_base (397)..(397): a, c, t, g, unknown or other
  modified_base (983)..(984): a, c, t, g, unknown or other
gatcgccacgcgaaaacaagcagttcaagtggacagaagagtgtgaaaaagctttccaagagctaaaggcaccacttgctaaacctcccgtacttttaaaacctctagacggtgaggaactgggaatatacttagctttcatagaacatgccgtgggtgtcgtgctgatcagagaagaatacaacgtacaatacccagtctattacatcagtaaaagactcattgaggccgaggggcgatatccgttgatagaaaaactcgcctactgcctcattttagcaacaaggaagttgaggccttatttccaagctcatcctattcgggtatataccgaccagcaactacaacaaatactgcaaaagccagatgcttctagacggttactcaagtgggcggnagagttgggtcagtacgaaatcactttccaaccccgaacagtaatcaaaggccaagccttggcatactttgtggtagaatgcacaggcaagaaagaaagcataccagattgcaaccccgagccggcaccaatacctcagccatgtcacaatgaggacaaactgacctggaaactacatgtggatgggtcggctacagatcaaatatctgatgcagtaattgcccttgtcatgcctggggggcaacacttgcacgctacagttaagttcggattcaaagcatctaacaacgaagccgagtacgaagctctaatcgttgggctaagactagctcgtgtgatgaaggtcgaactcatcgaaatctgcagcgagtcacagctggtggtaaataacgtatccagagaatatgaagcttggggagaaaagatgatagcatatctgaccaaaatacacaatctgctcgcacaattcaaaagctacgatctcaaaaaaattccaagagaagaaaatacaactgtagacgcattagctcgattggcaagcagcaatgtaagggacaaggcaaacctggttcctatccagttcctnnaagagcctagcatcactggcatggaagaaatcaaaatgattgatacatccccaaactagacgacaccaatcgcagcctacctcaactctggggagctcccagataaccggaatgaagctcggaaaatgagaaggaaagctgcacggtatatcatag

SEQ ID NO: 151800 - DNA, 554 bp, Cannabis sativa
  modified_base (118)..(129): a, c, t, g, unknown or other
  modified_base (195)..(200): a, c, t, g, unknown or other
  modified_base (401)..(401): a, c, t, g, unknown or other
  modified_base (498)..(520): a, c, t, g, unknown or other
aacactcttagtttaagatattaagatattattatattatttctaaataaactatttttcgttttcttgtatttaattaaataaagaattttgactaactagattctttctgaagctnnnnnnnnnnnnttcattaaatattcctatttaactcataaattagttatttctaaataattttttttatcaacttannnnnnaatatcttttgaatttaaaattaaattgaggaattctaggagttgattattgaagattctagagatatttttttttaagttgttaaacttaaaatggaatattcttaaattaggtggttacaacttgattttgatacttaattaaattttatttggaaattttttttaagttggttatttagattctttctataacaactnaaattagatattttctaaattttgaaaagatacttagtaaaattaaaatatttatactaattattatttctattattaaaataggaaaatatcattnnnnnnnnnnnnnnnnnnnnnnnaattaattttggtacaattcaagtgaagaatatt

SEQ ID NO: 151801 - DNA, 891 bp, Cannabis sativa
taataatattttttctttaaattttaattgtatcactttcaaataacatagaaaaaaactaacataaaatttagtatgcatggctcgcacgtagctttttattagtatatatatatatataaaggaatgcacaagatgagtttaggtggcattttactattctttcttcctattttttttttctattttttggcatattctcttattttatttgtaaaaataaactatacatacaaagctaaaagttccacattgtttagagatcttttaggtgttatctaagcaggttataaataatacttttatttttcaacacttttttgtctaagaaatattattttttatgggtgatttattaatatcttacttaataaattatatttattgatttctataagtagttatttatcttttaataattaaattttttataataatttttaattttaatattctagatttttatattattgtttgttcgagttaaaaatatttttttataactaaaatattttctcttaaattttaatttgttcaaaagttaaaaaaatatattttgtaagaggtgacacacttatatgactatatatttgagcattttttatcatatttttttatttttttttatttttttgttacttttttattatatcaattttagaatacaaaacatacattcatttttttttattattattatattatcatttttctgatttttatattttgtaagtttaatttaaattatttaaatagttaaaattattagaaataaaaatagcatttttttacttaaaaaatactttttgtagtttacattataaattaaaaacaaaaatatgaactttaaaatgatttatgtggcatcctatgttaattttaattcatatt

SEQ ID NO: 151802 - DNA, 743 bp, Cannabis sativa
  modified_base (711)..(712): a, c, t, g, unknown or other
ttttcccaccaaaatatgaggttagatggttttttgcaagtaaattgatagttgagggggttttgccgcaaattactctagttttaatcactaattcaagtttcttctaacattgtcttttgaacagcttgcacatgagggcatctctaatgaaacaccgtatatgtaattaacgtcgactcaaatttttttaaatattttatttaatgaaaagtattcaataattaaacaaataaatgagcaccgccatgttgatgttgaaccatttttgaaagttttttattgaaaagtcaaagtagaaccctaagaccatctctaataatgtaaaatttgtgttaaatttaacacaaaaaaataaatttgtactatatttaacccaccatttataattatgttccaatgtacaacatgtaaaataagtaaacaaataattaattatattaatagtcatttgatattttattgagaatatacaaaaattgttattttttattgtttaaataatggtaatatagtaaataaagaatgtaaaatttagtaaaaatcaatgaatcataataattagtagtattatagtaaataaaaaagtaacatttattgtgggccaaatttagtacaataatgttaggcaaatttatatgttatattaacttttgccattttttttacagaaatactgtcagacgatattttttactgtgtttttttatnngtttcatactgcagtatactgtgtaaagttt

SEQ ID NO: 151803 - DNA, 1085 bp, Cannabis sativa
  modified_base (308)..(308): a, c, t, g, unknown or other
  modified_base (532)..(533): a, c, t, g, unknown or other
gccccaaccgcgtaaaaatctctccctcttaatttcttgcagctttctaaattattattattttattggttgtagaaaacctcggtcaacagaattctttagagttctctatatacatttatttattttttaaataaatatatactttttaagagaattaccctatatattattttttttcaaatttacagttagagtttctaaagtggttacagcgctagttgcaatagaggtttctgtcgattttttgttgcaatttaagttgcagcgctagttgcaatagggttttctatgtagaatttcgtaanaatacaaaaaaaaaaaactattttgaaatgtaaaaataaaaaagcccatactttttataatatttatatatataattaaaaatttctacaaatagtcacaagcgaagcacgacctgcttactagttattttagagtaaatataatatttatacatgtattataattttttttgaggcttttttatttttacactttaagacatttttttttttgcatttttacnnaattctacatagaaacctttattgcaactagtgctgcaacttaaattgcaacaaaaaattgtatagaaacccctattacaactagcgctgcaactattttaacccaaaccaaaccggtaaattttaattttttttaaaaaaaagttaaaaaagttaaattaaaaaataaaaaaatagtatttggagtaattggagtaattctttttttttttttttgagaacatacacgtattactatttaaaataaaattattataaataaattttaaaagaaatatatattttattaaaatgtaattattcgaggtatactttgttaataaataaaatttaaaaaatgtatatatatttttttttaaggaaaatggaaactttattaaatagaagaatcatccattacaatagaaagaaaatcagtgggaacattatcctcactaaaaatactatctgggtacaaacaagagctacgagcaagccaatgtgcagctttgtttacagaccgtttaacaaaagtaattgtgactgactgtagatcggccagaagagaacgac

SEQ ID NO: 151804 - DNA, 685 bp, Cannabis sativa
  modified_base (642)..(647): a, c, t, g, unknown or other
atacgatcccactgtcgattgatcactttttaaggtcaacaatgtcgaaccagtaaaactttccaatatggaagccaaaaaatgattgactttctctgaaaaaaaaagcatttgttttcttatttttttgcatctttccatacttaaaatctactggttctacttcttggagaatttattctcttgatcgtggcaaaggagcaatatctccctcttcagtaccatcgaatgctttcttcttcagttcatcaggatgatttgtaggaaagtaccgtctatgacccatataacgcatcttgtgtccatttgccaagggacgagcccatgtgtttgtgcaacaatttgaacaaccttcataaccttttgtgcttaagcctggtaaattaatataagctggaaaatcactaatagtctataacaacactactttaagattaaagaattatttttttaaaccatcataggcctgcgcactattattcccatacaatgctattaaatcttcaatcaattgttccaaatatacatcgatattatgtccatgttgttacaagtctgatattattaaagaattcctattgaatttccctctcatcactaaccagggaggaagattatacataacaaggaagacatgccatnnnnnntgacgactacttagagatctatgtggatttactccatc

SEQ ID NO: 151805 - DNA, 581 bp, Cannabis sativa
ttgtttcatacttccactagttttctgattttaattttctctcttaatttttatttaaccaaatagaagtaagaatttaattttaaagtacttaactacaatccctgtgggatcgacctcactttttgtgagtctattactagttaacgatacgtatacttgcgtgttaaaattaccacaacagttaccaaacatgttaggagacatattttgtagttgttgaaaaacttgttgtgacattgacattggacgtggggttaaagtaaatgcgctaccttgctgttgtgatggtaaaaaattttgtaaaaagttttcaaatggtgggtcatgtagagaagggtcactagaggtgccaaattgatcaatcttatcacgcacttttaacataaactcaacaaagactcccatatcttctggactaatggatgtagatgggccttgtgattgagcttgactttgagtactagaacttgttactgatttgtctttcaatttataatccactcctctttgatagtccaaccgattcccaagaactttattaatagcttgaaattgcttgtatttggtagaagatccat

SEQ ID NO: 151806 - DNA, 973 bp, Cannabis sativa
  modified_base (35)..(55): a, c, t, g, unknown or other
attggtgataaccattcagctcgccaataaaaggnnnnnnnnnnnnnnnnnnnnnaatgggaactcggtaaatatcctttataaggagaccctaaagaaaaatggagctcaaaaagccaaattaaggccttgtatggtgaacctttttggattcccctgggacagtatcgccagccttggcataatcgagctcgcattaactttaggcaaggtgcctttatctgctactgttatgcaagacttcttagtcattgacctaccctcagcttacaacatattgttgggtcgtctagcactgatcggactaggggcagtcagttcgatcaagcacctatccttgaagtttcaaatgccagatcgtgtgggactggtgcgtggcgaccaaatgttggctcgcaattgctatcgcataaagttatagcataggtaagctggtcatcaggtgatgacgatcttagcaagagaaaatgagaagaaaggcgaagatcttgatccccgagttcaagatgaaagaaacctactaaaactaatcgaagaattggaagacgttattctcgacccaggaaatcccacaaaatgtgtatacattgggaagaatctggacgagcagctcaaatagcagttaataaactttttgaaggcaaaccaggatcaatttgcttggagccatggagatatgacagggatcgaccctaatattatctgccatcacttaaatgttgatccaaactacccagcaaagagacagaatatgaggcccttggattctgagaggcaaggggcactaaaacaggaggttgacaagttgttggccaacgaatttatacgcgaggtgttttatccctcgcgaataaccaatccagttcttgtctcgaaacctaacgaaacttaaagaacttgtattgacttctccgatctacataaggcgtgcccaaaagattgttttccacttcccaggatcgaccagttagtg

SEQ ID NO: 151807 - DNA, 662 bp, Cannabis sativa
attgatttgttatagataacttatctccatagaaattaatatttttcttaggtttaatagattgcatgcttcatgatctattgcttagtaaaaaaaaattaagtattgagcgttttgccttaattaattgtactagggaggttgagaaaattaattgcttcagcattaatagcggggttaatagtttaattgaaaaatcagaatagtatttattattattgatcttgaatgattattaagggtggagattaatccttaactatttcttaatagtgtaatatctatctttatttgctttctaatttattgtttaatctttataaactaaaacccccacttttcataataaattgataatagtcctcacgagatcgacatgtatttattgttatgttgaagtaattggtaatatagaaataaaaattagtaaattttttgtagtaaatgacacatatgagtaattaagagtgcaattctaaatttatagtggagttaggagaaattaatatttttttattagcagattggttacataagctcatggttcccgagataatattatcttgtagactcaattagtttatttatttaatcaattaggattttaaataatgactatgtcttatttataaattttccctaagcaagtgcttaattgtgaa

SEQ ID NO: 151808 - DNA, 653 bp, Cannabis sativa
  modified_base (598)..(612): a, c, t, g, unknown or other
tataaattaataaattaacctaaactctttttcaaatcataaaggtcctaaattgtatgccaattaatatttcaagtatgataacgaacgaaaaaaacttgaacacattccattaaccacataaaaatatgaaaacataaaagttaaaaccttagcaatatattgataagctaagaaataatacaaccaacataaaatttaaaaaaaaaaataagaagagaataaaatatcatgatattaatcatcaataatgggaaaataatgaacgtacaaattaagaaataagaacaaataaaaatacctgtgaaaaattttcattgtcttgtttacaaagagaagtcatagcttttctatcttgcacattgacttcttgtagaaattaaaacttttaaaaatactttagtagaatagatttataaaatttgggagtttttttaggaggaaagaataatcatcttcatctttaaatattcagagataattaggaattacaaaataaaagtctaaaagatatttggtagaaatgaatactatggggagtagaagagtttttttagttagtaaatgaaaaaacgagtttttgcaaatgtcaataatnnnnnnnnnnnnnnnaaactgtatacgtctgcagaagtagaatgtaattctgttac

SEQ ID NO: 151809 - DNA, 514 bp, Cannabis sativa
  modified_base (251)..(257): a, c, t, g, unknown or other
atgtagatttaaaataaataattttagtatttataactcttcataaaatttattattatgtatatattaacagttttacacatatttgtctgtgcaggaagatctttcactagagcctgtactcatccagccaagtacgcaaacgatggtgtacttggattcaggcaatggcgacatagcggatgatctgaacttcatcatatccatgtaagttttatatcaaacatcccaatatgtaagtgtgttctttnnnnnnnaatttatatatgctaattaactttactttttgtacagattgttcaccatgtataaccaaatgataggacaacctgatcgacctatccaatggatgactcctatctgtcctgaacaatccgatgacaaatagtgtggatactacgtcatgaaattcatttaaagtttcatgaccgtagaagatccaatacaactgttgacccaacatgataggttatccactccgttcactaatgatgagataaatattatgtgtgat

SEQ ID NO: 151810 - DNA, 678 bp, Cannabis sativa
gcatgctttgccaagccatgggctactaaattttcaaagcgagccacatgggacaaaattgcccccaaaaatttagacaataaagctataacatcctcaaacaacacacttaaagcgctagagctttaacttcatactatacaccaactcataaatatatcaagaatgatcccaaaatatctacaaaataaaataagataaaagtgcattaatcctcttgcgataatattaaaattaataaaagaaattctcaattgttaaaagataacaactctcaaataaattatatttaaaataaacttattggtacatctatgtaatagttggtcttcctcaaacccgacctacaaattaacaaaataaaactttattaccacaaaagacaaagcaccaaaaaagcctaagatatatatgctcttggagaagagccttccaaaaccgaaatgctgcaaaagcctgatatcaccatggatgatattcttgccaaagctttaaaccttaccgtgttggatgaagatggttgggaaatcaacgaagctgggggagacgttgccagaggtcactgtgcgaagggccgattctgctccaacaaaccgatgagttgtcctcttctgaagacgattttaggtcgggtctggggaattgctgataataactggggtgtggaaattaaacaca

SEQ ID NO: 151811 - DNA, 1083 bp, Cannabis sativa
  modified_base (129)..(145): a, c, t, g, unknown or other
  modified_base (292)..(303): a, c, t, g, unknown or other
tactcattactctcactcaacaacaggtgtttggtctaatgcataacaaagcatatctaagacctctcactattgatcctaaggaattctttcatgtcacttatttttttctagaatagttgaaacttnnnnnnnnnnnnnnnnnatctatgtctagaagtcgaaaagcttctatagatgtagccattagaaaaaaaatgcactagtatcttagtaaagtaagttgcttgcactagagtaagtaaattaccagacataccataagccacatgtttagataaactcaaacctnnnnnnnnnnnnacaggaagttttgttaagtctattaaatagacatattttcaaaatttcctttcttgtccttgtaataaatttttttttagttactccatgtgaatggtttcagccatagttctcttggctttgcttcttagttccttatattgactatccattacctgtttaaactaacaatggatttcatcacaagtgtcttccaagtcataacagggcgagttccttgagaccctcccactataataaggtaccgtgactttctgtctaagagcactaagtggtattgacctcatcggttgtgtcaagacaacagtggtagtggaaccatcttatatacaataagatgatagaacacattggaatcaaataaaactatctcctttactttgctactttattttaagatttagtcatattcttagaaagtagtatttttttgaaacaaatactttcttatctaaatgattataggatggtccacccctaatcacttagatggctatcaaacatgcaaatctaagtgaacatttctagcttttcttaaggtcacgatcaggacatccatgaatctagtaatggtctacactaagtacacaactatttcatcgttttaaaattttcctttcactagggttttaccctagaaggacttaggcaactactagtaactaatcataaaccgtttactttcatcattgtgcaatttgaatttctagggaggtaagtttgggtataattcaaaaattcaacttaatgatctttgaactgcatatctaccaaatattt

SEQ ID NO: 151812 - DNA, 636 bp, Cannabis sativa
taatcatggaattaataaataagaggttatttggttgatgagactcaataaataatctaatttaatggagcttagaactataggtccatggtccccaaattgccaccttgaaacactatcaagagtagggataaagagttgtataaagatattcaaaaaaaatctattttgaattggcaaaacagtaattatttatttttttaataaataaataattttttcaaattaattaaataggaaaaaagacaacaataattcttaaagacaaaaaataatttgttgagacaagatttgtcaagaaaaaagttattagaacaaatatatcaaccttgtcctaaaagacggtggtaggcgccttgttcctgtccctattagatttgtctttttgggttaattaattcaattagataaatatctaatttgaaaataagttaaagatatttcaaggttgttgagatattctctcatgtaattgagagattccctcataaatatcagtaaccgaatttagttatagatattcatttatttaaacatttaaataataatttaattaaaaggatttaactactataaataggagtctaatttgagaaataagtgttgggttttgtgccctaaataaaaccctttaca

SEQ ID NO: 151813 - DNA, 660 bp, Cannabis sativa
ctctctaatgcgcttcctattagatctgtgcttggaagaagattccacattgaggataccaattgccctttgtgcagttaaggggaagaatcaatggaacatcttttcttgtcttgtgatgtggtaatgcatttttggcgttcttcaccatggggcatatatcctatatgtaatgctgggatttgagtttgggactgagtcaaattcatctggaatcttaatactagggggattcgattggaggaagtatttttgtgtgcctcgtttgttgttgaaactatctggagaattcgtaatgagcttatacataacaacactcgcccgaatattttgaaatgtatatattgacctgatttgtacttcttatgcagagcttcatgatgttgtcttgccttccccaacaccttctttggaggggacttggaggcctcctcctctggagtagataaaattaaattgtgatgtcagggtaggcttggaaagtatgtgcatagaggtggtagccagaaaccatcaaggtactgtggttcagattcacacggctcagttagattttgtggatgcttcatgtggagaagcaacgacttgttgttcagttgtctctttggctctggagcaaggcttcaaatatgttttggtggagagtgactcgagaatagt

SEQ ID NO: 151814 - DNA, 1516 bp, Cannabis sativa
catattagtggtccactaatatattctcaataaaaaattattaaataattttaaaatttgttaaattgtaaataaaacataaaaaaaatgtattttttttgctaagcgttattcaatacaaaaagttattaaataatttaaagttaaaaaaataattaaataatatttatttaattaataaaaataaaaaaaaatctattttttcagagatataaaaaatattatttatagttatatctttccttgtttcttcgtatttgtgcaaataaatttgttgaagatatttttgtaaaaaaaatcaagtttaggtataatactgaaaaaatctcttataataggatttaagagacttatagtgatgaaggtaatgtaaatataactttaagtatataatccgtcagaagaaaaaacatgtggtatataaatatataaaatttaaaacatcaagtatttatgccgcaatactctatgtctgaatatgatttagcagaaaagtagtgacagaagcaacggaaatgtaacttaaagtatttaatccgtcgaaaaaaacatgtagtattaagtgtataaaactgaaaacgtttggtatttatgccgcaaatattcctattttaaaacataatatatataagagtaatttacagcataatctccttaagtggccaggtttttgcaactaactcttaattctaaaattttggtggtaaaacctcctaaacccaagttctgttagcacttagcccattccatttatttttaggtgttaagtgccagattggaatgtctacgtgtacatagtgtacacgtggcacaatttaattagtccacgtaataaatatttataattaaaataaaatttaaaataaagaaaaataatttaatttgttttaacagaaaaataatttaaaaattaaaagtaaaacatttttttttcaatccaacaaatccttttttttcttcattattttctatttttcttcttcttcatcttcttcataccatcgacatccaccgaaaccaccactacctaccatctacaaccaccactgctcaccaacgccactaccgtaccctattttttatacctaaatcacacatacacaaaaacaaacaaacaaaaaaatcaaaccaaatttgagaaccctagatctgaaaacacttcacattcatccaaccccatatctgaagccttctctcgcaacacctccaccgctccttctcttgccggaaaacttggggcaaatctgaaaatgccctccctctccacttggatcaggaaaataaaacaaaaatagataagaaaaaaagctacgaactttacaatattacacaaaagaaaaaaagagagagaagatgatttgggaaaagcccagatgaatatagataaaaatacattatatatacataccagaagaagagcagacaactcgatctcggtcgtgggtcgaggaattgaaggagggtttctattacaggagtttcttgaggctaaacgcaagagagagagagagagaga

SEQ ID NO: 151815 - DNA, 824 bp, Cannabis sativa
  modified_base (379)..(380): a, c, t, g, unknown or other
  modified_base (782)..(798): a, c, t, g, unknown or other
aaacaatctcatcatctccttagtggacttctctgcatatttagaacatctttttgaaagctgcatatttattagaacatcttcattggtttttttcttttctttgaaagcatctcattggtttttaattagagttttttaattttacactttaaaataatttttttatatttttacggaattttacacagaatttcccataccaactaacggagcaatcaaaatccgtatagaaaccaccggccgagaaactaccagaaaacccaaaccttaaattaaaaaaaaaaaaaaagttaaaaaatagtatctaaagtgattttttttttttcaacttaaattaatttttaaaaattagaaatttttttccacattattttcnnttaatattaatagttaattttattttattttcacttgttttttttaatcacctatgctcttttttattttttgttatataaattttatgtaatttattattttataggcatactagtaaataacccgcgcttcgcaacggatgtttaatttttttaaaaaatataaataaataaattatgtcttttatttaatgataactaaatagtaaaattatactgatttttttaattatttaaataattatttgagaagttattgtacgtaataaatttttacttctgacacattttaattagcttgataaaataacagtataaaataaataaattaataatttaattttttttatttgtggttttttaatttaaaaaaaaataataatatctgaccttaaatttaannnnnnnnnnnnnnnnnatcaaatttaaaaataagatagacaa

SEQ ID NO: 151816 - DNA, 1441 bp, Cannabis sativa
  modified_base (1096)..(1101): a, c, t, g, unknown or other
gattagttttaccacccgcattgtacgaggtgcataatatctttcacattctatgttgagaaagtatgtgtctgctccgaaatttattttgagttatgatgatattgaactataaataaatttattttatgaggaagcgacttggggatcagagtcgcagatgcgggaggtgtattaccaaattattcaggtaaattttgaggacaaaattcttataaggagaggatggttgtaatatcccaatagcctaatggtaagtaattaggatttataactatattatgggttaattagataataagtgggattatgatcctactaatctagttcaacataaattaaaattttgctataaatagataaataagcgtaatttataaattacagagaattatatagtatatatgaatgtaatatgagttaccgatgtaataaaaatattttcaggtttggcgaccttagagactcaattagggggccagaaatgtcataaccggtttaattgatagaatttatgggaatattatgataagttgataatatagatattagggtaattaggagtatgtggaatttaacttagcgccctagaactatagatttcttagtgactatgaaatgataagataattataaatataatatttttattattttattattatattattattattattaatattattgttataatattattttattatataaaacttatcagtaaattgataagtatatatattatacgttatacatttataaatagaagaagaataaaaacgaaaccctcctccttcgtcaataaattctctcttctcttatatctattttcttcgattttcaatccaaaacctagcgatctaagctccggtagtggcaggatagaaaatcctcatagcggaaaagcttaaggtaagatttaattttgttttaagtgtaaaataattggttttgtataggggttttgcgaaatagaatagttatgaaggttctgacgttataggattgttctcgggtagtcatgagactagttctgatgttttcttgctaaaattgaggtgattttgatttagaaattgagtttagaactttnnnnnncttaagtccgaacactagtggcgtttgctaattacaggctcgattttagattgtatttcgtaagtatggtagtatatatggtatctatgtgccctatgaagtttggggaggtttgaacaggttctagtagcgtttcgagtgcgtcaactttaaaaaatcatatttttgcccttgataaaccagtcaactggtttgtaagccagtcaaccggttctggccaaatagtttaccatttcgggtagcctcgggcactcgagaatcgtattttggtcataacttttcactcgggtgtctgttttggatgttctatatgttcggctttgtgccctaaataaaactc

SEQ ID NO: 151817 - DNA, 614 bp, Cannabis sativa
  modified_base (134)..(137): a, c, t, g, unknown or other
tactatagacaacaaaaatcattcatattccatacaataaaatatacctacaataaaaaataaaacaaaataatatattattattataaaaaaaattgtatgtaccatataacaaaattatatatcacctttannnntaataaaataaaaattaaacatgcatgatctaaaatgaaatgatatactatacaataaaacttatatagcatataacaaaaaatatataccttacaattaaaatatatataataacatcaaataaaaataaaaatatataagatactaataaaattatatatcatgtcaacaaaagtataacagaaaatagaacttaaatattattttaaaaaaaataatgtaccgtataataaaaaaatacttattcaccaaaatatatatactattaataataataaaaatatatattactaaaatatatatatctgtatacactaaccaaattatatactaaaattaaaatatatatcatgacaacataattatataccgccattgtatacaataaaatataaactaattattatgctaacaaaattatataccgctattatacatagcaaaataaaaaattatatcatttaaaaataataata

SEQ ID NO: 151818 - DNA, 650 bp, Cannabis sativa
  modified_base (67)..(70): a, c, t, g, unknown or other
atcccacttgaccttccccaggcggtgtgggattggacaacttactcggtatttccccttacggatnnnnggactactgactgtcacacttttacttttcactcttaagctactcatggttgatgggcatgaaggagataataaagatagaaggttatgcttgggattatttcatagccatggaaatccaagctaatcaccattccttccaagctgttgggccactcttccgcccattgcttaccttggagttaaggagtagggcccacaagatatcgaggctctccatggaggctagggacatttccacattggccatagaggaaaacttctgcaagtacggaatctgttaacccataaactttccatggttacatggacatcaatgtttaacacgtggcaagaaagatgacatctcggagttgagtagtctcgagtcatagtagttgatctgggaagggtccctagccctgtaccaaggttgaatttgggaagtccataatggaagtttgaattctgataagttatttccaactcactatttttttagtattcagtaggggtgttcacggtgcgggtggtgcggtttttaaccattttttcaaaccaacccgcaaatgcgatttttctaattttccaaaccgtacccg

SEQ ID NO: 151819 - DNA, 576 bp, Cannabis sativa
  modified_base (550)..(550): a, c, t, g, unknown or other
tctcctggttcgtgagccacgaggtctgcctcgtggtcttctcactccaagttcaagttgattttgagctttcgtcccctgtgccgccctggccaacgctgcatcacgctctaactcagcgttttgatgttgtgcctcttccagacggcgtctcaggcgacgactttctgtttcacaagttccttctcccatagactgggcacctccacgattgagctcttcatccctcgtctcagggtttcggccacccccacgctgagttctcctcaagcgtgttgtccgcgtactaggaccaacgtcgggttgggctctccgggaacgtgtggtccgtgtactagggccaccctcaagttaagtcctcctagaacgggtggtccgtttggactgcgggttggtagaccttctgaagcatatgggctatttcccagaatgatgattagtttcctcatgtggggtgttaacatttttttggattttcagccatgaaagaggtggttttttttttaagaagggagggtttttctaagctttttcacagaggctctcaatnaaagcaccaaattgttaacgcagatt

SEQ ID NO: 151820 - DNA, 890 bp, Cannabis sativa
acttcagtagccgattttggtgttggccaatcccgaacagcttcaatctttgccagatccacaatgatcccatctttatctgctatgtgccccacgaaagagacacgagttaaccagaattcacactttttgaatttagcatacagcttgtggtctcgtaaccgttgcaatacagatctaagatgcaactcaagttcttcttctaattcagaatacaccaagatgtcatcgataaatacgatcacacatctatccagataatccttgaatacccgattcataaaatccatgaatgcttccggggcattagtcagtccaaaagacatcactagaaattcataatgtccatatcgagtacggaaagcagttttcgagacatcttcttctcaaattctcaactgatgatagcctgagcaaagatcgatcttagaaaacactgtcttccccttcagttgatcaaacagatcatcaattcgaggtaaaggatacttgttcttaatagttagctggttcaactcccggtaatcaatacacatccgcagagattcatctttcttcttcacaaataatgttggagcaccgcaaggtgagtagctcaatctaatgaatccctgattcaataattcttgtaattgtaacttcaattctttaaattctgctagagccattcgatacggtggttttgatactggatctgctcccggaaccaactcaattacaaattcaatctcccgcgtaggtcgcaatcccgataaatcttctggaaagaagtcaaggaactcgcacacaaatcttgtatactcaggtcttgatgtcacaggatggccgctatccactgtagtgactatgaatcccagacaacctctgctcatcaggtccttaactttcaa

SEQ ID NO: 151821 - DNA, 693 bp, Cannabis sativa
tcaaagaaactaataacatgaataagagttcatgattactcaggatttaggccgatctaccattgatcatcattatgatgtaaattaggtctttatagtaaatattatgtttgataaagacatcttaattacatatcggtccttgtcatatatagtatctattatatacaacaccttcacttagatatcatactacatcaataatctgaatcgacattacttacaccaaataaggggcatcagtgaaccgtactatcaaccattgattaaaaattcctaaactttaatatgttgtttgttgttttattcatggctaagtggtcttaattaccggagttactaatgaagcaaaaaagtgatttaagattgaagttatgttggggacagagttagttcctaagacatgtattgaacagtatcgataaaaattaaatgaactgagaattcagttgtagaaatgcttgacttacggtacaccagatcgtgtagttattttggggtacgtcagattatttgttaaaagaaaggacagatcagtgagaatggtattgcttaatcaaagggtgaataaatggtctattaagggaagcatccttgtaacgcccgcattttaaatttactagactcaaaagataactttgatatattatagctttataactatatggatcgggatcctgagtatcaaaatac

SEQ ID NO: 151822 - DNA, 853 bp, Cannabis sativa
tggtgatttggacatccataaataatattttataacatttaaataattataacgtacatattaaaaaaaaattaaaaaaacactcttaaattctacaaaatagatcagaatatttttgagtaattggttgattttttccaaactgattaattatgtacctaaaacaaaattatattaattggaaaataagcttcatcacttaaaagttttcaataataagtgatccaatcgaaatgtatgattctcgtgtggattttatttatttattaataaaataaaagtctttgattataaatcttcaaattgataatatacaattgtacgatgactttaaagcaaagaaaaggaattttattcacaaccaactaccaaaccatacaagaactagcttacagcagcaaaagctcaaaaaaggctgattaaagaaacaacatcaccctccctttttctaaatctggcaaaattcccactcttaactttaactcttaagacattttaattagggataatcatctaatccaatctaacatttttcttttcattcgatccaatctgattagtaatcggattcaaaaaatcattatctaattcaatctaattacctcaaaatctaattcaatccaatccaattatactaattagattggatcaattttttaattaaatatctaaacacctaaattttaatattaactaaaaaatatgaagaagaataagtataaattaaatatcactctttatttaaatttaatactctataaacatataatcattacaagtagaatacaattaaaagtttgaaataattaaaataataagtaataaaatagaataaaatatcatgaaaataaat

SEQ ID NO: 151823 - DNA, 881 bp, Cannabis sativa
caggatatgatttagaaaataagggaaaataagatctaagatctgaaagaacaataggctcatcttgtatctattattgtattaccgacacttcctgttgtaccactatatgtgatggaatttatgaagccaacttactattagatcaggaatcaaaaactaaatgaaccaccaattatgggacaagacaaaaaagttccagggtggtcaagatagcggttgatgtgagaataagaaattgtgacattatcctcagtgttcaagatgctaaaaggtgccatttgaaccaatgtagagccagatcttgttttattatggggtagtgggtcatttgaaaagaacctacccatagttaagaaagaatgatgttaaagataaaagtgtatgggtcctgcccaagtgttggttatgacttaaggggactcaggtatcggtcctttgactgactcaaattagaatttatgagaaatattataattgttatttcaatttatattggcattaaacattatactctcaattggggcgacatcaaaagatctaatggactgtgcatgtatgttatttagtggtagttcatctaacagggtaaaaaaaatgacaatatgagttaaatttgctggtaatcccaagtggaatataggacatgactagttaatggaggcatcaatctaattgattcaaataacaaaatcttttgtttaaaagtgatctagcattagcaaagttgggataatttatgagtagtctggaatactaggtgaattcaaggcgatgattctgtagtaattttgagattatgtaggcgtgggactacctatgttagcaagaagcatcatgttttgatagcttaccacgagggaacactatggttgagtttc

SEQ ID NO: 151824 - DNA, 744 bp, Cannabis sativa
agactttctatctcatctttcaataggcgtcattcattggtcgtgtgcccaatatccttatggaatttacaatacctgttaggatctctttttctcctcactttcctcatgggctcaggcttgccgaaggcaaccttttgctcatgtgcgaggtaaatattctcccaagtttcattaagctcattataaatagtatacactggcacatacttatcgtgcttcttctatttttttttatcctttgacagttccttagaaccgtcctttctcttcgaaccagaagccccgagttatcatttctcgtggaaacaatacttgttgaaacgttgctgggtttgcttctcgagcttgttttcaaaaaattcatttcctttcgggctttttttttccgaacaaatactcgagccttttggttgaactcagtgatgtttcttactcaatgaccatgtaagtcgtcccacagctcgccccttacggttgatggatcagtagagatccccgcctgaagggctgtaagttgtgtactgtcatccaaattcctaaccctagctgcagccatgctaaaacgacttaagtatgccttaagtgtctcaccaggctaatgctttatatcggttagttaggcctttttgggtcgtctatccctagcatcttggaacagtttcttgaaatccctggacagctgctcccaagaaattattgatgttgggttttgtgccctaaataaaatccattacaatctga

SEQ ID NO: 151825 - DNA, 531 bp, Cannabis sativa
atatctaatatcataatattaaacataattcaaattcaaaaatttcattatttaataatagggttatttgcggcaaaacctcctaaagtgggcatatttttgcaactaactccctaatctaaaattttagtggtaaaactacctaaaccactagtccgttagcaaatacactccccagtctaattgaccccgttttctgcttatgtggctgggtagcctaagtgcccagtcaccaaaatccatattacgtggcattgtacaatttaaaaaattaaaaattaaaaaaataattttaagaaaataaaaatttttaaagaaaagagaaatggaaacaaaattaattacaaaatttaaccaaagtaattcccttttcttccggtggtggtgttgatggtcgtcttcttcagcttctttcttcttcaaaaactaaaaacactaaaaaaaaataatagaaacggtatatattattatgttattgatatataatatgtattttcaataaattatatttttttcataaagaaaaaaaaa

SEQ ID NO: 151826 - DNA, 1131 bp, Cannabis sativa
tttttttataaaagttttttttttactgttatacgcatatattttcttttttactgtataatctacatattatatactgaattagtataaagttttttctcttttatactttttgtcacttcaagatatgtgtttttttttaaaaaaaaaaaattaataaaggttgatgggaaaattgcctgatatatatatatatatattttaaaaaactaattataaaagtttttattgtattaaatagtgaaaaagttttgatgtgatggtgttgtcattttgtgaattttatttttttaaaaaaaactaatcatgaagagcttaatatacatcttcctctagtttccacgcgttatctttttttctttttaaggtataatagtttttattatttatttttcattgtatttgagctctctctctactattcaccttcttcttctttttttttttctttttttttttcccaaatctataacattacccaaataaaagttaagtctctccttttgtagtaggtaactaaataaaaacagcatgtgaaggaggaagaaaaagaagaatgagaaagatgagagtgtggttgtgtgtgtgagagagagatggagagcttgctctatgatgaacttcttgtagaaatcttttagaaactcccactaagttcatgtcattcagtctctttggtctcaaagcgttgactccatctctaccgtacttctaaggccaccatctttctcaaacttaccattttctgttactggtttattttggcattgttttattattattttaaggttgttttaatgttgttttcttttatttttcttatcatattttccaaatattattgtactgctctatttttaatagtaataggaaaataatgatatttgtatgtaagttattttattcagtattatatgctccaatatatgttcagtttttctctattgtttcagtgttgttttttagttgttctgcttcttttcatttttgatgtcttctcctgtatgttctcttgttgtgccctagctccctacatttgttgtatttgttttgttgtttattttcccagtcagcttccatcctctttttttttttttttttggtcttctagatttcaccatttcaatggaa

SEQ ID NO: 151827 - DNA, 555 bp, Cannabis sativa
  modified_base (199)..(202): a, c, t, g, unknown or other
  modified_base (296)..(300): a, c, t, g, unknown or other
  modified_base (448)..(448): a, c, t, g, unknown or other
aaggctgtgaagaatcctgtttcaagagaaagagattcagacacagatcttggtgataccctgctacagacaagatacaagggttagagatttgagtggaagaaccaattaatattccgctgcgcccactgtaaggtttccgaaattataagattactttatttattttaattataagatcagatattagatttttttnnnnttaaaatttcaatgatcttatttttatattaaaataatcttgtataaattttaaaatttgctaaccatatcatatttttttttcaaatttgttnnnnntgaaatatattttattaattaaatgataagatttgataaatgttagttttaacatttgatcttattagatatattttattaaaaattaattttggcaaaaataacatgaaatttgaaaaattgattagtttaggtttgaatagaaatnttagggtttctaaccataaaatttaccaaacttattttattttattttttaataaaattggtaatttcctaaccataaaatatcttttttttcaaattgtttatttt

SEQ ID NO: 151828 - DNA, 745 bp, Cannabis sativa
  modified_base (478)..(507): a, c, t, g, unknown or other
gacgacgacgtctatatggcctggcagtcaaatggccaaagtattaagcttgacttctatcccaagcctgaagaggctcttgctaaattcctgaagaagaagaaaaggcttgatgctttgcttgaagcgcgtcgcggccctcgtcttcctcctcgtatcgactaggccgcggagtccaacccatttcatcattataatcatatctcttttcttttttatttacaaccatttttcttttctttaagacaatcttaatttaggtgtttattttctaatgggagacaattattatggcccgtccccaagccctttgtatattttttttggacctgccctttgggtaaggatattttaatttatatatatgatcactttgatacatattctttttgactttgcttttacttttggcctgtttgacatctgtccgtgtggtatgccttagtacccccccctgagtggcatgaaaactttgttnnnnnnnnnnnnnnnnnnnnnnnnnnnnnngaggttgcatacactttgacggtacaaattctttagacaaagcctaagtttacatatttggactattggtaataatttcagaggtaattggcgttccaagcccttggcacaatggtttcgtccatcctttttagcttataggttccggagccgatctcatcgtcaatctcatatggaccttcccaatttggcccaagtacccccactctgggttcttgagtggctgggaagactcttc

SEQ ID NO: 151829 - DNA, 811 bp, Cannabis sativa
gatcagtggttccatcatatgacgagacatgcgggtttttgtatcctgaaggaaaaggggtactcatgatatctggatgatacagctcaagctccttttcagagtcgtattcagattgcctcattagttcccccacttgatatctcataaacttgtcctctagctcatttatccgcaattggatgtgatcctcttgctttggaccgagctgttgctgaaggtcatgtttcttccgattcaagtgctctcgtagatccggttgggagtagttgctgatagacctcgtcttactcacagatcgcgtcctactcataaactatcttagagtgacttggagatttactggttcccatactttcacgaccattagctcgttgagtactttctcctcttcgagttgatcgattgtgggtccttgaccgcctcgaggtcacacttgcttcttcatgctctgttctttccccctgagtgcggttcgtcatatttcccccattagggtctatacgagtcctcgctctatgggtttgggaagaacactggtgattcctagcaggtgaccttcgttctccagtttgattcccaagattttcctcattttcatgaggaacttctcgttcatcagtttctggttgcctcccattctcattttcgtgagagggttctggctggtcattttgattttttaggggtatctcattctccctgtgttgttcttcccgggcattttcctatctcctggttcgtgagccatgaggcctgcctcgtggtcttctcactcatggttcaagttgattttgagcatttgtcccct

SEQ ID NO: 151830 - DNA, 586 bp, Cannabis sativa
  modified_base (44)..(70): a, c, t, g, unknown or other
  modified_base (276)..(277): a, c, t, g, unknown or other
taactggcccaaatcgggacttgattttttttataacaaattannnnnnnnnnnnnnnnnnnnnnnnnnnaaatagaggttctactgtaatatttaatttttttaaagcaattataatattcagaagaaaataataaaaattcttaaaaaatttgataaaatattaattttacttaataaaacttaaatcatttctaaaaaatattttcaaactttattttatttataaacacgtgtcttaaaaattaaattaaaattattaaaaatctaataaannatttaaataaactaaaatttttgaagaaaaaatcaaacttatttatatttataaacttatatcttaacaaatagagaaaaatatttaaaaattcaataaaaatataaaattatttcttaaaaaagttataaattaaattaaaataatgctatgtttacttaaataaatctacatttttgataaaaataaaatctactcaagtttgttcccgtaaaattttgtttttacaaaaaataaatttttaatatctatattaattttttaataaaaataaataatttttatatcatttaattagttttaaaattt

SEQ ID NO: 151831 - DNA, 695 bp, Cannabis sativa
ttgtcaaatattttctttcttcttctttttttattaaatattagttttttatgtattttttttttataaataaataaatgatatttaaattttaataaaatttaatatatcaaacaacatagttactcattttttttttaaatttttatatttaaaaattacaaaattaaataaaaataaacttatttttataaaactattttaatagatttataaaataacttataaataaattgaatagtatctaaacatcatatgagttacattagaaaaagaaaaaaaaaagtaatcttaagatatcttaaataataaaataacataatatagccaataaatatttctatatatatataaaagaaacaaaaagtttttttaatattagtcgtcattttttggaggcagaaaaatatatatttctcacatattaaaatgattattttattatttatgtatgtgaacaattttgaataaattttttagtgaaaaagtaaccaattgatatcttattcacatcaaaagcaactaaatagttgtttttttttttcaaaactctcaaaaagcaaaaatttctgaaaacaagatttttccaatttttttttctattttcggtaattattttgaatttcggtatatatgctgatatggcacgacagtatttgtgcaaataattttcttaaaggtatttttataaataa

SEQ ID NO: 151832 - DNA, 889 bp, Cannabis sativa
aggatttattaaatgattatataaagcataatttattaattatagagattatattgagatatgtgggtatcgaggataccatatttaaaataaatatattttttgggcttggcgactatggaaacttggcgatgtggtcagaaatgtcacgacactaatggatggattgaggttgacaaccctggcaagtcaagaagctaacattcaaatgagcttcaaagaagtactctttgtaaataaaaaccgcgatcgacacaagacatgcatcgtcgatcttggaaggaaaaatggccccagctcgctattgagatcattggaaccaagcttctatcgagccaactccagaaacaataattaaagacgtgtttaaaacacgatcattttgacccagtaaaagcaggaaaatcatatctatatgattttcaaatcataaactgcatttacactacgtgataagtgatcaaatcttatgattttagggatgattgttgtaaacatattacagtcaactttgtaattaactgtctactatgcaattataaatagtgacaaagaagatcaaaaaagagatgaaaaaactcatacaagagaggccctaaaaaataatcaaaaatctgaataagactgactcgtggactatgcggatttttaactgcaaaaccaagtaaaaaaccctgtgttcatatttttatttttacagcttatatattttcagtgtgaaatcactactatgagggtcaaatttggttaacgaaaatctgcgttaacactttgatccccaagattaattgcccaaacacagtcaaggattttaggctaattgcttgttgcaatgttatctataagattgcaaccaagtttttgagctctagaatcaggaaaatcttac

SEQ ID NO: 151833 - DNA, 743 bp, Cannabis sativa
tgtttagaaaaaaaattttaaccaaatgtaagcataaaaaatcaaatttcccaaaatagattgaggtatttaaaaaattaataaaaggagagaatcgaagagaaaatagattaattttaattattaattattatttattaagatttttttgaataattataatatttttattattattaaataaaaataatttttaatttttaaaagaaagatggggaagagttattattgagatatttttggtctttactttttcaataaacttaaaaaaattggaggaagtaagcggatatagattttgttttttgatttgtttattaattaatattgattaataaataggaaaaatgagaaaaaaaaaatagaagatcgattttcaagctatatattaggcataaaaacatattaactaatttagaattaagaaaacataacacagtaatattaatattaaggctaattaagatttttactctctgaatttaacatgtaccaaatcatcccggtcataaaagttcaggagcataatttagtacatgttaaaatttaggaaaaaaatcttaattagcctattattaataatatgtaaaatgcaaaaatataactatgtatcttaagaaaaagagtaagcatgacacaccttagtacttgatagccatatgagacttaattgttagactttttatttgggcttacattaacttttattggttttattaaaacttgggttgattggatagttc

SEQ ID NO: 151834 - DNA, 608 bp, Cannabis sativa
  modified_base (46)..(57): a, c, t, g, unknown or other
gagatctgagtgggaggagttatttaattccgctgcaaccactgtnnnnnnnnnnnnaccttttatgtgtttattttcatcatttttagaaattcatattacgttgttaaaaacatacttaatagtaaatctagatcctggtaaaatatattccaatagtttactccaaaaccattgaaaaaagccaaaacagaaaaactccaattatattctcaaaggaagatacaaagcacgtgaggtatccacatgtcgatcctctcattattacagttcaactcgccaacaaaagaataaagagagtattggtggataatggaagctcagtaaacatcctttacagggatacgctgaagaaaattgggttacaagatgcaaaattaaaaccttgcatggttaatttgtgtggatttactggtgatagtgtcgccagccaaggcatcattggacttccgttaactgtaggagagccattgtaatctatgacattaatgcaagacttcttgaacgtcgatctaccatcagtttataacatattgatgggtcgcccagcattgatcggactagaggcagttagttcaatcaaacacctatcattaaaattccaaaca

SEQ ID NO: 151835 - DNA, 622 bp, Cannabis sativa
ggaaaggcaaaagctgaacaggagtgagtctgtctaggatgggattgtacatgtcgtggcagcgtgacttggagtgttcggtctcgggacattggggattatattttgtagttgcagcgcgacctaaaaattgaattttggttcattttgtataaaagtttagaaacgggatcccggtgtttgtaaataattatgtaaattataatgattaatatttatcatcaaaagttttaatttgacacgttttttgagaaaaatctttgattcgtaaggataacagtgtaattgataaagcactgtagcgtcccttagcatcagggtgttacaattttggtatcagagccgccaggtttgtctactgaagcttgccaagacatgtacaatcttcatcagagaaagctcgactcgtggttaagtaagcctgtacttgttttgtagtatatgtgattattaaagtatgttaggaagcatattagattataattatttgttgagtgtgttgtctaataatccataagagcggtataagttttatgatcgctgtctaacctgcctggcttatgggttcgcaggctaagtcctattacatggatgccctgcgaaatataagaagtcagggtaa

SEQ ID NO: 151836 - DNA, 512 bp, Cannabis sativa
tagatttcctgctcttattccttcaccgttgtcagtctacattttaccggcgatcaacaccaacacccagtctccacacttcatgtaagttcttcatgactagtactctttcttactatttgtttatatagcacactttatgatttctgggttggatgtctgaacttctgggaatatttttgtttgagtttatgtatggttaattcctcctcttttgcatttagattacttcttttaactatgtttttgtcgagaaaccatcttcatcccacgtaatgacactttagggtttagagcagacctcgttttttcggttttacccttttttccctttctctctttacttttttgcaatgtcactatctgtgggattcttggacccgactcttgtcaaggaaaacctattgaggctttcttttatggcaagtgtccggagggggcctctttccagcggttaggggacccacattcccttcttaaattagggtttggtttggggccttactgctgga

SEQ ID NO: 151837 - DNA, 780 bp, Cannabis sativa
  modified_base (732)..(735): a, c, t, g, unknown or other
gtgaaccatgcaacataaaatcatttctgatattttattaattagtaattctaattatattgaaatagattttatttagggcagacaacctagcattcacaccctgaagaatactccttgacagcaaagaccccacaccaagcatgtttagaacaaattgagacggtccgcaccatgttacaagataacaataaaggtgcatacaagtctggcaagtacaacaagaacttgaagtcaaaatttctacccaaatgctaaaatagcgaacatctcggtaagtactctcacttgcaaacttgttaattaattcctttaacatttcatcgtgtaggaacccataaaagagctagtacccattgctttgtagcatggcttgccatcactcttaagtgatggctgttccaaggtaagtcgcgtaggggtaggcactacgtgatctcaaaagaggacactaagctataagcttttgttacacgtaagaccaactatgtgtaatccacttgctcacaagagtaacttcttatattactctttcagtttcacatgcgtactatggataacaccacaagtgaaacttggcgaatagcaaatgaccaagagacttgcctgcataatggtcgcttgggaggcatccataccatacaatgcatcaaacaagcacaaagaacttatgcagataaatttttgttgaaaatattctaccaggatctagatttactaacaagtaggttnnnntaacatcctaaatatgaattctataaaacaatgaaaataaacaca

SEQ ID NO: 151838 - DNA, 782 bp, Cannabis sativa
ggcctggggaaccctgccaaaacctgctaaccggtttttgaggctctgcaaaccgccggtttgcaccagagttcccaaaaaccttcattcattactcaattctccaccaaacgcaatgaaaccttccaaagtacctaatcagggtatacataatataatccaacttgtatttcactgaaaaactcagtgtaaacaaatatttcattagagatcaaagcttggaactcaaagctcaaacttgcacaacacccaatccaatcatcaaaaccagtaacaagaggctaataccaactcaaattaagcctagaatgtgaatcataactcaacctaaccctaacagccactaaatcacaaaatcacaaactcaacctaaacttaaattcaagaactaaggcaaggagtttctagagcttaccttggcttgatttcttcttgaatcccttgctgaaacactcaaaaaccagcagctaatcccctgtcctgagctggttcgaagagagaaagaaaggaatagaaagcttcttgattttctttgtattttcctgaagtttttttttttttctaaaatgaataaaggattgagtaagctaatccttgctgaacaaattagagtgctagatgtcacaaacctaggctgccacttaactctcaccaaaagaaatgactaaagtgcccttagacttaaaacatatgtatttctaaagctaggggtaaaatggtcaaattccataacctcgctcaatcccgataatttattttctctaaaatattttccactaaga

SEQ ID NO: 151839 - DNA, 908 bp, Cannabis sativa
  modified_base (462)..(462): a, c, t, g, unknown or other
  modified_base (598)..(601): a, c, t, g, unknown or other
gagttgaatgagctcatcctcctcctgagcttgttcagtccggccagcaccagacttcctcttcttccccgccatggacttaggagtaaagtgctcaagataaagcccgtacctcacaagattatcattggaggtcaactgtataatattccggtctaccacgacaaccgagcaagtttttgagctctatccctaagagcaagagtgaggggaggacggtgatatgttagaatctgctgaaatcgagtctgggtaatgctcgcatccttcaccatgaagtactcatcagcaaaacgccctattttgcttatggccttgtcattcgtgccggtcaaccacttgacgcttggctgagaaaaatagaagtacctcgacctgccttgttttggggtggacttcaaatcgaagaacctggcgacctcgtgaagagaaggagtaccccatccttaggaagcgtagagnacgaagagggcagacaaatacttaatgcccttaggagtgaactaggtcgggtagagaccaaagaagtctgccacatccttgaagtacttatgaaagggcatcaacgctccttgctgaccatgggctcccgaccagnnnnacatccccttgtcagggtttgtgacaagattattgtggacgggaatgtagcagtctagctcgcccaagtttccgccctggtcaagagtttgaaggcgcgcctccgtaatcttggacgtaggacttacccatctggcgcccaaggcaccttgccttttatgaggaaccgctgcggcaagctcctaagtgacgtagtccacgccctcaaccaacacgtgtctgtcagcattgactggctccccagcctcgttgtaccccccgtaatttgggggctcaacctcttcctctccctccgccttggagggact

SEQ ID NO: 151840 - DNA, 529 bp, Cannabis sativa
ttagcaaagatagcactgtaattggaaaagcactgtagcgtgccttagtattagggtgttacaacaccagtagaaatgtttgaagtatcgttagaaaaactagtcgtcttattagatgaagtagcacggctattatggttgttgctagacatagcaaaaaacccacctagagctaaaacattggactaagagtgagttcaccaaaaacacaaatatatggaaagcaaaacgtcggttagataaaataaaaatatatatatatcgaagctcaaggtgaaaaaaacaactagacatacaaacaaataccttactaatgctcactaattggataatacatgttctaaatagaccaccagttatggtcctctaattaaccaaagggtagataatattttagctagccagacaatcacaactcaaatcacatttactattatacgaagacaaacagtaaaagtacaaatttttactgcccacaaagatcaaacacaaacacaaacacaaacatacaacaagtaaaatatattta

SEQ ID NO: 151841 - DNA, 526 bp, Cannabis sativa
ttaattttagcatattttttatttagtttaaatcatgtttggagcattttcacgctttttatcttttaattttgcagatttaaaatagatgaagatgttgaaaatgtcaatagaaaaatgataaaatatctcataaaaatatcccggtggaaaatatcaaattcaaatccaaaaaaaaaaaagataaaagcacggattatagagcagaaggccacacgggccgcggcatggtattagcatgccatggcccgcctacgtgaaaaaccaaaggagatatcctaggaatgccacacgggccgcggcatggctttagcatgccacgtccgcccttatgttagcagaaaaaaaaatatctcgtttgaggttttctaaaaaaaatttaaatccgaatgagaatttaaacatgtgcatttttccatctttttgggccctcaatacctatataaagggaagaagagagttgatttcatcaagcaatttcagagagaaaaaaaaaagagagaatatagatgcaaagtggagagat

SEQ ID NO: 151842 - DNA, 830 bp, Cannabis sativa
ttatttttttattaaaaataatttttgatgatttttcaaaatccgtaaatcatagaaatttttttgggtttcttctcgttccatatgacatagtcactcgtatttgatttatcttgaatatgtaatctccaccaatattctttctttcacatctttccataactaggttacgtgaccgcgcctcacgcggtcgttataataattgatttaaaattaaatagtttaattatagacaattgttattaattttaaggaatgttatgataaaatataatttaaataatattttgaaatatttctttgtaaacaatattttttatgaaagttttatctttcatctaatcatcatcgtttagtatgatcaatctttctcttgtagtgactcgagagacagcaacatataattgaccatgggtaaatacttgcttagggagatataatccaacatgtttaagagattgtccttgacttttatttattgtcatagcaaaacatggtgttaaaggaagttgtcgtctattaagcttgaattgaatggccattttgattcgttaggagacatgataattcttgggattgtaacgttttgaccgatatttgttccagaaataatgtcagctctaatggatcattttccaagatgtgtaacaatcaatcttgtgccattgcataagcctttagtttgatttagatttctaaggaacattactggaacaccttcctttagtcaaatgtcatgatttggtatgccattaaatttcaaactatgcaaaaattcaggtggatacaaaagatcatcatcacttgtccttacacttgctttacataca

SEQ ID NO: 151843 - DNA, 835 bp, Cannabis sativa
tgcttccccttacctcggattgactagatggtggacggaaccttcgggttcaagctattgtccttcatggatgcctactccggctataacctgattaagatgcacattgcggatcaagaatgcactagctttaggactgataagggggtatactactacttggtcatgcccttcgggctaaaaaatactggtgcaacgtatcaaagaatggttaaccggatgttcaaagaccttctaggatgaaatatggaagtttacgtggacgacatgctagtcaagtctaaagcttgcgtgagccatgcggacgatctcacagagtgcttcgaagtggtctgaaggtacggaatgaaacttaacccgaagaagtgcactttcggggtcaaattagggaaatttttggggttcatcgtcagccagaggggaatagaggcgaatcttgaaaaaattcaaaccttattcaacatgtcttcccccaagaagcaaaaagtcgtgcaaagcttgaccgaaaaagttgccgccctaagccgattcctttcccgatcaacagacaagtgcattcccttcttcaacattttaaagaagtgtcagaaattggaggggacagaagaatgcgaggaggcattcaaaaaactaagaaaacatatggtcaaacctccaatcctatcaaagccggttcatagagaggacttgttactgtacttggccatctccgagaacgctgtcagcgcaaccttagtctgagaagaagaaaaagtccaacgtcttgtgtactatgttagcaagcgtatgataggggctgagatacggtacccattgattgaaaagttagttttct

SEQ ID NO: 151844 - DNA, 595 bp, Cannabis sativa
ttcgagagtgtggaatgaagagcttattagagctagctttgaggaagatgtggcctcggctattctaagcattaggccgctgttgtgcaatggagatatcaccttctggaaggggtcaaagactgggcagttcacggtgaaaagtggctattgggtaagtcaaagtggcagatttaagagacccattaaggtctgggagagattgtggcagtctaatattcaccctcggttgaaactagtactatggaaagtctggtctgatattttaccctccaaacttcggttgggtttggtagataaaagctgtccattttgtcatgaggaaacagagtctgtcctccacttgttctgcttctgcagcgttgcacgcgctgtgtggttccaaagtgcatggggaattcgtattgatgatctgcattgggaggatatatttcattttggttgttggtgggctcaagtaaaagatgagaggctcctcttattttcagcatgtctttgtgagatgatttggaagtggagaaacaagatcattttccaagggtgttccttctctttggcgaaattgatttcggatattaatctcagagttaaggag

SEQ ID NO: 151845 - DNA, 856 bp, Cannabis sativa
ggggctccaactcaccgacctggtgccttgcaatcaagtgatgtatggcttctttggcgaaggcatcgcccctgtcgggtatattagattaccactcataattagagaaaatccaactgccaaaacattgatgacgtagtttgtcgtgatcaacattccctcggttttgaatgccatgataggtttaccggccctcaacaacttgaaggcactaacatctatcaccacttatgcctcaaatttccaataaggcatggggtggcatgtgtaagtggagactagtagtctgcccgtcattgtttaaacttggccctgtccaaggccaaaataaagaagatgcctaccaaaagcctagtttacgagcccagcaagaagcaatgaagtctagcccaaggcagggacacagacataaatcctcactttggggatcctacaggttgcttcgggcctgtagaagagttggaagaaatggaggtcgaccccacttttctgacaagaagactgaagattggaaaaggcttagctccaaaaattaaatcagcattgatggaatttctaaggaaaaacctagaccttttttactggtcacatggagatatggtcagaattgacccctccgtgatgacccatgaactaaagatagatccaagcatctgacctgttcagcaaaagaggcaatttttggacaaggagtgcgcccaagagctcaaagatgaggtcaaaaggctgagacccatgacttcataatagaggcgttctacccacagtgggtatccaaccaagtactggtgcccaaacccaacaaaaagtggagagtacgcatcgaattcaccaacctaaacaaagcatgtccaaa

SEQ ID NO: 151846 - DNA, 638 bp, Cannabis sativa
tttttgcttttttttacaaaaatataataataataattgttatcccaattttggcactctgacgtggcatcacaggctggtgacacgtggaatcgactccccataatctgcccgaaaaaaaatgttccaaatagaacaccacacatatctgcacggatgaagtcttcctagccgaataatggacaatccgaacaacatgccaacacttagcaacttcagcacttgcatcgtgaatcatagaggcaatccctataactcagggagcatatcatagagatatggcaagctgtccaaatccctcaatcaatgtattctgtatttaatgtgtaatcttactgattatagacattttaaacaaaagggaaactttccctcaagcatatggccctataaatagtgatctattctcactgggcaaaaggtcgaaaagacttatctaagagagtttagttagagatatcactgtaagagctctaagagaagaatcactacattctttgttcttaagtcaataaaaatcaaggggagtaggctattaccgcactgttcaaggccgaacctctttaataactcggtgctctttatttatcttatcatattatatctatattatatcacttatcgcttacaattaagac

SEQ ID NO: 151847 - DNA, 1211 bp, Cannabis sativa
agccttggtaatgatttactttcatgttgctgctagctcaagaaggaaaaataatttcattcatgaattaaaagatgagaccggttcttgggttcagtgggggttgggtctgtctcaagttatggtagactattacgtgatattttcattctatggggtcaaattgtgctgaagttcttgatgttatacaaccatccataacatctgagaataatgttactcttttacagccagttttggaggaggaggtaaggcatgctgtcttccaaatgcacccagacaagtcacctgggcctgatggattgacgcctgctttctaccagaagtgttggcatattgtgggtaaagatgtttttaagatggttcaggatttcttccgatctaagtccatgcctcggggtcaaaatgctactaatctcgttctcattctgaagaagaagtctccttttgttatgggtgatctaaggcctattgctctttgtaatgtatcgtataaaatcatttcgaaagtcatggctaatcggctcaaaagcctattattgaaggtcatctcgaagtttcagagtgcttttattcctggtaggctcactactgacaatgttcttatttcatttgagatattacattatcttagacgtaagcaacaggggaagaatggttgtatggctctaaaacttgatatgagtaaggcatatgataggatggaatggtctttcttacaagatattttattacggatgcgctttacggaggcttgggttgacatgatcatgaatgtcttcgaaggattttgtataatattgttcatggtggtgaaagtttgggtcttattgtcccatctcggggaatccgtcagggggatccgttgtcaccgtatctgtttatcatctgtgcggaaggtttgtctgctcttattcagttgtatgaggagaggaagtggcttcatggttttcgggtggctaggggggctccttgtgtttcccatatgttgtttgctgatgacagctttctctattgtaaggcaaacagagaaaaggctcaacgggtcctagagttgcttaatacttttgagaaggcatcaagccaaaaggtgaaccttagtaagtcttctgttttctttaattataatatcgacgtcgggacttgtgattctgttttgtctactcttcatatgagggcggcatatgttggaagttattttaccaggaact

SEQ ID NO: 151848 - DNA, 754 bp, Cannabis sativa
ttcttttagaaaaaataattttaaaaaaacaaaaactaattaatataaattcatattattcaaaaaagaaaaaatattatatacatattaaatgaaataaaaattaattagtccatcttcttccagccattttatctttacagattaataattaactttttgtgtaaggagattaacaataaattttgattctcgattcaaatgctatctttcaattctattttcacatattcaaaattctcattccataaactgtctactaatatttttcaatcaatgaaacaaaaagacaaactttaattcccatataaaaaaatcaaactttcaatcccaataatttatagaaacaacattaaatttcaagttctcaaaatctataaataaataaataaataaataaaaagatctcataaacacaaactcaaacagtagaatcccaataaaatactaaaactcaagcatttaaaatacacacaataaaattcaaacccagaacttaacacacacatccgaatacaaattaaattataaataaatcaaatccaaactcaaatttgtcttcttcttattctttggcttggtctccgttcaagactattaaaactgttaagtttagaaatttgagaatttatgctactattttttgaattcatgtatttattagcaataaatttaatattttaagtatttatgtcacaaattgtataatagtaaagttaaaattttaatataattttactaagtaattattatt

SEQ ID NO: 151849 - DNA, 1316 bp, Cannabis sativa
acatattacaaatattgattccgattatttttcatttattccgttacatttctccattaatttattccgattctgattactgtatagtaaacgtgccattaatgagtaatactcatgaatgggtaaaagaataaaaaattaagtttttatgcttactttttttttatcgaattaaaaaaaatctctcatttttacatcgtacgggctgagattgttctatcggttaaaaaaaattaatttttttttttaacaaaaaaaaaagaaaagaaaaagataagtaaaagttaagtgtaacttaaatattttaacatgaacattattttaacatagtataaaagaagatattttttgatattttttttaattaagtagttaaactaaacataaaaaattaaatttctcttttattattcgttatttgattaaaatttgctggtttaatatttttaaaattaatattttataattaaatttgtttagtaaccattcataggtaatacccattgagaaatgttccatatatatatactagcaaagatctacgtgcgagacacgtatactaaattttatgctaggttttttctacattatttaaaagtggtacaatcaaaaaaagaaaaaatattattagttattaggtaagattattattatgtgtatctaaatgatataatttataatttttgacaattaaaagtaaataccagatgcaatatattagtgtttaagaaaacgtgataatttaaatatatttttaagttaatccaaaaattaactaaaaattaatgttcaaatacttaaggaaacataacttaaatgtgtgtaagataaaaaaaaattaaaaattaatttctaaatttttgataattgaagataacatttatctaaaaattgtagataagaaaactaatgatactcatgggtgaaggttaatctttatttgcttcgacagagacaatagtaaaatttttgtattttgcacttttcattttagccagattcacatataattggattgtctatttttatagcagaatttttttcctattctttatatcatatatgtttctctatgttctcccactcctaacaaacatagaaagagcacatggcataaccttatttatattcaattcccgaatattatataaaccaagccatttgattgaattgttagagtactacacaaaaatgcatatggaaaaacaaatagccattcctttgtttggaggtaatgaaatggaatggaatggaaatgaaataatttttattcaattcctttatttggttgcattttaaagtattggaatagcatt

SEQ ID NO: 151850 - DNA, 527 bp, Cannabis sativa
  modified_base (144)..(144): a, c, t, g, unknown or other
tataaaagatgtcatctacttattgctttatgtagatgacatgcttattataagtcaagaaagggctaaggttgaaatggttaaggatctgctcaagacagaatttgaaatggatgaccttggaaatgctaccaagatccttgngatttctatcctaagagacagggataaaggaaaactaatacttagacaggaagactacattgagaagatcatagataagttctctatgagggatgctaaggttgttaagcaacctattactagctagtatacactttctaaggaacaaagccctaagacagaaaaggaaattgaatctatgaaggatgtaccctactctaatgctataaggtctgtaatgtacttaatggtaagcacaagacctgacctaggttatgctatgagtgtacttaacaaatacatggctattccaggaaaagttcactggttagccatgaaatgggtattcaggtatctacttgggacaactaaagttggattaatctacaatagacagaaggcta

SEQ ID NO: 151851 - DNA, 588 bp, Cannabis sativa
tttgctgcttaggtcggcttgtactaaatgacttgtaatattttataaataaattttacaggatttcagatatggaactttaaattattttagtttataataaaatgtcgatgtttattgcaagttatttatttaactaattttaatattttttttaaatcacttgacttatggacctcaattaacatgaatagtggtttgtaaacacaacacgtggtatttctttgagtaggacgttacaatttaactattatctgtttatgtatatatattacatatcactaaattaaatatttttattataaaaattaatatatttatatatatatgaatagaattgattttttattctatctcattatttttattatctaactattatcttgtattgtaaagataatttatcatcttatattagtttttttaggaaacatgcatgtcttatattatcggtgtatcaataacataaatttatataaaattatatttatttatgcatatttatgaaatttttatttgtgccatcgttttatatataatattatttattatcaaaatattttctatgcattgtattaaatttttgtt

SEQ ID NO: 151852 - DNA, 505 bp, Cannabis sativa
tgatgaagttcaaccttctattacagattctcaaaatgctattcttcttgatatggtggaggaggaagaggttcgggtggcgctctttcaaatgcaccctgataaatcccctggtccggatggaatgagtccggggttttatcagaaatactgggatattgtggggagagatgtggttcgtctagttcgggagtttatgaacacggggatgcttccaattggtttaaatgatactaatctcgtgttgattccgaagaagaatactccttgtaacatgacggagttgcggcctatttccttatgtaatgtggtttataaagttctttcaaaagtcttggcaaatcggttgaagaaggttcttgatcaagttgtgtctgattttcaaagtgcgtttatcctggggagacttatttcggataatataatggtttcctttgaagttatgcattacttgaaaaggaaaacgggtgggaagcaaggttatatggctttaaaactcgatatg

SEQ ID NO: 151853 - DNA, 1157 bp, Cannabis sativa
agtcccaggctcttggttcggatcctttgggccagtagaagctggaggatctgttgtttgaacaggaggtatatctacagtttggctgcaggtagaagcaacaacctcaggttcaccataggccacttaggaagcgcagaactcgaggtacatgtccttagcatcacccaagtagtcatagttggcatgaggattagccttccaaaagtcaaagaagagctcaagaccggctgtctctggagcattaaccttgtctttcagcttcatcacctcggccgaaagctcctcctccttagacttcttctcctcttccacccgacgaagaactgctcgaagagaagtcctctcatcctgaagactgttcacttcagcgaataaggtctcaatggtctcttcaagacggtcagaaacctcgagatccttattcagctaggtatcttcttctgagcggtaaagagcttcttgttggcttcacccagctccatccgaacaactccaagctctaccctggcatcgtcagcgtccttcttggccaagtctacctccaccctcaaggtgttggacagagccgtgttcttggaagtagcagacttagcccaggagtaggtgtaggccaacttcagaccagcctgcacaaagaaaaaactttagcatttgagctaagtaaagaaaattaaaggaaagcgttaagaaagacttacccgggtaaattccttcaagactccgcccatcagcagctccaaagaagagtcattgtcagcaccagccagttgctcactgacctcatgaaccagccggttcatatactgggcaagcatctatttgcccttcttggcctctggaagcaccggtaaaggtggagtaggggcccgcacctgttcgggttcacttctgaccagctcaaaccgacccttcggtggtttagacctgtccgagcttcctccccgagactccttagacttagcagcttttggggtagaggggtttgcagccgttagctcctgagaaagatcaatgacctccccagcatgcatcttttccttagaagaggacccttcactacctttagacttcttggctggaggagaggcgctagagcttccgcccattctcttcttcagagcgtcaagcatctgctgagacatgtctgtacagaa

SEQ ID NO: 151854 - DNA, 527 bp, Cannabis sativa
gacggtttattagacattgggaatgtgcggattggctgggaattagaatttcctaaaatacccctttaatgccctttatgttattgtagtatggaggggcaaaatggtcattttgccccattgttgttttctcctttagtggacttagtaagtggaaaataaatgttaattgatgttatgttggctaaatatatgtgatttatgccccttttcttttatttcaaaagttagaaaatatttggaaaagaaaaacaaaaacctctctttctctctttctttctctctctttcggttttcagcagctgggtttggggggagttatttgtgtgtttcaagctaaattcttcaaggtttttatgatctctaagtgttggtaaggttcctttagctttccctcttgaatttgttgagaattatgaaaagatgagtgttggtatggtttttaatgttgttgctgctgttagttgttgttgttatttctatgattaaaatgcttgaattgaatgggttagataggtttaaaagca

SEQ ID NO: 151855 - DNA, 513 bp, Cannabis sativa
aattatttaaatttattttttaataataaaatatatttattattttataatgtgtgaataaaagttattatgactttatatttacgaaatgacgatcatttaaatgttgtttttttttttaaattttttttttacaaaatataaatagattttgtagtggttaaaaaatgaagtattcaatgtaccaaaattattttaaaagatgcgataacaatatgtagtatatattatagagtattgttagcggaactaggagtgtcttctagtactattcagagatagcggcgtcttatgattagttagtgatatttcttaaaaaaaatattacaataaattatatggacttgatacttaattataccaataacaatataacactaaagaaagtattagacatcattgatatattttagcatttctctaaattataaggtcctactatgtagatatattttcgtttatttttttttcaaaataaaatcatttatacatcactacagttatataagatta

SEQ ID NO: 151856 - DNA, 627 bp, Cannabis sativa
acttctggccaacgatgattgaagattcaaaagcctatgttaggaagtgcgacaaatgccaatgattttcaaaaatacctagagctccacttaatgagttgactcagatgcaaagcccgtggcccttcgccatttggggaatttacctgatcggacaattacccaagcgcaaaggaggccggttcggactgccgtacaagatagtttcagataatggcaagcagttcgacagccaatcctttgctgacttttgtgcaaaccatggcatcattaaaagtttctccgcagtggcacatcctcaagcaaatggtcaagttgaagcagtcaacaagaacatgaaggatacattgaagaaaaaactaggagatgccaaaggaaactggccagaagagcttcctgaagttctatggtcatatcgcaaaactgagaaaacggcaactggacacacaccgttcgcaatggcgtacggttatgaagctatgctgcctgtagaactcgagctaccttcccacgaaagattgatgtacaatttgattagttatcaatataagaaatttgaagtgatttatgtttgtatgaattttacatgcttatggtttaatatgtttattatgtttatacacaaaa

SEQ ID NO: 151857 - DNA, 618 bp, Cannabis sativa
atcaaactgcactttcagacgttagcaaaaaaagagtagagatcaattagttttagttctgatgaataatcgaagtgtatcacattacaaaatatatagaaaaaattaatttggtggacgattttatttaaatttatttttttgctaaaaatttatatacatatagtattaaatattatttagaatttatatctaacactaaatcagtatttagtatagatgattaaactaagttatctatacttttaggggtgataattcaggtcatgacctgcagatttgacacaaatatgacttgagattttatgggttcgatacaaaataaaaactatttggatcgtgtttgtattttataaatcttttgtgtcatggatcgtattcatatcatccatctaaaataaatttaagaattttacacgacaaaaacacaaaacgatgacactaaaaataacaatttagtttacaatccgccaacatgacacgagattttgcgagttcgaaatgacacaaaatttgtttgagtcgtgtttgtgtccgtgttttacaaatttttcgtgtcacgggtcgtgttcggactgaacaagacccaaacacaacacgccaacacaaattgccacc

SEQ ID NO: 151858 - DNA, 789 bp, Cannabis sativa
gtttcagaagttcatatttaggatgttaaataacacacttgttagcaaatctaagatcctggtaaaataaattccaacagcagatatgttagggacgtaccaatcatgttccttccttggcctaaacacttaattgtaacatccgaggtaacttctcttataaattaattattaatgattattggagtttgaatatcttcaatattcaaccatagtgaagtaggttctgtgaatatatgtgttgcggtgggatggatgaacaaactactgttatatctatgttatttgtcattatacaggaacttttaaaatttttgggggcattaaattacaaccgttatgatgcaaaaatttaggtagaatttggatcaaatttgatatatctgtgttctgttttgtttagggtccactcgctgaaccgccttcaagacgtgatgtgtcgaaggggaaagctccaatgcttcctccaccaggcggtcgtgcacggaagatgaagtattctcgaaaaagaacatggacacgatccctaaatcgctaaaatggatggtacttgaattcctgaacctcaaagataaacctgatataatcacaattcctgtaccccgaggattcatagcaccgcatacctagatcacgttatctggagaggatttgaagcaggttgcattgtgtgacttcatcgaaaactaggaaatgttgtttggaatgatgtatactcttctttaatctaattaatcttatatatatatatatatcaaattctagtcaaattattataagacactaata

SEQ ID NO: 151859 - DNA, 649 bp, Cannabis sativa
attaataacttaacaattaatttcttacattttattattacttgtctatgcaatcatcatttcactactgtcttttaaaaaatattcatttttaacaataaaaaaatttcactatcaaaatttaaacataataaacagagattcttcaattaaaataataacaatccaaattttataatttagtatttgtacatacgtgtggccatttcataaaattggaaaaggacattctttatacatactaatttgcatatatttgaaattgtaatagatactagtatacattaattggtaatttggtgtatatttaataaaaatatatatagaatattttttaatggttattaatccattgatattattaaataaatttttataaatattaattttaaaaatattaaattattagattttgatccaataatgaaaaataataatggaaaataaaagaaaattttaaatttttatacttaatttagctatttaattaaaaaaaaatattaaaaaaatatctatttttatactatgtcaaacatatgtttggatacaaaatatttaagtcaacttaacttttttatttttttttagaataattacataagatactattttttgtaaaaaaattacatttttacgtttaaatattttt

SEQ ID NO: 151860 - DNA, 538 bp, Cannabis sativa
  modified_base (36)..(44): a, c, t, g, unknown or other
attaataagtaaaactgattatattgaaatgagttnnnnnnnnngcataaaacccaacatatatataaaataataattaaataataatatatatatgtttgtataaaaaaaaaataactgatccccttcgtcccctctctctctctctctacctatctctcttcaaaatacaaaacaaaaaccaacaaactccacaaccaccacacttcggcgacccacctctggccaccgaccagccccacgcgctggaccactcgaaccttctagtgctggcgacctcaccacccaagcggcgccgctcctttcgttgccgttagcttgggatcgcaagtcaaagttgtgtgattcaaactttgaacggattttccagtcacctttggtgtccgtttggcgagacatttttaccaataaactcagctcgttgaggggaacaacctacactaaacctttttgcccaattcgatactttttctggtgacatttttgtagctccacccctttccggtgacatcgcgtaccgttttgacaaacgattggc

SEQ ID NO: 151861 - DNA, 950 bp, Cannabis sativa
cgaggcatcctgctcggactatatttcccgagcaaatattccaagtggattccacatgtcaccattcatgtgatgccacgtcagagtgcaatatttgggataacatgttcgactctcatctcccgggctaattttaggccagctattaaaacttcatactcggcttcgttattagatgccttgaatccaaatttgactgcagcatgcaggtgttgcccctaggcgtgacaagggcaattcctgcaccagatagctgatttgtagctgacccgtccacgtgtagtttccaagttggcttgtcttcactgttacttggctgaggtgtttctaccggctcggggttgctttctgataggctttcttctttgcatgtgcgaacgacaaagtctgctaaggcctggcctttgatttttgttcggggttggaaggtaattttgtattgacctagctccactgcccacttgagtacccgtccacaggcgtccaacttttgccatatttggcgtaatggttggtcagtgtacacccgaacaggatgagctttaaaatagggccttaacttccttgttgctcgaataaggcaataagcgagattctctatcaatggatatcggcctttggcctcaatgtgtcttttactgatgtaatagactgggtgttgtatgttgttctcttctctgatcggcatggcacttacatcgtgttccgtgacaacttaatatattccaagttcttctccgtccagaggtttagagagtatgggaggctttgcgagttgcatttttagctcctgaaaagcttttttcacattcctctgtccacttgaattgcttgtatcgtcgcacgatattgaagaatgggatacacttttctgttgattttgaaacaaatctgctgagtgcggcgatctgacatgtcaaactttgcacttccttggtttttgttggcga

SEQ ID NO: 151862 - DNA, 792 bp, Cannabis sativa
ctaatttttatgatactttagaacttatttcagatttttatttttatgtcatgaaatgtaacatataattttttaaaatttatttattaaggggcccaaaaaattttatcgccttaggcccccatttcttcagggccggccctgagtgtagtatatagtgtcacactaatattagtgggatactatagacaatagaggtgtacgttggtctgtttacgttactttttattcaaaccaacataatttaagttttttcagtaaacttattttttttttattaatttaatatttttatttcaatttttcataatttttttattaatattttcaaaattaataaaatattataatttttgaaattattaatttttttaaataaaatggggcaaattttgtattagttaaagtttaaagaagactatgttaaattttaacggtaaaagaaatagaagaagggatatattacataattatgtaactattatattttaggagtatcaaaagttcagaggacaaaaattctaattattcttataaatattcttaaaaatataaattgtttgttttgaaaaattctacaatgcaccccaaagtgggtctagtgatgcatctatctgttttggcatctgagagaattttttagtctaattttattaatagtcttctacgttatagttatttaaaacatcctgtaaaattttgaaagattcgaaaaaatttaacaccctgaaaatagggtataagaatatttttatctaagaaaatatatttctatttaaagaaataaatttc

SEQ ID NO: 151863 - DNA, 613 bp, Cannabis sativa
tgctcggaaaagggaaagctgttatggccgagataagaggcttgtcaagtgatgatggacttttaagtcttgctcgggaaatcgtattgcatactacttcgtcttgtttttaagcttcttgactattatgctttatgtttctgatgtctgttttctctaaccatgttgtttttattccgtgcagacatgtctcaaaagatgctcgatgctcttaagaagagggttggaggaagctcaagcgcatcccctccggccaagaaatccaggggcggtgaggggaccccttccaaggaaaaggcacctaccggggaggtcatcgacctttccgaggagctaactgttgcgaacccatccattccaaaagttgctaagtccaaggattctcgaggagggagtttggacaggcctgagcaaccaaaaggtggattcgagctgatgcgggctcctactccacatttgccaatgctttcagaggccaagaaaggcaaggagatgctcgcccactacataaactggttagttccttaggttagtgagcaactggccggtgttgacaacaactcttctttggagctgctgatgggaggagtcttgaaggaattcacaagggtaa

SEQ ID NO: 151864 - DNA, 523 bp, Cannabis sativa
ttagtgctttggatatgttgtacttatgatattgtactgttcttgaacttttgggttgctttggttatgtttgggattgattttggaggaaggaaatttgaagtttgcagccctgcaagaaccggtcgaccggttggttctggtgcaacacaacccgtcgactggtttgctacaggggggaaattttcagtgtttccttagggccggttttagggctcggggtgattttcgtgtctgatatagattttttagaaagcaattattatcgttgtgactagattatgatcgagggaaagataatgggaaacgattatcatcgttgagactcgattataattgaggataatgatatggtacgattattatcattgtgactcgattatgattgagtaaaagaaacggacattactgatacgagtaattactcttgaaactgcggataggtttcttacttatcgtttgctgtatcgggcaacgatagtgacatatgaagctcgtggttaacgagtggtaggggtacttt

SEQ ID NO: 151865 - DNA, 616 bp, Cannabis sativa
aaatgttgttccaataaatagaaattagtagatttattgacgtatataatggtagactatataaaataaaataaattattgttctaaaatacgaaaagaagaatgaaaatttgtttcaatataccaaaataaactaatagatttgttagcatatacaatggtaggctataagaaaaatgtaaacagaatatgccaaagtaaacaacatgccaaaataaactaataagtttatttgacatatatgagtatagacattgtaggattttttgtctgatcatcattttttttatttaaaattgatgattttatcaaaagtaatcaattggtatcttatcgcaagtataactaattagtccaaaaaaaatatcgtatttgtaatgatttaaaagttatttgtaactttattctttatttaactaataaaaatgtatatattaatttacatttaaaaaatatgagtgacttaaatatttatgatatatattttttaaaatacaaattactaaaatagtaacttactagatgacaatttattattttcaaaaataaacttgaaagttactcaaatatattaatataacctaaataattgtgcatacatgtaagttttagaggt

SEQ ID NO: 151866 - DNA, 864 bp, Cannabis sativa
caccctccaaatagtatccacaactatggaggcatacaagaaagcatcctccactagaactcctctacggtttagaccccagatgaacttgacccaatcccaaactcggatttcagtatcacaaatggggtaaaaaccccaaggagaagaacgccagaggtgaaaggccacgtcacaagagaggaataagtgttccatagtttcttcccttgttccacaaagagggcaacaagtgtcctcaatgtggaatcttttattgatcactgatcttgtaggaagcgcattagacagaatacaccaccacaggatcttgtgtcgttccaggattttgctattccagagcttgttctagagattcggggcaacctcgcactggggggccctatccaacgcttgaacaagataagcagacttacacgagaaattaccattgctagtttgagtccatatccatctgtcagtgccatgactagagggttggcccccttttaagatggctacaacagtttcatgatcaaagctttcattcagcttatccacgttccagtgtccattggatagtaacagatcagacacacggttgagattattcgcacctcccctatttggttttggacaaaaacctttaaagtggggaatccagggatcctcccaaatagcagtattctctccattagccactagtttacaagcacctctctttaaaatagagttagccttcacaacactcttccaaaaccaggagtcagagattttatacttatattttagaaaatccttcccttttaaatattttgtcgttaaaactctgcagcacaacgattggttaccagtaaggatatgccacccccacttagccagaaa

SEQ ID NO: 151867 - DNA, 833 bp, Cannabis sativa
tttaaagtcctcagaaaatacaacatgaaactaaatcccttcaagtgttccttcggaatcagcttgggaaagtttctaggcttcatcgtcaatccctgaggaattgaagctaatctaggaaagattcaagccctcctgcatatgaactaaccaacaaaaaccaaagaagtgcaaagcttaactagtcggatcgccgcgctcagcagattcattttaaaatcaacagaaaagtgtgtaccattcttcaacatcctgcgaggaaacaagcagttcgagtggacagaggagagtgaaaaagcttttcaaaggctaaaggcacaacttgcaaaacctcccgtactctcaaaacctctagacgacaaggaactgggaatatacttaactgttacggaacatgccataagtgttgtactaatcagagaagagaatgataaacaacacccaatctattacaacagtaaaagactcattgaggccaagggccgatatccgttactagaaaaactcgcctactgcttcattctagcaacaaggaagttaaggccttatttacaagctcatcctgttcaggtgtataccgaccaaccactacgccaaatactgcaaaaaccagatgcttctggacgtctactcaagtgggcgatagagttgggccaatacaaaatcactttccaaccccgaacaacaatcaatggccaagccttggcagacattgtggtagaatgcacaggaaaaaaagacagcataccagaaagcaagcccgagccagtacaaatacctcagccaagtcacaatgaggacaaaccgagctggaaactacatgtggatgggtc

SEQ ID NO: 151868 - DNA, 633 bp, Cannabis sativa
  modified_base (289)..(304): a, c, t, g, unknown or other
agggcacaaaacccaacagttaataccttataattgtcacacatttatcaccatgcataaaagggttagttaataaatttatgaattacatacacataattatctttatatttttattaaattaatctacacaaaagagatcactttaatgatattttgtttcaattaatttaattaaatattaaatttccttaataaattcttaaactaaaatttgaatttaattgttactgtattattattataattaaaaccattatatatcttaataaaataataataataatannnnnnnnnnnnnnnntaataataataataataaaacaagaatacattacatgaattctcgcaaaagaaagaaaaaaaaaaagaagcacatatataatgtaaacattaaactgcatataccgaatcgcagcagactttttctcttttttttttttttaaacaactgatttatatatgttcagtcctagagaaacatttataatcaaaactacgacaaataaactacatgaacttatataatcgcaacaaacttttttttttattgaatcgcatatacaaataaattacgacaaatgtctttcaattgcaatatgtatatatatgaacgattataatcaataaatt

SEQ ID NO: 151869 - DNA, 512 bp, Cannabis sativa
cccatgcggcattaaatgcgaggtgactgttcagattgggtctgatgcctctcggaggtgcttcgctatagctctaccctctgggagtacgtggacccctcatgccttctccgggaggtattttgttgctgatcctcttgatttaaaaagacttagtcaaattatctcaaaaccattttcctcaaatctacgtgtcccagttgcattggtccgcgtatttttggcaaaattaagggcaacatttaccccccaagccttgtttggtgggaagtaaacgaggcttacttaggtgcctcctactgccttattgactacctggcatgtgctttgggcgcgtggggtgcatttatgaccatcatcattgcagtttttactttttacaggcaacgattcgtttcctatttattaatgatctggcgcatttaatgggtgtcaatcaagtactcaagcgtttccaaccgccttgatgaacgcttgcccaaccgttagatatgtagaatgcgaatcgattg

SEQ ID NO: 151870 - DNA, 1125 bp, Cannabis sativa
  modified_base (287)..(301): a, c, t, g, unknown or other
  modified_base (377)..(384): a, c, t, g, unknown or other
  modified_base (522)..(561): a, c, t, g, unknown or other
tcaagcttggctctttaatggcatctcttgtttctgagtttgggtactggttttgttgcttggaaaatgatctttaggatgtttagaacaggtccggaaggtttcatgtgaattgaggttgatttggttgagttatggaatttgtgatattcctgcactgaaccagaattccagtttagagggaccagtaggaaacgaaattctggttgggaaccggtctaccggttggggcaattttgggaattctagtttttcccatttttgtgatgtttagggtattgccatgnnnnnnnnnnnnnnngaaacttttagtttcaagtttaataccccgaaaagtgatttagcgtgtcacttacctatgttatgattgatgtgannnnnnnncctgtaattcgccgagcagttgttgcactcaggttggccggcacacctgaattcggaatcaaggtaagattactataatgttatgcatatgttattacatgtttagcctacatgttgtttatgcctgttagattacannnnnnnnnnnnnnnnnnnnnnnnnnnnnnnnnnnnnnnntgataaatgtatgttggctgaaatgttgatcgatgatgtcacatcaatatggctagagtatgactagtatattgagtataggctgacattatgatcgataggattttcgtatgaacgttctagactcagtgccgtgtgggagacgaggattagggttatgatcaagtgtattggcgccaggttataacccgggttattgtatgttttatgttatgcttttcttactgagtcagtcgactctaagtgctattgctatgtgtaggtaagggaaaagctaaggttgaggagtcgtgagagcgagcagatgaagattgtacatgtcgggggagttaggcctagagcgtacgatcctcgggacatcagggcttttgctgtttagtcgctaagcgacaaatattttgtatatggatagtaaacttttgtaactgtattttgtaaatgggatcccagaattttataaatgtgatacaatatgttttaaataattaagcaaattttttaattattcacgatttccaataatctcgttgattaacaacgtgctgcacagtacgttaaaaatca

SEQ ID NO: 151871 - DNA, 704 bp, Cannabis sativa
caggatctctttaagcttaatttttagtacgggccccaggctaagtggttggtgagaagtactgctcgtctaaccctctcctcctatttagatcatccctgagatcatgaactgttcccactctattaaataaagatgcattaggttgtcttagtgactggttggtttgcccgatcatttggccagaaccgttaacttgggcagagttattaggtataacttctcctgatgaattactagataaggtctggctgcctaccgcttggcccacaagcggaacctctgaccagggattaggcggctgaccattcagagtctgagaagcgttcccagctaaatctttgtctgactcacccaacgggatgttggtcccaggttgctaattagtagcttgatatgccctttgtattagtataatggcttgtcttgttcggttgtcaatggctgcttgctgagccctcaacgtttcaacctttttatccatccattcagcgaacaagcacctctgctcttcaaatgcaaggttcactgcaacacggatctcttcctgatcatgatgtagagtattagtatggccttgcatgagtctaagagcatcacggaggttctggatctcggtgtcgtgtccaacagttattcggacattttttgctggcggaactccagtgctgggaatacctagattggctactgaactggtattt

SEQ ID NO: 151872 - DNA, 659 bp, Cannabis sativa
tatatatatatataaaaaaagaaagataaaaagagaagtatttagacagctggagtcccaggctcctctttcgggccttctgggttggtaggagctggaggatctgttgtctgagcggggggatcgtcaacattctggccagatgtagaagtggtcgcctcgggttcaccataagccacttgggaagcacagtactcgagatacatgtctttagcctcgcccaggtaatcaaaatttgcctgagggttagccttccaaaagtcataaaaaatctcgagaccagctatctctaaggcatgtactttctcttccagcctcgtcacctccgctcactgctgatcagcctctgatttgtatttcttgacctcaactttaagatcctcctccttagacttcttctctgcttccagccgacggaagacagtctgaagaactcccctttcctcttgaagaatattcacttatcccgacaaggtggcaatggtatcttcaagttggtcggaagccttaaggtccttagttaactcggttattttcctcttagcagtaaaaagcttcttattgacttcacccagctccattcagacatctacgagttccaccctggcttcatcagcatccttcctggccaagtccacttccgccctcatggtgttgga

SEQ ID NO: 151873 - DNA, 592 bp, Cannabis sativa
atgtgaatttcaagaagttttttcgaaagacctaccagggctacccctagatagagagatagaatttgtgattgagttagcgccaggcactgcaccaatctcgagggctccataccagatggctcctaatgaattgaaggaattgaaggctcaactacaagatcttttagacaaggggttcatcagaccaagttactcaccttggggtgcgtcagtcttgttcgtcaagaagaaggacagtattatgcggatgcgtatagactattgggagctgaacaaagtgactataaagaacaaatatcccttgcctcacatcgatgacttgtttgatcagttacaaagggcgatcgtcttctcaaagattgacttgagatctgggtaccaccaattgaaagtccgagaggaagatatagcaaagatggcatttcaaacaaggtatgggcattatgaatttctagtggtgtcatttgggttacccaatgccccagcagtcttcatggatttaatgaatagagtattaaaagagtatcttgataagtttgtggtggtattcatcgatggcatactcatttattcaaggacaatggaagag

SEQ ID NO: 151874 - DNA, 640 bp, Cannabis sativa
  modified_base (502)..(507): a, c, t, g, unknown or other
agccacaagagaagcaaacacattgagaggaagtaccacatcatcagagaatatgtggaaagaggggaccaactggtggaggaagttgatactggagacaacttagctgatctattcaccaagattttaacaatcactacgtttgaaaagcacagaacgaatctaggattaattaaaatgtactggttgttttatgttagtgcaagtgggagtttgttgagttttgtatcctaaataaaatcctattttaatgtaatcttgaacattcatttatcaataaagaaacatatttatttcattacttatttaatgttttatttggttcatgtgatcacttgtttgatttataaattcatccaaatccttatcacattaatactcttgtttattgtaatgtcaacacagtgaaaagtaatcaatagattatgtgattaaatgtattcctatgatttatcaatacacagggtttaactaataggataatctacaatgtagtttactnnnnnnttggataagtgctatgtcctttccaggcattggttaaagtaagtgtggattgaatgtatggagtatgcatcagaagggaccgatattaaacttaaataagatataataaacttaccgtaatatctatctaatt

SEQ ID NO: 151875 - DNA, 928 bp, Cannabis sativa
tcccagtctgagttctagtcctagtccaagttcaggtctcggtcctagtctgggtctaagtccgagtcctgatctatgtccgggtcaaagtccagagtttgagtccgagttttggtacgagtctgggtctgggtccaggtctaggtctgggtttgggtctgggcccagttttcagtccgtgtctgtgtccgggtcttggtttgggtctgggtctgggtctatatttgaaatctggtacaggaatgggttcttgtccaggtctcgtgtcacgggtcctaggtctcaggtcgtggcttgctctgggtccccgttcgggcctgggtccttgtattgatcccagtctgggttcgggtctgtgttcggttctgtgtcttgattcgattttggatcaaggtccaattcctgttccagggtccttattcttgtcctggttcctatttcgggtctcggtgtccgagtttgggtttgggtcctggtctaaaaattgttccaggttcgggtcttggtatgattgcaagatctagacacaaactacgggtcaggtccaagccccaggtcgtgggtcaagatccggatcccaatcttgggtcccggtctcatttccattcggatcctgggtcccagtctatgtctgtgtctgggtctgggtctgagaccggggttgggtctttggtctcagtcctagtcctgagtcttgattctggttctaattttgagtttggttccccaatctaggtctgggtcctgggtgcaagtcagagtctcctatcctgttccgggtcctgggttcgagtctaggagcaagtccgtgtctcggttcgagttcgtgacccgagtcccgatctcagttttgattcagatccgcgtcctgatctgggtcagcgtcccgatccgggtctgggtttgggtcctagttagattctagttc

SEQ ID NO: 151876 - DNA, 640 bp, Cannabis sativa
  modified_base (37)..(63): a, c, t, g, unknown or other
aacaatcttaatagttcaaggggaatttttaacggcnnnnnnnnnnnnnnnnnnnnnnnnnnntacatgtcaaagttcgggggacaaaattgctaattagcctttttcaaaaaatatatacgtatgtatactttttggttgttgatattttacttttttattaaaataataattattaacttaaaaaatgattaagaaaaaagaaaaaaaaataaataaaaaggtttaatgagtgggagagaattagcaacaattttattaaattataaataaatatttttatattttaaatttttgtagtcaactaattagtaaatcataatttaaaagtactatataggttcatagtatttagtgttagacattaattaaaattttagtatggtatatatagtcaattaatattttttagtcaataagataaaagaagaaaatattagttcacaataatattaacattattatgaaatattatttatagatgtccaaatcaccatattaattatcatcattaatgcttgattgtattttcatttattacatattaacttagtttctcatttctttagtccatacttttgtataaattggggttcaccccattagaataaacaactgagaaattctcattcactttctc

SEQ ID NO: 151877 - DNA, 521 bp, Cannabis sativa
ttgttattatgttattattattattattcataaaattaaacctaataggagtcagatagtataggtttcattcaaccctaaaattatatcgttctattcttcccacatctgaagactaaccctaaaagttttcaagtcatctttctattacatcattagccaaatctatagcaatcttcactctcatctttgatcaccatcatctcatgtctattgtccttcttcatcatcataataaaaaattcatttgcaatgaaaccggttgaaaaacctacaataacctgtattaaaccataagttttgagaaaaatcaaaaaaccacctgccaaagatgacacaaaatggagtgtcatgatattaagttgcccacagtgaaaggggattgtactgtttctttataaaaaggggatatcagccaaagccatataggtatcactacaaaaaattgctacttttagtgacaattttttagtcataatataaattttttgtgactaaatgtgacttttagtcacaagaaa

SEQ ID NO: 151878 - DNA, 583 bp, Cannabis sativa
gtgtacaaaatatcacgtaccgagtacgttcatttatgtttcgtagtacattggtaagaaaaatttcttataactctagaaattatgtgtcgttaaatattgagttttaggttggtttatttattttattgtaattattttttatattaaaaatgaccatagaaattttttttgtgccaccttataagattgatttttttacctaaaataatttagttgttcatcaataataatattgagatttgttcaagatgagataattaccattaacaccccaagcataacatatgaagtaaataaaactaggatttttgaagcaatgattagagtcataaaagttaaaacatcaattggaaaaaatagctagtaatatgtatcactatagtatgactcttgtgtggaggcaggcgggtccgggaaatacgcgttggagtggtcattgaatgagtcagatcttgcttgattggttgcagattttcgcccctgagatccattattctgttgacggtttgggcaccgacgataatcatggtctaatgagtgacaaatgcgacaatgtcttgagtttcttgggatctactcc

SEQ ID NO: 151879 - DNA, 627 bp, Cannabis sativa
tcaaatactgagataatacaaaataaatttaaatgatttttttactaatattagaaatattctaatattatcctacttgatcagcatttagatttaccacttaaacacaatattcctcattacataataaatatatgaatcatagtgataaattctcattatatgaagagtattatcttccatgtattacgatatattcattacataacaatatactttacgtggaaatgtacttaagcgaataaactctaaactttatgtttattttggtcctttaaaattttctcaaataaaaaaataagatgcatataaatatataaaaaaataccaaaataaaagtttcatcaataataacattatttgtataaattacataaggaaaccaagtcccatgttctctacatgatccttaaatttattaggctgcaagatttttgtcataggatcaacagtcatcaattcaatgctaatatgatgaatgaccactttatttggttaaacacgttctataatagctaagtacttaatatcaacgtgattgcttcaaatttcacttttgttgttcttgccaagaaaacaacagctaaattgtcacagaacattcttaatggcctagatatgtaacga

SEQ ID NO: 151880 - DNA, 583 bp, Cannabis sativa
ttttagtgcaagttgaatatataacatatacaaaattaatatacgcatatttacatataacctatttttcatttttatttttttagaaaatatatctatatcatctactaataagagtacataaaaaaaaatactcgtatttataataatatttttaaatttgtgatatgtacaagtattaatttataatgaaataggtatataaagaaatgaaaataagcaaaatataaactattaaagtaaaaaaaaaaaacattattgttatatatgcattaattttttgtgattgatttgttaagacgaataatttattttttaatatgttgtgaaagtcgtacgtttagtagaagttatattctttagagtttttattataatattataactaaattttttatgcacagttctatttgcactccacaaaaagataagtacaccttaatatttttaaaaaaataaagtttaattatttttaatgtttttttcgaattttttttcttacattattttgttttcattttaatatttattttaattttattttcataatttttttaaaccatgtataatttttattattttt

SEQ ID NO: 151881 - DNA, 556 bp, Cannabis sativa
gaatgctataaccttgccctgaccaaggccaaaaaggaaaattcctttggctagagtttggacaaggggaaaagcattgccaaataggaagtcgcccaaggcagggacgaggatgtggatccctgacttggggaaccaaataaaaatgttgggccagtggaagaattggaagagatagaaatccacccaataatattggcaaaggtttgttgtttgaagaaaaattagctttgataaatttctaagagcaaacctagatatttttgcctggtcacatgaggatatgatcggtatcgatccttctataatatcccacaccctaaatattgatccgaacttccatcccgttcagcaaaaaagaagattattagacaaagaataggcagaagcattgaaagaagaggtaaaaaagctacgcaataacaagttcatcattgaagctttctatcaggcctaggtagccaaccccgtactggtacctaagcccaacaaaaaatggcatgtatgtattaattttactaatctcaataaggcgtgccccaaagattattttcca

SEQ ID NO: 151882 - DNA, 504 bp, Cannabis sativa
atttagaaaagacttatacagtattgacacctagacgacgttttggtttggaattttattttgaataaattaggtcattcttgttcatttagaatttcaaagtctttttcaatattggttctactagttttttaatttataaatttattgaaatttatttcataaaaagaaaccttataatttctcttgtggtacaaaacataaattgaatcatgagaattctattatactttagtataagtattaaggttatatctccgaaaggaaagtataaagacttacttttgatagaattcttgaccctttgattgaataaattttaaattttgtaaagggataacaaataaacaaaaagaaaccaagtgacaaaataaagtttcattgtctaaaaatttatgttatattttgtggatcttttctcatggtttcatggaatgatagtatcttgtctttagactaataaaatttattttattcataaaggcattaatctttagacgttgt

SEQ ID NO: 151883 - DNA, 621 bp, Cannabis sativa
gctttttgttggctatcttttgcttgcatttggcttatttggggattcttcacttgttttgtacagtattttgaaatcaatgaaatttattaccaaaaaaaagtaatcaaacaaaagtttattatgaatgcatatttatatatttataggatatttctcaatagtttattaataaataaatttaactataaatattatgagaatttaaaatgaaagaggctaagataaatgaagtttcatctcaaaattaattggcaataagaggagtagtctattccttatatatgataatttatttccacacattagtaatgtatgactaactccaatacaccttcctcacgtttaggcctagaaagtgtgggtataataaacgatatttaagagactataggaccgaacgtgacatttgaaagaatcacataaggccaaatatcgagaaatttataggtatacacacgttgaaaaatttgtgggtgtacacattggccgaaaagtccaaatagaagttaaagaggaaacatcgatcgaaagttttttgtttgactcgtctttttggacactttgagctcacgacgaatcacaagctgctctgataccatgttaaaatttagaatgaaa

SEQ ID NO: 151884 - DNA, 593 bp, Cannabis sativa
cttcaatgcaaaatggcaaaacccctttctctctctagctttctttctcttctttccctctctttttctttctttctcttggctgctcacgatgccccaccttcagccccctttctttctatttttatttgtttcttttagattaacaaatttgggcctaaaagcccttaattggtccaagcccacaacaaatggggcagagccaacaaatctccccctctgcctcagttggtgggctctactacgcgcgctcttcgcctacaagctttgagcttctctttaggcaaagcttttgtcaatatatcagaaccattctcattggtatgcaccttttctaagtgcaattctttcatctcaagcacatcacgaatccaatgatatctaacatcactatgtttggatcttgaatggaatgttgaattcttggagaggtgaatggcactctgactgtcacagtagacaatgttgcaagcccaactcttgtaggaactttttcatccataaagcttctttacaagctttagttacagctatatatattcagcttctatagtagacaaagcaacacacttttgtaacctcgattgccatga

SEQ ID NO: 151885 - DNA, 909 bp, Cannabis sativa
tttcctttacctacacatggaagcagaactgtgagtcgacaaactcagtatgaaaagcatttaacatatcatatattattgaattgtatctaggagcccatacacctatttacaaggcttaacagatgagtaagaacgttctactaagatacgaccatgtaccatgtaccatgtaccacatgcactcagtactaccatcgtactagtgtaggtagggtatgaaccgcaccttaagtactgttaagtgttgtaccacatagaccttgtaccttcccgtactagtgctggtaacatcgtgatgtactcttcagacatcatacacttttccaatgcactctgtaccgctaccgtacaagtgttggtagtgtatgaatcacaacaagcatgcatatacattaacacatagatacattcacatactcatatcacacattatatataattcttacctcctttacagattcaagtgtgttggccgacctgaacggaaagtctcgtgctggatgtatgccctaatcacatattaaaaccaggtaaattacatttttgaatccctaattcgggaaactcgagtctacaacctaaggctctgctatactatttagggattacattaacctaggaaacagggacacacccagctaagacactgaaaaggatgagaattgagaaaactggtttctcggggaacctgccaaaactaattaaccggttttataggtactggtaaaccggttaaccagttttttccattcctccccaaaaaaacctccaatttgctcaaaacttgtctaattgcctccgaactttctagagtacctaaatagggtatacacaacatattccaaccagaaaatcccaaaaaaactcattgaatcaaattttgccattaaagatcaaagcttaggt

SEQ ID NO: 151886 - DNA, 636 bp, Cannabis sativa
  modified_base (81)..(87): a, c, t, g, unknown or other
actttatatgtgtttatttatcattttagaaagttcatatttaggatctaagatcctaaatatacttgtgagtagatctannnnnnnggtaaaataaattccaacagctaccacaagtactttgggctcacagaactatcgaaaagacggtaacgggacacactcccttctcactagcatttggctcagaggcaatgttacctgtagaagtgaacatctcgactcatagacgagagttttatgatcaagaagaaaaccaagaactcctaaaattatccttggatctacttgatgaaaatgaactcagtcgcaaatcactaatgcagcgttttaacactgaattacaagatacttcaacgaaagagtcaataaaagactattcaatgatggagtcttggtgttaaggagagtatttgcaaacacgagagatgcgtctgcaggattgttcaaccagaactgggagggtctatatgtaatggaagcagtagtaggaatcagagtttacaaattggctcggataaatggctcactaataaagaactactggaacgtggaacatttgcgaccctactaccaataaattaatgatgtaactcacattgctgatgtaatattttaacttcagttatgaataaa

SEQ ID NO: 151887 - DNA, 643 bp, Cannabis sativa
gaaagaaaaacgtttacccatcttcatctaataaagtgatataattataaaaattgattttaaatagaattacttttaaaattttcaaacaagtacatatatatatataattgagatatatatatccattaatttatataaaattttaaaaatattttgtagttaacaattctattttaaagaatcacaaaaatttgtgatacagataataattaattgacagtgttattatgaaatacacaacaaattttatccaataagtattagttatatttatatatattaccactttaccatcaatagtactggaaggagtatgaaaagttggtgttgatgatgtagaaagatcaagattttgtttgacgtgttgttgttgctacgattattgttgtcatggttacttgtatggtttccattagatagtagaagttgaagttggagttagaggatggtgttcaagtattgtaattcaaatcacttcaactttggaagtaagacaatgcaagagagaaaattaagccaaataagaagtgttataaaaatagcatgcaactttgaaaaacaataaaaacaatttatagagtgccaggattactttttgatgagagaggagtgctttaatgtgtcatgtgtggtagagtga

SEQ ID NO: 151888 - DNA, 600 bp, Cannabis sativa
acctaactcttttcagatcttttaagtcctatctaaattagactaacatataatcctcattaaacaataatataaatgtcacaaaggctatgcaaagactttgtttcacatcaaaacttagtttatccaattttagcattctcaaaactcacttttcaaattttgaattgggatcataaagcatacaaaatgtgatcaatcttaaacatgcaattaaacacaaatatggataaattcacaatcaagaaaggagaaataacaattatcattagcctaagaaataatgtcaatcaacattcatcatctccccaaatagaagtttagtttataatctccatagtcaaatccatagttaaaattgaaacagaaaataacatagaaaaattaagagagaagaaaagaactggttgaagcaaataatccgggtcgccacaagccgctcttgaagtcttctcctttgtttctagggttccaattctgaataatgatcaaaaatgacgaactcccttttaagtgagccaagttttctttttaaaattcgtgaaattaaaaaattgctcaagaattcgttaggaaggcttcgtcgcgacgaagcttatt

SEQ ID NO: 151889 - DNA, 953 bp, Cannabis sativa
atgccaacaattttgaaatcaatccagccatactgcagatggtccaatcttcagtctagtttgggggactgccatcagaagacccaaacatgcacctctccatcttcgaagagctttgccagacattcaaggtgaatggagttagcgatgacgccatcgggttaaggctgttcccattctcactaagagagcgagccaaaagttggttggtatctttgccaacctactctatcaacacttgggaggaattggccctaaaactcctttccaaatactttcctcctacgaagattgccaagcttagagctgaaatcaataactttacccagcatgacaacgaatctctttatgaagcctgggagagattaaaagatttattgaggaagtgtccgaaccatgggattgaaaagtggttacaagtgcataactgttatactggattaaggagcaacattcaaacattgatagatgcctcagctggtggggcttatatgagaaaaagttctaatgaggcctttgaattacttgaagagatggccataactaatcaacaatggtaaacagagagaggcccaactaaaaaggttgggagaatgcatgaagtcgatgccataacaaagttgacagcccaggaggaggcattaacgaagctggtgattgcacaagccaagcaagctcaagttgtctgcaagctgtgtggaggagcttatacaactgacacctgccctatcgatagaaagtttgccaatggagcaagcctacgccattggaaactatctgaataattatggtcgtcagcaaaacttccaaaagcagattcctaatcaggaacaacaagggttctatccttcgcaaaatcaatctcagcaaagccaacactatcaacaacaacaagactctagtggagggtctaatcctcaattagacacgttgctacaattcatgacagagat

SEQ ID NO: 151890 - DNA, 519 bp, Cannabis sativa
ctgttattacctataatattaagtgtgatctattaggctatatcagtactttgatgaaattatatttttacattggatttatgaagctattgcttcttgcaatgcataggtatcgactttaacaaagagaaaacagagttggtaatgtgtgtcactgatgttgatcagcagtaacactttgatatgttattcaatggacgttatgtacatagtcaaaatttacctaaaatatgatggattaatttaaagcttaaaataaaattaatcatacgtggcttggcacgtaacatccacctagtatatatgatatctatctatgatgaattttttttgtctaatgagtaatgacgtgttgtctttctcagacttgtatgtgaaaagaatggataagatttatgaaaaagaatcatctccatatgcattaaataaaagggctttttatttttacactttaaaatatgtttttttttttgtatttttacggaattctacaacccttattgcaactagcgctgtaac

SEQ ID NO: 151891 - DNA, 674 bp, Cannabis sativa
gtctgtgtttgggatcgggtcccagatttaggtgcaggtccgggtctcaattcttgtctgggtacacgatcttgtccgggcacaagttccagtcccagtttgggtctgagggtaggtctgtgttcagttctacgtctgggtccgggtcctggtcctagtcacgctcttagtcttgttctagagtcctggttcggcgattcttgtttaagttctaatattggatcccacgtgtaggtctgtgttcgagtttggttcttcgtctgggttcttgtccttgtctgagtcccagatctagacaccaactactggtctgttccagctcccgttacctgaatcccgagtcaagatctttatcactgtcatgggtctcggtctggttttggttcacgtcccaggtcccatttctgagttttggttcgggatcgagacatgggtgcggttctaggtcccgaccctatatctgtttccccagtctggttccttgtttgggtcggagttaaggttcgggttcaggtccggagtccagttttgtgtttggatacgggtccgcctcccaattcgggtctatgtctgatttggagtccaggtgcttgtcccggtacagttctggatcaaggtccaatttcagttatgattttttagtccaagtgctagtttaagtcccggtcaacttc

SEQ ID NO: 151892 - DNA, 557 bp, Cannabis sativa
aactagaagaccctgaattgcttagaactcgagaagatgtcttaacaggcaaggctaaggacttttcgatctctagcagtgggatgttgttgtttaaagctccagtgtgtgttccgagtattgagcttaagaaagaaattcaggatgaagctcacactaccccttactcactgcattcgggaaccaccaagatgaatcaagatctgaagccttatttttggtggtacgagatgaaaagggatgtggtggattatgtgaccaagtgcttaacctactagcaaattaaagcaaaacatcagcaaccgacaggactacttcaaccgttatcacttccagaatagaagtgggaagacattgcgatggattttatggttggtttgcccaggaccacagggatgtatgactcagtttgggtcatagttgatcgctttagcaagtcagcacacttctttcctataaaagtaacctatacagtagattagtatgcggacttgtatgtgaaagagattagtcgccttcatggggtaccaaagtctattgtctcggatagagaccct

SEQ ID NO: 151893 - DNA, 776 bp, Cannabis sativa
gtgatgcagttatgtgatatatgggtgcaggtttttggcacgagctcacctgattaggtgatgcagttatgcgatatgcgggtgctaggctatggcactagcttgactgattaggcaatgcaatacaagattatcagattaaagtatcaacttgcctgatttggcaatgtgatgtaatgaagatggctacttatgaggtaacacatatatataatttatatgattaaatgaatataagttatattattggtttaatggttttgtattaccaaatatttgtatagtgatatttattcgtggcagatgttagtagtgatttgaattttatcttacgaacaattcgtggtggttgattctaattgtatataaatgacaatattcgaataataaactatatgattattattatgacttttcttgctgagtctttgtgactcacgggtgctatgtggtgtaggtaaaggcaaagaaaagctagatcaacaatgaggtgatagtcttctccagcaatgtacttattgactacgccggcctgcgtgccgtgttgccaggagttattttgggctgtatctattgtgtattttagttttatgtttttaagacatcgtcgtatatagttcttttataaaaaaattaataataggggttgccggaacacgctttttatgtcgttataatgtccgttttcagtattttattttagtcaaacttttaatattattatggtttttagtaataaattaatgtaccagtattaaactagtttataaaatcac

SEQ ID NO: 151894 - DNA, 767 bp, Cannabis sativa
gcgtgtcactaatgtgggtgtcaggaaaagtaatatttagtgacacttcagtgcatgtcactaaaaccttttagactctctcattgcgcatcactatagacatttagaatctcacattgtcagactctaaagataacaaccacacccataagtgtcactgtatctacttttttttttaaaaaaaaaaaaataattttcttgacaatggccacacgtaaagtgtgtcacaatatcatttttttttaaaaaaaaaataaatgtatggtatttcaaatttgttttaattttattttccttttattaaaaaaaaaaagaataaagcataaaactacaaaatgcatcaataattcaacaatagaaataaaattttagtgttcagaaaaattgtagatcaaaatgggtaacactagaacttgaaagcttattcggatgagctcctttgccatagactggtgaactttttttccattattagggacctaaaaaacttaaaaagaaaataaaaatacaaatattacaaaatctgagagcaaaatagtgatactacaattactgaaccaaaattttaaattgaaacactatacaataatttatgaatcaacaaatattcatataacattaggcatgaacaattcatttatccaaaaaaaatactcagaatgtacttatttcaatacttgagagaaatcagtgtaagaaagaatgaggagttcttcttagccttgtcaacagccatcaaaatctctccattacaactagatagaaga

SEQ ID NO: 151895 - DNA, 555 bp, Cannabis sativa
aggactgaagagtcatttgatatatgcaattattggaatgtgacgggcctcaaataccctttgttgagtatgattgctaaggatgtgtttgctgtgcctgtagcgctgttgcatcagaatctacattcagcactggtggtagacacgtgagtcctcatcgaccgagacttcatccttctacattagaagcattagtatgcacacagaattggttgatgactgacaaaaaaggtagatatcattaaataattatatatatttgtgtatatgtttcataattagtattgattttgttttttttacagtaacaataaatgatgaagatgttgatgttgatccaacaatggtaactagtttagttttcgtaatttatcaaataaattttcaatttttattattaatatttttctttatttttttaggagccttacgtggttgatcttgatgatttgaatatatgttattttattgttagtttttattattaatgtactttgttattagtaatatgaatgtaattgatatttcaactcaactcaaattataattaggaaa

SEQ ID NO: 151896 - DNA, 537 bp, Cannabis sativa
  modified_base (336)..(345): a, c, t, g, unknown or other
catggtggatggcgcgggcattacccgtactcggttctagtagattccaacatatcaccgccctcccctcactcttactcttagggatagagctcaaaagcttactctggtatcgggggaagaccagaatatcatccagttgactttcgaggataactttgtgaagtacgggctttatccaaatgatttcattactaagccagtgaaggggaggaagaggaaatctggtgttgcacgggttaaacgagctcatccggagaatgagctgattcaactgaagcgcgaggctaagttgaaagtaggtgcaagggccaagcaatatgctcaggagccctnnnnnnnnnnagatgaagctgaggaagagcaggttactctgctcaaaaggaggaagaaacttccagcccagcccaagcctattgaacatgcgattcgcattagggagcctaattcgcatgctcggccgccttctcccgtgctcagaaaagggaaagcttttatgtctgaaataagaggcttgtcaggggatgatggactttc

SEQ ID NO: 151897 - DNA, 520 bp, Cannabis sativa
agcaagcccctccccggccggagaacctccaggacaagggggcgacgacctacgtccggattgggattgggcctctttttacgtcgaacccggttatatttcaattataatcggtttgagttattttgtgttatatgtttttattcattatgtaatagaacaagttttatttttgttcatatcagagacatttatttatagtaactttttcagtaattttttccagctaaggtgactttcccggcgacagtgacttttccggcaacatttttggctttactaacttttccggtgacttttttggtaccaacgacttttccggagaaacttattattgttttacaaatatgagatttctatctgtttttagcaaaaatatagcataaaaaatctatataaatgtaaaaaaaataaaataacctataacctatagtattatttatttataaaaaaaactcttataatttttgttgtgttatttctttgaggaaattacacttactatgggattttaaaagtt

SEQ ID NO: 151898 - DNA, 506 bp, Cannabis sativa
gataattaccatgcattgataattttttgtttataagaggtttaaaactctgtttcgatagcggggtttcatgttttacctgaaaagggggatttgaagtatgattaagaagaagtagatgcgtgaggctatggaagagatgttgctcaaccatccttttgacgatgaagttgatggagcagacgaagacgaagacgaaggagaaggagaggctgccattactgatcaatttctggagtacggacgcaacgagagaggatctgatggttgtggccttactggaaagcctttcgtggacttttctgtctctctcagctcaagaaagacaaactttgttcaaagttcaaaacgacgtcgttttagttttttttatttttggcctaatgtaagcaccatttatcaaattttccaatcaaaacttagagatatgatgtatttgtgcattcctcctattttgccaaataaaaaaactataacatgttataaatattaataattatgtggat

SEQ ID NO: 151899 - DNA, 538 bp, Cannabis sativa
  modified_base (346)..(360): a, c, t, g, unknown or other
  modified_base (513)..(513): a, c, t, g, unknown or other
cttggttaggagcacccggggattgagaatctccacatttgcgggacatcaagtaagacagtagttgcacgtagagatatgcacggtggcgcttatatttgaaatgataaatatgagtaattagaaacagggattagggttatgaccctaacatgagcggtttaacggcatagggttgttaccctggtgatatatgatgtgtatatgctatgccattttaattatatgagtatattaagatatagggttatgcgtttaaggcataatcaggttggactcgataactagaaccgagataaaccattctaaggccttattctaattagacgtgtgagcgtaacacgtnnnnnnnnnnnnnnnagacataaataggcgtgtgagcgtaacacgcaagtctgtgtcatacagacgaatacaaaatggcattaaataatgtgatatgttaagtatggttattgatattttatattgtcttgttgggctttctgggcttggctcacgggtgctccactntgcaggaaagggtaaatctgtctct

SEQ ID NO: 151900 - DNA, 532 bp, Cannabis sativa
aaatatagaaaataagagggaagacttgtgggtgggataagattaaattttgggttaatagaacaaaacctttatttactgtgtttaattgttcttttaatgttacattacttttgtgaggttccagttccacaagcaagagagcttatgcttatatgattatttatgtggactaattaattgctcaacataaacttggcttagacataatcattcattaccacaaataagtttgttaaatgcctttacttatatacacatagtatagctataccatgatctgagttcatctgttgtcttttgttgtgagacttagtttaaggcctttaattaactatttgtatacacataccttgatctgacttgttgtgttctgttctgttgtgagagttagtctaaggcatttaattagctatacatatacatacacataccatgatcttacttggttaacaattgccttcatttcatacactgtgtcaatatttatagatatatgcataaaagagatgtgtttcaaatgtggtttcag

SEQ ID NO: 151901 - DNA, 698 bp, Cannabis sativa
gggttttcatgacctagtgtgtcaacctagggagctcccgtcttgtttgttaagaagaaagatggatccttgcgcatgtgtattgactatcgagaattaaataaactgattgttaagagcaagtatcctttacctaggatcgatgacctttttgatcagcttcaggggaaggttgtcttctcaaagagtgatcaccgatcgggctatcatcagttgataatctgagaggaggacattccaaagactgcttttcgcactaggtatcgacattatgaatttctagttatgtctttcagactaaccaacgctcctgcagcttttatggatctgatgaatatggtattcaaagatttactcgatatctatgttatagtttttatcgatgatatcctagtgtactctcaatcagaagaggagcatgagtaacatcttcggatggttctacaatgactacgagaacataaattatatgccaaatttaagaagtgcgagttttgactgtctcaggtgtcttctattggacacattgtcagtaaagacagttacagaagttagatgtttcatggtctagctggttataaccgtcagttcattgaaggattttctaagatctcaacaccctcaactaaaatcaccaaaaagaattagcgatttgtgttgagagacaagggtgaaacaagctttcaggagctgaaata

SEQ ID NO: 151902 - DNA, 570 bp, Cannabis sativa
  modified_base (455)..(455): a, c, t, g, unknown or other
gcaccacatagcacccgtgagtcccaaggactcagcaagaaaagtaataataacaatcatatagtttattattcgaatattgtcatttatacacaataagaatctaatcatcacccattgttcataagattaaatccatatcactactggcatctgccacgaataagcatcaatgtatagatatttagtaatacaaaaccattataccaataacagaattcatattcatttaatcatataaataatatatattacctcataaagtaaccatcttcataacatcaggttgcctaatcaagcaagtcgatgttttaatctgataatcctgtattgcattgcctaatcaggtaagcccgtgccatagcctagcatccatatatcgcataactgcaacatctaatcaagtgaacctgtgccaaaaacctgcacgcatatatcatataattgcatcaccnaatcaggtgagcctgtgccataatttggcacaaatattgcatcatctaatcagacgagcccatacctacacccagtacttatcatatgtcgctgacgcccgtacctatgctcgat

SEQ ID NO: 151903 - DNA, 623 bp, Cannabis sativa
  modified_base (569)..(587): a, c, t, g, unknown or other
tgtggtggttctatccgtgggtatggaagatggaggctataaaatacatttttttttcttctctatggttattttgtgatttttttattatttgggttctcctaaaaaaacatttgacgagctcactaattttttttttttgaggtgtgttgttctttttatgtttttctaggtggttatatctgtttattgttttacatttgtttttgtgttgttttaggagggttttttttttttttactttttaaaattgggcttgcaaatataactgcgattgcatttagtattaaggttgtgcagaacatttttttaaatttttttaatcatgttttcctttctcttgtttaatttgttttagtgttattttacagttgttttgccatgattatttatttaacgtagattttattgtttttctcaatctcaccggaattaatagttatttttcgattgttctggtgttcctgtggtggttctgtccgtgtgtggaacatggaggcctcattttattttagtgtttgcagtataaaagaaaaaaaaatttgccaagacagtataaaagttatttnnnnnnnnnnnnnnnnnnnttgtaaagattgggccaaaagtcaatatttttgtaa

SEQ ID NO: 151904 - DNA, 973 bp, Cannabis sativa
  modified_base (541)..(561): a, c, t, g, unknown or other
  modified_base (617)..(618): a, c, t, g, unknown or other
taacaccgtaagatctcgtatgataagtattttataagttttcatttttattagactctcccctacggtgaatacttagaaacaaacttacaaagtatgaaataatggtggaagctcataaaatgagaataaccttgactctcacctaccgggacaacgttggattcttattttgatcgaataaaacgttgctagaatggtgttcattttagatgagctgactactctattcaactaatgttatccttgactctcgcctactgagacactgtatttcattatgtcagaaatcttggaaaataacaaatatgttttattttggtacttttacaaacatatttgctttacttgttatattttgaacttgtgtatgaatttaattgaaccaataatttattttaatttattgatatttgtattatcaaaatgtacaacccacaccccaatccccatctagtttatgcctttaggaatgaactccaaagtgtgaagatgactctgttggaatatattttcacaggatctagatttactaacaagnnnnnnnnnnnnnnnnnnnnntatgaatttctaaaacaatgaaagtaaacatatataaagtttcagaaaaccttacnntgggtgcagcggaatattaatgtctccttccgctcagatctctaacccttgtatcttgtctgtcgcagagtatcaccaagatttgagcctgaatgtcattgtcttaattctggattcttcacagtcttccacactatgattgagataccacttgatgtgagtgggcactcactctaccactcaaggtatgaaaatttgaagaagaaaagagaggaaacgtggttcggctatgggtgtagaatagatggctcaatttttattgaaggcaagaaatttcatcaacttttaagtgtgatccatcactatctatttataggcaaccactaggttttggttaggatttattaggcattaa

SEQ ID NO: 151905 - DNA, 678 bp, Cannabis sativa
  modified_base (116)..(118): a, c, t, g, unknown or other
atgtattggttcccctaaatttttgggctagcttcgcagataggtgacgccccacaattgttagtgatatttactaaaagttattttttttaaaagaaaatttacatggtatactnnnttttgttatttttttacaaaaaaactgttaggtaaatttttttattttttattgtgtttttttaagtttcatactgcagtatactgtgttaaatttcactggtatgatctactggtaatttttagttgttctactgttgtttagagttattcttctttgtgttttattggtgttttataaaaacgcagtatttttgaaaaaatttccgtatgacagtatttttataaaaattcactcatattccagtattttttataaaaaaatttggactagtgtcccagatagttgacgccccacagttgttagtgatatttattaaaaattatttttttaaaatatgagatccgatacttaattatattataataatatgatactgataaaaattctaaacagtaatattatttttttaacaattctctaaaaatatcaattttattgaaagtacttaaacgatttattggtgcttgaataaatgccccacacacatacaaaaaaaaaaaaaaacaagaaaaaaactataaataccattcaattattaattataagcattcttaaaa

SEQ ID NO: 151906 - DNA, 508 bp, Cannabis sativa
agagatgatccttcaagggatgaaattttgactccacaacttggaatcaaatcattaacttcttggtgtggtggtgaatcaagttgtgtaccactttgaagtcttatggccttggcattttctattgggttactttctatatgtctaggtaaactttgaatttcatacccactcatagatgtttccattggctctgcaagattctctaacttttgtagagattgttgaaggctctgcatagtttcatgaaagctttgctgaaattgcaaggtattagcttctatcacgtcaattagctcaacagtagttggcttttcactatatggtgcaacatgagtaggttgttgaaattgtacattatttttttccatccaagtagtagaagccaccaaagtgttgagcaaatcagtaagaaaatgattttaatcttgtggtgctacaggagaatagtcagaagttgtttgaacatattgattgatcccactataggaagtgtaagaataatctc

SEQ ID NO: 151907 - DNA, 923 bp, Cannabis sativa
ggtgcaaaggcaacgatgccccttcctaggcatgagcacccgaccaagcgcacatcctcctttaagggtttgtggcactattattgtgggcaggaatgtagcagtccaattcgcccaggtagccaccctggtcgagagtccgcaggcgtgcctcagtaactttagatggaggactcacccatcttgcacccaaggcaccttgccttctaccgcagcagtagtaaaagttcctcctcactaacgtagtccactccctcaaccaggacgtctccatcagcatcgactagttccccaacctcattgtatctcttgtagtttcgggtgcaacatcctcatcttccttcgctcagagggactgctagggcgtacgtcgtcctgctcttcaatctcctgaacgtcagcgtccccttcatgatccccctcctcctggacggctggatcctattcgacgttatgcaaagtggcgtgccaagccactttagggtcagatgcctcggttcccccttaaaagcgaatatgggaaatcaaaataatcgagtgcagccgtcaaccgtggtgagagaaaatcgaatttcaaaatattaattgtcagagtatttattagccaaaaactgaagggacccccagtcagcctcacatcaagtctcgaacagatgcgctcgacacgtgtccccatcaaaatgcagaagcagctcggataaagtctgcacgcaactttggaagtcccgtatagacttgggggcaaatgttatcccaatttttgcagtctaatgtggcatcacatgatggtgacacgtggtatcaacttcgagtatctgcacggagagtacagtccgaacatgatgcctcgtaggcatgcctgaagcaaagcgatcaacaatccgcgcagagcgaccaacacttagtgaattcagcttttgcat

SEQ ID NO: 151908 - DNA, 621 bp, Cannabis sativa
  modified_base (153)..(165): a, c, t, g, unknown or other
  modified_base (221)..(226): a, c, t, g, unknown or other
tcctggtcacagaatacaaaactcttattccatacataaacatatagtttggatccattgatagaaaatggatattaataacttgtgaaagtcatactgtattgtccaatgtattctaggaacagaaattgaaatttctatttggaatctaannnnnnnnnnnnnagacttaaatttataccaaaaatttcttgagttattattctagcttggaccaccannnnnnatctaactctaagtctaattttcctaaaataaacatatacaagttggagatttctaagatcgaggatttatatcatttcgggatagaatgtcaagaatataatcttctgcgtcatccatttcataagagaaattagagtgacatcataagcagatgatgtattaaccttctgtccatgatatactttataagtaataagctaagaggaaactaaatgataatttcgattaaaataagaatccaacgatgtcccgtttaggtgagagtcaaagttattcttattttatgaatctcttcattgtttcatattgtaaacagtaatctaagttgtaatctttggatgtacaactagatattgcatttataaatacttatctgttgagatctaacactat

SEQ ID NO: 151909 - DNA, 670 bp, Cannabis sativa
cagactggttcccaaccggaagtccagttctgggtcaccaaccggtcgactggttgctataggtcccccagaaccggaattccggttctatgctggaaacccgaaacatcctcccatgacctcaaaatccaaccaaactttaccaaactctccagtacacctgtatttacaacctaattcaaccagaaaatcacagaataaaccaataaattccaacttgccattaaagacctaaacttgagtttcaaagctcaagcttacccaattccatctccacctttcaaaactaataatcagagcttaaaaacaactcaaaactaacctagaaatcagattacacaagctttaaaccttaacagcccctatcctcaaaaatcacatgctcaaccaaagaaaaagcttcaaaacacataagcaagagttctagggtttacctccacttcaagaacacttaatccttagcttaattccagaaaattgaggaggagaagttggctttcctttagtttttgcctcagccgagagagagagagagagagaacttcaagggaaaaatattatttccttctaattttctttttttgatttcattaattggaaaaaggattttaattaatcctttgctgcccaaataattgctaggtggcaacctcaaaatcagccacctatc

SEQ ID NO: 151910 - DNA, 821 bp, Cannabis sativa
taatccaatcttgtccagtccagtccaatccttttcagtccaatccagtccaatcctgcgtaccaaatgggccctaagagaactaatattcaattctttcagaaattttgaattctattattgtatcatgttctcagccactcatgttattaagctcccaaaactaaagttgtaagaatcatattctctgagaaactttaacgagtgaatcaaagaatttaatgaacacaataggaattcatgtatactcaaaatttgtactgatctattaatgatcatcgttgtgaaatgaataactctttcatgataaacgacatgcatgttgatgaaatatgttattacatatcggtccaatcatgtatgatcaaattatatacaactcctttactacatgtctatccacatatgtgatctgaattaaaatcacacacacacgagtatagtgtacaataaaccatacttggtagttctatattaaagattcctttaatttaatacaccaccgattagttttattcatattgtataatcttaattctcttgtacatccttacaagattatactttctccattaaataaggaatttttagatatttatcaattatacttctataattaatgtatccatttatcttataattgtgtttcatatattttgtaatatattatctattaattacttgtttttaaggcataaatccaacatgtattccttaggatatagcctgactactcctcatgttaggggtgttcgcagtgcgggtggtgcggtttttgaccattttttcaaaccaacctgcacatgcggtttttctaattt

SEQ ID NO: 151911 - DNA, 607 bp, Cannabis sativa
cttgattctctatttgtgtaagttgtaatctttgccatttatcaataaagatatcacagccaattgagcttttttctacccagggatcaggtccaagttttatccaaaacttgtgactgaacctcgttaatcttgttgtcattttacttttctggttttataatctttctggtttaacattctaagccattttcttcttgcattgtgttcttgttggtgcttgagtgcacaataaatggtatcagagcactagggagatcagggattagtttcaagaactctgtgcaagaaatcaagattggtgcataatggcttcaactagattcgaggtggacaaattcacaggcacaaatgacttcagtttgtggaggattaaaatgaaagcgtttcttgttcatcaggggatttaagaggcatttgatattgaatctatgaaggagatagatgacaagaaaaggaaagctgagactgaatctaaggctcacagtgccatacttctcagtcttgaagatgaagtcttaagagaagtgtctagtgaagaaaaggctcttggattatgggacaaattggctgctatctacatgaaaagatctctagccaataaatt

SEQ ID NO: 151912 - DNA, 970 bp, Cannabis sativa
tttttgtggcaaaacttccttaagtttacttttctttgtaaatttaaggtgtcagttagatattactgttatataccaactgtataaattactactgtatcgatttcgagattttactgttacatatataggtgtatacaatggtcatccaattgatatttaactggtgtgtcaaatttgcaaagaaaaataaacttaagggggttttgccacaagaaaaaaagataaagggattaagtgtataaaaatcaaaacataagggggtttcgtcacaaattgctctaaaactaattaagttagacctcgtggtcattacaaattaagttaaccggtatggaagccagatctaccataccagtgatattaccggcaaatgcctattttgccacattatgggacgcaaagttacaaagtctgaaaatatatgaaaaattacaactagtgaacaggtttgagagcatttcacattgaattacatagttaccaataccctaattgaaagtagttcccttgagtgtgttgatcaccgtctcagagtcactctctatcatcacaaacaaatgcttcctacgggtcgctgattcgagggctaacaaacaggccacaacttttctaatgaaaggatcagagaagttgatgttgttgcgagctacccacaaaaccgactccttatgatctcttgccaaggccaccacacacattgagtcgctaccaaccttaacatcgcagttgattttgttccaatcgtctggcggggggaccaaacaggagtcataagaaacaaacaagaggcaaaatctgcgcaataaatagaaatataatcaattcaacgcttaatgttacatatacaattattagtatgaatcttatcgttctgagttttccatatcgtctccactacaattgaagcatacaaaaacaactcttcgacctccactccttttcctttcaagctccatagaaaattaac

SEQ ID NO: 151913 - DNA, 588 bp, Cannabis sativa
aattttttcacttttaatcacaaagtttgttgtgactaaaattgagattttttgtagtgatgggtggctggggaactatgttagtggtgcttaggtcgttgcggaagttcgatagtggcgcgaggtgtctgggctacttgggtggcagtagagggcttgggatgaaatttgagagggtgcaatttcaatttaagaaagagaagagaccaaaagagggaaagatggaagtgagatagtggagagttttaaaatagggaaaacatttttatagtctgtgccatattttttgaatattcatgtaccgtattatatgcctattttaccatatattattggctcgtttgatagtgaatacacaaagagtgctactacaaattttcacaaataaatttttaaatcttacttttatttatatttaataattttgattctttttcgtatttaattattatttttatcatttttgttagttaattgagttggttatctttttttggcaaaatagttaattttggaaaattctataatggacccattaaaatggatatattgatgcacccctacctgttttagcatccgaaataattt

SEQ ID NO: 151914 - DNA, 537 bp, Cannabis sativa
agtaaaaataggctatctccaaagaagtagggcactcccatcctaaaatatggtataggaccttcaagctcacaaggatcatatacgagatggggttcagctggaatggggtaaccctgaggtagttacagtactccttaaaataatccctaaggggaaggactgccccagccttgatgtgcttgaggctccaggctctaatgcccgaggaattactcatgctaggcccaatgcactttttacgtagtaccctttatggaggaaaacaggtgaattccacaggagacatggaacttatgacacaacctttcctttgcttgatgccgcaggactttaagatgccatgaacgtaggccccaattgacctagccttggattcgatgagttcaacctcgaaggtgacattgtgatcctgtggggtcttgatttacgaggcttaggagacataatgtcaaaatttaggtaacctagttcaaaagcaacaatgacttcaggtaaaaatatttttctcgtgagtggaatagaagctaatattgt

SEQ ID NO: 151915 - DNA, 717 bp, Cannabis sativa
aattatttcttgaattccttatgtatcattaattcaatgtgaacagttaatctataacttattatagatttgaatccaactgtcaacactttcataattaacactataagggaactaatattcgatccgttaggaaaacttagattccattattgtatatcatgttcccaaccactcttgttattacattctcaaaatagaagttgtaaggatcatcttctttgagaaactttaatgagtaaatcaagaacctaataaacataaataggagttcatgatacttaagatttagacaggtctaccaatgatcatcactgtgatataaaaattctttcatggtaaaggacatgttaaagaaagatgttattacatatcggtccagtcatgtataatcaaattatacacaacacatttactacgtgtctatccacatatgtgatctgaattaaaattgcacacactagagtatagtgtatagtaaactgtacttaatagttccatattaaagatccatttactttaatacattgccaacttattttattcatattgtataatcttaattctcttgtacaatcttacaagattataccatctccatatgaataaaaaaattagatatttataaattatacttgtataattaatgtattcatttatctcataattgtattttatatattcagtaatatattatccattaattacttactttta

SEQ ID NO: 151916 - DNA, 524 bp, Cannabis sativa
atatataccttataatagaaatatatataataacaacaaataaaaataaaaatatatatagcatgctaataaaattatatgtcacgtcaataaaaaatacaatagaaaatagaactagaatattattttttaaaaaatgatatactgtataacaaaaaaatatatatacactattcaccaaaatatatatactaacaataataatataataaaaaaacaacatattatgccatgtgctaaaacatataaataataaataaaatgctcatttctctacattggtacacaatttttttgataaatgagctaaattttaatttcattaatttgtatctccattacatgagtatatatatattaggaacagtgaaacatattttaatttgaaaatatattttcaagggtacttttgggataagttaaatgaaaaattgaatatgagtttatagaattaaaagataatagaatcttaagtaagcacggtatacatacgtacgttgattgttatgtataattgtacatta

SEQ ID NO: 151917 - DNA, 682 bp, Cannabis sativa
  modified_base (149)..(166): a, c, t, g, unknown or other
  modified_base (461)..(463): a, c, t, g, unknown or other
aattaaatgggctacctataacctatatgcaactaagccctaagcccaaaggaaacatataggctcacagaggaacacagatttggatagatcctattatgttactaggtcatacagagatgaaagaagaatgcaaaatttacctgttnnnnnnnnnnnnnnnnnnctattgacaattgaaccatgtgttaaaatcagatcattggatctggcaacaagttaaccatggaaatttagatcaaagaataagagatttttataaaacttgttttcataatcaaacaatataaaacatacaagcatgtaacaagttggatagttggatatagggtttacttaattttaaattaattaattaatttaataattttaaaaaatcaataattttttttttcgaaatataaaataaataaataaattaaaaaaaataaaattaaacctataaatttgaaaaattaggnnncaactaacctaaatatctttttttaaaaaaaaaatgctaacaactttcaaatttcaagttattttaaaattaaatattcaataaaataaaatgataatgtaatatccttcatctgattttataatttaatttaaataagaaataaaaaaatttaaaagttagcaaaatatcctatttcaatttaaaatttcatgattaaaataatcttattttcaattt

SEQ ID NO: 151918 - DNA, 511 bp, Cannabis sativa
  modified_base (57)..(61): a, c, t, g, unknown or other
ggccaaaaaaattcagggggcacgatttagtgcatgtcaaagttcagggggaaaaannnnnaattagcctaataataataataaaaatttgcgactaaactctcttatgtttgatccttttaacacttaaccctttatcttttttttttttttggcaaaagtactttatgttcacttctgtttgcaaattttaagtttcagttaaattttactgttaaatgccaattaggactgccaatgtgtacactaatgtacccgtggtatgtgtttattggttcaagtaattttaactatttaaccattataaaattgtttaaaaatttaaaataaaataaaataaattttcttcttctttttcttcttcttcttctttggttcacccaccatcatcagcaaaaactgttaggatatttttagcctattatttatattatttttagatttaattttcttctttattatcactttttggaataaaattatgctcgttttcgttaatttcaggtttcga

SEQ ID NO: 151919 - DNA, 597 bp, Cannabis sativa
  modified_base (239)..(241): a, c, t, g, unknown or other
taggtcaatagatcttaatcctaagatagttaggttctagcttaattttattatttgtgttctttggcttgtttgttaaagttgaacaaatggttgttcccaatacttacatcttgagaacatgataatacaattgagttggagcactaatataactttataaaagtgaaatgataattttatttgagcttagcttaatagaaataaatagaagaactcttatttcagtaattatattnnnttattgaaatatcatttataggaagctaagtgatttaaggataaaatacattgaggggtagaacggtaaatttatccttactagatgtaaatcaactatagaagatctttgataatttagattaaaataatgggtaattcaaagctcatatatatatatatatattgtatatataacattttatgtaatcaggagagcaattcttaatctatagcagagttcggaggaattaataagttaggaaatttactgggtaaattttagatctatttattgggagcttggttacatagggccatggtccccacactaactgggataatattattttatagtctcaattaattgattttaat

SEQ ID NO: 151920 - DNA, 665 bp, Cannabis sativa
tcaatacgaggaggaagacgagggccccggcgctcttcgagtaaagcatcaagccttttcttattctcccggaacttagcaagagcttcctcaagtttgggatagaagtcaagtttgatgctctggccattcgactaccagaccatatagacgccatcatcaaagcgcttgacgcaatgcttacagacgaatggggttaggagctcatctcttttggcctttttcaaggcctggtctctaaaatcccttagctccttcacctccacagttaggttggccgtcgattgcaagtccgcctgatgcaactcctctaaggacttcatcttggcagccatctcatccatagcctccctggcttcctaaagctcgcgtttggtcctggttgtagcctcgccttccaccttcagcgcctcctggtgcctcgccttcgcctcagcctccctttgcttggccttctcccaaaactttgcctctgcaagggcctccctttgttgagcctcctcccggaacgcctgcctttcggcagataaatcccgcaggatcctcacggcctcgtctatgcccccaaatttggacatgacgaagccatggtcgatcagggtcttggaaaagcagccggtgttgggttttatgccttaaataaaactctttacaatctgattagt

SEQ ID NO: 151921 - DNA, 544 bp, Cannabis sativa
cttttttattttcatttttttttacttaaactatatttaatactataaaaatacaaatttgtatcaatttttaatatgttatatcatgtagaaaaaatggtaaaccgtccctcacttaaaaaaaaagtctgcccccgctcaacttaaatcctgggtccgccacattatctttgccctctcttccgctcagcaacaaagacactacaaaaaatcttacttttagtcacaacaaaattggtcactaaaaataaaaaatttgtgactaactataaattgtcattcctatactaactgtctcataaacaagttacaagaaaaataaataagaccttttacaagagcctaaacagaccattataactcttggagtagtcagttttgttttcataggcttagatctttaagctctttacattaaagaagtaaataacaatattccaagactctaacaaactttcagcaaaacaaggaaaataatcataacagttttctaactgttttctcagctaaaaaacacaataaaatcacaatcaacaacaatata

SEQ ID NO: 151922 - DNA, 575 bp, Cannabis sativa
  modified_base (231)..(234): a, c, t, g, unknown or other
aattaatattatcaaaagttcaagaagtaaaattgctaattattctacttttaattactgtaatttttttttttcaggggggtggaggggggcttaactaatgatatggtatttattgtatttttatatgtatatataaaatgttgattatttaccgactatttgaaatatagtcatgtgaattaattattgaaatttttacatattgattcaaattttgaaaacaattannnnaatatgttaatataatttttttttatttctacgttttgaaatttttatttataaaaatatatttttcaataaaaataataaattatttcttgggtgttttaaaatttatttatagttgtattatagttgtcgttttttcaattgtttttggttgttttatatttaatttataattgtcgttaggttgattttctcgttgtgtgttaataattttcttatttttttttgaggaagaaactgttggtggaatgactctggatcttcactttgatttcctttgctcttcttgcctctttctgctgtgttttagggttccgaatcgcttcccctgacttccaatc

SEQ ID NO: 151923 - DNA, 562 bp, Cannabis sativa
ccgaaaacctcggtcaacaggttcgttttctatttgtactttataataattaataatttttttaaaaaaataccaatacaattaaaacataagaaataaaaatgatatgatgagagtatcacataagaatgttaaaaaaaaaagtttttgagatatatgtaattatattatcacaaaagttttatttattttaataataaaaaaactattagcatatatatcttttaaatttaaagaatagacagatatatttagaatgatttttaattaatatcaatataaaagaatgatagaattaaggagagaatagatgaatgtatttagagtacttttatagtgccatgttacctccattaatataaaagaatgagagaattaaggaaggaattgatgaaggtatttagagtaattttagaaagtcatgtgacagcttcatttttcttctttatatatatagatatttaaatttaggctaattatgatttttgccccctgaacttttaagatcgttaaaaatgccccatgaactatagagattgttggatttaaggacttttttcaa

SEQ ID NO: 151924 - DNA, 727 bp, Cannabis sativa
aaagctttctcatccaacaaactagccaacaaaacctgctcaaatcactctacaataccataatataactacagaaaacataatctaacaacagcagcaagaggagtaagttaaacaacatttcatgcaaaactccattttcttacaattcaagcgactaaaaagattgaagcgaagaacttacctttgcttggatacacttgaattgagctaagatcacttagaattgatgaagaaagctcaaaccctagcagcccaaggaatttttgagagagagagagcttgagagaaaataatttttgcttccttttcttaatttttgtaaaatgagaataataaaattggttttattaaaataccttcagccaaatataactagaaaatctgaataaattttatttactaaactcacataaagacaaaacacaaaaggggcaaaaagaccaaaatgcccttgcccacacaaaactaacttaaaggatactaagggtattttgggaaaactctaaatttccgaccatttccaacattcccaatgtctaactaaactgccccgctatactaaaatactaaactgtgattctactgagccatacaccgcgttccaatgttgctggacattgaacatgcacaaatatgaaatttctatatatgacatataaaatgtattctgaattcaaataaatcatcataaataattaatttaatattaataaataattttcat

SEQ ID NO: 151925 - DNA, 759 bp, Cannabis sativa
atgataggggtgtatatatttagaatccttatatctacattactctagggtggaggaattattttacaaagacgtaaaaacccatctataataatttagttccaccagtgaagctaaataacttagatgtttttgaaaagtactagaaagtaattcaaactgaagaaagttcttaactgattttatctctattttattttggttagaattagagatgtgtcttctgtacattctcttatcaagcaataaagaattcagtattcctagaggagtaatacatatagaaaaataatattgcataatgttttatgaacacaaaagaagtaatagaggataaagcaattgcttaccacaagcgttacagttcctgttatttgagtttagttaaatacactacacttgatctggatatcaagacaatggattgattgaaatgcacttcttattttatgttagtgcaagtgggagcttgttgggattctatgccctaaataacactcatttcaatgtaatcttatttgttatcaatagaagattagaaatcatttatgtttacatgtatatatttatagttcaatatacaatttttgttaaatccagaacatataattattcacaattatagtgatgtcaacaacgtggaaggtaattgtgattatatgctttaaaagtttatgtcctactattcatcagtgcactgaatttacactgatgtgatagtcagcgataaagtttacttacaccttggataagtattat

SEQ ID NO: 151926 - DNA, 688 bp, Cannabis sativa
  modified_base (267)..(273): a, c, t, g, unknown or other
tgcactaacataaaacaataagtacatttcaattaatcctaaattcagtctgtgtttttcaaatgtagttccagccaaaactttggtgaatggatcagttgagttgtctttagtgttcactttctccactagtacatcccctcttgccacatattctttgatgatgttatattttctctccatgtgtttgcttctcttgtggcttcgatgctctttactgttggctatggctcctgtgttatcacaaagtaaaaccagtggtttttnnnnnnnaggaacaacaccaagtcttgtgaagaacttttaaagccagacaagttctttagcagcctccacgacaactatgtattcggcctccatggtagagtctaacgttctggtttgtttggcacttctccaaaccactgctccaccaccaagagtaaacaccatcccagatgtagattttctatcatcaagacaagcttgaaaatctgaatcggtatagcctacgggattcaaagcaccactcttgtagactaacacgaattgccttgtacttttcaagtacttgagactatgcttaactgcattccaatgttcctctcctggatttgtctgacacttgctcacaattcctagtgcatagcaaatctcaggtctagtccataacattgcatacattagactcccaactgctgaagcataa

SEQ ID NO: 151927 - DNA, 500 bp, Cannabis sativa
tttactagtgcttttcatccaacgctctccatctttcaacatagactcatgtgttgtattgaaaatatttgaaggagtcaagccctttgaatttttcatatgagcatatgatggcatcatatgcttctgcacttcctgtaacattaaatgattatgtatatatactagggaataggactgccctttcaaatatctttttaattttacattaaaataaattattttttttattaggaatgaaatttaaaatatattcattttttaattttttttaattatatataaaaattacgattaacaaagataatttataatacaaaaaaaaaacctcttacattaagttatgcataataattaaataaatattcattttttcttgttttacacttgaaaaatatattacaaatatgatttttgtaataagctaaatattaataataacttactttttaaatatttaaaaatgtaattattaaaaattatattttaccgtacaaaat

SEQ ID NO: 151928 - DNA, 618 bp, Cannabis sativa
ttctgagcatggccaaaatactatcagtcaacgcagtagaaaactcaagcagaataaattttctaatcctaagcagaatatgttttttttcagcgttttttttattttattttatcattttttttggctataacagaagtggacttcaatatttttgagcaagcaatttgggaggaaataaatagcagaagatatagtatgaatttcagaaatcaactgcaatactggaggcattcttcaaaggattttcaacattcttttattttctatttcttctcttttctttagttagcatgtgtgatcttgcttccatgaacatgattgactaaacacttaattagggtttagatggatgttgtttacattgttttatgattttagtatatgatttattttccctcagtttctatgtattctatttcatttgtacttaatttcttttaatttcctgattaccaattaactgtctatgattttgatacgagatctgaaaagtgagtgtcaattatgctatagtgagattgaactgaatttcgatataggagaagagtacctgtatagcttagataatttatagggtttctgtgtttaatgcttgttgcatgtttaatttatcac

SEQ ID NO: 151929 - DNA, 612 bp, Cannabis sativa
tctggggtcgggtcccgaatctcgggtcagtttggttctttgttcctaggtccaaccctagttcttgagtctgggtctaggtccggctctcggtcttggtttaggtcccaagtcacaggtcccagtctgggtccaagtctcggtatgggttaacgttgagtttgggtttagctttgggtcctgttacagtcccaggtttgggttctcgtcccaatccaggttcgattccgattctgggtccaagatttggtctggatcccggttcggggtatgggtctgggtcctggattcaaacacttattatgggtcatgttgaagcctcaagttcagattcagatctcggtctttgatctcagtcttgttctagttcgggtcccgggtcctgggccgagtcctaagttttagtttggtctgagtttgggtttgtgtcctggtagtgaggtcctgggttccaagtctaaggtcgggtcctgtgtctcgagtctagggtcaaattttgggtttcagaccccggttacgaggcccagtattgggtccaagtcccccatctaggttcggatcctttgtccaagtcttggtcaaagttcaggtttggggccaaagtcccccatc

SEQ ID NO: 151930 - DNA, 704 bp, Cannabis sativa
ataatggatggaagagctatgctgatctaaagtgtatagatattgaatttcaagttgggaatcctatctttcttcaggtggttccaacgaaagggaaaattcagatattggttagaaagggcagttaagtctcaggttaatctgcccgtttgagtttttggaaagagtaggtcgggtagcttatcagctagccatactctttgttttatctggagttttgttgtgctaaaataagatatacgcaagtgcatgtagtcacaaacaagtaatacaatgataagcaacgagtatcgtctccacaaggactataaaataaaatttctattgcaaaagttaattaccaagcaaaatgcctaagaaccaaaataaaatgattaatgattaaactaaatgaacaagaaaataagtaaattagctcaaaagtggatgcaagatgaaaataaaaatgagttgtaagtttttgaaatgtgaaaggtttgaactattgaattcccctatgtttagcaaaaactgtgcgttttgctgcagcaaaacattagcaagtctttagcaaaaaatctcaggtttacaagaactccaataaagtgcacaaagctcttccaaactttatgcactcaatccttggacctgttcaaacatattcctatgccaatcaagctcgagaataccattacaagcacaactctcaaatgttacacaaggat

SEQ ID NO: 151931 - DNA, 545 bp, Cannabis sativa
tttagtagtaattaatccaattccttgtggttcgacctcacttgcgtgagtatactacttgattgcgtgcacttgcgtagtaattaataattttcgcaacacctacttcctcagaggttaacgcaagaactactcctttcaaaaagagaaagtttgaggaggcctctgcatcactttgttcacgcccttggaagctccttcctccacatccttgggctatccgtgatttcccgtgggatatggagggacgagctaatgttactaaggatgcggaggaagagccctccgaggaggtctctctatccaatgacaacttcaatggcccggatgagtggaggtctaaaggaaagaatgtgatctcgtcgaggccaatggagggcacttttgtgattgaagaatcttgttcttttgggtcggcacgttctcatacccctgtggacgagattactactcctccacaggagccatgagaggtatcgcttggaactgtagagggttagggcagacctctacagttcgtgagctgagatcggaagagcggttca

SEQ ID NO: 151932 - DNA, 544 bp, Cannabis sativa
gggcataaaacccaacaaagactaagtttaaatgtatgctatgaagtaagagattatctgagtagaaaggtagtagaacatacatagttgatctcgggcagcatggtgatggagaatgacactaaacgcgatcgaatggcgaagttctgttttgaggaaacggctgttaagaccgctagggagtctaatctagttgaaggtgggaagagtatatcgctcgaaatgaggatatagttgcttagaaaagggggttgtccagttctaagctcgggcggttgatttaacctctcttgccaagagtgtaaggactgagatgtaagagatttcattagggtgaatgctaaacttgagcctgcttttaatgtggggtagtaggccatttagaagaaattgtatactgttgcaacaactggaatagaagggtgatggcattctagttactgtttgggtgtttgtttgacctagactgagattggtgttagcctttctactataataagttgaattttcatgaatcaaattttgttaataattttgattgatt

SEQ ID NO: 151933 - DNA, 1281 bp, Cannabis sativa
aaagaactccacaattaagtgtgcttgacctggggtaatttcaggatgagtgacctcttgagaagtttttccaggaagtgtgtgagtgaggaaaaagtatactggaaatacttgtgttggtctttagggccagtcgtcatttctcaagctctcatcttcaaggctcaacactatggtgtttctagcctttttcagaatctcatccttcttggatttccccaatgttactgacattttatcttctcctttcaatgcttcatccaatcctatgttttcaagatgagctttcatattttccttccatagaaagtcattattcccactgaacttttttatatccataattgcaggggggcatattttcttcatcttcgtaagtttgattcttgattttcttgaagtttcagttcagaccaagattcaaataccttctcttttatttactctggtttattgtaaatgtcaccaaactgaaactataaaacataaaccataagctctgataccataacattaccctttaacaaataataatacaagtagtcggtttcgcattctttttataaaaaataagaaaaaaataatacaattttatgttttttagttataagttggtagtgataatgatatgtagagatcataaactatgagagaagtgggactagacataaatctctcgtacaaaaagtaagtttcaagttccttttggtagaagtggaagaaagaagtcgtctaatcttcaattgctattgtgtaataaccatgaatttcttttagtttacaactgtctttcggattagcttttaaaaaatgacattgaaattctatacaggccctacatatggaaaaaggtccaaaatcaaataaattatatgagcctatttgacagtgttttcagtttttaaaattgtgttttcaaaagtgagaatataaaacagttttttgttattttaaaaatttaatggtgtttgacacaaattttttaaaactattttttatttttttcttaaaataattaatatttttacaccataccatgacatgaacccatctaagttcgggttcgagtatggttctaggtctaggatccgagttaggggtgttcacaaagtatccgatccaattcaatctaatccacaaaatacggacatccacacttgcgcagattggattgaattgaaccatataaaatccgtacttgtgcggattggatgttgtttgacctcaaaaagtaatcaatccaatctaatccgcacttaattatatatatattttttaaaa

SEQ ID NO: 151934 - DNA, 783 bp, Cannabis sativa
aggtagttatgccgctaaaattttagtttttgtggttaagtgttacaaaccgtaaagttcaggtgatttagccgccaatatccctatttagaataatattttctaattaatatatattctccacactctttttcttacttaattttttttccactaaaattacttttgaggttataatgaaatatttttttcacaagaaataaaaaaaaataaaaaaaattctgcaaacaaacttgtaaaatgcaattgctaagagaacttataagagtttctctaaaataaaaaaactttaaaaaaatttaaagaattgtaccaaaaacatgctacagtagatgttttaaactacttcattttaattttttttaaatatactattcatgctctacggactacatttatagaatattattcattgctttaaacatattttattaattattttaaatttttaataataatttttatatggggatatgtgtatagattaatactatatatttgaaatgaataaaatatattaaaaattttaaaaaatgaggttatagtgaagcattttaaaaaaattaatatatggtgtaatgtaaaagtatactataaaataaaaataaatagagttttgaagaggtattttaaatgatagaataaaaagactgttgtaagtgctctaaatatttaaatttataagaagtgaaacgatcatttccttcgaacttggctgaatagagataaatgattgaagaccccatttcagtaattatattagtttactaaagtattatttat

SEQ ID NO: 151935 - DNA, 579 bp, Cannabis sativa
  modified_base (440)..(441): a, c, t, g, unknown or other
  modified_base (519)..(539): a, c, t, g, unknown or other
tttgtgattgtgttctgaagtttaaatatgttgttttaagcttgatttagtggctattagtagatttaaccaagctttgagttttagaactcaaacttggagcattaatggtaatttttggattttgagcttgggtaactgctttattgcttggaaatggtttattggggtataatatgcaggtctggagagtttggttaagtttggaagtgattgttttgggttttctgggtaaaaccggttacccaaattttgcagcagggttccccaaaaaattcaactcgttgattcgttctagtttcaggtttttgattggttgattccctgctagtttagggtattgtcatattaagtttcagtagataggtttttggtttaaaacctaagttctggtggtgatttagcgagtcacttatttgtgttgttatcgatgtgatttnngagcctataattcgccgagcagttattccattcaggttcatcggcacacgtgaattcggaattgaggtaagattagtnnnnnnnnnnnnnnnnnnnnnttacatgtttagcgtgcatgttgggaagcctgttacatta

SEQ ID NO: 151936 - DNA, 504 bp, Cannabis sativa
tgagtgtttgtgttgtatgtttacaacagctgggaaaagaaacaacataacaaatgcaacagatgtggggagctggagcataacaagagaacatgcaagcgaagacatcaaaaatgaaaagaatcagaacaactaaaaactaacagtagaacaacggagcaaaaataaacatatattggagcataggatactgaagaaaataacttacatacaaattttattatttttctaatactattaaaaatggagcagtacaataatatttaaaaaaatgtgataaataaataaaataaaacaactataaaacaaccttaaaacaataaaaaacaataacaaaataaaccagtaacaaaaatatatattcaatcctaaataatctaacagaaacatatttaacatgaagaactaaagtacatgaatataggaaaactacttctagcccagaatgatgagagggagaagagaaaaaaaaaagaaggggagaggagaaaaaaaaaagaagaa

SEQ ID NO: 151937 - DNA, 677 bp, Cannabis sativa
aaaatttaataacatatttagaaaacaataaaaaaaaagtcaaaattaattttttcaaaaaatttatgttttaaaatattaattgacattttttataatattaaaaataaaaacaattagtatattggtaactaggcaatatattcgcacagctaatttaatttttttaagtattataataaatagttactttaaaatataattttaatatatagtaaaattataaataaattaacttagtatattgtttagtataacattgagcattaatgaaaattttaagagaaattcgaatacaagaaaaaagctaacaaaaaataagtacaacaatgcaatgactcaaaaaaaagggaaatttgaatttctatgcttgcattaggggataattttttctctaaacttaaaataggggatattggtaaaatgggataacattttgttaattcccacaatacccccctcccatttgaaacctgatgctctctctctctttctctctttctctctcgctcggtgtcgtacccacacacgcagaccacccacccacggcagaccacccacgcccgaccgcccccctcaacccatatcactcacgccgactgcccccctcaatttttttagtgattttttcaattttttcctttaattttttgtgcttaaattcatgaaatagaata

SEQ ID NO: 151938 - DNA, 667 bp, Cannabis sativa
tagtaatcagatggactaaatttgtagtcctagacctcaacataaccaaaatggccacagtaaattattaattgtgaataatgcagtatgggagctcaaataaaactataacaaaaccaaaaaaaaaaactaccaaacagatccaactatacaaatataaactgcaaacatctgaaatcatattgatacctaaaaactaacagcaaacaattatacctaataaaaatccaaaaacacatcaaacataacaatgttaaactataaacaaactaataggaaattacaaccaacagattacacacactaaaacgaaaacaaaagtttcaaaaatatttaacaataaatgacaaacacatacagaacctaaaacacaaacgaacactgtaaagaaagaaaacacaatcaatttaaaaggccaaacccagaaaagaacaaaataaattgctcaaaacaaaaataaagacctaaaaaattaaacaacatcaaatgaaattttaaaaaggaaaccctaaaatttcacaaagtagaatgaacaaaaaacgcaaaatctcgaaatacactaaaatgtttaaaaaagggggaaacaaaaatgaaactgaaaaccaacctctgttcgaacttcggcagcaacactagcttttttactagaaatttcttcaaccatttg

SEQ ID NO: 151939 - DNA, 512 bp, Cannabis sativa
aatagagtccaaaaatacccctaagtaccccttttatgccttttagtgtgggaagtgaaaaatggtcttttttgcccattcttgtttttcttatgtgagttttaattaatgttaaaataagtttttttttttttatattactttggctgaagtagtgtagtaaaacctaggtttatttcatttattcaaaaaaatagaaaattgaaaagtttggaaaattctctctttcaacctctctctctctctcacaaaatcccttagagcagctagggttctagaattttttcttcaaatctttccattttacagcagctcttagtgatttcaagcaagggtaagcttctagacaactttcctttagttttcttgaaattcaagttttgaaagtatgcatgttttgagagtttgagtttcatagttgctgttgttgtttgactcatgtttctggagttagattatgaattgttatgttttttaaagcatgaattgatagttgtttgaaggtttttgca

SEQ ID NO: 151940 - DNA, 688 bp, Cannabis sativa
ttcaacaaattccatctaaagagagtttagagagcgaggaagcccgaactccaataccgaagttatcgcagggattgaagctcaaagattaatcagtggaggtatatcgatctttcattgcatatattatcgatatggttatagtttatttccgcattacatatcgtttatttatatgctatattccatatactatattatagtctaacagttggtattagagtggtttaatctctgccttgattatttttgagtttcatatatatatatatatacgtatatacacgctgttcatatatatatatatatttgttttggttcgttcgtgtatatatgtatactcatattcatactatcccgattatatatatattttcatacgcatatacatatatacatttttattcatacggttcatatatatatattatatacttatacacttacggtacatatatattttttttttatttttcagtatatttacatatatgtatatatatttatatatattgtacattatatgtatgttatcgcataataatattcattttcatttatgtgatatatatgtgcacatatatatagaacataaagtttatcggtgtaaagtttaattttctctatttttcattttttcggtatttatttcgaattctatatatattactatattcgtatagtatta

SEQ ID NO: 151941 - DNA, 569 bp, Cannabis sativa
aaaaaaaaaactgttttgaagcgtaaaaatgaaaaagccccaaaaatatatatggtaaaactattaaaattttactaattagtacgctaaatcaagaatttatttaggaaaaaattcgccaaactttgattttgtttgtttatttattgaaataaaatattatcatattaatacaaagagtcacaatacaatagacattagagatagggttgcacacatgttacgtttttgggttgtcgggttcggggtttttgaatttcgggtgttttaaatgggcaaacgaatccgatttttgagtggtcgggtgtgacggagtttgggtcgcattttgcgcgtttaatgtggtcgggtttaagttttactgagctgagtttgaatgcttcattttggggctcaaataaaatttgatttttaaaaatgccatctttttttttttaattatttttaacatttttgggccttttatgtaacgccttaatgctaaggcacgctacaatgctttttcaattatagtgctatctttgctaatcaaagatttttctcgaaaaacgtgttaatttaaaactttt

SEQ ID NO: 151942 - DNA, 542 bp, Cannabis sativa
agcttctttcacgcggtcaatgatctaataatcacccaaaaccacgaatttgccctctggctcctgcttgtgtctctctcaaaactgtgtcacaagcccatctcaaaaaatcaaccatgcatcctctaatgactcgttaattttcaacaaacttgataacacccagtcttacttttaaggctttgaagtcatcccaatccgctatctcccatcggcatatgctctttgaaccatccggcttataatgtctcatacaacaccagtgtccccataaacacaaaacatgcccataccatgccgcaaactagctcagtcttgatcttggcctacgcccctgaatattttttgtctacagcttgcagcaatcatgcaagtcttcgcactgaacaacccatattttgtagtgtttccctctcgattcacacaccaaaactgaacgagtacattgattcttaaaacatatgaattagtggcctcccccacttcaacttgggaaaaacttctctcttagaagaatatccctcaagatatagctcgcaagc

SEQ ID NO: 151943 - DNA, 552 bp, Cannabis sativa
  modified_base (40)..(40): a, c, t, g, unknown or other
  modified_base (283)..(286): a, c, t, g, unknown or other
tatttgttttactatatatcgattgctataaatcacttancgcttactaaataagactcattatcgttggctaaaagcgaggtcaacaattgctaatgcttttagtgtcatggattcatataggttttgttcaggaatattgttcactccttctaggaatatttgagttcttcaaacagtttttcaaaaagtaaaataataaaaaaaaggtttaaaaaactgtgttcaagccccattggaagaataaagctacctatctcaatgtaaagaccgcttagctttnnnntggaaattagtagataattagggcttaattatgaaaattacttattaatattgaattatttatttacgataatttaattgaattcggaatgcatttatgtgtcatatatagaaatttcattatttttgtatgttttgtgtctagcaacattagaacgcggtgtttggctattagaatcacatctaagtatttttagtatagcgggacaatagtttagacattgggaatgtcgggaatagtcaggattttgaatttcccaaaatacc

SEQ ID NO: 151944 - DNA, 565 bp, Cannabis sativa
caagccacaaacatctacacagtccctaaatctctgtgacagattactccctgctctttttcccaccctctcattggcattaagtatttcattaaagtcccccaagactagccaagcttctctaatattattacttaatacttccaaatccctccacatctgttctctactattttcatcattgaatccgtataccaatgtaagctggaattgaccagaacgttgtttgaattgcacagaacaatgcatcaattggcttgaacagaaccgaatgtctactgtgtatacatttggttgccaagccaatgttattcttcccttatccacccaagcattattattcgaaaaacaccaacccgagaaaatactagcatacaatttacccatatttttattctgaaccttcgtttcaaggagactaaccaagccaacacgcttagagtgaatcaattgcttgatttcttgatgcttctattggctgttaattccccttacattccaacaaagcaatctatccattggaggtagagggatctcccccccccccccccctgtgttaacatcc

SEQ ID NO: 151945 - DNA, 828 bp, Cannabis sativa
  modified_base (254)..(267): a, c, t, g, unknown or other
  modified_base (645)..(648): a, c, t, g, unknown or other
caacatccaatcattttagattttccaatccaatccaatccgcgcaagtgcgaatatccacattttacggattggattggatcgaatacttagtgaagacccctacattcaacaatgataaaaattgactaagatatattattatgtctaactaaactcaagtgaagggtgaagagatcacctttttatatttttcctaattatatgaatttaaaggtttattaaactacattatttttatttttattattatnnnnnnnnnnnnnnttattattattattattatttcgcgtaacatattttagaatgcattcttcgcacaagaaagacagattatattaattattaaaattataaaatccatacaataccaaatacgaattttgctattcaatacataaaatgataaaatttacaatatattttctaaaatagtaaaaataaaaatttgagctcaattttcaacaattttattttttaatataacaaactttaagacaatttctaacaccaacatatacagaaaatataaccagttttgtcataacatctttagattagattattagttaagttttattttgacaaaaaatcagttcagggtcatatttgtacaattttaaaaaatacagggtctattttgtnnnntaacaaaacagatggtccaattaataacgtttacaaaatacaggatctaaaataatatttacccttgttgaataaattccacttaccggtcctgtatacttacagatatccacatcagcaaagtaaaaacagaaacaagcaaacagacacagtcctagggtggcttcgcctctagtggat

SEQ ID NO: 151946 - DNA, 1249 bp, Cannabis sativa
catgtccgagtttaggggcatggacgaggccatgaagagtctgagagacctggcggctgagaggaaggcgttccgggaggaggcccagtagagggaggcacagtcggagaggaggcccagcagagggaggcacaatcggagaggaggcatcaggaggcgttaaaggtcaaggcggaggagctgaagattcaggatgaggctacggccaaggcaaggcgtgagctgagggaagccaaggaggctgtcaaggagctgactgccaggctaaagtctatggaggagctgcatcaggaggacttgcagtcgacggccaatttgaccgttgaggtgaaggagctcagggattttaaagattaggccctgaagaaggctaaaagagatgagcttttagcccccgtcgtctgcaagcattgcactaaacgcttcaatgacggcgttttcatggcttggcaaactaatggccaaaacctcaaactcgacttctatcccaagcttgaggaagtccttcctcgcttctgggagaaaaagaaaaggctcgatgccttgcttgaggagcgcagggggcctcgtcttctaccctgcattgattaagccaacaatcatccgttactactatcactatcttttttttcttttttacatttacagtctcttttcccttttttttagacaattttaatctttttctttaaggggagacaattttaaggcccgtcctcaggcccttaatattttttagagcctgttattgggtctgaacatttttatatttatgcttaaatacatattttgctttaattttgctaaacttttggcctgttttacatttgtccatgtagtatgccttactgcccccttgagtggcatgaaattttttttttaaagacactcagctttacgaatataaatttggaggttgcatatactttttggtacaaatttacttgatgaagcctaagtttacattttctaactattggtaatactttcggaggtgatcagcgttccaggccctaggcaccatggttccgtccattcttttgagcttgtaggtcccggagccgatttcatcctcgattttgtatggtccttcccaattaggcccaagtaccctcactccgggttctagagtggctgggaagattcgtcttaggaccagatcatgaatagagaattttctacttttaacttttgagttaaagtacttagtcactttcttttggtaagccgccattcgtatttgagactc

SEQ ID NO: 151947 - DNA, 561 bp, Cannabis sativa
tattacaaaatataaaatacaaaagttgtcgcctagcaattattcaaaatgaaacatactgtcccgaaaatcgtatgctccaggtttaaccgccccgacatgtacaatcttcatctgctcgcacttactgttgctcagccttagctttgcccatacctacatatgtaaacagtgagtcaacagacttagtaagaaaagcataaacataaataaatataaaataaattataattaagcacccatacacctaatcatagctatctcgcgtcccacgcgtattgagtctagaacgttcgtacgacagtactattgaccataatatcagcctatacttggtactctagtcgtaccgatgtgataacattaatcagtacttatgccaaatatacattcatcggtatccaatataactctatgtatactaataccactattttaatgtaatctaacaggaaatcataaacatgtatacaaaacatgtaatcacatatgcatattattatactaatcttaccttgatcctgaatttaggtgtgtcggtcaacctgagtagaactgctg

SEQ ID NO: 151948 - DNA, 663 bp, Cannabis sativa
  modified_base (433)..(434): a, c, t, g, unknown or other
atcaagctcgacttctatcctaagcctgcggaggctattgccaaatttcaggagaagaagaagaaacttgatgctatgcttgaggcgcgtctaggccctcaccttcctcctcacattgactaggccgcagattccaccctatttcatcaagattatctctcttttttcttatttacagctatttttctttcctttcagacaatcttatttacagcgattttattttctaaggggagacaattattaaggcctgtcccgaggccctttgtatatatatatattttttacctgcccttagggccaggatattttatatatatgatctttttgatccatatattttttttttcttttggacctgccctttgggtcaggatattttgtttttacttttggcctgtttttcaactgtccgtgtggtatgccttagtanncccctgagtggcatgaaaactttgtttttaaggcactcaattttatttaaaatctagaggttgcatacattttgacggtacaaattctttaaacaaagcctaagttaacatatttggactattggtaagactttcggaggtgatcagtgttctaggcccttggcataatggttccatccatcctttttagtttataggttccggagccgatctcatcctcgatttcata

SEQ ID NO: 151949 - DNA, 924 bp, Cannabis sativa
cgacccccctcccctatataaggggtcacccatgacctgggaggaggatccgcaatctcaaacacttagaaaagtaaacaattctcattctttgcaatcaagagcttgtccttgacttttgcaactcagatcaataaaactcaaggggagtaggctattaccgacatccggggccgaacctctttaaattatggtgtcttttatttacatttattgcgaattccagcgttattaactgcatttattattgtgattttggtttaaatctcatttattacgactttgcgtcggttggctaaaaatccagtcaacattttattgcgaattccggcgttattaactgcatttaagtttttcaccggaaaaaatggtgttaacccaaagatctcaagagcgacctgacgaagagatggaaagtgcccactaagttccattagcaagcaactttgccggaaataatggagaacgacccccgcgttcggggaacggcgacactaccaccaccgctccaactgctggccatggagcaactggtcaaactgcagtcactagacagacaactactaggcgtaccaccaatgccactgccgcaggaggcagtgctattaatggcgccaccagaagaggtaatactagaaattttgtcccacctactaacggtgcgggccaagctcagactggccgcggccctggcatctttacgccagggaatgaaccccatgttgaaattgagggaattgaccccgagatggatcaactgcgagatacgataggccagatgcaaggccaattccaaattgtgcacgaagagcaaaatatggctcgagcggccttgactgaaagtctcgctaaccaaaggagagaattccaatcttggatagaagatcatgctcgtgagatgaggaggcgccaagatgaccaaga

SEQ ID NO: 151950 - DNA, 675 bp, Cannabis sativa
  modified_base (457)..(467): a, c, t, g, unknown or other
  modified_base (629)..(633): a, c, t, g, unknown or other
aaaaagttagttttctaattttaccaaacgcattttgaatgatagcttttaaaaaaagtacttctagctttcttaaaagctatcccaaacgcacccttaatagttgtgttagactagtctctttcttgattacctattaaagttgtagctttaatggttgtgttgggttggtctctttctttctttctttcttttttttttttgaaaataattcatcactttattaattgcaatcctttaagattacattatgaaactcagaagaaatatcattactcctggtaactaggagtgttcatcaaaccgcccgcaccgaaaaaaaaaatgcagtttgaaattttttgcagtgcggtcgcagtttgaatttttcctaaactgcgcggtgtggtgcagtttgcagttttgaattgttaatatgcggttcaaaccgtactgcaccgcacattataaaaatacnnnnnnnnnnntttatttaggtccaatatgtaaatattcaactcaaagtccactaattattgtattgttgacacttaattttttttttttcatatctattttcaaaccttgcggcattttgacaagttttgctcaaagtttgttgtaaatgtgatagtttaattatttagtgnnnnnccaaaccgcataaactacaaaaccgcaccgcaccgcactatt

SEQ ID NO: 151951 - DNA, 595 bp, Cannabis sativa
tccagaaatatttccaccagtttgaaggagaattagaggtggaggagagatctgaatcttcaagagaagcagcatgatgatatccggagtgaacattatagatccctgaagaatgatggtgccagatgaggtgatcatttgctgaaaaataactcaatggaatggttagtatacgatccacatcaatacttgagaaaaactcatcgagcagctgcttgttccattgtcgatcttccgtgatcaagttggtaacaacagtgtttggtggccccgcataatgaattggttgaaatttcgtgtggccaagaatccatggatcgattgcacaattgatgtccctaccttccccaactttccatcgtaacccaggttgtaaaagctctctgccatgaaggataccttgccatgtgaaggatggggagtgaccatgaggagcttctaagaaagaattgtgtgggaagtatcggcttttcaaaagcctactcaaaagtgatgatgggttgtcaagaagtctccatgattgcttggcaaggagcgcttggttgtagtgtatgaaagaccgaaagcccataccaccatcaagtttggctttaca

SEQ ID NO: 151952 - DNA, 1134 bp, Cannabis sativa
attttagcttctcgagactaatatcgtcttaaccttgatggttatactctctggggtcgagaagatcttcctcgcacgcaaaacatcttttagtgagataaacgcctcgttgcctgttatcttggttcgccatatatactatctatgctcagtttgcatatcgcataatatacgctaagtatttttagtgtcgtcgctttctctttcacacagcgaggttgaggcctcgtcatgagcgtatgcactcacatggtttctcgtcaatacataaattagcaaatcgtacgtttctgtctagcagaaggctattcagccaaccgagttataaacctaccctgggaattatattttcaacgagttgctccatgctaagcgtacttgtcgtttgtgtacttgagttcttcccagctcgacacgtgttctcctctgatgtgcttaccgaacttcgggtataacaatacccctactgttaggttctattttttttaccattataaattagtattttaaccccttgaactttgaccaatacttcacagggcacatatataccatatattaagggtgggcatgcgatctaatccaatcttttttttctcatccgatccaatccaatcaacaattggatttagaaaatcaccattcgatccaatccaattagacctcaaaatcctatccaatccaattactaattagattggatcgattttttaattagatatgcaattacacatctaaattacaatattaactgaaaaatacttaaaaactaagtatcaccttttatttaagtttaatacttcataaacatatgatcgttacaagtaatgtatccaaaaagtttaaataattaaaacaacaatatctctaagtaataaaatagaacaaaacatcgtgaaaataaaaacaaccaagtgttataaattcaacacaaaaaaaaatctaataaaaatgtaataaacatatattatatttttcaatattttcattatataaataattttttaacatatataaatgtaattggatatgatcagtttttaatttgattttgagattgacatccaataaccgatccaatccaattagaatccaacttttagcatccactacaatccaattgtaattggatat

SEQ ID NO: 151953 - DNA, 722 bp, Cannabis sativa
  modified_base (214)..(216): a, c, t, g, unknown or other
  modified_base (525)..(528): a, c, t, g, unknown or other
attttggtgctttcattgagaggagaatcgcagatcgctcttttcaacattcgacaagatggtgcaaactcgtagaggcttgtctgacccagcaagcccacagacgttggatccgacattgtaggacccagggagttcaagggttccacccgctgtcaatcctggatagacggggaacacggtgaatggtgggacaactcctgttactgaaacnnngcctggtgtgcaagagactgggaggaacagttccgcacacagccagggcattcataacacgactattccaccaggcatcaacgcccaaacgaccatcggagacccaaccgaattgcaaaatctccttgctgcactcggactcatgaagggtcatagcaacactctgcatcacgataaggaggaactgcgtgctgcagtaaatctggcgtttgattaacagaggcgtatgttcgctgaatggagagacaaagagatggaggccttaagggctcaccatgcagagatcaaagatcgtagtcggcaagctannnngctgatacgaagagcctaccagacggtgggctagcaaatgtcgagcgtcattcccttgggagaaacggaggatgacccgacgatgaatgtcttccagacaaccaacggtgagccgtccaatcaccggtcacgagttccactcatgggccaagaagtaggcggctagaccttgttcgggaattcatcaggaggag

SEQ ID NO: 151954 - DNA, 555 bp, Cannabis sativa
cagccatggctgccactgatttgaatctgggactgaagacggcattggtggtagtagtggtagtgatggtggtggtggattcgcccaatgcgttcttagggtttcttggactcactaatctggcttcgctccccatatttgggattgttctcgacgaaagaagaggagagaaagaacagtgctccaggtttgaagggtattaaatttttaggggctgaatgaaagaggagaccgatctttaacggtcgaatttttttgaattgagctattgtttcggcaattctaacggctctaattgggaacgtcacgtgcgagggagagtatttgtagtttgtacatcctaaaaaacaagagacaaaacgcatgtcgttcatgtgtgaagacaataatccttacaattatttattttctattaaaaaataagaatttttttatttttacacctcaaaatagttttttttttatatttttacgaaattctacatagaaactcctactgtaactaacattgcaacttaaattgcaacaaaaaatcgtatagaaactcctattgca

SEQ ID NO: 151955 - DNA, 815 bp, Cannabis sativa
atgattagtttggctagatttttgaatcttttcaaaaatgttggaacctggatttaacattttgacattctttttaatattttcaagttccttagtgaaagaaataattttcgactcttttaaagacagcttagattcacaacatttaattttttcttccagctcattaatgttgttacacaagtctttattatctttagccaaggaatatttttagcacatatttccaaccacttaccaaacattaccttgtaagattcagccatagacttcttatcaatttctaactcatctgattcggatctagcttcctccttgttgtcatcgatcaaggtattattcaagcaaataattttttctttatcctacaaatttcttgacaaaatacttgttaaagcaacctttttattttcactatcttcagaatcatcatcactccaagtaacataaaaccctttttattctttttcaaggtattggcacattcagattgaatatgaccatacccttcgcattccctgcattgaatacccttttggttattgggaacaaaagatttagatgcatcgttacctttttgagtatttgagaaattctttttatttccaatatttttcatgtactttttaaaatttcttgttaacaaagccatttcatcatcactctcattatcaaaaataacattttcagaaacatttaatgcaatacctttgctattatcactcaagaaacttttcttaccctttttcttgatttgttgatttaattcaaaagttcttaaagaacccatgagttcctcaaccttcattttgcca

SEQ ID NO: 151956 - DNA, 647 bp, Cannabis sativa
gggtgaaggggtaatataggggtaatattaatatggtaatattaatatcgcattaatatcgccagaagaatatcgccagaaggctttaagtttcactatgctctgaggtaccaattttatgcatccaataacgaggcagagtatgaagccttgatcataggcttaaagatagcagaggcattgaaagtaaaaaatctcatctgtcatagtgattcgtagctgattgtgaaccaggtcctcagggaataccaggccaaaggcttaaaaatggcgaagtatttagaaaaagttcggaagaacttagaaagattcgattactttaaaatcgaacaaatttcgagagaacaaaactccaacgccgacgccttagcaaaactggcctcgcagaatgacttggatgaattgaacttagttccgatagaaatcctaagcgagccaagtatatgtggaactcatattatcatttatttactcgacagacaacttccaaatgacaaaaatgagggacaaaaactattgtattcagtgcctcgctacacaatgatcgaaggacaactatataaaagaaggttttcaatgccccaacttcggtgtgttctccccttagaagcaaatgaaatcatcagagaaattcatgaaggcttctg

SEQ ID NO: 151957 - DNA, 623 bp, Cannabis sativa
caaaatactaatcagatgacagaaacaaggagcaatccagtcgagaaacaagccagagtatgaaaaatggtgctaggcgctatagcgcaggtctaaaaaaaaaaaaagataattcagcacgtgggttattgagaaaatatctcatgggcgctatagtgcaggtcttaggcgctatagcgccgtacttatcttttttttaaaaaaaaaacaaaaaaaaaaaatcttaattctaaaggggttcatctatcttttcaagcactataaatagaaccttttaggctacaaattttagaatcctaaggctaccaaattgagatagaaacttagagagagagcaaggaagagacataattcgcgacttcgaagtattcttcatcatagttcttttcttcttcttaaactcttactatttattatgattatcgttataatgtctagtgccgagtagtttctttttagttaagggttattataaaactcgagacatgaattcttaatttcattattgaattttaatttctatagtttctattatatcaaattgcttccattattctatgttcaatgtcatggttattgttttaatcttgtttagatggccactaaattaagttttactttaa

SEQ ID NO: 151958 - DNA, 536 bp, Cannabis sativa
  modified_base (82)..(99): a, c, t, g, unknown or other
  modified_base (403)..(406): a, c, t, g, unknown or other
  modified_base (498)..(511): a, c, t, g, unknown or other
aaatgattgaggccttatttcagtaattatattagtttactgaagtatcatgtataggtagctgagtgttttaaggataaannnnnnnnnnnnnnnnnncggtaaatttatccctattcaatacagatcatcgatagaggatccttcactattaggattgtaacaatggataatcatagcgtatctatattgtggtacatatagaatattctatataactaggagtgtattgaattccaaatctatagtggagcaatgcagaattaataagctgagaatatacttggtgaactctagatctacttattgaaagctcggttatataggcccatggtgccctcactagttgagataatactgcttcccgactcagttaaatgattttaattaatcaattataatnnnnaaattagactatgtcttatttatgcatattcactaagaaagggcctaattgtgaagaaaagaggtttgggggtcaatttgttaattaagagnnnnnnnnnnnnnnaattaataaattacataaatgataa

SEQ ID NO: 151959 - DNA, 508 bp, Cannabis sativa
ttaatttcattgttttagaattcatattaagattttaatgaaacatagatggtagtaaatctatatcctcgtaaaatatttccaacacactcctcctttcttaggcactcattgaacagaactaacccatgaactatccgagtttgggtacacaatacaataatctagccacttgatcacttcttttcgcaccacttccttcatgacaggattaaaccttcactgatgctcaacataattactacaaccagcttctaagagtatattgtgcgtgtaaatcgttgggctaatacctcttatgtcagccatagtccacctgattgctttcttatgctttttaacacctctagcaaggcaccttcatcttcaacttccaagcctgctgctataataactgacagcatttcattctcccccaaataagcatactttagatgaattggcaagggtttcaactccaactttggtggttcttggatggagggttttggaggcttaaaattacttt

SEQ ID NO: 151960 - DNA, 558 bp, Cannabis sativa
  modified_base (179)..(190): a, c, t, g, unknown or other
tgggatgtgttctgatgcaagctgatagagtcatagcctatgcctctcgtcaactaaaagattatgagtagagttatccaactcatgacctagagcttgctgctgtggttttttctctaaagatatggcgacattatctttacggtgagaagttcgagatttatactgatcataagagnnnnnnnnnnnntttcacccagaaagatttgaacatgaggcagagaagatggctgtaattggttaaggactacgactgtgaaattttatatcatcccgagaagaccaatgttgtggccgatgctttgagtagaaagggtcctgggcaagtttgtactacgattctgatagctcctcaactatcctctgaaatggttagcgcagggattgagttcgtagttggaaagttacataatttaacacttcaatctgatctgctaaagagggtcagaagagctcgacttgaggattctgagctagttaaagttcgagatgagattatggctggtcggcctaaagacttttcagtctcaaacagtggaatgttgttatacaaagctc

SEQ ID NO: 151961 - DNA, 526 bp, Cannabis sativa
  modified_base (38)..(39): a, c, t, g, unknown or other
tccttttggtatttcaattctagaaggagcatttgcanncagtatatatgatttagttactcctttagtgtcaacaaatgcatcaagtaattgattatgtacaatgttttgaacttctgattcacatttccttatgtaaggatcaggatacaataatgatggttcacaccatgtaatatattaatgtggatttttcttttctctccctaatgttgggaaaagttcatcattaaagtgacaatcaacaaaacgtgcattgaaaatatcacctgttaaaggttctagagtgtttccctcatcttgaatttttatatggttatttgataatggaaggagattcaaatccaacgtatgttcccagcctcctttgagggcccatctttgtgcgttgtggtggagcaatggaaacatatacagtacaaccaaagattcttaagtgagaaatgttaggttcttgaccaagtgcaagttgtaatggggaatacttatgatatgcacttggtcttatgtgaattaacattgcagc

SEQ ID NO: 151962 - DNA, 736 bp, Cannabis sativa
  modified_base (420)..(440): a, c, t, g, unknown or other
cgctaccccaggatataatcaaagatagctcccgcatgatcatactttggggcatccatgagagaggagcctctcttttcaatttttttgacaaaatagactaatattgagttatcaagttatgagactgtcatgttctatttataggctttcatctagggctaggtttaaatatatggattaagaaaaagataaataaatggctaaaaaaataattaagtggccagccattattgtggatccgactagtcataattttaccattttatttcaataacttatcttttcattcataaataccatattttaactttaaaccaattaaatgtcaaatctatttatttaataattaaaattaattatcgaataaaattatcatttatcttatttattaataagaccttacaaagtctcttaatnnnnnnnnnnnnnnnnnnnnntcttttcttcacaattaagtccttccttaatgaaaaatcataaataagacatagtctaatttagaattataatagattaattaaaattaattaactgagtctacaagcagtgttatctcaactaatgtggggaccatgagcctatataatcaagcttccaataagtagatcaaaaatttactaagtaaaatttctaacttattaatttctcctgactccactattgatttggaattaaactctgaattatatagaacgttgtatatgttccaagatataaatacgctattaattat

SEQ ID NO: 151963 - DNA, 745 bp, Cannabis sativa
ttgttattataataaatactataatcaataattagaacttacagttttttgatcttgtatataacggttggggtttgcacgtgcgacgatgtcagtcatgtatttccaaacagaaaaaccacattcttggtttttaggttgtcttggacaatttgttaataaaattcctggccacggcccaagacacacatttgatgcccatatatattttcgtatgctctgtttgaaaaattatattaatatttcaattcattagttaattaaataatttgttacataaatagtcattaaattattaccttcccaacatttcagtaatttgttcgggaactttgtggccatgtatagggtctaaatggataattttccctggcacaacaacctctagtatccaatgcgcactaaaaaattatattgggatataagtaagacagtataaaaataatttcaagttataatatagaaataaacaattagcactaaaaaattaaatagtgtttacccgatattctaaggaataaagaacatttggtggttgttattcatcaataataaccaagcagtcaatcgttttgctgcattctcaaaagactgactcttctcttcatcgttgataccattcactgcaagaaactttgggtcgtaaaaattgaaaatttttctcaaatcttttatgctctcctagatctgcctgcattaaattgttaaatattagattaaagaagagtatgcatcattccaaaca

SEQ ID NO: 151964 - DNA, 670 bp, Cannabis sativa
  modified_base (384)..(390): a, c, t, g, unknown or other
ctcttgccttgaattcaagttattcgttaatggtatgttgcagatgaaaattttttgggatgcatggttttgaagctctagttcaagagctagaactttgccaagtcaaagcattattttgggttagttaggcaatttgaatttttagagttgttgttgatgttgttagctctctattgtgatgatttttatctgtaagaagttaattttggttatggtatgattaaggttcgaatttatggaaaagttggcatgtttaggccgtaaaaatggagtttttgggtgttctaaacccagtcgccgcgacgggatttttggccgtcgcgactgggtttggaaatgagaaagtctctttatccagattttgttttggccataactttnnnnnnnggactccgtttgggacgttctttagatcgttggaaatctcattccaagctctatttgattatctgtgttttgagtgccatgtttatattatgtgaaagtgaaattagggattaaacctatttgtgaaatcccaggttgtgtgactaggattaccgacacttgatcaggagcacctagggatttaaaatctctattattgcgggacaacaggtaagacagtagtttccacgtagagtatgcgtggtggcgcttacgttgaatatgatatatgtaagtaatt

SEQ ID NO: 151965 - DNA, 537 bp, Cannabis sativa
gtaaaataatatccaacaaaaacaacatcatgtgaatgaaaaaaaaaatatgtagaaaacaatttaaagaaagtagacaaagaaaaccaacgttttgttgttattgtcaattaattatgaacgatgtgcaacatcactgggtacaggggcagagctaggacctaattactaggggggccaactattaatttctatttgaaaaaatttatagtgcacccctagctaaaaaattcgttttgacatctaagaaagttttttagttcattttttttcatgatcgcgtactttgtagttttctcgtactacttgtaattttttagaaaattctaaataatttatagtgccgaaaaataaaattaaaacaattacttaccaaacaaattaaaaaaaataatcatgtgtgcaacaaatttttttcaccttatttttagtactgtaaacaattcaaattgttgtaagaatttatagatgattctaaataaatacaacctacgtaatcatgaaaataatttagataaaaaaagattaaaatatttt

SEQ ID NO: 151966 - DNA, 720 bp, Cannabis sativa
caaaaattgttaagacaaaatttgccaagacaatatttgaattgagacaaaagttgtcaggacaaaagacaccatccttatcctaaatgagacaaggtaggcgcttgccgcccgatctagctatagtagggtgtccctattagttttgcctttttgggttaattatttaattaattcaattagataaatatttaaatttgaaaagtagttaagatattctttcaaatagttgagaaattccctcatctgaaatctcaataaccgaattcggttatagatatttacttaaataattaaatgtgatttaattaatagagatttaactactataaatagaaatctggtttgagaaattagaagaagcttttcacactagaattttcaaaattcattgggagaaaaggaaaactattttctctcttaaatttttcttgctcatgggttgaaaatttatcaagaacaaattatacacttttccttgtgtgtggtggatcaattagaaggactacggtgtgagtttttaatcaatcaaaggatacaacatatgagaactttcgagaataccctgatagtcatcaagaggtatatattctgatcttatattttatatcttaatttaatatatacatatctagagatccattgagttgtggtacaatgataatcagatatataaattcgtcttcagtgtacataatttagtaccattaaaaccaacaa

SEQ ID NO: 151967 - DNA, 706 bp, Cannabis sativa
gattgttcttttttatgttgtgaactccctggtgtgtaagattgagtcttgaatctccaatagttctgggccagggtttggggtcaggatcaagtctggtgctaaggccaaggctggggctggggtagaggtcagggctaaggtcaggagtcagggtcgaagttaatattacatatgatataagatttgataagaaaattacaaaaatatgacacttataagttttttttatggttcaaaccataactacatggaactaaaaagggcgtagggtgcgttctctctcttccaatggcaaagaagaagagaaacgttttgaagcttgctaaaccagccatagccgatgtaccttacgaacaagagctgcctttgagcgaagatggagtggaagatcagaaccaggcagaggtttttctcgacccctgcgaagagcttgaaccagaaataccagtaatggagaaaccagtgagcagccctttatcgcagaactgggcagatgagatggagtaagtcgattatcaattgagtgctaaggatatgtggagcaatttcaaaacaaaccagacgagaactctctactagaattgaatttacagaacctttgagagttagggatcagcttattgcaaaattcgatatggaagaaatagaagttgaggctgcctattagaaaaatgctatagtttgtatagttcttggtgctaac

SEQ ID NO: 151968 - DNA, 711 bp, Cannabis sativa
ttgaaaaataccacattttttctaacataagggcccaaattttttttttccctatggcccactttgtttcagggtcggccctccctggaaggtagttgggacagatgactctcgagcggaacttccattagtgataaagttggagcgcgatagcagtcttgtagatgatggacatgttagcgttatacaagagttgctcaatagacagttacacctttatttgacacaggatcagatcttgtccctcgtgtcaggccatggtagtgcgcgtacgcacctttggacatgcttttttcccgcccaacagcctggttggagagtattttacaaaagagagacctttgcatgacacgtgtcctggttttgtacgaaaaccctcattgcaagttgtacgccacacgatggagaaggttcttataagccaatggtcaggtcatcttttagcagtaccggccttagcagcatgtggggtatgaaaccctaggtaggtaaagggtatgtgccctttaccgcatgtgtgcctataaatactcctactttctttgagcaaaggatgaacaatttttcatttacagatactctgctaaaattcctagagagctttctcccaagagaaacaagaggagtagagaaacccttaatggaaacacctgtaatgaaaagactcggtttgaccgagtcaaatgggtttatatatatatatataaaata

SEQ ID NO: 151969 - DNA, 507 bp, Cannabis sativa
ccattgattgcgccagaaagtgatcgatagtcaatttcaaaatcattgccttcataatgacaacgcaatggaagatcttggccagaaattatatgatctctgctgagtcttgataaaggtaaaccccgtcttcctcatagataaattaattcatcacgagaaggtggaccgtcatcacattcagatgaaactgcactctctacagttgaagaaactgtctttcttttatggcccatagtatggagttccattcaatctgcataaacacatacacaaaagaaactccttttatccacagccatatacattacaattcataaatatatatatatatgtgtgtttatatgaaattatgcatacaacaatacaagagaagtaacacaagtttcctctaaaaaaaaaagagggtatataaaagaagcaaaggccaagagcatgagcaatacggggcaaacaaacatcatggcaggccacccaaatcatcataaggtattattcaatctccat

SEQ ID NO: 151970 - DNA, 721 bp, Cannabis sativa
atgatttatttctcacttcaaattaatgatcatttaagttgatttttttaatttgacagtaatattttttttttcaaaaaaaaaaatcttaaaaaggaatagtaaacacgtgagaaattattattgaaaaaaaaaatatagtgcaatttaatattaaattcgacatattatattttaaaaaatattataaattacctttaaccatttatacagtgtcgttaaaaaaaatacacataaagcaaagtaaaagaacaaaacaaacatctaaagtcaagccaagcactgatattgataataacaaggataaaaaaaaattatttacactccaaaaatatataaatacgtttaaaaaaaaataaataaatacaccttattttaaaaaatattataaattacctttaaccatttatacagtgtcgttcaaaaaatacacataaagcaaagtaaaaggacaaagacaaacatccaaagtcaatccaagcactgatattgataataacaaggataaaaaaaaattatttacactccaaaaatacataaataggttaaataaataaataaataaatacattttattttaataatttttattttatataaaatatatattttattatattaatttttttaattatattcttccaatttatattattaaaaattatacttatcaaacaaaaataaactttattttcattattaaaataaaaaattatataaa

SEQ ID NO: 151971 - DNA, 890 bp, Cannabis sativa
gaatttttggtgatgcctttcggtttgacaaatgccccggcaacattttgcaacctgatgaacgatgtgttatacgagttttcggatagattcgttgtagtatatcttgatgatattttgatttatagcaactctttagaggaacacttgcagcatctacagaaggtgttggcaaggctgagagaggaaaagttgtacattaagaacgagagatgcgagttttttcggaaggaggtgaaattgtttggtcattgggttggtcaggggaaactgagaatggatgaaggcaaagttaaggcaatcatggattggcctatccccaccaaagtagtggagttgcagtcatttttggggctggctaattactatcggaagttcataaaagggtactcaaagagggtgagcgctcttactgatctccttaaaaaggatcagaaatggtgttggtccgaggaatgcaatgaggcatttgagaagctgaaagtagcagtgtcttcggaacagatattaaagttgcctgattttgatctaccattcgaagtacaaacaaatgcatcggatcgtgccttgggtggagtactggtgcaagatggtcatccaatagcttttgaaagttggaagtcaaaggatgctgagcaaaggtattcgacccatgagaagaaaatggctacggtggtgcactgtttagatgtgtagaggcactatcttttgggaacaaaatttacagtagtgacggataatgtagccaacacctactttaagtctcagaagaaactaactccgaagcaagcttgttggcaggagtacttcgtcgaatttgattttgtatgggttcataaaccggggaagtagaattaagtggctgatgcacttagccgaaaagatgtaca

SEQ ID NO: 151972 - DNA, 660 bp, Cannabis sativa
ggtcagacccgtgaggacccaaatactgctgttgcaacatccaacatggctggtaaaaagtcttttttttcatactcattcttggataattgatagtggagcaactcaccatatgtgttctacaaaatcttgttttttatctttttctaacaatgattttccaccacatgtgatccttcctaatggcaatcaaatatctgttcaatggattggtacagttcaaataaatccacaccttattctttatgatgtgttatttgttccaacctttaccatcaacctattctctatttcaacatttcttagtcacacggctaacatggtccattttcaccatgatttttgtgtattacaggctcactctccgagtgtagtgattgggacagctaaaagacttggaaagctatatgttcttctccaagatttcatacctatagcaagttctacttgccctttattttctactaataatggagaccaatggcacaaacgccttggtcatccctcaatgtacatttctaatacaatcaataaaaagttcttttctggttcaaatgattcaaaaatccagcattgtcacatatgtcatattgcaaaacaaaaaaggttaccattcatatcaaaccataattttgttgatgatatatttgaccttattca

SEQ ID NO: 151973 - DNA, 626 bp, Cannabis sativa
tagatgagggcaattgggtcaaatgaaaaattcattaaactcaaatttcagcttcccttaaaagctaaaatctaaaagttggtgtgggccaactttatctaaaagctataattttagcttaaatttttaaaaaagcaatttttttttttttttattttgccaaacactttttaagcaataactttctcaaaaagcacttttaacttttttaaaagctacccgaaacggggccttaatatattcagtttccccataactttgtataaacctttgcctgagatcggtttttatcaattctccataaccatttgcttaaaattggactgttccatccaatgattgcagaagccaaacggtttggagcctactttgccaatagtcatatttttaatgatacaatagctgtgatccgagcaagtctttcgtacataataaaatcaaaaaaatcgtaaaaatatttaaaatttcgtgaaacaatatttttgtaattttcttttgtttttgtaaaataatccgtataaaatatagggcttttttttataaatatggaattttttaaatgtattttgaaaaatatggacatttaatggaaaaatttaaaatctggaaaaaaaattaaaaaactt

SEQ ID NO: 151974 - DNA, 747 bp, Cannabis sativa
ggtggacgctgtaagaggtggtatacttattttcattcaataattactagtaattattatggtgataattaatcactttattacactgtgcatttttattttattttttttttgaatgaacactatgaatttaaatatatagtaattatatataaattcttaatattttatttggtaaaacaattaatatttaaaatagaaaatttttagtaattatactcaattttcatgtgagctataggaattagagagtgttgagttagaaattttaacaaagaatcataagcacaactcacttgctaaattgatgagaatgaaatttttgttaagtataaacaaagagagacataacaatttatagtagttcattctctgtatcgcgaaagtaattgagctacatctacttcaaatttttatttctcacgatatggtaattacagaaaaatgctaagtattcaagctctctagtttctagagatagaagctctaaccttgtgggtagttttctgaatgtgaaaaatgagctagatgagctctccttttagagttgaaggatgtccttgaaaataggaataaaataataaaaaaatattaaaaaaaaaaacaagttggttattttttaccgatgatttttttaaaagaacatcttgttcattgattaagaaagatagatgagaatcacagggagacttccctcccattgctacaaagctcgttgactagcaactctagcatacttagctacac

SEQ ID NO: 151975 - DNA, 617 bp, Cannabis sativa
aataataataatttgttttttttttcttttaagttaatatttgcttatgagaattctaatactacacacacataataatttgtaatttctctagctcttagaattctactctattactttcttagtgtaataacttgtctattaatataatttgcctattaaattctaacaatacacacacataataattactctattaaaatatcatttaggattctatatattctcttttaatcaattgatattattagtaaaaattaaataaataaaaaattacaaattagagaaaagaaagtattagaaggaaaaatgtctcctcacctctttgattatatatatatataaatatattgtaataaatctatatatagggtataaattatagttagtaagaaaattaaaaatgcaataccttatcaatagaaaatattaataaattaaaaatatgacatatttttaatttttaatatgacatatttaaaaatactaatagaaaatagaaaatgcataccttattaatcataagcataccaatagtttgacgctcttcctaatttcataagataatttttttatttttttaaaaaaattcaaactctaaaatatatattgttatg

SEQ ID NO: 151976 - DNA, 831 bp, Cannabis sativa
  modified_base (59)..(63): a, c, t, g, unknown or other
  modified_base (427)..(432): a, c, t, g, unknown or other
  modified_base (711)..(712): a, c, t, g, unknown or other
tagtatggaaaaaattaagtaattcacttttttaaagaacttaatttcgattttatttnnnnnagttatgaatttttgaaaattgaaaaatattaggggtggtgatacccccacacgcgcgcggacacccgtgtcacacggggtgcacgcgggttcagacaaggggatgtccaagtattctcggtcagaggacaaaattcgtgtctaaacaggggccgtgcgcgcgcggaaaggctgcaagcagcctccctatgcgtgatttctcggccaagccttccccatcacgcacgaggatggtatgcggtattcaatgcataccgtccgcaccaaatccaaaaattttcattttttcatgctttttcatggaattaatttcgaattttttgtgtagttttgtattttgatttttatttttcatatttcaaannnnnntatcagaattaaattaattaatttaagatattagtgatatttgaaccttgaaaataggaaaaaatctatctttttgcttagtttgttatcttcttttttaaaatttaattattttatcttatttttaaatttaaggtccgatattttatttttacaattatttaattaatttttataaaatgaccgtatttgaaatttaaaataagattattttaatcaagaaattttaaattgtaacaagatattttgctaacttttaaaattttgttattttatttnnattaaattataaaattagataattaatatttagttatcattttttattttattggatatctaattttatttttaaaataacattaaatttgaaaagttagcattttttgaatagatatt

SEQ ID NO: 151977 - DNA, 732 bp, Cannabis sativa
cattggtcagttggcagaggtcagggtagtggctgtaaggtggtgcctgcaatgtagtcttggtcgggtgtactaggtgcttcaggtgggtgagtccactacttgcttaaatcttgtctccactcctcgttcattgtcatggttgagcatgcacgatatggtccccacatagtgaccaaggcttggtggtactggcgcggtggtccacgtacctctcctccatagtaagtctttagttatttctattaatttcttgctatggatcaggcattcgagtctaatctttttaaaagggaatggtcttcgtctcttgttatttacaaataatgggtcaaaacaatccaaggggtagtaactcgatccttgcctgattagctttctaccgagcatcaatagggcgattgtgtaagaagtgatttgtaggaatcagtttgcagggaccctaaccgcaggggtgtagggatttagccgaggggtctacccgcaaggaccctttatcgctaagttgtttcttgtcgtgtcttctctttttctttcccaattctcgataggatgcgcgcggaggattcaatatatcgtatacgaattctcccaataactataacccataagcttgcgacttagccaaccacttctgattttattgtattacttttggaataggcaggtagaattcattttttttttaataaacttagcaactttattaactagcaatcgttaataacaata

SEQ ID NO: 151978 - DNA, 585 bp, Cannabis sativa
gtgcaaaccagttacaacaccacttgctcaacacttcaagttgtctgcatctcagtcaccaaaaacagatgcagaaagagccaagatgagcaatgtgccatatgcaagttgtgttgggagtctcatgtactccatggtgtgttcaagacttgacttagctcatgcaatgagtgtggtcagcaggtacgtttcagacccagaccctgaacattggaaagcactgaaatggataatgatgtacttgaaaggtactttagacattagtattgtgttcagtaaggagaaacagtacaaagaagaaataactggttttgtgaactcagattttgcagcaaacctagacactagaagaagcctaacagggtttgtgttcactgctcttggaggctgcatcagctggaaatctaacttatagaaagtagtagccttgtcatcaacagaagctgaatacatggctgctatagaagcgatcaaggaggctatatggattaaggggctaacagaggaattaggtttcaaatctgaggatatcacagtttattgtgacaatcaaagtgctttacatctcatgaaaaatccaatgtt

SEQ ID NO: 151979 - DNA, 951 bp, Cannabis sativa
  modified_base (917)..(925): a, c, t, g, unknown or other
ggttgaaaaatcctcacagaaaatggagatctaaaaaaatcaattgataaatctatagaatactcatcatatgattttaaaattgttgtcatttaaagctgtgtcatcaccgtatctcacttatagtggccactacattcaaagttgctatcattatcgtatattatttgtagttatcactattaatcaaaataagtttgccctgtacataaaataaatcatatacttgagttaattaattactaactttatatacataagtggatgattttgttataaattacttacttgcatcatcatattatttgtaacctaaaaaagaaagaaaaataatattatcaaaaaaaatataaggtaataaaatactaaaccaattaccaaaatacaaataaaaaagattaaaaattaaaaaatcttcatcaagaataaagatttcgaatttttttttgacaaatctatgaaaaaaaactcatcatatacttgagttaaattacacgatcaataagtctttgatctgagatacaattaaatttggtgttagttttaatagtttgatttaaaattgtatataaatattttttttattaattttaattgagagaattaaataagattatgttgagtgatttttaattgtatataggtatatagatgtagatagattttttaatttttaatttttttgaaacttagttattaaatattgtttcaaaaacaaatactgtattttttatttaaaaaaataaaaaaatataattaaaaaatgaaaaaatagataaataggttttaaaaaattagaaaatagataaataaattttaaataattagaaaaaatgaaaaaatagataaaaagattttaagctattttagagtgtcatattaccgatcaccgtctaatacttctcctttatatatannnnnnnnntagtatattgttacgtgcgatgcacg

SEQ ID NO: 151980 - DNA, 627 bp, Cannabis sativa
  modified_base (582)..(591): a, c, t, g, unknown or other
aacatacatggtagtatatctagattctggtaaaacataatccaacaactggtatcaaagcaatggtaatgatttactttcatgaaatatggattttaaaatgatttttatgttgatttggattgtttcgtgatggtttatatgcatatttgatgattgtatggaaatcgcaatgtatgttataaaatattttttgtttcgttctagaaatatttttactggaaagtagacaaaaaaaaatgaatttaggcttttacagaattttttatgagttagttatgatttttcgaattttgatgaaaatatctgaaaccaagcaacacgttgtgtaagtgcggatagggtctgatagggtttctgacacgcccatatccgaattcactcaaccaagggctgtccaaatcccctcctcaccgaggtttccctcccaagaggctgctagcagccttttactcgcccaaatgcagccttgtgtgcgcatggggagtatgcaatgcatactcctctaatgcaatcttgttttggtgatatgttttgattcaaaattcgtttttcattaaaacaaaattcaaattttggtannnnnnnnnntagaatctgaattttcaattaaaaatctaattatga

SEQ ID NO: 151981 - DNA, 601 bp, Cannabis sativa
tccaaagctgtttctataggtttgacaaaaaatttccaggtccctcaaccaacagcaccaatgctagtcctaatgttgcagcacctcaagccaatcttctcacttcttcaaatgagtgggacatggtttggtacccagactcaggagctactagccactgcacaccagaccccacaaatcttgcacaaagctcagattacaatggacaagagcaactgtttgttggtgatggatcaggtttgcccattaaacacataggtcaatcctttctatcatcaaatctgtctcctcaacctcttgttctcaataatttgctgcatgcccctgctataactaaaaacttgttaagtgtatccaaatttgctaaagacaacaaagtgttctttgagtttcatcctgatacttgttgtgtaaaggaccagggtaccaagcaaatcctgctgcaagggagacacaggaatggcctttatacttttgaggatctcaccattctaccttcactgtctgttcaacctggaaacaccacaactcaggacacaaccttctctcaatctgttcataccacatctgtagggcctttagaatcttttttttttttttt

SEQ ID NO: 151982 - DNA, 1164 bp, Cannabis sativa
  modified_base (699)..(702): a, c, t, g, unknown or other
taggtcttgattatttcatcaaaacttttgttccaagagcgagaaccttgcttgagtccataaatggagctattgagtttgcaaactttctctttctaccctagaagcacataaccttctagttgctccatatagatggtttcttcaagaactctattaaggaaagttgtcttgacatccattttgcaaatttcatagtcgaaagcagcagctatggagagaagaattttgatggatttgagcatggcgaccggactaaaagtatcctcatagtccacactttctctttgggtataaccctttgcgaccaatctagctttaaaagttttgacttcgccaccaacacctcttttcttcttatagaccctcttacatctaattggataataatcatcatatgcgtccatatattcccaaattttattctttttcatagaatctatttctgaatccatgtcggctaaccattatttccattctggacttgccactacatgtttataggttaatggatcgtcattaataccatcactaacaaccatattgatttcaccatccaagccataatgagctagttttgtagaaaccctcccactacgacgaggagtggtgaccttctgaacaagaacacttgtggtagatttctcagtcgtaacaactttcattggttcaaccaagggagtgggattatcctctacnnnngtagaagatgatggaacattagatggagttatttctgaaagcattttctctaacattactttactttgcggccttaagttctttatatagtcatcttcaaggaaagtggtgtttgtagaaatgaacactttatcatccatgcaactataaaatagtccacccctagtctccttagaacttttgacaaacatgcaaacttcaggtcgcgcttctagtttgccttctttctttcttatcacatcagcagggcacccccaaattctataatagcgtaaactgggtataggaccattccatagttctatgagtgtcttaaggactaatttcgatggaacaacatttaaaatttcattagccattggaatagcatatcccagaaggatgttgacagggttgaataactcaacatagacctaaccatttctaaaagtgtgcgatttcttctttctgtaactccatttt

SEQ ID NO: 151983 - DNA, 803 bp, Cannabis sativa
  modified_base (447)..(451): a, c, t, g, unknown or other
atcatttgatctaagatcaactaaatgatattgaattatatagatattacggtaagtttatgatatcttatctaagttcaatagcggtctcttctgatgtatacaccatacattcaatccaagcttattttactaataccctggaaaggacatattacttatccaaggtgcaagtaaactacattgtagattatcatatcagtaaaatcttatgtattgataaatcatacgaatttatttaatcacataatgttaattactttccactgtattgacaacacaataatcaagaatatcaatgtcataaggatttgaatgaatttataaactaaacaaatgaacatgaaataaacatgtgaaccaaataatacattaaacaagtaatgaaataaatttgtttctttattgataaatgaatatttaagattatattgaaatagagttttnnnnngggcacaaaacccaacaactaaaactctgattcaaactgttcaaaagggttctacaccaatgatagaatatctaagacaaaagaaaaattaggcagacatgcttgcctttcctggagatccataccctgaagcataccttgtggccaatgtgctctcagctctagatgcagaatatttgtctttgtacttcaaatcgaggcttgcccaaaaacaacaaggcaagagctgcatgatattcccctcagctttgatagcaaaataattgtgacagtcagtagtcctgtgatctgtaaggggaaataccgggtaagttgtacaatcccacactgcttggggaaggtcaagtgggat

SEQ ID NO: 151984 - DNA, 1324 bp, Cannabis sativa
  modified_base (429)..(430): a, c, t, g, unknown or other
cttatgatccagacaaacaaagctttattacaagaaagactggatcaaattgacgaactctgggatgagtcgcaagtacggatggcagcttatcaaaagaaggtgggtaaacacttcaactccaaagtcgaagacatgaaatttactatttgtgatctagtcttaagaagggtcttcccagccactcaggaacccggagtgggggtacttggtccaaattgggaagaccatatgaaattgaggatgaaattagctccgagacctataagttaaaaagaatggacggtttcatggtgcctagggcctggaatgctgatcacctccgaaagtattaccaatagtcgaaaaataaagtgtatgttttgtaaagcaaatttgtaccggacaaatatatgcaacctctaatttaattttgtaagactaagtganntaaaaattgattttcatgtcacttagggggggtattaaggcatatcacacggacaaatataaacagatcaaatttaaggaagttaaaagctatatatattcgaacatagtgtaaattggttgaattccaaagaaaaaccttaaaaggaaaaaaggcctggggacgggccataaatgtctccccttaagaaaaaaaagaaagataaattgtcttaaaagtggggggaaggactgaatatgtaaaaaaaacaatgattatagtgataacgaaggagataataagtgatttaatcagcccgaggtggaagacgaggatccctgcactgctatagcactgcatctagccttttcttcttctcccagaagtgaacaagaacctcttcaggcttgggataaaagccgaggttaatattctagccattagtttgctaggccataaagactccatcatcaaagcgcttcttgcagtgttggcaagtgactggggccaggagggcatctctctttgccttggccacctctttctgagcctgctccttatattaacgaagccccttcactttaatagttaggttggctgtcgtttgcaaatcagcttgatgcagctcttccagagacttcagcttggcggtcagttcctgcactgcctccttagaatcctgaagctcctgccttgcagtggccacagccgcatccctggccttttagtgcctcatccttcgcctttagctcctcgaccttcgccttcttgatggttccgctttgtaagggcctctttctgtcgggtttcctctcagatagctcttttttgtgcctccaagtcccggagactcttcatggcctcctccatgcccccaaactcggacatggtgtacccatggtcgataagagtctt

SEQ ID NO: 151985 - DNA, 521 bp, Cannabis sativa
tagacccgaacgtagattccagaccgggattggagattcagacttgtacccaagtcccagacctagattggtgacccaaacccgaaattagaactagaatcgagacccaggattgcgactaggacccaagacccgaccccggtctcggtcccagacccagacttggacacggacacaaactaggacctaggatctgaatcggaacaagatctcgacccaagattgggatccggatcttgacgcacaacctaaagcttagacccaacccgtagtcggtgtctcgatcttttaatcgtaccaagacccgaacatgaaaccatttctagacgtggacccaaacccagactcgaattcaggcccttaaaataggaattggacctggacacataactagatctagacacggaaccgaacacaaacctggacccagattgggatcgatacccggaccaagacccaaacctggacctagaattgcgccaggacctgcgacccaaaacatggagcctaggacccgggac

SEQ ID NO: 151986 - DNA, 859 bp, Cannabis sativa
  modified_base (59)..(61): a, c, t, g, unknown or other
  modified_base (92)..(93): a, c, t, g, unknown or other
ccacccttgtttcccaagaaacgaaagattataatctcgaagatccctgaaacccatcnnnccatcagtcttatgtctactcaaccgcttcnnacttatccaattcacacccttcgaacctgaacgtgattgagatttccaccaaaactttgccatcataccttcaagattagaacaaatctcctttgttaacagaaatacgctcatggcataacaaggcaatgcttgggcaacagacttcaatagaacctcctttcccgcttttgacaagaaacgactctcccaagtaaaaattttctttttcatcttttcttgtaaaaaacccaggatagctttcttattgcggcccaaaatacaaggtaagccaaggtaaaaactgttatccccagcctccaacattcccataagaccacacagactagtacgtgcatcacccgaacagttcttactgaaaaagactgaggacttagagtaattcacttgttgacccgatgcttgctcataaacttggagaaggtgcatcacatgtgtagcttcaccctcattagctttgcagtacacatagctatcatcagcaaatagcatgtgtgagactcgaggtgcactcctggccactttacacccagtcaaccatctccgttgctcgtacaaagttaagagtgaagagagaccttcagcacaaaccaagaacaaatacggagatatgggatccccttgacgtattccacaaccaggtacgatcggacccaacttcgttcctccataagtaacatggtaagacaccgtagacacacagaacataatcagagccacaaatctcgaactaaagcccatccgaataagcatagcttcaagaaaa

SEQ ID NO: 151987 - DNA, 921 bp, Cannabis sativa
  modified_base (272)..(279): a, c, t, g, unknown or other
cgcaggcttgatacctgccaccaccacgatgtgttccagctggtgagggtaggttatggtagagtgaagctcagccgcttcccacccgttggcacgggacttgtacccttcctaggccactagacccttcatagcttcctccagggtggccagacgtttctctcctttcttcgaggatttagaaccggatgcagacatcttacttctgaaaaagatggaaaaatccagcagtcagaccctaaaccaaaccctaagtcaaaaaagggaatggnnnnnnnntaaccgctggaaagaggcccctccggacacttgtcaaaaagaaaaccttagaaggttttccttgacaagagtcgggtgcaagaatcccacatatggtgacattacgaataagcaaagaaaagaaaaaaagggtaaaaaatcgagaggacaaagtctactctaaaccctcgaatgtcaatatgcgaagaaaagatgggtccttgacaaaaaatacgtagaatagaagtaactcgaacaccagaaaagaggaatctaacgtgttacacagaaactcgaaacagaaattcccagaaaacataaacatcaaacccagaaaaagaagatgaacagtaaagcatgcgatgtacacaaacaataaactaaagtacaagatgcgaagaacttacataaagcttgagaactgggcgttggtgttgatcaacggtaaagagttgattggcagcgacgaaggaaaaggagtaagaaatctatggtgtttgaaggtttctgtttctctctggagaacttgagaaagtttggcgaaattctgaaagtaaccaaatgaaatgagaagggtggcttctatatgccaaagcacatgtgaaacagctgtgatcagctaccatcaaacggctgggagggcgcacgattcgaattcccaag

SEQ ID NO: 151988 - DNA, 561 bp, Cannabis sativa
  modified_base (93)..(94): a, c, t, g, unknown or other
  modified_base (187)..(196): a, c, t, g, unknown or other
tactagttattatattatatatatattataatacgtttctgagtaacaaagtaacacttatatatatgtaaagttattattattattattatnnttattattattattattatcttactagtaatcataagttactgtaagtttttaaaaaaagtttatatatataaaatattattattattattannnnnnnnnnattattattattattataatatgatatattaaagtatattattataattatatataataaaatttatatattatttattataattattattaatatttatatttatgttatatataattatttatttctgcatttataagtctgtctttatttctgcacatatattaatattagtatttatatttctgtcaaatatatacatattatttatttcccgttatattttaaattcagtctttattttacgcacttatatggtaggcagctcctcctaatttttcctattattttaatttttgtgatacttagtgtatgatttactgggaacgaaattctaaaaattatttggttaaaagaaaattatt

SEQ ID NO: 151989 - DNA, 605 bp, Cannabis sativa
tcttctctctgcaacttccttttgctgttgagtgctaggggaagtcagttgggattcaattccaagttcaattaaatgatctttgagctgcatatttatatattctctacccctatcagttcacatgatatttaagatcttacccaattagttttgagccaatgatagaaattctaaaaacttctcaaaagtttctaacttcttacgcataaggtaaatatgcctatatctagagtaatcatcaatgaaagtgacaaagtacttacaaccacctttggcttttatattcagtggtccacaatgatctgaatgtactattcctagtggttcttggcacgctgtccatttgcagagaaagaacgttttatcattttgccttctgcgcgagattcacaaactggtaatttacctaagatgatattattcagtggaccaccttcttggaatatctttcaccaggacttagatttactaacaagtatgtttttagcatcctaaatatgaacttctaaaaaaaatgataataaacacataaaagatatgagaaaccttacattggttgcagcgaaattaaataactccttcccctcagatctctaaccctt

SEQ ID NO: 151990 - DNA, 952 bp, Cannabis sativa
  modified_base (201)..(210): a, c, t, g, unknown or other
gtgattagatctaagatcctggtaaaataaattccaacaccgtgctgattagagaagaaaacaacatacaacactcggtccataacactcgttgatgccgaaggccggtacccattgatagagaaactcacttactgcctgattctagcaacaaggaagttaaggccctattttcaagctcatcctgttcgggtatacacnnnnnnnnnnttacgccaaatattgcaaaagctggacggttctagacggttactcaagtgggcagcggagttgggtcagtacgaaattaccttcgaacctcgaacaacaattaaagggcaggccctagcagactttgtggtagaatgcatagtcaaagaagagaggatatcagaagacaaccccgagccagtacaaacacctcagccaagaaatagtgaagataagccgacttggaaactacatgtggacgggtcggctacagatcaactattcggtgcaggaatcgcccttgtcacacctaagcggcaacacctacgcgctacagttaagtttggattccaggcatccattaacgaagccgaatatgaagctttgattgctggcctaaaactagcccgggagatgaaagtcgaacacatcgaaatctgcagtgattcatagttggtggtaaatcacgtatctggagagtacaatgctcggggagaaaaaaagatagcatatctgagcaaaatacatgacctgcttgcacaattcaaaagatacggtctcaaacaaattccaagggaacaaaacacgacttcagacgcgttagctcgattggcaagcagcaatgtaagtgataaagcgaacttggtccctatccagttccttgaagagcctagcataattcgaatggaagagatcgaaatgattgatacttcaccaaactggatgactccaatagtatcctacctcaacattggggaactcc

SEQ ID NO: 151991 - DNA, 776 bp, Cannabis sativa
actgtagcgtgccttagcattagggtgttacaaagtcgttttaatcgacgaggaagagggagtagaggaagaagaaggcgagattctccctccttaagaccggaagcgcaagggaaagatggtggagactgaggttgtgaagaagcccaggaaagtagacactccggctctcagatctgattcagggatcccgtttgaggtggacgagtatactgttcctccgggtatcatcctaaccctcattcctaccgatgaggaaagaacccaactcccgatcgccaagcacaattatgccaccgcagagtacacaaaggggaacgccgaggtggaagccttgaagaagatcctgagggaggctcagaatagttttactcgcagtgagtacgcggggaacgtttgggatttcaatctggatcccctaactgacttgtttaatcgcttcattggacccaccttggctccctttgcctcagaattaatgagccattttgctgccggcctagtttagctccccatgaagagatacttggcctgtgcttctaccaatcccgtctaccaaatccaggacgtgagcgcggccgtgactgcggtaagttcttatctgtttagaggtattttcaggcttcttttccttttggtgcttgacttcatgcattccttatacatatattttttttttgttgtcaaattgctgcggaacctggtcgtctttcgaagactcttatcgaccatgggtacaccatgttcgagtttgggggcatggaggaggccatgaa

SEQ ID NO: 151992 - DNA, 600 bp, Cannabis sativa
cattggagatggccttacaaattattcttgtattatactgtggattataaatagaggagtgctaattacaaccttttagtcattttccacgtttgaaatcacatgccgaaatatttttttcaaattatttttcatagcggtattcgttatagttacagtatcatccctataaatttttgaaaaattccgtataatttacagtacctaaaatagagttctagatattccaatttaccaagtgtgttcaaaaaacttcaaatatattttcggcactataaactattcaaaaaatctcaaaatttacagggatgatgttgcaagcataatgaatattgtcgtgaaaaaaaaacaatttcgacgtgtgttttcaagcgtggaagttgactaagagattataataaaaggctaacgataacactcctcaaatactctcttataaatagtaattttcaactaattgtatttgtatcaatttagtatttattaattaattactacccattattcaaatagtttactttttttaaaagaaaaaataataaagtttatgactatcaatataaactatatatgaatttatattttataaaaaaaaaaaaa

SEQ ID NO: 151993 - DNA, 1297 bp, Cannabis sativa
gcttttgctgatgatgtgttactattcagccatggagatttcacaagtgtgctatacatgttacaggcactcaagctcttctctcttacctcaggattacaggccaatgctagtaaaacagctatatattgcagtagcatgcaacaggggagtgtgaataagcttctacaactttctgggtttatgagacaagagcttccatttacatatcttgggataccaatttgtgcagggaaaatctcaggcaaagaatgtgagatcttggttgaaagaatgacagctagaataagaacgtggagttcaaggaacttatcttttgctggaagaattaccctaattaactcagtgcttattgcaatacaagcatactggagtcagattgtgattatgccaaaagaattctgaagtccattgaagatatttgcagagcttttttatggaaagggcagggtcttttccatggagcaggggctgtctcttgggataatgtttgtcaacctaaatcttcagggggattagggatcaaaaagctggagctttggaacaaggcagcaatgtccaagtacatttgggctatcttaaataatcaagaaagcttatggcttagatgggtgaatagtgtatacataagagctcaagactggtggggttacaacacttctattcactctagctggtactggaagaagctggttaacctcaaaaaccatatcagttcttttgctgatattgctgagtttctgagaaacaaagatagcataattgctgggtacaaaatgttcagcaatccacaagcaaggaaaacttggagtaaagaggtatgggctcgatcgaatacaccaaaacatagtgttattttctggcttactatgcttaacagattaaaaaacaaaagataggctggtgaaaatgggcattcatgttcaagaaacctgctgcctatgtgacgagtacaaggagaatgttcagcacttgttctttgagtgcaagacaactagccattggttagttgaggttaaaaactggctggggtggaaagcaaaagcaacaaacatacagcagttggtttgatggattgagaaggcaaaggtgtcaaaattcaagaaacaggttttttctgcagcagttgctgcacttgtttacagcagctggaaggaacgaaatcatctcatctggcagggaggacagatcaatcaaaggcaggttgtttgtgacattgagtggagtctaaggactcggattaatgttgttttgccaaagaaaatctcaagtatagatagagagtggttctttgctt

SEQ ID NO: 151994 - DNA, 1275 bp, Cannabis sativa
  modified_base (613)..(618): a, c, t, g, unknown or other
acaaattatttatttgacctattcacaattgaactattgattaaaatcagatcattagatttgtcaacaagttaaccataacaatttagatcaaataataataagtgttataaaccaagtttttgataataaataatatataaaacacacacacatgtaacaaactagatagatggatatagaatttatttaatttaaatcaattaaataattaaattaatttttgaaaaaataaattaataaataaataatttcaaaattaataaataaaattaaataattaattttaaaattaaacatataaattttgaaaaattaggttttaacaaacctaaatatctattcaaaaattatgctaataagttttcaaaatttatgtaattttaataaaaaagaataaaattaaatatccaataaaataaaatgataaattaatatcatttatctgttttttatattttaatttaaataaaataataaaattttgaaagttaacaaaatatctagttagatttttaaaatttttagattaaaataatcttattttaaatttcaaataaggtcatattataaaattaattaaataataaaaaatataaaatatctgaccttnnnnnnaaaattaagataaaataatcaaaatttaaaaataagatagcaaattaagcaaaataatagattttatctattttcaggttcaaaaactactaatatctaaaattaataaaaaaattaattaatttatttaatcctgataattagatttgaaatttgaaaaataaagatctaaatacaaaattacacaagaaaatcgaaatgaattccatgaaaaatcatgaaaaaaatgaaaaaaatggaaatttttttgatttggtacagatggttgcgcgcatgggaaggaggccctgaccgagtaaatgcgacacaggagcaggaggctgcatgcagcctctccgcgcgtgcatggcccctgttcagacaaaaaattgccctaacgggagaggaatctcggacagattcctgtcctaagccgcatgcacccgtgtgacacagggtatccgacacgtatgaggtgtcaccacccctaagatttttccaattttcaaaaaatcataactaattcaaataaaatcaaaatttagttatgtaaaaagtgaattgcttaagttttccatactatccaacaaaaataatttcagaataaaattttaattattttacgtaaaaaatttataaacatcaaacaatcatcaataaacacatagatcgacatga

SEQ ID NO: 151995 - DNA, 659 bp, Cannabis sativa
atattattaggcaagtctccatgaagaatcaattcctagagcaaatcatatcaagaaaaatatttaccaggatctctacaagactgcaagtttattaaaaagctaaaggaacaatacaccccttaacctgatctaccaaaatttgctctaatttttagagcttcaaaaatgtttccataccacaaatggtgtctcattcatgaatgcgcacagttacggaaacaaatggcggtggtaataataatggatcgtggctacagaaatggagtgagacatttgggcagaagatcgaggcaccttgactccgacatgtctcatttagatatgtaattgtgtttttgaacaggttgtctccatggaagcgagacaaaggtgaaacattgaagaataaaaataccaacgtacaaagagaaagacaaaggtggaacaggttgtctcattgtgtttttggcttgtagaccaaaagtcgcacaatatccaactagcttcacaagatttggatgcttcacaacacataaaaaattcacttcatttatacgttctttatgccatggacactagaatgcaaatacatggtaaatttcattagataacttcaagcacctgacaatggcattccaaaagcaacattgatattctaaaacaaaatccatttcaac

SEQ ID NO: 151996 - DNA, 562 bp, Cannabis sativa
atcaaatttccctattaaatttagaaatagttttctttttcatttattattttataataacaaatataatttctttgttaattctactatttttaatatttatcacaaagtgttatctttctatatattttaaaaataatatatttctaatttcaatactattacttacacatatcaaaatattatattttaaattatatctcaacaagcacaatatatttatataataaaaaattatagaagttgaacaacaccgcgtgaagtgcggcttagtttcctaatttttaataatgagatcttttaattttaaaatgaattgcattatgtaatgccatctggaagacgttaaagcaacatggagtttctttacctggaccaacaaacaacaaggggtgatcgtatctactccaaaagtgacagagtcatggcaaatcaatcttggttagacaattatcctaccgctgaagttggtttcctaaatgaaggtctctttgatcatacaccagctgtcctaactttgtatcctcattggcaaggtgggaagaagccatttaaatacttc

SEQ ID NO: 151997 - DNA, 805 bp, Cannabis sativa
  modified_base (754)..(780): a, c, t, g, unknown or other
tggctctgatatatacgagtagcttatccgcttgccactaacctttttttttctcattgtcacacgacgtcgtttttgtctttgataagttacgtaacgacatcgttttgtaaggctaagtaagttcacttaccactcactcatgactgaaatttattaactgaaaagcgtaacgacaccgtttgtttttttcagaaagaaaatggtgacattactaagggtgtgtttggaaagtggaggaattagaattgcggttaatttatatagttttgtgtttttgtttgatcacgtaattatactgtaattatgtgattgagagacctcaattgcacactcaaatccttgtgtaattacttaaaacttttcatttgagataatatgtattaatttttttttttgtgtaaactattttatcaaataaaaaaattaagaatttataaataattactactatatatttaaataaatatgatattcagagccggtcctgagttgaaataggtcataggtaaattttttttgggtccttactataaagataaatggtatttttaaaaattaaaattataaaaaaatatgatattttttaaaggtattttttttttatttaggctcctaaaatgagtgggctcaaggcgcgggcttaccccgccttataagccgaccctgattgtattttaagatatatatagtgtaattattattctaagtaattactattttaataattatattatacagtagaacctctatnnnnnnnnnnnnnnnnnnnnnnnnnnntctaatttgttataaaaaaatcaag

SEQ ID NO: 151998 - DNA, 959 bp, Cannabis sativa
gtggtgcaggtaaaggcaaagaaaagctagatcaaccatgaggtgatagtcttctccagtaatatacatattgacctcaccagcctgtgtgctgagttaccaggagttattttgggctgtatctgctgtgtattctgattatgtctttttaattattgtcgtttatagtctttagtaaatcttttacaatagggattcccggaacacagttttagtgtcgttatgatgtctatttttagtgttttattttagtgaagttttaatattatcacatattttagtaattaattaaattattagtactaaactagtatataaaatcacacatgtggcgttcctatgggatagggcattacagtgatcaagaataaattattaattacctcttacttaggaattgataaacatgcacactaaaaacgtaatcacatatgcatattattatactaatcttacctcaatctcgaatttaggtgtgccgatcaacctgggtggaactactactcgacgatttacaggcccctaagtaccaatatacgcaaaactaataagtgatacgctaaattactttttggggacttaaaatcatatctaaaagtttccatatcgatgtataatatggaaataccataaatatcactaaaatatgaaaaactagggtttcgcaactgttagaattggtaaaccaaatttccatatcaaaaaactagttcttagggttctgccaggggaatcggttgactggttctacaaggcaagcctgaaccggtcgaccagttctgtgcaggaaccctacaaaccctcacacaaaactcaactctaccccaaattgcctcaaaccttccagaatatctatacaaaccataataaacttaattcaagcaataaaaataactttaaaccatagaaaccaaaatcaccatggaagagcaaagtttgagctcttaagctcaaacttt

SEQ ID NO: 151999 - DNA, 508 bp, Cannabis sativa
  modified_base (27)..(33): a, c, t, g, unknown or other
aaaatagattacattgaaatggagttnnnnnnngggcataaaacccaacagttttgatctcaacatatgagcaaaaactctttttaaagagaaaatgataataccactaatatttttaggtttcctaaatatatctttaaatttatagcaatatatttattataactaataaactaatattaaaatttttattaaataacatatttattaatttaaatattaaataatgatatttaaatattaaataataataatatttaaatttttattaatttaaatattaaataataatatttaaatattgattatgttataaatattattttcaaatttaaatatttagtttaaactaaatattaaataaatgattgagggaatatttcaaccacttaaaaatatcttaataacttggagagaatctctcaaccactttgagaaaatatctcaaccataaataaatatatataacaaattttttaaatttaattttaaataaatatttatcttt

SEQ ID NO: 152000 - DNA, 742 bp, Cannabis sativa
tttcttccgctagttttctccaacgccatagcatagcataggagccggaggtggatattatatatataagccattaattttatggagatatatataatggcttattatgattattttattttattttattttattttacttattcatttttttagtttggtaaaattgttacttttgtattttttaaatcatgaaaataaaaatataattattgattttttttttatttttttttagagattttatatatcaatagattaaaatatatcataatttaattgtaaaattaagacaatgactaaaataaaaatttgattacataaatgttacaatatatatatacactatatatattatgtctcaagggtcacaacttttgttttggtggagagtgactcaaaaatagttatcaaagcgctgaatggtctacattctatatggaatattgataattgtgtctttttatggaatcaattctctaaaaactttttatcttgtaattattcgtttatttcgcgttgttgtaattttactgcccataatgtggctagatgggcgttcgctcgaaacattataggttttatggaaccttcctcgacacatatttctatcctttgtaatgaccaaaaaatctaattttccctatctatataacgttttattttcaaaaaaaatatatattgtgtaggatattatcatttaaaattctaactcatatcctcccacaataaatgagtataaa

SEQ ID NO: 152001 - DNA, 569 bp, Cannabis sativa
gatgtaaataattcataaagtgtagtcggacaatcatttgattttaatgagactttaccatccaggcaacaaaagccattaggttcatgggtaaatcgttttgcttggcagtgtttgcaagtagaaggttgcggtaataatgttggttcatttggtatatcatttagagttcggtgtataagaagattggtgtgtattttgggtccattataagatctattctgttcttgttgcgaagaagtagatcctataataatttatttattaagttaatattttttgtagatacataaaaattgagtaagagataagggtatatataactaaccaacttcaaatacgatactcctagtttgaaaacgatcatcaattgttggtgttttatctgaaaataggattttcaatttagcagaggtatcttagatttttattttttttttctatttattgattgtgtaatttgaattatttcagaatataaactaacctatttggtaaccaggagcttctgtttgtttgagtttttttgttcgatatgcaattcggtttttctcatttatttctttttt

SEQ ID NO: 152002 - DNA, 600 bp, Cannabis sativa
tccaaacctaacttcaaaccataatgtctactaaaaatttaattttaattatatattttttaattttaaatttataccattttaattaaatttattttaaaacaataattatacttatagaaaactataacatgttcaacttataataatcaatataagcactcttaaaacaatcaaaacgtcatgagttcaatccttaaagtaatattttttttttctttatttatatttaatttaagattttaattaatttaataatttcaaaattttatcatattatattaattaatttacttttcaaaattataatgtttattgtatttaaaaattttagatataaaattaattatttactttaattacattatttatataatcatgcataaaatagtaaataatacatatttataatatattttttcttcaacttagttcagtatttaaaatttttaaatattatattaattatttttcttaataacactatatctatatgaattatgcatgtcctagttagctatagtagtatacatatatagttagaaagagttaatgcacattatcctatctaagtgacatgagttcaagccttgacacctt

SEQ ID NO: 152003 - DNA, 513 bp, Cannabis sativa
attttcttttggtcatcttgaatatagaccaaagcctactccaaatttgaaaactggaaacaaacaataatacataacaaacatagaaaaaaacatataagaaaaaaaacaagaatctaaataaaaaacaaactgtaacaacacaaccaacaagtaaaagaaagcataaagaaggcataccttcccatcgaaaccttgaggtttctttggaagataaactggttcaaatttgaggttttgcaaagcaactttcttaagctcacggccaacaggataaaaatccttaacagtggcctgaaaaatttgaaagaaatcaaacatattaaaaaccagttataaatacactatttaaacaagttctgaatagcccctggtttttttcaaatatgaactctcccaattcaacatttgaggatatgtattagaattcctcttgcagtaattaggagacaggcttggtagtatctcgaacaaccaaattaggaaagcaaatggaaacccttggaatttaaa

SEQ ID NO: 152004 - DNA, 512 bp, Cannabis sativa
aaatatagtgtaattactaaactgtgtaattaccactctagtaattacactatctagtaattacacagttacttccaaacacacccttaatgaaagtaggagtgttcatcaaataactaatttaatttattttaatctataaagtgtaattatttgattagaaaattaaaaatttgtattgttgtaaattaaatgtttaagtaattgatctaatctaatttcttttgtgtttttagtgtaaatattttttataattgtttatattatatttatttaagattacatgtaaattgtataaaattttaaataattctcctataaagaaaaaacactagcaataaaatatttgtgactcaccattaacactttgtaacatgtataaaatttattccattttattaaacaacaaactaaataaataattctacattatattattgttttgatatgttcatcaaatgttttatttatatattactttatacttaaaaaagaacaaaacaaaccaaaaa

SEQ ID NO: 152005 - DNA, 605 bp, Cannabis sativa
  modified_base (40)..(43): a, c, t, g, unknown or other
tattaataagtaaatattattatattgaaatgggttttannnngggcataaaacccaacaattatcgatctcatcaatagaataatcaagtttgttaattctattattattccattatagatatggaattgcactctttgataatatagaattatatttacagaattcttactagtagcccattggtataaccaatataagtagttcacccttcaattattagttcataattagaattggtcaaaattccattttacccttctaattctcttgatttcttatgtaccattaactcaatgtaaacagttaatctataacttattatagatttggatccactgttatcactccaagaattaacactataagagcactaatattcgatccattaggcaagcttggattctactattgtataacatgttcccagtcactcatgttattaagctcccaaaataaaagttttaagaattattttctctgagaaactttaacgagtgaatcaaagaactcaatgaacacaagtaggagttcacgtatactcaggattcaggctgatctactaatgatcattattgtgatatgaataattctttcatggtaaa

SEQ ID NO: 152006 - DNA, 502 bp, Cannabis sativa
agggcgttacaacatggtatcagagtgccaaggtttttagatcctgaatactgcttcatatgtacattggctgcaaggacttgatcgtctcatggttcagtaagctttttgttaaaagatagtttgttaattttctgattgcctgattatctgaattgtgttgatatcagaaaggtgcgggcaggactataatatatggaaatacttattagtattattattacctagaatgtgaccgctggtgtatacatatgcactcgagccggactggtaggggtacccgcgagctagctgggcttggggctcctggtgagggaaagaaccctccaccaccaccaaattgggaaaagttatatgttgcaatgcaagagactattcgacagcagggtgagcaaatcagagaattgagagagtagtgagctcagcctgctctaaaccctaattgtaacaccctaaataattatgcacgctacccaaaatgcttatgaaaccctaatcccct

SEQ ID NO: 152007 - DNA, 1072 bp, Cannabis sativa
  modified_base (214)..(214): a, c, t, g, unknown or other
  modified_base (1026)..(1026): a, c, t, g, unknown or other
ttctgagtttgggtttgggatcgagattggggtgcagttctatgtctcgaccctggtatcgtgtcgttagtctggttccatgttttggtctgagttgcggttcgtgttgtggcccgagtccaggtttgggttgggatctaggtccggctcccaattcgggtctaggtctgatttggagtctgggtcctagtccgattacggttctggatctagntccaatttcagttatgattccaaggccatgtcctagttctagtctcggtcaacttctagttttggtcctaatttgtggtcacagcgtacgggttcgggtccacttttgggtttgggactacgttcaggtccgggtgtaggttcgggtccttgttagggttttggtccagggctgggtcccaaatccaaacaccgactatgggttttgtccaagccttgggtccagatctggatcccacttttgggtcccagtctggtttcatttctggtgccgggcacgagctgggtcctatgttcaagttctggtctgggtcgggtactaggtccctaacctagttctgtttcctaggtccatatcctgattttgggtcgaggtccatgttattgtgtgggttttggtcccggtctaggttcaggttcgagtcctagtctcggttcgggtttaggtgcttgtccttgtcctagttctagttcggtactagttccatttgcgattctaagttcgagtttgagttcgagttcggatcgatgttcgagtcctggtctgagtttgggttttcctcctgggtcttggtctaggttggtctgggtctaagtccttggttctgatcttggtctgtgttcaagtttgggtccgagtctgggtctagctttgggtctgattctaggtgtgggtgtttgagttcgagtccgagtctgtgtgtgggtttgtgtccaggtctggaccccgatctgagtctaggttcggttccgggtccatgttcgtgtccactttttggtttgggactgggttcatgtctgggtgtgggttcnggtccttgttagggttcgggtcaagggctgggtcccaaatgcagac

SEQ ID NO: 152008 - DNA, 935 bp, Cannabis sativa
actttttcctttctatccagaatctgtactagttgttcttcacatgaaaggtcggtttgaagctcgatatcttcgtaacttaatacatgagttgtatcagatacatatttctaaagcatcaaggcatgaaacacgttatgaaccccagatagagcaggaggtaaagccaactgataagctacctgacctaccctcttgagaatctcgaatgggccaataaacctgggacttaactttcccctcctcccgaacctccgaattcccttcattggggatacctgaaggaacacaaaatccccagtctaaaattcaatatctctacgcttgggatctgcgtagcttttctgtctactctgtgagcaagcatacgagctcgaatcttctcaatggcttcactcgttctttggacagtttcaggtccaagatacctacgttcaccagcttcatcctagtgaatgggcgaacgacactttcttccataaagcatttcatacggagccatgccaatggtactctaataactattgttataggaaaactcaattagaggtagacacttgttccaagaaccttcaaaatccattacacatgctcttagcatatcctcaagtatctgaattgtcctctcagattgaccatcagtttggggatgaaaagttgtgctaaactttaacttggtacccattgctcgttgtaagctttcccaaaacttagatgtaaactttggatctcgatgtgaaactatcgacttcggggcaccatgaagtcaaactattttcttgatgtataaattaacatactgatccactgtatacattgttcgcactagtagaaagtgtgcaaacttcatgtatcgatccataatcacccaaatagagtcataataccctattgtccttggcaatcccaccacaaaatccatggtgatgtcttcc

SEQ ID NO: 152009 - DNA, 692 bp, Cannabis sativa
aacttaagctccttgagttctgctggagccatcctatatcaagacctcccaaaaacaatagaggtgcttgctttcagaatctttcatacaacggcttcatacggttgccagcaacaggttgttctgctggcatccttggagctacaacagcctaagcaacttgctgaggaggcacggcaggaggaccctgctccctgaacctctgaatctcttcatcctgctggctgatttgatcttgcatttctgcaaacctctgctcccaatccggaggagcttgtggtggatttaaagggcgaccaccctgagctctgccattgccatggccgctaccacggggattctggggattttgatttccctgaccgcctccggtctcaaccatattaccttgacttcttgtattttgctgggcgtccattttataggacttagcctacgaacccataagccaggcaggttagacaacgatcataaaacttaataccgctctttaggacttaaaggcaacacacttaaaatatataattgaaatctaatatactgcctagcatggttaaataattatttaaaatactaaacaaatataggcttactgaaccgagctttccctaatgaagattgtacgtgtcttggcaagcttcggtaaacaaacctggcggttctaataccaaaattgtaacgccctaatgcta

SEQ ID NO: 152010 - DNA, 513 bp, Cannabis sativa
  modified_base (65)..(65): a, c, t, g, unknown or other
gagagagagagagagagtataaaaaaatttactgactaaaagtaaaaaagttgtaactaattatnaattatcatttttatgttgtgactaaaaggtttgtggcttttttttttgaagaaaaaaggtttgtggttaaaaatattagtcataaaaattacaatatgtagtgactaaatgtatttttagttacaatacttattgtgactaaaactaaattaatgacaacttgtatctaaatattatgttttagtcagaagtaagtttttgttgtgactaaaagttacatttaatcacaaaaaatttatgttgtgactaaaaattaaattgtcattaaaaatagtaatttttcataataagagagagataaatatataaataagcgtattgaaacatatacaaaataaattaaaatgttattgatacttgacaaaattatttttgacaattaaataaaaataaggtatagagtgcaaaattcctaaaatgcatatataaaagggaaacttacaaaaa

SEQ ID NO: 152011 - DNA, 608 bp, Cannabis sativa
tccagtaattgtggaaggaagggacttatcagttgatctgataaaactaaacttggaggactttgatgttattttgggcatcgattggcttgctaaatataacgccactattgatttcaaaaaaaagatggtaacttttcagtctgaggacacggacccctttgtatttgtgggtaagatgcagggatcgtagattccgttaatgtcagcgcttaaggtaagagatttgttgtgtgaggggcacattggtttcttagcaaatgttgtggatattactagggaaccaccagcgggaccgaagcatgttccagtggttcgcaaatttctggatgtttttccaaaagagttactgggattaccaccaaaacgtgaaattgattttgagattgatctaataccaggggcagagcctgtatcaagagctccctacatgatggcacttgctgagctgaaagagttaaaagtgcaattacaggggatggtggatttaaaatttacaagactaagcacctcaccttgggctgcaccagtttgcgtctaatccctttcattggggacactcgtaggaagacatgatcaccaggttggaatgtaacatcccgtcgctt

SEQ ID NO: 152012 - DNA, 553 bp, Cannabis sativa
  modified_base (33)..(35): a, c, t, g, unknown or other
aaaatgtccacaccatggttttgagaaatggannntggtaaaatacttttatgatggattatctccctcaaacaaacaaatggtacaatcaatgcacactggaagttttatgcaatttagaggggacgaggcttaggagtctcttgagaatctttctgtaaattctcaacagtggaattgccaagatcctagatcgaaagcttccaacacacctaagagaggtggaatttacgatgtcaaagatgacgcagatttaaaaatatcattagcaaatataactaggagagttgaagctatgtcattaagtcaatccaacaatactcctatccaggaatgaattttgttctctattttatagtacaagtcgtactatctagccgtgtccatcattgcctatataccaagaggcattttctgaagatgcgaatgcgcttcgaacttatcggaactcatttgatagcccattttctaaatcctacaatccaaattggagaaatcatccaaatttttcttggagacagaaccagcctccaatgaaccaagggcaccaata

SEQ ID NO: 152013 - DNA, 693 bp, Cannabis sativa
  modified_base (283)..(285): a, c, t, g, unknown or other
  modified_base (622)..(636): a, c, t, g, unknown or other
cctcacatgaacaatcccaattgtaaaggtctatttcccttatttaaataattgtattagactaattatactagtttagcctaattaaaattgaattagcaacatatttaattttgaaataaatgaaattaatttttcattggattattttaaattaatttagaaaaacatacttagtttaaagaaaaaattctagataatgatttctagtaactaatttatattttctaatatttaattatgtagaaaaatatatttaagttaaaaattaattatttaattnnntttagaccaacttaaattagaatttttttttttttggaacttaaattagaattaataattaagttgattttattcaagatacttaattatttgtttctatatcaagaaatttaatttaatagtaaaatatatttaagctgaaaataaatttttaattaattttagactagcttaaattagaatatttttcttagatattaaattagaattgataattaagttgattttattcaagatccttaattatttgtttctattttaataatttaattaaatagaaaattatatttaagttggaaatgtgttaatatcatatcaacttaaattagaataattnnnnnnnnnnnnnnnattttattttaataatcatttttctagataaattttgaaatacatttattttaaatg

SEQ ID NO: 152014 - DNA, 512 bp, Cannabis sativa
  modified_base (401)..(407): a, c, t, g, unknown or other
  modified_base (483)..(483): a, c, t, g, unknown or other
agcttgtcaagccaacctctctcgttggacctagcattcttgctttaaggagtatatgtaggcacaaccaacatgggataagtgagtcaatccaaaattaaaaatttgggaagcgtatgtgctatatcagatccaaagtaagaattaaatatatggcaaagtaggaatggtgttatccttgagaaacatgttcagttgtgcccgcataataacaataaggaatattttattcgttgctataaagacttgactgactggccctccttggaggaggttacaaaaaatgcaaatcttggtatattcttcactttggacaggtgtcccaagagaattctaaagttaggaacactcttcatataaagtgaaaatcctaaagcacgtgtctgttgggttttatgccnnnnnnnaaaactctatttcaatgtaatctaaattattcaatatcaataaaataacatacgtatttttcattcatttgtgtangttttggttcatcttatcaattgtttgtc

SEQ ID NO: 152015 - DNA, 567 bp, Cannabis sativa
ttacattatcaaccttggaaagacatgggaaaagcttcagctcgctatcagggctattgtagctatcccaacaagataactctacgacatacactttggagcgtgtttaaatccacgtcaacattaacccggtaaaagcagataaatcacagctctgtgattttcgaataataactgcaattaatttacgtgggacgtaatcaaatcgcacaatttcaggggataattattgtggaaaattaatctgattgtaattattaactgcccttctatgtaactataaataggagcagggtacactgaaaaagggacggaaaatcctttagaaagaaagcccaagttttgtatcagaaatctaataagatagactcgtggactatgcaaaattttaattgcaaaactacgtcaaaaagcttggtgttatttcttttccttttactattattatttctgtgcaaatccatcacgaaataggctttaatttaattagcgaaaatctgcattaacactaggttaatttcaaatttattaattatttaatttatcatataatataattttaatatt

SEQ ID NO: 152016 - DNA, 578 bp, Cannabis sativa
  modified_base (213)..(214): a, c, t, g, unknown or other
tagttaatggaagcattgatctaattgattcaaataacaaaatcttttatttaggagtgatctagcattagcaaaggtgggacaatttatgagtattgtctggaatcttatgtgaattgagagcagcaattgtgtagtaattttgagattatgtaggcctgggactacctatgttagcaagaagcatcttgtgtttggtagcccaccatgaannaactctatggttgagtgtccttgatttggggtgattttatttaagaaatttccccatgaagtgttgtcatcaccggggtaacgtataaaagaacatcaagaagagtaatggtatcactaaagtaaagaagattacctagatttacttaaggtgatacggtaatgatggagagtactttataattgactggatagtcaatatggtatataaggacaccattgacattctggtaaaatattactttattatgcaattatggaaaggcataaagattactctactagtattaaactagtttataaaatcacacacgtggcgtccctatagattagggcgttacaatattagtttactgaaatatcat

SEQ ID NO: 152017 - DNA, 1453 bp, Cannabis sativa
  modified_base (427)..(429): a, c, t, g, unknown or other
cccacacccagagcttgatccggatctagaccgaaatccgaacccgaacccaaactcagaccaagactcgaaccccgacatgaacttgaatccaaactcaaactcagagttgcaactagaacttgaaacgaacttggactaggactaggacctaaacccgcacccgacccagataaaatcaagacaaagacccaaactcgaatcgagattaggactcaaacccgaacctagactcgcacctaatcccagacacgaattgggacctggacctagaatcaggatagggacctgggcaacagaactaggaccgaaacctagtactcgaccccagacctagacttgaacctaggacccagctcatgacatggcacccaaaatgaaaccagactagcactcgagatcgagatctggatctagagccagggcnnngatcgaacccatagtcggtgtatggatcttggacataggcccggacccaaacccaaaccagcacgcgaaccaaaactcaaacctgaacccaatcctagacccaaacctggatccgaaactttaccttgtgacccaaaattggaaccgaaatcagaagttgaccttgacccaaaaattggaccagaacaagtacttggacctagaaccgtaaccgaacctggacctagacccaaaactataaccggaccaagacccagactcaaacttagacctagaccaaaaccgggacccgaacccggatccccacccagacctagactcgggacccgaacccagacccaaactcagacccaaatagggaaccagacttgggacacacaaccggggctgggacctagaatcgcacccggtctcaatcccaaaccgaaacttggacttggaacccaagaccagaaccagacctagacccgtgacagggatccagatcttgactcgaaatccagtaaatggggcttgcaatagacacgtagttggtgtttgaatctgggattcagactatgacccgaacccaaactaggacccaaacccgaacccagacctagaccaaagacctgaaactagcacctaaacaagaactgctggaccaagaccatgtaacaagactaggaccctaaacaagacccaaacccaaacctagaactaaactcaggcttagagatggtcgtgtagccagatcggaaccgagaattgaattagacctaaatctgggacctaatcgcaaacacaaactcgaacctagatagggatcaaggtataagcctggacttagacccagacccagaccaagatcgaaacctaggacctagatcaggacctagatccagacccaaacccaaacgtggacccgcaccagagacctgaactcagacctggaccgaacccagacccatatcgggatccacacctggacctagacctggacctagacttgaacaaggattcaaaccccaacccagacccagac

SEQ ID NO: 152018 - DNA, 909 bp, Cannabis sativa
  modified_base (553)..(565): a, c, t, g, unknown or other
aaatatcaaatctaattatcagaataaaattaattaattttagatattagtagattttgaacctgaaaatggataaaatcttattctttttctacttaattggttacttttttacaaagtttaattattttatcttatttttaaatttaaggtcatatattttatattatttaattaattttataaaatgatcttatttgaaatttaaaataagatatattttaatctaaagaattttaaaaatctaactagatattttgtcaccttttaaattttgttattttatttaaattacattataaaattagataaataatatttatttatctttttattttattagatatttaatttttttttttaaaataatataaagtttaaaaacttagttgacattttttgaatagatatttaggtttgttaaaacccttatttttttttttttaaatttttaggtttaattttaaaattaattatttaatttaattttatgattttcgaaaataataatttattaattagatttttgaaaataatttaattatttaattannnnnnnnnnnnnaaatcctatatccaactatccagtttgttgcatgtgtgtgctttatatattatttattattaaaactttttttttatataaatcttattattgtttgatctaaattgctatggttaacttgttgacagatctaatgatctaattttaactaatagttcaattatcaatagtcaaattaataatttgaaacaggtaaattttgtaatcttctttcatttgtgtataaacctagtaacatgataggatccatccaaattagtatgtgccttttcccatatgtttgctttgggcttagatgcatataggaagtccatttaatttttgtaattaaaatggactaggtt

SEQ ID NO: 152019 - DNA, 708 bp, Cannabis sativa
aaagtctcgtgctagatggatgccctaatcacattatgaaaccgagtaagttacacgaacaaaaccctaatcccgggaatcccaaaatcataaccgtaggttctgttatacattctaggggttaatctaactctgaaaatagggaaacacccaaccacggcacggagaggacgaaaattgagaaaatgaaagccccggggaaccctgccaaagccggttttgcacgtacatgtaaaaccggctacccggtttgcaccagttcacccaagaaattttatttcttgctcaattctccaccaaacgtcaccaaaccttccagagtatctaattagggtatatacaaaatattccaaccagtatttcacagaaaaaaccaatgaaactcaacttgccattaatgatcaaagctttgaactcaaagcttaaacttgcataaaacctaaaccaaccatcaattccagctgctaggacccttaatcaactcaaattaaatttaaaattcaaaccctaagcattcccaaccctaatagccactaacactaaaaatccttacttgaaaccaaatttgaagcttaaaaacacaaagatcaaagaacaagggattacctcaacctcaagaacacttggtattcaacttgattgcagaattagagaagaatttggatggtttcctctggttttttttttttggtcccagccgaaagagag

SEQ ID NO: 152020 - DNA, 698 bp, Cannabis sativa
gaagaagaagaagaagaagaaactgaaacaaaaatagaagatacaaagaaaaaaaaaaatagaagatacatagggaaaaaaaaaacaaaaactagaaacatgtgtgattttttaaacacaaaatataagaaaataaaaaagaaaaaaaatgaagaagaagattaacaggggagagaggatgagaattaaaatgaaaaacaaaaaaaaatataatataaatacaaatatataaagcaaatttgtattttcatcattatttttatttaaaataatgactctcacaaaagtgatatgaacagtcaaatcaaaatttttgcaatctttaaatataataaaaattattacaatagaaaatggggtgacactatcaataaaatagaacaaatttttttaaaaaatataataaaaattggtaacagtaactggtgtaaattctccatttatatatatgggctagcttttggtataacgacttatttcaatcataattacatagaaaatataaattgatattttatttacaaaaatacatttataaggtaatatcaacgtttataccttttatgtaattttaattacaaaaataccgcttacacaattagacgatggttgcaaagtggttgcgcggtggttgcacgatggttgcacgatggttgcatggtggttgctaggtggttggccgaaagttgcatcagacg

SEQ ID NO: 152021 - DNA, 512 bp, Cannabis sativa
aaattacagaacaaaccattgaaactcaagttgccattaatgatcaaagctttgagttcaaaactcaaacttgcataaaatcaacaacaaatctcaaaaccagctgctaggaactaaaatcaatccaaactagccctaaaattcgaactccaaacaaatctaaccctaacagcccctaatttacaatttcacatacacaaactaaagaaaaagctttaaaaatataaaaccaatgatctaggggtacctttggttgttcctccttgaattccttgctaaaaactcagagaaaataggatggaaaagttggttctagccctggtttgcctcagccgaaggaaagagagagagagagagagagttcaagagaaatgctatccttctaatttctttttgatttttcctttgattggaaaaaggattttaattaatcctttgctgcccaaatagttgctaggtgtcatcctcaaaatcagccacctatcccaccatttaaaattactaaaataccc

SEQ ID NO: 152022 - DNA, 621 bp, Cannabis sativa
ttaacggccttaaaagtttagggggcatgatttggtacatattaaaatttgggggataaaaatcctaattagccttatctaaatatagatttgatagtttatatttttgaccatgcttatttagtatctgtattttgaaattatacatatgtggtaccttgaaattaaatttaattgataaaattttataaatatgatcaaattgctataaattttatgagttcttaattcaaatttgaatatttaatgatatataactaagaattattaaattaaattgataaaattatattgattaaatttgatttcaaaattttaaatatgtacaattttaaaataaaaaaaaaggattattgaataaacatatttttgagtatatttccttattattactatgtgctctacccacaatgtttcttgtaagtcccatattaattccttctactataccatatctcttgcaattttttcacttgtttgtaaaatggggtaggtttttagtgtgtaataggaatagcaacgagtaagatatagataatgggtatgtatataagaaagttacatttcacaattcaaataaaataggttaattagtaatttttttcctgaactttcacatgt

SEQ ID NO: 152023 - DNA, 525 bp, Cannabis sativa
tagttatacataacttatttcacattaaagttacttaagtatagaaaaatgtattgttaattaatcatacacatctcacactagagtgaagtgaatgctatgtttagtttttataaactcctttttaatttttagaattaacttttttttttagggtgtttggataaaaaataattttttttttttaatttaaaagtctttttcgaaaaagttagaacttgtaatttttctcaaaacaacttttgagaatttattttaaaaattaaaataatttattcctgatttactcataatttttttttttaatgatatccaatcattttaaaaaaatacttttaataaaaaaaatatattgatatgatagttatgcaaacactaaaaataagtaaaaatttatattatcttatagttctttataaaatagttctaactacaggcaaatgaaaagcttaaccaaacaaaataattgaaataaaaagtaaatttattgcatatatatgtaaaaaaaaatacaaattacctcaa

SEQ ID NO: 152024 - DNA, 656 bp, Cannabis sativa
  modified_base (62)..(65): a, c, t, g, unknown or other
  modified_base (292)..(317): a, c, t, g, unknown or other
atttacttggtaaattcggttaagcttattggaaggtcagtaatataggtccatggtccccnnnntagttgagaccatactgcttgcaagactcagatagttgattctaattaattaattataattctagaattagactatgtctagtttatgaattttcactaagcaaaggcaaaattgtgaagaaaagatattctaggttttatttattaattaagagaatttatatgtctaattaataattatattaaatgataataatatttattaatttattttagttattaaatannnnnnnnnnnnnnnnnnnnnnnnnnaattggaaaattggcgtttttgagcaaatagaaatgaaaattgtcaaaattgtaaaatattaagtggggcccataaactctatggccggccacttgatacgctttttctaattattatttttattattttaatgtcaattaattgctaacttaaacctagtggttacctataaatagatagtgagactactacaaaattgggttttattgacactctttagtgaaacgcacaaaagtgggggtcactaaaaatttaagggtgagttttagtgacacgcacaaaatgactacaaattcagtgttagtgtcccataatgcatgtcactaaaaatatgaggt

SEQ ID NO: 152025 - DNA, 594 bp, Cannabis sativa
acatttaatgcttagaagttataattttaaaagcgaagaaaaatctatttttgttagaaaataattggtttgattactgattaaattagggtttacgacttagggtttatgtaatgaaattttatatttaagtatttatattttatacttattatgtttttctttttttttgaaaacaggcgtaggattatattataataattaaaaactagacctcctggtcattacataaaatgtttaccggtacagaattgatcgggatcgatccataaacctagtgggtaaaagcccacttagcgacattgtgtgccgcaaataatgatgagaatatatgtttagtggatagcgcaaccactcatacaatacttagaagtgataaatattttttaaatttatcaaaaatgaaggctaatgttaatacaataccaagcactgcaagtttaattgaaggttctggaagagccattatattaatgcctaaaagaagaaaatttttatagatgatgcattattatctaccaaatcaaaaagaaatctgttgagtttcaaagatatacgttgtaatggatatcatattgagacaatagatgaaaa

SEQ ID NO: 152026 - DNA, 552 bp, Cannabis sativa
  modified_base (504)..(505): a, c, t, g, unknown or other
aacagggaaagatattggttccaatcttattgataagtgtaaagggaaagtgaaggttattgataaagattctttgaggacttataagttgccttgttttccttatgcatttcttgtttggatttataaaactattcctctttgtcagaaggctagtttttgtgaatatgatagtgacccagaatataggatttatagatggttgaatatgggtcttcccaataatagtgctgttgagaagaaagttttttcatcttctaaggtacattttttattaattttttttttatattttgttgtttacattttagtttattttttttttaatttactgattactaattgtgtttacactttttgttgttttttgatagctgaaaggtgaatatatatttctgttaacattttcgttaaccaaaatttgagcgtaacagtgataatttcacatagaaaaattaaaagtagtaaagtaagaggtatgaacacaagggattttttacgtgnntttgcagttaaaattctacatagtccatgagtcaatcttattagatt

SEQ ID NO: 152027 - DNA, 616 bp, Cannabis sativa
acttgtctgtccataaaaaccgctgattctttttagtgagttccgttaagggtgtttagatcttagaaaatccctcaacaaaccgacgataataaccggccaaacctaggaaacttttaatttctttaactgtctttggtctcagccaatccccgaaggattcaatctttcttagatcgaccttgatcttgtctttactaacaatgtgtccgagaaaaaacacttgagatagccaaaacttgcactttttaaacttggcatatagtttattttctcgtagtcgctgtcgtcgataaattctataacccatataaaagtttttggagcattggttagtccaaatgacataaccagaaattcatagtgcccatacctagtgcggaacgcagtctttggaatgtcctcctctcagattctcaactcatgatagctcaatcggagatcaatcttagagaagaccgtctttccctgaagctgatcgaacaggtgatcgatcctaggtaaaggatatttatttttaatagtcagtttatttagttcttagtagtcaatgcacatatgtagagatccgtctttcttcttaataaataacacgggagctccctagggtgacaca

SEQ ID NO: 152028 - DNA, 929 bp, Cannabis sativa
  modified_base (718)..(723): a, c, t, g, unknown or other
tagggcataaaaccccacagttatcccattattcttatgaaaaaaatgttaaaaaaagttttcaaaaccaatcgactctttcatttcattcccactcttaacccaatctcaatcgtttcatttcttgggcttgaaattcagctgataatgcttcacactctaaggtgagctttaggacggagatcggtggacaaaacccttggagatccagcgatgagagcctcagacgtgggacatcggctacaaatccaagacaacttctctattaattagattgttacggtggagcacgattgctccgattggtgaggccatatcactagctctctaatttcccctaactattcttctacaaatgaccccttcggagatcctaactcatccgagacgcttatggcattctctttgttgctcgcctcaatcaccagaccaccgaacataatcttcgctaggttcctttttcttttattcaaaatttttcattttcttgttgaatagctatgtttatttactttatggctaattaattaacctttttcgtcgttggaatttcagggttatgatggttcagttgaggcgcttgttgagcaaatatgatcgggtcaagaatttaggcttagttagacacattgtcttagtagaaaatacctagcataaaatttagtatacgtgcatcgatatatctcgatcagttttactatctgaaataattttttannnnnnttttttctcatggtcatgtaaattgttgttatttaaaatatattgtaaaattttaagaaatttagaaaagttttaaaatgctgaaaaatacgttcaaacagtgtgttgtacgtatggctgtaaataaatttttgtaaaccgtcctacccgaacaactcgcccaaaccaaatcgagataacccgacgaaaaatgtaaaccgaaaaac

SEQ ID NO: 152029 - DNA, 1023 bp, Cannabis sativa
  modified_base (711)..(712): a, c, t, g, unknown or other
ttctttattgatgctgaataaaatggattacattgaattggagttttatttagggcataaaacccaacaggggggtgacaaccacccaagttggggggggcccccaagacccaagtttgggggggtgactaacacccaagttgggggcccccccacgacccaaaattggccccccaagacccatgttggggggagggagggacaaccacccaagttggggggcatctcaatagtcatgactttacaccttcttcattaattttgtcccggtatttttgtgccacgcggtgctactcttgacacgtcatcgtcgttaaaatttggctaaacatttgcttcccaagtttctagcggtatgaccatatggtaggaactttattgtgttgtttggatcttccttctgttgttgacggcttggcacaacagcaccaaaaatactatgcgtatactaaaattacatttaaaaaaaaaaaattcaaacaaacatttcccactcactacttttttcacattttataatatagcccaataataatttcccaaaaaaataataaattacaagaaaataataaatttcaaagaaataaaattatttacaaagaaaatgaccaacaaaaatatggaaattactctttagccctcaatggtagtggagggttataatagcatttttgggataaaaggccctctttttgcaaaaataaagttccnnatgtaagaaaggaaagaagacaaaaccctcacatttcaaaaaattcatcttctcaactttgctcttcatttttgggttggacatcttaccaccattggaggagattttgaagttttgaagtgattcttagacacttggtagaacatttcttcactatgggtaaatttctaacacctccatagtcattttttacattgaaatcacgttgttagtggtatttttgaaactttttcttggttttcttgctatggccgaatttgacatgttgattgggattgttggatttcttgatataatgtgagtgtttgatg

SEQ ID NO: 152030 - DNA, 567 bp, Cannabis sativa
  modified_base (26)..(41): a, c, t, g, unknown or other
agcttccaataagtgaaccaaatttnnnnnnnnnnnnnnnncttattaattcttcgttgaataactagattttctctctctctctttgctccttgcaactctcctctgagttggtgccatggcgaaaacgaggtccaagaatgtggggaaatcgcaaatttcgaacaaaaagaccaagaagaaaggtccgaattcatttgctgatgtaaggaagaccaaatccatggaggaaattcttggtgttgaactagtggaattctcggatgatgaggaagacagagtaggagtcaatgcgtacgatcaaccgcctatatctccggattcgtcattgaggtttttaaagagacaagatgagatagctgctgattttggctatttcttagctgctaataaggaatgtcaaaattctatctcgaaaggaattcaagcttcacctccgattcttcgagcagagccagtgattcgtaacctagaatcggcttttaagagttcgaacaaagaggggaaagtgaagataacaatggatgacatagaggaggaggttgcatactggaaatcggctatagt

SEQ ID NO: 152031 - DNA, 543 bp, Cannabis sativa
cagctagtggagtcacattttgggcattaaacacatgtcttgacctttaaattgcaatggtttgaaagatgtgagaccaggaagccacggcccagaggaacaaaatatgctttcaccattaccaactttccatcggaggccctttgatagcaattctttgccccagactattcctctccatgttagggaagggtaagaacccaaaccagcatctaagaaggaagaatgtctgaaatatctgggtttaagcattcggctgagcagagaattcggattggagaggagtaaccatgcttgcttagccaaaagggcttgattgaaatgtacaaagcttttaaatcccatccctccttcaactttcgaatgcgtaagggctttccaagttttccaatttatgcctgaagacgatgagttggaaccccaccagaatttgttacacatggtctctatttggttaataggagattttgaaagccgaaaactgtaaagtcttttttttggcaagttagttgacaaaataatttttcctcttatggtaagatt

SEQ ID NO: 152032 - DNA, 766 bp, Cannabis sativa
  modified_base (400)..(407): a, c, t, g, unknown or other
ctgcaaattttcttaatataatctcatgaagtgaatgtctaactaactaatccctcctcttgtttatattacttctaacttattcttgaaattctatagtttcagctgtgaaatctaaaaaaaactaaagcaatcataatgataatgatgtttatacccaagaacgaatgtgttgttgcatttaataagagaacgaattaaattttctttcatttattctttaaacatttactttgattaaatattattatttaatgtagggtaaataatattttggatcttttattttgttaaatgataaaatagaccctatattttctaaaatagtaaaaataagaccctgagtttaattttcaatagttttattttttaatataatcaactttaagacaatttctannnnnnnnagatacagaaaatgtaactagttttgtcataacatctttagattagattattattatgaaatattttgacaaaaaaaatagtttagggtcctatttgtacaattttgaaaaataaagggtttattttgtcatttaacaaaataaagggttcaattggtaaataaatagtctaaaatagtatttaccctttaatgtaaaaacagttttaaattgatcaattatgtaatcctaaaggatacctgctttctatataaaggagtggtctaaatcaaataaaatcaagcggaaatttttgcaacagtggactaagcaaatcgagctctgattgagccactataattctcttgttttctctttat

SEQ ID NO: 152033 - DNA, 526 bp, Cannabis sativa
agtctctcattgacatctcagcttacctcggggaaattgagtatacgtgtcctttaaataggagttcggtctcgagtttctaggtgagaaaaatctcactataacaagttattgtaacttttaattttggctcatttgcatacttaattttcttatgcaagtagtagaaaatgatatcaatatgttgagaagtaaaagtgagaaaatatgaaataaataactaaaaaacaacaaaaaataaagataaatttaataagcaaacaaccacaaaacaactataaaaacacttactgaagaagttaaaaagttaacacgatacctactcttgtgaaactacatcttggtgtcaacttcctcaacactaaaatgaaagggaggaaaaaacttacccttgtccttcaaataaacattagttgttttcctaaaaatgaaaaatgtaaagtcctttttttggcaagttagatgccaaaatattttttattttatggtgagatttgtttacattcataaccgattttctcacctt

SEQ ID NO: 152034 - DNA, 813 bp, Cannabis sativa
  modified_base (629)..(629): a, c, t, g, unknown or other
tcctttgtaatgcttctatcaatgcagaatttagtttcaagaaaaaaattatttattaaaatatgatttaaataattatttaaaagtatgaacaaacgtagataattatttttaataataaaaatctaaattttaattaaatattaattgaattaattaatcatatattttttaacaaatttattagttatattgtttaaaatatataaatttattatctgattttattatttaataaaactagttagatatattttttatataaataaattaaaaattagattaaattttatatatttaaaaaatataattgaattgtattagatgtgactttttttttattattatttaaattaatacttaagtaatagaaactttaatacactctaagcaaacatgccttgtatgttactaatacttagtttatatatatacatatcttctcttataacaaatgtggttattgttgactcaaaaatttagacacagatctttgggtcacaccagcttgctagattggcaagaatgtattatgagttaagtataagtagagagaaatagcagtttatagtaggagtgggcatccgatccaacctaacctttgtttcctcatccgatccaatccaatnagtaattggatttggaaaatcatcatccgatctaatctaattagacctcgaaatctaatccaatctaatccaattactaattagattggatcagttttataatttgatatctaattacacacctaaatttcaacattagcttaaaaatataaagaaaaatacgtaaaaaactaagtatcacttt

SEQ ID NO: 152035 - DNA, 633 bp, Cannabis sativa
tgtctaatttttgcatttaacccatccaggtacttctccttcttactgaaatcggtgggcacaattctcgaggccaaccttgccaagcaatcagactgagtcgtaaactcagtaacactcatgttttctttctcagtcagatgggtgaattcttttctcttggcacttctgaccgcctcattataatacttgacattaaacagttcctggaacttctcccaggtcattgttgttaaatcatgaatcatagacaccatgtcccaccaaactaaagcgtcttcttgaaattgaaaagtggcacagaccactctatcattacccgtgacacccataaaattcaagatcctagtgatcacaattagccattgctcgactttcataatagcagggcctcccaagaaaattggaggtgcctgcttacgaaacctttcatacaagggttccatccagttcattggaacccccggttcggcctgcacaataatggcaggagctacaggtatctctggtgcaagaactgcaggagcaccctgctgtcttaattgccgaatcacttcctcttgttcattgattttagtttgcatttatggaaccctgttttcccaattctgggcatcctgagcagcttgggca

SEQ ID NO: 152036 - DNA, 1118 bp, Cannabis sativa
gatgccctcatcgacggaccgcagacaactcttcctgatctcgactcctaagcttaccccaagcttctcccgaatcctaagtctgtacttgtccctctacctccgtaaaaccaccctcttggtgacgatctctctcgcccatttttggacttgatcaaagaccctatgccactgtcgctattcagaaccacacattgagtagtgcctccacactagaattacttcccccaacatgaactcttctgagtccatcacaacgtccctccagtcaaaccaagtagcccttgcagcactggccttaaagctaacacatcctctgatagtagctcattcgccaatcgtccaatgcatactcctttcagcaaggactaagtatggtgcacccctcggggtgaggttcacaaaccaattgctcccaacggcacctatagaacacgcttccactaaagccaagtcccttcagaaattacacatgccaaccctatggcgcaccatcctcctgatggcaatcgagcaagacactcccatcgcaggataaagtttggtgcgtcccacctggacgaggctcgcaagcatagtgcacccaatacaacaccaagtgcactcttgcacataatttcttcgcgaagttcacaacattggccctccggccctatcgcacacccacgacttcatgcaaaaggccccgctgacccactgcatacttgctcctctgagctcctgcttctgtcagctctcaaaactgtgttacaagtttatctcccaaatcaaccctgcatcctctgatgactcgctaatttttgacaaacttgataacacctagtcttactcttaagacttgaagtcattccaatccactatctcccatcggcatatgctctttgaaccattcgacttacagtctcccatagaacaccagtgtcctcataaacacaaaacatgccaataacatgccgcaaactagcttagtcttgatctcagtctacgcccctgcatattctctatctgcaacttggagcaatcatgcaagtcttcgcactgaacaacccatgtgttgtagtgtttccctctggattcacacaccaaaactgaacaagtaccctgattcttcaaacata

SEQ ID NO: 152037 - DNA, 556 bp, Cannabis sativa
attaattaataatctaccaaaaaatatattaaaaatatagagaaaaaatactaatagaaaatcgaggctaataaataaattatgaataatttgaagttataaagatagtaaagttgtcgatataaataaaaagtaggtatgtctctaaattatcaagaaatattttgatgagtgagaaattaagaataaataaatcatattgacaataattagtaatctaaaaaaaatattataaaatatgaaaagaaaatatataccaataaaaagtcgagattttgatgttgtctattgatgtcattgctacgctcattatggtattctaaacaatgaaaaaaaatattaaaaaaaacatataagattagagaatgagaaagatgaagaatgtatgctctaaaaaattgaagaaacgaaaaaaaatatgaaaatttattaaaataatagtaaaatatcacttagtagagaatcgaggagagaagagaaaaataattttagagagattatagagtgtcatgtcaccactctatttctctccttttttatatatatatatatagat

SEQ ID NO: 152038 - DNA, 731 bp, Cannabis sativa
tcattactgcagttatttgctttttgcagacaacgattcgtttcctatccatttattgatatggcgcattaaatgggtgtcaaacgggtactcaagcattttctaccaccttgatgagtatttaatccaatcgttgaatctgtagaattcgaatcgattgtcatcctgaccgtacgatggtggttgatcacagctgtctcgcacttgttctggcctataaaagccagccttcttacttcatttggttactttcaacattttaccaaattttcttagagttttctcacagagaaaagaagctttgaacatcattgatttcttgctcttattccttcgacgatgtcagtcttcgttctaccagcgatcaacaccaacccccagccttcaaacttcatgtaagttcttcgtatattgtatacttgcttactgtttgtttatatagcatgttttatgatttctgggttggatgtcaaacttctaggaatgaattcgcctaagtttactgtataatgcgttaaattcctcttttttgcgtttagatcgctctttgttattacgtttctgtttgaggaatcatccccatcttacgtaataacgtctttagggcttaaagtagatcttgccctcttttttttctttttttccatgtcactgcctttgggattcttgcacccgattcttgccaaggaaagcctcttggggttttcttatttggcaagtgtccggagggg

SEQ ID NO: 152039 - DNA, 541 bp, Cannabis sativa
ctccttatccactaagtcaatagtctctggaggggcactggaagaagccttcatgggggtgaccatctgggaagaagttggaagaagggaagcatcaggactgtgggctccggcaagggttgccaagatcgtctccatgggattagctgctgcaacaagagaaaagagttaagtgttagaatatctgtaaaagcagtaaacacttagaaaacaatcaagctagtcctaccctgactctctaattcgggcctagcaaagtttcgaatcttaatactggctgcatcatccccgagatagttgtccgagggccggaaccagctggaagaaagataggccgaaggatccaagggaacgggctccggaggtccagaacccatccgggattgacctaaataatctcctaagttggagaaataataatcctttgcatgatccccctatctggtcgaaggcatcctaaacctaaggagacgttcatcgaactcgacgggcctaaggctagcatattcgcgaacagaagggacgtaatgtattgttaaag

SEQ ID NO: 152040 - DNA, 520 bp, Cannabis sativa
attatattttaaattatatattacatttttttctcacttttattattttttaatcatttattatttaaattaaaattaccaactttataaaaatttttaataccactttattatattttcaattatatattacatttttttttcaaccatttattaatttttaatcatttattaattaaattaaaattactaacttgttaaaattaataatatcatttattatatttaaagttttatattacatgtcataattaaatatttttctaattatttaatatttaaattgaaaatattttttattttaaaaaaaaatattattttactaacttttttaatcacatgtttcaatttcaattttatgttttaccttatttattttcttttattttatggacatattaatttattaatttattcttaagagtaattcaattttatttcatttaaacatttaattaattttacattttctctactaaaatttcggcagcataacagcttaaaaagtgtaaacccaaaa

SEQ ID NO: 152041 - DNA, 881 bp, Cannabis sativa
gaagtacaggccctgacaggaagaatggctgcacttaacatgttcatttcgaagtcaactgataagtgtgtgtcgttcttcaatatattgggagcaacaaaaagttgagtggacaaaagagtgcgaagaggcctttcaaaacattaaaaggcatctagcaacgcttctagttttggcgaaaccaaaactggagagacgttgtttctctatatagccatctcaaaagacgtgattagtacagttatagtgcgagaagagggcaaaaaccctggtcagcgagacgcgaaaaccgataagttatatgtggatggcgcatccaatgaacagggttcaggtgtaggggtaatattaatatcgccagaaggctttaagtttcactatgctctgagattccaatttcacacatccaataactgaatatgaagccttgatcgtcgacttaaagataccagagtcattgaaagtcaaaaatctcatttgtcatagttattcgcaactgatcgttaaccaggtcctcgaggaataccaagccaaaggcttaaaaatggccaagtatgtagagaaagttcggaagaacttggaaagatttgattactttaaaattgaaaaaattcagagagaacaaaactccaaatgccttagcaaaactggccttgcagaatgacctggatgaattgaatctagctctggtagagatgttgaacgagccaactatatgtgaaactgaaggcatcgagacaatagatagctctctaacatggaccacacgtattattaactatttacttgacagagaacttccaaatgacaaaaacgaggtgcgaaaactattgtattcagtgcctcgctacacaatgattgaaagcaaactatatagaaga

SEQ ID NO: 152042 - DNA, 726 bp, Cannabis sativa
gattatataactctcttctatgagtcgatatgttcacttcaacaggcagcattgcttctgagccaaatgctagcaagaaaggagtgtgtcccgtagctgtcttctaggtatttctgtgggcccagagtacctgaggtagctcatcaacccatctgcctttggcagtgtctagcttcttcctgatagtatcctttaacgttttattaacagcttccacttgtccatttgcctgaggcctgatactgacgagaagcttttgataattttattcctctcgcagattcagtgaacatgtcgcatcaaattgggttccattattggatactatcttcatgggagttccaaacctacaaataatgttcttgacgtcaaagttaaggactttcttgcaggttatggaaacgaggggcttaacttccatccatttagtgaagaattcgattactactactgcatacttagctcctcctcactcagtgggtaatgccccaattaggtccatccccatatagtaaatgggtagggcgaggtcatcattctaagttatgttggcggtacgcaagatatatgtgaaagcctttgacacttatcacatttcttgaaaaacttgtgtgtctccttattgatcattggccagtaatatccttgtctaattatcttttaatacagacttttccagcctgcatgtgttgggttttatgccctaaataaaactaatttcaatat

SEQ ID NO: 152043 - DNA, 606 bp, Cannabis sativa
aaagccaaacacagggcccatatctgtgcgtccttaacactacgcccagattcaaaaaggtgagattgagaatatggttcgagagatgctccgtattggcattgctcagcctagcactagtccgttctctagcccagttttattggtgaaaaaaaaaagatggcagttggcgattttatgtggattactgagctttaaatcgagcaaccgtggcaaacaaatttcccattcctgttattaatgagctacttgacgagcttcatggtgccaccgttttttccaaactggatttgaagtttgggtatcatcaaattcgtatggcacttggagatgtggaaaagacagctttatggactcatgaggggcattacgagtttctagtcatgcctttcggcctcaccaatgccccgaccacctttcaagctctcatgaatgaggtattttgcgatttccgaggtcattgtgtcttggttttctttgatgatatttttgtgcatatcccttctttagcagctcatgcaactcatcttcgcttggttctcgaccgactctgtcaccatcgcttgtatgccaacaagaagaagtgtctttttgctcaagctcaag

SEQ ID NO: 152044 - DNA, 973 bp, Cannabis sativa
cgaatccccgacttgaagtaagtctggtgtctggttgagagaaatagaagtaccccgacaaaccttgcttaggggtggacttcaaatcaaaaaaccagctaacctcgtggggagaaggcataccccacttccaggaggcatatagaacgaagagggcggacatatacataatgcccttgggagtgaactaggtcgaacagaggcggaagaaatctgctacattcttaaagtatgggtgcaaaggcaaaaatgccccttgttgggcatgagcacccgaccaggcgcacatcccccttttagggtttgtggctcgattattgtgggcaggaatgtaacagtccaattcgcctaggtagccatcctagtcgagagcccacaggcgcgcctcagtaaccttggacggaaggctcacccacctggcacccaaggtacattgccttctatgaggaactgcagcagtaagctcctcattgacgtagtccacgccctcaaccaggacgtcgccatcagcatcaactggctccccagcctcattgtatctcacatattttgggggtgcaacctcttcctcttcctccgcctcagagggactgctaggacagacattgtcctgctcttcaatctcctggacctcaaccttcccttcatgatccccctcctcttggacgactggatcttgttcgacgctgggtaaagtggtgtgccgagccacttgagggtgagatgcgtcagccatacgcattgcctttttgtacgaaccatcattctatggcttgacgaaagacttcaggaagaatgcctttcactagaagaaggtgggctagaacagagacgaggatggtcctcgcgtaagagttgaagcaagtctcggtcgattcgatgttcgctctcccaaaactaacttggattcatctacaaaagacaacacacaagatgagtgtttggtcgaaatatcgaacgttaaaacaagcaa

SEQ ID NO: 152045 - DNA, 554 bp, Cannabis sativa
ttaagaagaaagattggaagaaggcatgtcattgaaactaatagtcttacaatggtttaagcgttacgtagctctattcctatggtttcatacgtttggagtattatttctgattgtaagatgatgttaaatgacttgagagatatttatgtcaattttagtagacgttctgcaaatagtgttgctcacttcttggctcgagcaccctctttagttgctgatcgtgttttggattttaattatgtaatcactatagattgcaattaataaagatgatgattttttttttttaaaaaaaaataaattaaatttaatacacaatttaattatatttttatatataaaaatttaatctaattttaaatttgttttataatataactaataaatttattataaattatattagttaattgaattaacgtctaatttttaaatgagaaatttgaatttctatgcatgcattaggggataattttttacctaaactagtacttttaaacattgaaaacatatgaccacttttccaaaaccccaaaaatacccctctcaaa

SEQ ID NO: 152046 - DNA, 606 bp, Cannabis sativa
  modified_base (61)..(62): a, c, t, g, unknown or other
attgagattgctatggatatcaataatcaagaagtacgcatacctaattattatatattannattgtgttctatgttatatacaaaatgatcatgggtttattattaatttttctaacatgtggtattagattgcctattgtatatgatttagaacctataattagtataaataatttatatatgttaattatccataattacatattaatttttgtcataaattaaagataaaattttcgtttttaaatcttaaaactttaggggttttttttatcattaaattctcgttctgctgatatattatatgcatgaaatcattatgtatattatgagaattttaagttttaagttttagggtttatataattatattatgaaattataatttgtgttttttgattttattgtgtttgatctgaaattgattatcaatatctcattatcaattgcttatgaatgttcttacatgattaattttttattttggccaagattagtattacaattattttcttttatgttcttaattttcggattgttgtttgccatgagatctagaaatttagcctttaatacccgaaattagttgtaatgaccgctttag

SEQ ID NO: 152047 - DNA, 580 bp, Cannabis sativa
gtttgttaaaaaatactttgattagttagtcattggaaaaaaaaaatacataaatgaatatttgatttttttttttataacaatgataaatttattgataaaaagaaaaaatatattatcatacaacttaaaaaatataagggtaaataggggcataagtaccataattttgaatttgtaagcggcataaacctaatgataatatttgttaaaactgtaattttttttattttcgtcagtacaggcttcgttttaaatttgttcaaaaagatttggaagtaactgatactatatatttttcatccagaccaaataatctaaatatgggtcttaaatgtgtcctgttgtttaagacaataacagagtctgtactgattaggggtgtgcgtaaatcgatccaatccaatgacaatcgaccgatccaatcacaaccaactgccaaacattggacatccaattgtgatcggatcggattaactgctattttgaatatccaattggatcggatgttggatggagagtctaaaaacccaatacatccaacatccaattaaactaattagtattttcatttagtttg

SEQ ID NO: 152048 - DNA, 867 bp, Cannabis sativa
  modified_base (264)..(267): a, c, t, g, unknown or other
gacatcaagtataaaccaagaactacgatcaaggggcaagccttggcagactttatccttgaattccccagcaccgaagtggcactcatagaagatcaaatcgatgtagctataaccaataaggagatgtggacattgtatgtcgacggagcctcaaacagcgaagctcatggtggcgggatcttattaatcagtcctagaaattttaaggtacacgctgctttacgttttgagttatctacatctaacaatgaagccgagtannnngctttaatcgcaggattgaagctcgctctcgagatgaaaatcaaatatctacaggcgtttagcgattcccaaatcatggtatgccaggtgaatggagaatatctggccagaggtgggaggttggttaaatacttagccattgtatgcgagctcatgcagaagttcaagaaagtagtcgtgtctcgagtaccgcgtgctctaaattcacacgcagacgcactggcccgtttggcctcaactagagaagccgaattgctcgatgtaattccggtggatgtattggctcacccaactataaatcaagaagagatcatggaaatagatacccctcaagaagtaacctggatgactccaatagtcgcatacctagaaaagggcgttttacccgatgacaaggtagaagcaagaaagctgcaacaacgagccgcccgatatgtcatgtacgataaaaggttgtatcgcagaagttttagtcaaccgctactcaaatggatcgacagtgaagagtgcgactacatactacgggaagtacatgggggaatttgtggcaatcatacagggggtaactcccttgcgttaaaaatcatgcgacaagggtat

SEQ ID NO: 152049 - DNA, 1443 bp, Cannabis sativa
  modified_base (1367)..(1368): a, c, t, g, unknown or other
tggtaaaataaatattccaacaccatcaaccaccacaatcggtctgcatgcttcccacctttttatcgatgcgtccaatgccatgaaaacaaatagcaagctgttgtcttccgctgttttcagatcgataactgatcctgggtttgttttttccaccatgtgtaagaaacttggtactagactgtacgagtcattagcgtttcctcttaagtcatttactgtatgtttcttacttctccaagctttcatgtagttcatcttgatcccatacctgtatttcaactctccttttatgtccattggtgtagcttttgtctttatgttcagaaacttcagttttatgcattctctaatcagtttcaatgttgcttgccttcggtcttcatgcctaatatttatggggcaagtgtggatttttgagaacctcctgattatgaatgtgtttgttgggccatttctggatgctcgtagagaccaattgcagctttcgtaaacacatttcagactgtattcttgagagcacgacttccacactttgtactggaagttgtttttaattgcgtagtagctgaggacattcttcagagtttccttgtccttgtatgcctgacctttttctacttctgggtgatgcttgtctgttattaacttcgcgttgttgatgtcgatttctggatctagttttttactggtgttttcaagtttttctaccattttttcagcaattagattcacatagtcaattatgtcaaattttttcgttctcacattctcttgtttctgactcttccccttattttgtttgctgtcccgctgtatatgattctgttgttgttgtgttgttttctagcattgccacattctcttcatatggtgttgttgtggttgttatatttgggattgcagcaggtgttgtgttgttgttttgctggttgatgcataatggatatgtggtaaaatctgtttctttgatcttcaattgcaaggctggcatcgttgaatatttttatcggtggtattccttctttagattggtactgtatttgcatcgttgttctggtgttttcgcaccccaatgaagtaagtagtatttgtaatagctcttcgtacttgcattttgttggtatgaattctccactagcttcatagttgacataattatgctattcttcccattgttcattgctctttatcagaactggtatacgttccattacctgccattgttcacaatatttcatttatgtatcttttttttcatattaaaacaacaataaaacaacacttcaaaacaatttacactagtcatttattggtgttcttatttattattttgttgatccatataatcaatatatatatatatnnataaaggaaagcacaagaagagtttatgtgtcattttataaatttttcttattatttttcttaatttctaacaca

SEQ ID NO: 152050 - DNA, 591 bp, Cannabis sativa
tataacatttataaaatatatggttgtgtctaaagtaaatatgaaatgtcacaataatattttagaaacacaatttttttcttaaatagaataaatcatcaagattattatgaattttatttattagtagagaatatggcattagacattataacatttataaaatatataattttctctaaaataaatatgaaatgtcagaataatatattagaaacacaattttttttaaaaatatattaaatcattaagactattattaattttttttattagtagagagtgtggcaatagatattataacatttataagtatatagttttatctaaagtaaatatgaaaactcgaccatattaaatgatatagctcgactataatgtgtagagctcgaccattataaattatataactcaactgtatgagtagagctcaactatatatggtcgagatttttaaagagtttaatcgtcattaatagagttcgactgtttatggtcgagatttgtaaaaactaaacaaaattaaagttatcacttgtctataaagagtagagctcaactgtataagtcgagattcgtaaacattgaaca

SEQ ID NO: 152051 - DNA, 563 bp, Cannabis sativa
  modified_base (35)..(39): a, c, t, g, unknown or other
  modified_base (493)..(498): a, c, t, g, unknown or other
tatatgtataattttaaacttttttgtgtgtcaannnnnttattgcatgaattttagatttttatattatgtgtgatttttgagaatgtttttatattgacatttatatgttataaatctattacttatcatgttaaatatatattttgaaaataaaattaaaaatttagtaaaaatagtacaattacttataaaatatgaataattataaattccacttaaaccgtggtttaaaaccaaaccaaaccgttcttaatggtttggtttggtttgagaaatttattgatcttgtttggtttctaatattaaaaaaaaactgttatactggtttggttcaaaaaaaatataaaatctgaatcaaaccaatctgtgaacacccctaatttacaataataacttgtggaattcccattaaaatagtaatttgattaatagaataaataaggagtgtattgttggggattattttactaagatctagatttactaccannnnnnttgtttaacatcctaaacatgaatttctaaaacaatagaatataaacacatataaagttcaagaa

SEQ ID NO: 152052 - DNA, 692 bp, Cannabis sativa
ctagcgccgccagaaggaatgtaaccaccagtgccgctgtatccgattcgccttgtcagcgtcgccagagttggtcattcgtttctctggttttgttgcaggtgcagtcgcaaactgcttctcccagcaggcagtcgtctttgttcctcaagcagtcgtctcctccagcagccgtctgtctgacatggttcctcgcagtcgtcggtgtctggtctgtttctggtaggctgaatgtcccaccagtcgacgatctcaagtgctcttcatgccgttaacaaccagcgggggtcggtagatcttttcagcagtagaaatttgtataaaaggttaggtcttgtcgtatgacatggtttctttgtttctctctggttttttgttgctttttgttaatgttcaggtgttaaggttgtgtggggatagttcagagttttcttggttgtcgggtgtcttcggtgttgggtttcttggttgacaggttgtttggttgacgggtttcttggttgttgattctttgggttttctgccttgtggtggctgtgtggttcggggttatttcttgatagttatggtgttgacaagttggcacaatggtggggatactgaggatgaaatattacggtttcagattgaggaggaggatcttgaagatgttgcagttctcacagggggaggtgatgatggaattgatgata

SEQ ID NO: 152053 - DNA, 571 bp, Cannabis sativa
ctctctctctctctctctccgccctaaccccaaaccccatgaatggcgatcaatgctcgccccaaaccccgctgctcgccccgatccctcttctctaagttctggtcaacgacgcaacactccaccccaatcccagctctcctcccgctcccgttctcttctctgttcgggccaagcttggcccctaacattgtcgtttctgctcaggccatgctcgcacaaaataaccctatatattcaggtatatatatttatttttaaaaattaaaaattctggttgaaaatattagtttaaattgagaaatcgtactatggctctccaaaaaaccagaagcttagagcaattcggctcccaaaattcataggtgattggggaccatcactttcaactaatttaattttctctgcatttttctagggtttgtcaattcgggccccaaccgaatgcgagcagagggctgaagaggggaatcactgaagaggggaatctcacagtggtaaattgggacttgatgatatattgaagcctgatttgataatgccattgatatagtacactgttaaaaagatt

SEQ ID NO: 152054 - DNA, 559 bp, Cannabis sativa
aaatgtggtcaacacgggcacggcacaacaaccgaaagacatgcaacaatcaagcaataaaatagaaacagatgaattatttcaattgtttaattttgtgtgagaattcacacaggttgatatgttacattctatacacatgggattttatttttgaaaaattttaaacagtttggtaatagttgcaaaatcgatttttgacagttttgacacttcttaaatatttagtacaaaaataacttctttattaaagttttaaaaaaagtcagataggaattaataaaaatataattaataaaggaaaatggagaaagggaaaaacagtgaataaatacattgatagtcaattaaaaactacaagtacgctgaacagtgtacattgtttgtatatagttgtaaaatagtttctatatagttgtgcgactgtatataaaaacttgaacaattagaagaacatacaccttctgctgatacaaacatatagaataaacatattataaggattaatgtcaaatatcctaaaagtttaaaaccagatccagagtataaaactaaatat

SEQ ID NO: 152055 - DNA, 669 bp, Cannabis sativa
cacttaaatattaattattttcagaatatttaattagatagaaaattatatttacgttggaaattttaatttcagaacagcttaaattagaataattttcaaaatatattttctttaattttattaattatttttcaccaatttcgaaattgcattatttaaatgcagataatttaatatttttttaagaaaaatagattaaggttgaaaattaatttttaattaattttagatcaacttaaatcaaataaattttttatcaatgattaattaaaataaatggactaaaatatattatattagaaaataaagaaattagttagtgaaaatctagatagttattttctatttgcttgaagtatttttctagttatatttgattaaatagaaaattaatatttaagttgattttattcaagatatttaaatatttgataattttcttagaaatttaattaaataggaaaattatatttgtgttaaaaattaatttagtaattaattttggaccaacataaattataataattttttagcatttattttattttattttaggcaattttgagaatgtatttattttaaatacattgaattttcaaattttgctatatatatttatagaaaattaaatttgagttggagattaatttttaattaattttagat

SEQ ID NO: 152056 - DNA, 697 bp, Cannabis sativa
tcggcgtgagtagtaacttcggacaagccctgtccgagaaacttcgattatgaggtttgtctgtgccttggtcatggccgaggtgcactcagcctccgcgcgcgcacatgtgcaccaaatttaggatattttcattcaaacttcaaaaaatcataactaattcaataaaaattcaaattaagttctgtaaaagcctaaattcattaattttttatctacttttcaaaaaaataattccagaatgaaactaaaattatttatcatcgtaaaatcataatttccatacaataatcaaatatgcacataaactaacatgaacacatccaaatcatcacaaatattattttaaatccatatttcatgaaattaaatcattaccatggctctgaggccagtttttgaggattatattactgggatctaaatttactaccatgtatgttatttaacatcctaaatatgaatttctacaacaatagaatttgaacacatataaagttcaagaaaccttacatcggttgcagcatgattaaatgactccttccactcagatctctaacccttattcctttttgttgcagcgtattattaagacctgagcctgattctccttcaggtgttggattattcacagtcttacacactatgattgacttgctatgtgtgggcatgtactctatcactatatggctcaaaa

SEQ ID NO: 152057 - DNA, 550 bp, Cannabis sativa
agcgttgggctgtccttaggtgttcatagtatggttttatgaatgttatcctgcgatggtaaaactttttgcaaaagatttgcatccaggattccaagaattctgaattggaccaatgaggttgggaccaaaaatccaatttttagagacttgaaaggcaagatttttgatttgctgttgaacaaggtgatttttagtttctttattattttatctttggttttgtgtcagtttattattttttttttaattttttttgtttcatattttatttttttgttatcgtttttcagttaaagattaagaacattcgtccatttgatgaggagaggcagaagttgcaattggaagacttatttttagatgaatctattgatgatcgtggtaccactaagcaaacattcgagagtggttcatcttcgaaaaaatttgattcagaggaaatagaaatgttaaaatctatgttggaattggtcatttctaatcaagaatccttggccgaagattttatatctttgaggtgttttgttgaccttaatttcaagtctgt

SEQ ID NO: 152058 - DNA, 612 bp, Cannabis sativa
ttggtcaatatattgttaactatttagtcgtattttcttggtcactattttcttggaagaggcattggggcagggtaacattcatgggattaagctaagtaggggaggtccaattattatccacctgttttttgcagatgaccttatcctggtgggcagggctaatataaatgaagctaaaagtgtctggaattgtttggagaggttttgctcttggtctggccagaaagtgaataaactcaaaacgtcaatattctttagtaaaaacactcctgatggtataaggagagggatcaaggaagcattgggcattaattcaccggaaggtgctataaattacttggggttgcctcttttcagatctcgtcagaaggatgctgattttaactttattctggacaatctcacttctaaattgcagggatggaaggctaagactttgtcaaaggcaggtcgtgctaccctaattaagtcggtgggcctgtcgatgcctaaatatgccatgcaaaccacaaaactatctagtcatatggtctcgagggttgatggtttagtccgagatttttggcggggctttgaaaaaagaaatcatggtcttcattcaaaggcttg

SEQ ID NO: 152059 - DNA, 828 bp, Cannabis sativa
  modified_base (119)..(126): a, c, t, g, unknown or other
tacctcaagtactttgggttcatagaacaactgagaagacaacaatagggcatactccattcttgctggaatttggctcagaggccatgttgctagtagaagtcaatattgcgacccannnnnnnnatttctataatcaagaagaaaaccaagaactcttaaaattgtccttagatctacttgaagaaaaatgtactgagttgcaaatcactaatgcagcataccaacatcgagtgacaagatacttcaacaagaaagtgaagaagaagcttttcaatgtcggtgatttggtgctgaggcgagtgtttgtaaacacgagagatgcatatgcaggagtatttaacccaaactagggggtccttatgtgatcgaagcaatagtaggaaacgaggtttactaattagctcagcttaacggctcgctaataaagaaccattggaacgtggagcatttgcgaccctactaccagtaaactgatgctgtaatttctatttctgatgtaatatttggaacttcaattattaataaagttgaatcatttttcaagtaattacaaagttatattctttaaaatttcttgaggggcatatatatgtgtgtgtatgattaatcagaattcatctggaaatacatgatatattgcaaacccactacactttaaaatttttaaatttttaaagtttttgtttaagaacctttctcgcaagaaaggaaattcaaaggtattagttgtaaatgagatataactcataaaaataacattaagctacatgcaaagctgaatgctaacagctcgcattttgtaggaaattattaaacgagacacca

SEQ ID NO: 152060 - DNA, 539 bp, Cannabis sativa
  modified_base (320)..(323): a, c, t, g, unknown or other
caagcttactagccctataaataaagatgcatattcactaggcaagagatcggtcgaaaagcagttgagctaagactataccctaaatatattatctaagaattatatattcagaaaatttgttgtaagagttataagaaaaggaatctttcttcgtgatcttaagtcaatacatgtaacaaggattaggctattaccgaactgctcgggactgaacctctagaaaattcatgtgtctttatattgctttatcagatttttgttattataaatcacttatcgtttataaaatagacttggctaaaagcgaggtcaacatnnnngtgctttcattgagagaaggatcatgaatcgctctttattcaacatccaatcgcaaatacgatggtgcaaactcgtagaggcctgactgatccaccaaattcacaaatgctggatcctgcatcacaaaacccaggaaatacaagggttccgccagctgttaatcctggacagccggcgaacgtggggaatggtgtgacagttcctatagatgaaat

SEQ ID NO: 152061 - DNA, 564 bp, Cannabis sativa
ggtcctaggtctcaggtcccagtcctagtcaaggtctcggtctaggtctcgtctgagtttgggttttggtttcggttcggttctggtctcaggtctgggtcctagtcactgtttcagttctaattctgggactgggtttggttttcagtcagggtctaggtaaaggttggggtcggggtccgagtcttaatctgagtttgggtacaggtttttcggatcccaggctgggttcaggtttgagtttgggtcccaagttcgagtctgggtctacatttgggttctagtccttgtcccatgttttgatcccagtctgggtatgggtcggtattctgttctaggtctaagttcgtgtacatgtctaggtccaaatccaaatctcaatcaagggcttggtctgggtccgagatcaagtcccgagttcaagtttgggtttgggtttgagtctcaatcctagtctgggttcgggaccaggtccgggattgggtccaagcttgagttttggggctcggttatggtctagtttgggtccgagtccggagttccgatctaggtctgggttccaag

SEQ ID NO: 152062 - DNA, 885 bp, Cannabis sativa
  modified_base (350)..(350): a, c, t, g, unknown or other
aagaaaaaaataaaaaaaaaaatgaacataattaaatatattttgtgaaaaataaaaataattgaaactcggtctacttataaatttttggctgccaataacccatatttgaaaaaatctatagtactcctagggctatttggtagatagtctacatatgtacacctagggtcattggtgggctaggtttgcgcccagggtccacttattttaagggcctaaataaaaaaaaaaaaaaaaaggaaacttacaaaaatactgacttttggcccaatctttacaaaaatactgccacatgtcagaaattacttttatactgtcttggctatttttttttttcttttatactntaaacaccaaaaaaaaaaatgaggcatccatcttccacacctacggatagaaccaccacatgaacaccataacaatctgaaaacaaccattaattctggtgagattgagaaaaaaaaaagtgaaattgacgtcaaataaataatcatggcaaaacaactgtaaaacaacactaaaacaaatcaaacaaaagaaaggaaaatatgattaaaaaaactaaaaaatgttctacacaacctcaatacccattgcaatagcagttatctttgcaaacccaatcttaaaaaatcagaacaaaaaaactactaaaataacacaaatacaaatgtaaaacaataagcagatataaccacttagtaaaacataaaagagccacacacctcaaaaaaaaaatctagtgcgctcgtcaaatgtatttttaagagaacaaaaataaaaaaataagcacaaaataaccataaagaaggaagaagaaatatattttatagcctccatcttccacacccacagatagaaccatcacagcaccacgagaac

SEQ ID NO: 152063 - DNA, 594 bp, Cannabis sativa
cattcatacacaggttttacaagcctccaaactaatccaaagagttagcagaattaagcacacagttattttgcaatttcagagcacattacaataaacagcaaaacacaattatcttttagcttattgcccattcctaactaaaaacagaaaaaattaaagcagaaaattaaaagtgtagaaaattaaaaattttaaatcttccccccaaactaaatatcacattgtccccaatgtgtacaattaaatgcaaaggtgagagacttacctgagaccctttcaaaaagggttcggtggcgccggttgatcatacgaataaaaccgaggaggtggcgccaagtaattcgggttctcaatcccgatgttcattctattgatgagagcgttgagttgtttaacttgtccctcatcatggatactcctctgcaccatataattttgcatgtgattactctgctgaattatgtaactcagctgtgcatgagtatactgcattgccggatcaataggcccaagcagttgtgggggcttgtcctcctcttcctctacactaggctctcttcgccgccttcggccttgttgttgctcatcagc

SEQ ID NO: 152064 - DNA, 574 bp, Cannabis sativa
  modified_base (351)..(353): a, c, t, g, unknown or other
cccaatgtaaggttttcttaaactcttatgtgtttatttccattgttttagaattcgtattaggatgttaataaaacatacttggtagtaaatatagatcctggtaaaatatttccaacaatattgccttccccaccatatcaccatctgtggtgttgtcatcagtggtgatcataaggtcatgtcttatcttggaattcaatccatccatttatttttctttcttgctgaaatttgttggcactattcctcaggtcaatcttgccaatcgatcaaactgagttgtgtattctgtaacactcatattatttttctaggtcagctgagtaaattcctttctttttgcacttnnnactgcttcattatagtacttcgcattgaacaactcttagaacttttcccaagtcatagtggtaacatcacaagttaggggcaccatgtcgcaccaaactagagaatcttcttgaaactgaaatgtagcacaggccactctgtcattgccggtgacacccatgaaattcaaaatttttgtaataacagtcagccactactcgactttcattacattgggacc

SEQ ID NO: 152065 - DNA, 568 bp, Cannabis sativa
aatctgataatcttgtattgtatcccctaatcaggcaagcccgtgccatagcgtggcacccatatgttgcatagctacatcacctaatcaggtgagcctgtaccaaaaacctgcacccatatatcatctaattgcatcacctaatcaggtgagcctgtgccataatctggcaccaataacgtatcgtcttatcagacgaccctgtacctatgcccggtacttatcatatgtcactaatgcccatacctatgctcgatacatcgccaggaaaatcgcatcacctaatcaggtgagctcatacctacgctcgttactcatcatatatcaccgacgcccgtacttatgcttagtacgtcgccaggaaaatcgcatcacctaatcaggtgagcttgtacctacgctcggtactcatcatatatcagtgaccccatacttacacccagtaagtcgccaggaaaatcgcatgacctaattaggtgagctcgtacgtacgcttggtactcatcatatatcattgatgcccgtacttacgcccagtacgtcaccaggaaaatcgcatcacctaatc

SEQ ID NO: 152066 - DNA, 516 bp, Cannabis sativa
ctttagtttttgaatagaattattccgtcttcgagcggttgctttggcgtggaaaaatttagagttttgatcaccttccctaagccacagttgtttactcctttgtttccaaaaaatttcccgctgcaacaacacattatttagcttgacttgagccactttataattgttcgtagcttctgaatctctcccctttttccaatgccgaacctcagttttacactccttgattctctctttaaagttacccgaatagtctttgccccattcaatgagaacatctccacagcctttgatcttttccataatcgggcacccttcaaattgtctccatgtatcctcaaccaccttataacaaaggggctctttcaaccaacaattctcaaaacgaaaaactttggtagttacaactgtatgacttgaaatagccggcattaagagcaaaggacaatgatctgaggttgaaacttccaagttgtaaagcttaaccgaaggaaacaaactcaaccacctttg

SEQ ID NO: 152067 - DNA, 807 bp, Cannabis sativa
gaaacacaatattgatgtgatgcatgttgagaagaatgtgtgtgacagtctgttgggcacaatcttggacaacgataaatcaaaggacacaactaacgtgagacaagatttgaagaaattaggataaagggaatggatgtggatttatgaagacgacaatggtaagttgatgaagccacacgccccttacgttctcaaagttgatgaaaaattaaaattttatcaatttatcaaaaacgtgaagtttcccaatggattttactcaaatttgaagaagaaagtgaacaatgatttatcaaatattcttggattgaaatctcacgattgtcatgtaattatacaaagattattggcagttggtgtccgcaagtttctcccaaaaaatatatcgacaactattgctgaattatgcaacttttttaggcaagtatgttcaagaactataaatattaaagatatggaggaagcacaaaaggaccttggagttgattttcctttattaatcaatatttggtcttattctaaatagtcttatttaacatttaacatagtgatgttatatgacttaaaatgaacacttagaagagataaagcttcaatacccagatggagatcataacgtcttacacaaaaagaatttcaagcgatggtttcataagaaggtgatatgagactctcagttaagatttgaaaattatcatgattacttatgagtcattctatgataattttgctcatttagatatatgatttacacaagcttggatcattggagaatggtgaagagttgctagctttagcatgtgg

SEQ ID NO: 152068 - DNA, 545 bp, Cannabis sativa
tattaaaattatacaatccaatccaatacaatacaacccaatacattataatacaatacaatacggcgtaccaaacgagccctgagtgtttagctttggattgtattcccttagtaatataattacccttgaggagggtaatgttgatactttaaaaaatggtaggattgaatcattaccttccattatattaatttaaatagcatttttgaattaataaataaatttaaataccaataatattatcatttattataaataaaatattaccatatatatatatagtttgtgaaatcagttttttttaactgagttatttttatattattggcaataagctaattatgattttttttccccgaactttgacatgtaccatatcatgccccctgaactttttttaccgttaaaaattttccctaaagtatatattgagataattgttatatttaaggactattgtctaattttagttaaaaaattctaacatggataaaagtttaggggacatgattttgtacatatcaaagtttgaggggcaagat

SEQ ID NO: 152069 - DNA, 942 bp, Cannabis sativa
  modified_base (473)..(474): a, c, t, g, unknown or other
taaaggagttcgagaacacatttcaaagatgagggatatcactgcccatttaaagaagctcgatgttatcaatcctgataccatcctggtgcattgatccttcacaatcttcctccacagtataggcctttcaaaatttcctacaactaacataaggaaaaatggagcatcaatgaattgatgaccgtgtgtgcttaagaggaagccaggatcctacaagagcaaggagaaagtgctcacctgaccactcaacctaagaaacacaaaccattcaagaagaacaagggaaaaaagcccatgactccccgagctgccataaataaggactccatcaaatgtttcttttgtaaataaaagagacatgagaaaaaggagtgtagccatattaagaaatggatggacgacaaaggtaatccgatttccttagtattttatgaatctaatatggctaatgttaatcttaacacatggtnnattgattccagttcaacaattcacttaataaattctttgcaggatattaaaaacctaaggtagctagtggcaagtgaacaaagcatctaatctagaaaaaaaaaatgggctcacgagtggaagctattggaacatgcaatttagttttaagtattggttttattttaaagttagaaaagactttctatgtaccaagtttctctagaaacttaatttcagtttgaggtcttgtactctttggtttttcctttacattttttcaaaaaaaatattttaatttatataataaatctcaatgtgttggaaatggtattttgtctgatggtctttactgcattaatttacaaaataatactactaacaatgttagccatgttcatgctagcactaaacgatgtgttatgaaagaggattcctgtacattatggcaccggagattgggacatatctccattgatagaattaaaa

SEQ ID NO: 152070 - DNA, 984 bp, Cannabis sativa
tcttatgctagatggatgccctaatcacataacgaaaccgggtaaatcacatgatccaaaaccctaatctgagaaacccgaacccacaaccctaggttctgttatactctcaatggattactctaactcagcaaatagggaaacacccaactacgacactaaaatggactagaattgagaaagtggagcattcgggaaccctgcacaaaccggctagccagttttacaggtactggtaaaaccgactagcatgttcacaccagctcacccttaaattccgattttttactcaatcctccaccaaatgcaaaccatacattccagaacacctatacaatgcataaaaaacataatccaaccagtatttcccagaaaaactcaatataaacaaacatgccattagagatcaaagttaaggtttcaacgctcaaacatgcacaaaacctaatccaaacataaaaaacaagctgctagaaactaagttcaactcaaatgaaccctataattcgaaccacacaaaaactaaaccctaacagcccctaatttccaaaatacctaatcaaaccaaagtaaaagcttcaaaaacacaagtctatggattctagggttaccttagcttgaatcccacttgaatttcttcctaaaacaccaaagatcagcagcaactcccctggttttttactggttcgaagatagaaagaaggaaagacagagcttctcttgattttggtttattcatcttattttcttttaatttctctaaatgaaaagagtatattctctaacttaatcttgctgaattaacttgctaggtgtcacccaataaggtagccaccaaatcattccttagggcaattactaaaatgccctctcacttaaactagggtattttcaaaactaggggtaaaatggtcaaattccataaacccgctcaacctcaatattttattttctccaatatttttcccactaaaaaataaggtt

SEQ ID NO: 152071 - DNA, 541 bp, Cannabis sativa
acttgtacacgtggcaaatttttaaaggtcaacgtaatattaattttaaaacattttaaaaataatttaaaaataaaaaaaaaacaatttataaaaataaaaataaaaaatctttttttctctctctttctctttctctttcttcttgacagacaccaccactacccctccctaacccttattcacaaaaccaaaaaaatttcaggagcttgtaatattacaagcaataaaatgcataaacaatcttagatccagaacaaaacaaaagaaaaaaccaaaataagaaaatcaataaactaaaagaatagaaatagaaaagaaatgatgaatagatctgaactcgtgggtctaagatctgagagtttaggagccagttcagatggagctcgaacagtggaggagctcgattcgtcgcggaggaaagggatggacgaagcaagagagagaggaggagggggacggagtgagagagagcggaggctcgactatgtctggatgagagagggggagagagatggagagagagagagggagagtgtgt

SEQ ID NO: 152072 - DNA, 555 bp, Cannabis sativa
  modified_base (520)..(530): a, c, t, g, unknown or other
cacagaatactaaactcacattccatacattaacatatagtttgaatccattgacagaaaatggatattaaacacttaaatttaaaatttctattgtattctggaaacagatttataaaatttctatttagaatctaaaatttaaagttaaagacttaaatttaaccaaatattaaatgagttttattctagcttggaccaccagtactaatctaactctaagtataattttcctatagtaagcatatacaagtagaagatttctaagatcgggaacgtagtcatctgcgccattaaatttcataaaagaaaatagaatgacatcataagcagattatttataaaccattcatccaatgatatattatcatagcacattcgaaatgaaaaagctaagaggaaaaataaaggattatttcgattaaaataggaatacaacaatgtcccgataggcgagagtcaaagttattcttattttacagggagtttacaactacaattaataatagaaaataacatnnnnnnnnnnnaattcatacacaattcagaaattat

SEQ ID NO: 152073 - DNA, 845 bp, Cannabis sativa
  modified_base (685)..(687): a, c, t, g, unknown or other
  modified_base (793)..(819): a, c, t, g, unknown or other
tttgaaatatttcaaaaatttagaaatatttcaaaaatttacaaggaaaaatttacaaggatgatactaatttacaaggatgatactgtaactataacgaataccgctatgaaaagaaatatttcggcatgtgatttgagacgtggaggttgactaagaggttataataagacgttgtaattagcatttctcttcctaaaataggtgtactgatacctatatctgattcaaaatttaaaagagaattttttaactaatttttctttcatggttgtatatgttgtagttgtttaaaatattttataaaattttaagatatttagaaaaatttaacattccgaatatatacagagttcaaacaatttctttggaaatgtttcacacattgtttgaatagtactttaatttatgttactacatgcaatatggtatattgatttatgttttaataatttatagtattattgtgatcatttaattgattggtagttttatttagattattaattagatataataattgtgatgattttagtatattaatataataacaaaaagaatattttattttatttaaaaaaatttaagattaaaaaaatattgtttagtaaaatttttagtgttgtggttggaggcttggagcacactacaaaaaatcttacttagtcacaataaaatttgtgannnaaagtaaaaaagttgtgattaattataaatcatcattcttatgttgtgactacaaagtctgtcgctaaatactatgttttggtcacaagtaacattttgttgtgannnnnnnnnnnnnnnnnnnnnnnnnnnattatattgtgactaaaaagttttca

SEQ ID NO: 152074 - DNA, 506 bp, Cannabis sativa
ggatttatattagttcacccccatgttgcgatgaaaatggggttatgtctacttttatttttattgattagattcgacacagtagagttatgttgttaagagtgtgtagataaaattacaacaaatgatttctaagtgaaattttaattgagacttatgaatataagactcatgggagatttcatatttattattcatatttattattctaatcaaagtgggtggttgcatacattgccacatgggttgtggcagtgttttccaacaccttttacttaaccacgttactcaattctcgagtaaaatgtactaccttttgagccaattgtggatctgataacttcagaatttggctatgattacgaggtacatttagatctgtcttgaaattatctttccaatgcaagtgatataagtcatttggataaaaattgagagagttatgcccaatttattgaagacagtttatgctatcttgtaccaattgcgagcactggcatgccaaa

SEQ ID NO: 152075 - DNA, 560 bp, Cannabis sativa
aaattaatcaaccacccataaacaaaaatattttgggtgaattattatgtcataaaaagaatattatttataacctacatggatgatgcttacatcatttataaactggaacatttagttccatatatttttgtagttattttctaaacaaaatagaaaaaattcataaaattttaaaaatagaataaaaaaaatctaagataccacctaaacttattttgtgctttactttatattatatatgaatttatatttttctttacatattaagaaaaaaaataatgtttagtttcatttaaaataatttagtttgaatattttttttggactaataaaaatataaattatatataaaaatcttaaaaaaataataaatcttaaataaattgtatattattattatatattacatcaactataaaaaacttataaaacaattatttattaaataattacttttaaaaatataaataatgaaatgtatattagatgaaagataaaaaagacattaaaaataaaataataaaaactcataatgtaagaaattaatcaaccaccca

SEQ ID NO: 152076 - DNA, 878 bp, Cannabis sativa
acactgccagtttctttcttcattactgagactagggaatggaatatatctttgttaaaggctcattttggggacattgatgtggacagaatcttgactatccctttgagtttttttccaactcaagataggctaatatggcattacactactgctggaatttacacagttaagtcgggtttccatctggcttcggatttgaatgataaagagattgattctgcttctaactcacatcatgaatggtggaaatttttttggaatctcaaattgccttcaaagattaaaatctttgcttggagagtgatacataatgctataccggttgcaactgctctgtttcaaaaaaaggttctgaattcagccacttgttccttgtgtacacaagcttgggaatcaattgggcacgccttgttctgctgtaggcatgctaaggatgtgtggaaacaatttcatttccctattgattatgcaaaggcacttcatttggtaaatggtgattatcttttccatatagctactttgctaactcaggaagaatttgaaatgttgatttgcattatgtgggtgatatggactgatcgtaataagattatccatggagatagaaataaggatgctactgctttggctttacatgctacaacatatatgaataattatattaaagctaacagcaatccagttcctactgctactctatatcctcctacagttgccaacacttcacaacctgttgcaactttctgcaactgctgctgcaatgaagactcgcccaaaggaaggagtcccatggaagccacctttactaaacaagctgaaacttaatgtcgatgccgcaattaatacagcagacaaaattcttggcattggagcaa

SEQ ID NO: 152077 - DNA, 657 bp, Cannabis sativa
aaaatatatatatataaaataatgtccggtaaagttggactacaaaagagtttctattatgggctccattattatgtctattaatggtggactagaaatgtttttctagtccaattatttttgactagaaaaataccttttttatgtccctggatattatgtccacaaaagggactccaaagacttatctagtccaactttgatagacttaaaatgaggtttttgttccagaagctttttggggcacagaatccgaagggttactatggctaagaattttcttgaataaattgaggaacgatttgctaaaaatgataaggttgaaatgacaaaacttcttggttatttaatgaacatgaagtataagggtcaagaaaatgtaagggagtatattatggaattgcatcatattgtctcaagattaaggacacttaagattgtgctttcagatgatatacttgtactcatagttttgttaacgcttcctccacagtttaaccaatttaaaattagttacaactatcaaaaggagaaacggactctcaacgagctcatttcccattgtgtgcaagaggaagaaaggttgaaaaaggacaaaattgaaagtgcgcacttggccactactaaggataagggcaagaaaaggaaatttgagaa

SEQ ID NO: 152078 - DNA, 1076 bp, Cannabis sativa
  modified_base (967)..(986): a, c, t, g, unknown or other
  modified_base (1034)..(1037): a, c, t, g, unknown or other
tttacccttgttcttattagctaaggatttcaaactcattttagagcttttcttttgataggggaaggagatgttgaataacgggtaacagccatatatatacggattgagaaaaaaaatagaaagagggaaacggttaggggattcggttactgggatttgaaaaaaaaaaatttgaagaacacgaataggagggaaaatggaggtgggatcgtggagagggaagtttcagcaatggaggttactaaatttcaaaaaaaaaaaagaaaagaaatgcaaaataaaaggaaaaagaagaaaaaaagagagggataagatggatggttgattgataggggtcataggtcatgcacgtgtactcatgcatggaatgagtgtgcatgtggtaaaatagtaataaaataaagaagaagagtaaaaaagttgatatagccgtgtagtggtattagtgtaataaagattgcattttgtatttttaatgtaaaaatttctataaaatttgagctcaaataattaccagtgtaataaaaaaaaattgtaaactttttttcaaaactcaaaaagagaaagagttattttttaatattaaaaaaattatgaatatagtgtaaaaaaaaattatgagtatactatacaatgtggtgtatatatattgttttaaacctactacttcctctttggtgaaggctactgtttcagtggaatgaaatgatattgaatgcttactggagagagaaaacgatttagaaaaagaaaaaaaagttaatattgaatgcttaataattttttttacaggaatagaaagcaaataaaagctattcttatttgaatgtataccggaaactaatttaaacaaactaatattgagtatatatctaaattaattaagtcagcatgtatccctaaataaaatgcaattaacgtgtttttgtgtaattaatcctagtataattgagtgggagcgctnnnnnnnnnnnnnnnnnnnntagcttctataagtatttaaaagtaaaacaatgatttccttcgagctnnnntgaatagagataaatgattgacatctcatttcagtaatt

SEQ ID NO: 152079 - DNA, 597 bp, Cannabis sativa
  modified_base (226)..(226): a, c, t, g, unknown or other
  modified_base (457)..(465): a, c, t, g, unknown or other
ggagcctggttgagaggagggcccaggccgctgccgggaggcccctccgtattggaagtctggtggagaggagggcccctagaccaaggcctactatccaggtgccgaatacgggggctcccgatgccagcacttctagttctggtaagtcccctttgacgatacattacgtctctcttgctcatgaatatgctagccttaggcctatagggttcgatgaacgtcnccttaggtttaggatgccctctactcggtggggggatcatgcgaaggagtattacttctccaacttaggtgattatttaggccggtcccagatgggtcctagacctctggtgcctgttcccttggatccctcagcctacttgtcttccagctggttccgtccctcggacagctatctcagggatgatgcagccagtgttaagattcgcgactttgctagggccgaattagnnnnnnnnngtaggactagcttgattgctttttaagtgttcactactttcgttgatgtcctaacacttgaccttttttctctcgttgcagcagctgatcccatggaggcgattttggccacccttgctggagcccacagtc

SEQ ID NO: 152080 - DNA, 925 bp, Cannabis sativa
  modified_base (175)..(177): a, c, t, g, unknown or other
  modified_base (826)..(832): a, c, t, g, unknown or other
aatcttgttaatttgttgttgattttttgttatatgtatgttattttttgttcttattttcatgttacttttatttagttttcttataaattttatgttgttttggtgatattttttaaaaaaccgtaaaaatatataaaaaaaaatatatattctttaaacgtaaaaatgtaannnttttacaaaaaatggtgtcttatgtaattattcttattttttaacatatattcacttttatatgatgtgttgtaccctttaagttaatataaattatgtgctaaatttaatagagagggtgagaatatattaagcaatatcctcttataaaaataatgagtatattttaataaaatgtaatataaaagtatttttaattaatggataaaaaatattcttcaacttatcctacttatattaagcatttatttctctattgcgatttggcgtctcacctttagagatcttcccctttagctaggagttacgcctgttgtggaatctagggcccgtatgtgggactgggttaccttttttggaaccttaggaccagaggagtggatacagatggcttatttctttatgcttctatcgtggttgacacgatttggagggctcgaaatgacaaggttcataaaaacaatatgggtagcttgaaacattatattgactctatatattattgttacgcagattatggatccagtttgctcaagtcttgacaggttgatgatactctgggttggtccccctcgcctgaggattgagtcaagatcaacagcgatgtcagagtcagggtggaaaccatgtgtgtggtggcaattgccannnnnnntacggaatcgattttgtgggtggcaactaacaagcttcacttcactaaccctcttatcggggaagcggcggcttgtatgttagctttggagac

SEQ ID NO: 152081 - DNA, 730 bp, Cannabis sativa
ttaaaatttaagtgtaaatttttttttaactggttttttttttaaattttttgattgtatgttttgttatatgtttttaactatttttcaagtttttgattgtttttttaacccgtttttttctgttatgttttgttatttgtgactttcattatttttttactgttttctgcaaaagtaatattatattattaaatttttgtatttggaaccgattatttttaaattctatttagagaatcaatgttataggtgagtttttaactgatttttaagttttaactggtttttttttttatgttatatatatatttttgtatctgttttaattttgttttcttgtagcattgttaaatgtaatgtcttgttagaatctgattttatttttgtatttggaaccggtttcatttaatttttatgttttattgtctaagttagttttttaactagttattttggttctggtgtatttttgttttgcctgttacgtatgtgattcatacggttgaccttaattttgtatattgttttaaccagttatttttttatatatatgttcatcaaattgccgtgttttattttttttccagatgacatatgtatatttctttataactgtaatgtttatattcctgtaatgtttatatacctgttaagttttatactgagatttcttgtgttgctgtgtttatttctgtttgatgtttcattttctggttttcgattttta

SEQ ID NO: 152082 - DNA, 832 bp, Cannabis sativa
  modified_base (526)..(530): a, c, t, g, unknown or other
  modified_base (798)..(802): a, c, t, g, unknown or other
ttttctttttttttttttaactttccccaaaaaaaaaaaaaaaaagaaaataaatgtgtacttttggtaatagttactagccggcaacatccaattcaataaaatggaacatatccaatccaatccaattacaaaaacttggatattcaattactattggattggattggatgctaaaagttagattctaattggattgaatcggtaattggatgtcaatttcaaaatccaattaaaaattatccaatctaattacatttatatatattaaaaaaaatatttatatttatttatataataaaaaatatattatataattaattatatttttattaaattttatttttgtgtcaaatgtgtaactattggttgttttttgtatttattttcatggtattttgttctattttattaattagaaatgttatttttttttttaattatttgaaatgtttagttgcattacattgtaatgatggtatatttatggagtattaaacttaaataaaatgtgatatttaatttnnnnntatttttcttcatatttttatgttaatattaaaatttaggtctgtaattagatatccaattacaaaaccgatccaattggattggattggatcgaatgatgattttccaaatccaattactaattgaattggattggatgagaaaaaaaagattggattagatcggatgtccacccctagtagttagagttgtataccattagaatatttttatgagagacactatatatatatatgggtgactatttaatggttacatttttattgnnnnnatatggttacatttttctttaacctgtaat

SEQ ID NO: 152083 - DNA, 513 bp, Cannabis sativa
  modified_base (235)..(237): a, c, t, g, unknown or other
gaagaataagtggttgaaataaagtgacaaaattgtaaatagtgaggcttattagtatggtcgcccacttagtgtgatttttgcctattattttattcttttttaatccatataattaaatcataacccctagttgaaatactataaaatgaacatgatgttctcattctcatccaacactttcaacctaccaaatctagttttcattctctatcaactagtagatgagagactnnnttctatagtgatttcacaccttattcattgttcttcaccaattcaagtcatagtgatatagtactatgcccacacatagcaagtcaagtactcaatcatagtgcgaaaagtggtggtaaccaaacctgaaggagagaaagagatctaggctcagatcttgttattactctgtaatataaaggaacaaggatcagagatctgagcagaaggagtcatattattttgttgccatcaatgtaaggttttctaaattcttatgtgtttaatttcatcgta

SEQ ID NO: 152084 - DNA, 751 bp, Cannabis sativa
ttcgtcctcgaaatttaactttccaagcactcagggtattgtgtctcctacctaccacatacctcctcttctaccacatgaacccaataatcatgtatgtaacgtttgtgttatcggtaaaatgatatcgcatttaatacactcctttatttaaaaattgttattctactatactttacttaataacaaaacatgctcctacaattgcatgctcgtaatattataaaagttttccttctcttatgaacatccttacatgccataagagtaaaactatttattctcctctgaacatccttacatgtcacttgagaacacattatgcaacacaaaaaaaaaaaagaaaaaaaattaaatactattttaatcttgatattacaattgattcaagcttaaaaataaaaatgccaggtgaagattcatgagagagaggccgaagctgcgtggtgccgactgcggagagaagaggagctgtgtggtgcggactggagagaaggaagaggagctgggtggtagagaaatggagagagatcgattgcgggtgagaagcacagagagagagagaggtgaacggcggggtttaggagaagcttgtagagaaggcaaaaggcagtagcggttgtcgagaaaggatttggtcaccggagatcgcactgattggtggtcagagagagagagaagtaaggagagaggcagcgactgcgcggtgtggccttcagtttcagtccgattggagagagagagagagaga

SEQ ID NO: 152085 - DNA, 618 bp, Cannabis sativa
atattagtttagaataaaatattaagtatagaaaatcaaatttttcttattttattttattatgtgcgcaattaatagactactgtttattacacttgttacaataattaataaataaaaataaaacaaagtaatagttataatatcaatataggattccttacttatggtttttattattttcttgtattcatctcatttgtttatatatgtatgcttggaatctttggatatggttgaaaattaggcacaagactagttacatggcatgttctaacttcttaatacaaagtttcattattgttgttgttggatttttttcttttaagaaaatatatttttttcaagagattcattattgggaacatgtgtttttgtatataccaatttattttttaataactgtgcagtaacaaagaaaaaatagaaataaattgtgcaaatttaaaacttgacacaagagaattatatgtggtatcattattctttcaagcattactaattcactctagagaatgaaataaattaataaagttagggatgttcattggatcacatccaatggatttggactcatccgatccaatccaattattattggatattagattttgtcat

SEQ ID NO: 152086 - DNA, 638 bp, Cannabis sativa
aggaggcaaaaaactagtttttcaatcactggatatcgtgtctccgcccctatcatgcgcttggtgacatagtacacggagtgtttggttttttcctcttcccggatgaaggttgcgctaaccgcattctctgagagggctaagtataataacaagtcctctccaagaacgggttttgacaggatcagaggtttggtcatgtgttcttttaattttctgaatgcctcctcgcattcgtcagcccattcaaatttttggcatttcttcagaatgttgaagaagggaatgcatttgtctatggatcgggagatgaaccggctcagggcagcaacctttccggttaagctttgcacgtctttgcgtttctttggaaaaggcatgttcaggagggcttgaattttttccgagtttgcctctatcccccattgtctgacgataaatcccagaaactttcctgatttaaccccaaaaatgcacttcttcgggttaagtttcattccatatctccggaccacttcaaagcattccttgaggtcgtctgcatgacatgcacatgcctttgatttgacaaacatgtggtccatgtacacttccatgtttcgtcccagaaggcctttaaacatccagttaaccattct

SEQ ID NO: 152087 - DNA, 581 bp, Cannabis sativa
  modified_base (26)..(28): a, c, t, g, unknown or other
tcagcgataggtattcttacaccttnnntaagtgttatgtcctttccagggacaccagctcccaccacacgagagcatcttcctggaactgaaatgtggtgcaggtcactcggtcatttccaaccacccccatgaaattcaaaattcgctctatcacagtgagccattgctcatccttcatcacatcaggacctcccaagaacactggaggtgcttccttacggaacctctcgtataacaactccatacggttgccagcaacaggttgttctgcttacactgctggagctacaacagtctgatcttgttgtggaggcattacaggaggaccctgctaccttaatctcagaatttattcatcttgttggcggatacgatcttgtatctccacaaacctctgctcccaatctggaggagcttgtggtggattcacaggatgaccaccctgaattctgccatggcctcgactgcgaccacagggattctgggaaatttgatttccctaactgcctccggtcttaaccatattacctgacttcttgtatttcgctgagcgtccatttaataggacttagcctgcg

SEQ ID NO: 152088 - DNA, 771 bp, Cannabis sativa
  modified_base (677)..(677): a, c, t, g, unknown or other
taaataatttccaaggtttccaataaactaatatagtgtctcggtcagcgagagctaaagatatcattcattgaatagagtagtccactcatctaaaatggacaccgttctagaaaccttttattcaatcaaaataagaattcaccatcgtcccattaggcgagagtgaaggttattcttattttatgagcttccactattgtttcatactttgtaaatttatctttaagtagtcaccgtagaggaaagtctaatagagacaaaaacttacaaaatacttatctttcaagatctttatggtgttaaatgttcaatgtaagaccatccataagggagacgaagtgtagcatctcgaggtcccattgaaatgttaaccatgtaagaccaataatggagatcaaatatccttataactaaagctcattattttaaagaatgtattttcttttgatacttattttaatccatatattttaacatatatatttatttatttaaaattaataatttagataaatcaaaatatatagtttaatctaatatttaataaattatactttaggaagatttgaaaaaaatattttccatccttagttttaatttttcaataaatattataaaaattacttaatttaatttggtccaaaattaattaaataattaattttcaactcaantttaattttctataaatatatacctataattgaattgaaatctaatgtatttaaagtaatacattttcaaaattcattaaaataaattaaaata

SEQ ID NO: 152089 - DNA, 687 bp, Cannabis sativa
aaaaaatttttgtaaaaattaacccaaattcgagtatttttgtaagtttcccaaagaataattgttgtttttccaataataggaagtgggctcttcatatggcaaaaggtagcatggatatgcgacaataatcattgaaagcagaggcaacgaactaatataatttccctatttcaaaaaatatataatttccctaaacgacaggaaaaacacaaaaacgacgattactgacagcatcacaccaaactaggggtgttcattagatcacatccaatatttttaagcctatccagatccgatccaatcatatattggatgttagattttaccatcaaatccgatccaatcaatttaagtcatccaatcgatacaatatccattggatgttggattgcatcggttctatccattagatggattatatatatatttatttgtttaatttgggtttatccaatattttagacctagtattttttggaccggatcggattcatccaatatttttgatccagtatgtattggattggtctggatccatccaatccataaaaaaagagttaaattttaatattaattttcatatatacatatagatttaacgtataacaatataaaatctaattactcagccaatctaaatgaaaatactaattagttcgattggatgttggatgtatttgattt

SEQ ID NO: 152090 - DNA, 625 bp, Cannabis sativa
taaccacttaaaaaaaatataaaataaccacacccttcaatttttttttactaatgagcttgtcaaatgtatttataggagaatcagaataaaaaacactaaacaattatacagaaggaagaagaaatatatttatagcctccatctaccacacacgcgtataatatcatcacatcaacatgagaacacttggaaaacaaccattaattctggcgagatggagcaagaacaatggaattgacgtcaaataaataaatcatggcaaaacaacggtaccgtaaaacaacactaaaacatataaaaaaaacaaaagaaaagaaaaaatgactaaaaaaaataactatcttctgcacagcctcaacaccaaatgcaacagtagctatatttgcaagaacagatttaaaaaatcaaaataaaaaaaaaacccacgctcttatttccccccaaaaatgtgactaaaaattagaaaaactaaaaaaaatgagaagaagatgatgaagaagaactgaacaagaaataaaataaaaaatttatatgttaatggagagagtaaggaacttaagaagaagatagtgagaaaaaagatgataagtgtatggattttgaaaaaaaaaaagagagaaag

SEQ ID NO: 152091 - DNA, 587 bp, Cannabis sativa
catggagagtggaactgctataaattttatgtatccatctaaattatttatttaaacttattaatcatctcgccaatctagcgagatgatgttggtcactttttagcatcaatactaagattgtcaaaattgatgcctatctggtagttttaagagaaaggggctcagttcacgtcatcaagtcaactccacacaagtgtaaagttgacttgggaggcaaatgttaacccaaaaactttccctggtcacttggatatcaatgtttgacacatggcaagaaagatgacatcacgaagttgagtagacttgagtcatagcaagtcgacctaggaagggtccctagccttgcgcccaggttgactttaggaactccaggatggatgtttagacatcaataatttgtttctaactcactaccttttagtattttatacaatgaagacatggagcaatcaattccaggccttgagagctgaaattacattaacctccaccctgaaagtcaacctcggcatctacggtttcactagtgtccaagttggaatcctaacaagggcttcagtttccagggccttcttagtgaaaat

SEQ ID NO: 152092 - DNA, 523 bp, Cannabis sativa
ctctccacaaccaccacgaccacatatccaatgagcgtcgcaaacccaatgacttctccattaaccacgacttcaccatcggtaatgttatcaaatgaataaattgtatgattaatgtttgttatctgtgagtagatgttagatttagggtcgaaaaacgaccagatctgagttttgggcaaaaaaatagtttttttgccaggcccgatagtggcccgatgccttcctattgttaaaatgagtaaatgttgaagaaaaggttcgatggtggtctaatggtagcccgatgatatggtctgatagtggtcccatgctttcctattgttaaaatgattaaaggttgtagacgaatgtgcgatagtggcccaatgctatagtccgatagttgttcgatggtagtccaatggtggctcgatgccttctaacttaatgaatagagcttaatatctatatatgtagaatatggtttgatggtagtccgatagtggcctgatgctacttttttttttatgtacaaaaacat

SEQ ID NO: 152093 - DNA, 664 bp, Cannabis sativa
  modified_base (161)..(171): a, c, t, g, unknown or other
  modified_base (613)..(620): a, c, t, g, unknown or other
tatatagaatagatatatagattgattttgattaagtattagattaattaagatttaatgtgattaaaaatgtgaaaaaatgagaaaaatattagattagaataaagctaatttagactgtcacgtcaccgtctcattcctctcttttatatatatatatnnnnnnnnnnntatatatatatatactagtaaacaggccgagcttcgcgtgcggctatttatagaaattttaaattatatttatgaataatataaaagtatatatttatttaaaaaataaatttatataaagaactctaaaaaaagtttcaaaattcttcataaaatttctcatatacaaaataaaacacataaaaaatatattcaaatatatattatagtgacaaactattgaaaattaaacaatactcacacaaaatatagatctaaaatataaacaaaataataaatctatagaaaactcatcatataactttaaaataagtgttatcatcgtttcttacttgtagtcactactatatttaaaattgatgtcattaccgtatatcacttgtaatcatcattagtattcttcctattactcagttttatagctttattattattattattnnnnnnnntattattattattattatcgaaactaaccaattttaaaattatt

SEQ ID NO: 152094 - DNA, 737 bp, Cannabis sativa
aaaaaaaaaaaaaaaaaacagaaagaaagtagtttttaaaaacataaataaaaaaatcttaaaatttctattatttattttttattttaattttaattaaatgaaatattattattaataatcttttgttaataataaattatatgtataatcacaattttaaatttgaaaatattagactgaatctaattatttggttatgaaggttagactaaccctatatttatcaaaagaataaaaattgtgtcgttatttagcaattaattcatttaacttaatatatgactcgaaatacaagagaaatatatcaggatgatgaaacactttacaatctctccacactattctatttattttctattattttaattctaattttttaaaatatatatttaatttttcaattttaatttataatatttgataatatgtttatttaaatttcatatcataatttctataagaaataaactatttaaggaaataatttaatcaaataatataaaactaaaaaaattgttttatagaaatctattatattttattagtacctaaggtttttttttttgttataaatttttcaaacgtttttttttctttataacaatcttttagatataaacttagtccctaattaaaagttaatttaaaaaaataataaaaatatctcaaattaaatctaataaaattgataaaaaaaataaaaaattcttaaaaaaatttaaaatcctaactct

SEQ ID NO: 152095 - DNA, 808 bp, Cannabis sativa
acatttaccccaaagccttgtttggtgtgaagcaaacgaggcttgcttaggtgcctccggctgtctcattgatttcctggcacgtgcttcggacgcgtgggctaaatttatgacagtcatcattaaaatttattgctttttgcaagcaacgattcgtttcccgtccattgatgatccgacgcatttaatgggtgtcagacaaatactcaagcatttccagccgcccttgaagagcattcatcccaaccgttagatctgcagaatactaatcgattcgattcccaccgttcgatgacgcctgatcacagttgctttgcacccattctggcctataaaagccaacattttcccttcatttggttactttcactactttgccattttttcacaagagcccatttgagagaaaaaatttcagacaccatagatttcttgttgctcttccttcgccgttgccagtccaccctatatcgtcgaccgacgctgaccccccagctctcaactttcatgtaagttctttggacacttcaagctttttatcgtctgtttgcatgttaggatagaactttttggttgagtgttggatttctgggaaataactttgactgagtctgttgtgtaatgtgtagaatcttctttatttgtgtttttgttatattcctccatttttctttagaatcgaaccttctgttcgaaagactgtttagggcatggggcgattttttctcccacattctgcgttttttatttttcgtccactttcactacctttgatttttgcacccgatgtttgctaaggaaagtcctt

SEQ ID NO: 152096 - DNA, 569 bp, Cannabis sativa
  modified_base (37)..(56): a, c, t, g, unknown or other
atcaccagcaaacttagacagccgatcaaactccagnnnnnnnnnnnnnnnnnnnnattttcccctgagtaagcttcacaaaatcctccatttgtgaattcctcatagcaatgtcgtaaaacttttcttcaaacagatatttaaatttgtcccagggtctgacccacaatatcccaccaaacccgggcatgatcttgtaacaggaaggcttcatagtttactctctcagttcctgtcacacccatattatcaaggatacgggttatagtgctcatctactgctcgacctttattatgtcaatacatcccagaaaagtcagaagttgcagtttcaagaaccgctcaaacattgaatccatatgcgacattacaaacccctggttacgcaccactagcacaggtgctggtggtaacacttgttcaacaagagcagccggtgctggttaccttaattgtcgtaactcctcttcttgacgaattataatacctcgcatttcttgaaacatctactgccagtcagcaggacgattagcattaccaaccctcgcattatcccctagattctgcgg

SEQ ID NO: 152097 - DNA, 613 bp, Cannabis sativa
atatgctgcgaccttgccgaatatctctttcttgaataacttgtcctttaattcctctagttttgcatggaaaactcgtgcaaccagatcaggtctatctagtccatcagtgtaacaccggtgcggatcgggatggtaactcgacgcgaatgactgttgaccgatctagtggacacgtgaagcgttgagcttgaccaagccgcaggcagccatggctccatatcagaaacaacaagagcaaagagagcactccggttctcaaatgctgtatcatcctgaagataaaccaaatcatacaaataaatataaacccacctctttcatcagaacacatggtatatgccctaagacaattaaatttctaaacataaaaggggcaaagactttacacccaacatgtgcaacaatttaatatattattgttgattaaaatttatatgttgcgaaacaataataaagcaaataaagacattggtaagccttgaacacttcgtgggttaaactgaggttgttgaggaaatcgttcctgttgagggagaggcggagagacgaagaagaggttgttgaggaaatcgattgagcaatggcatccttgagttggagaagagaagag

SEQ ID NO: 152098 - DNA, 810 bp, Cannabis sativa
  modified_base (215)..(217): a, c, t, g, unknown or other
tctctctctctctctcaaatcctagggcagctagggttggtgttctttatctttttcttttgactctcagctggttgtagtcaagcccggccctgggcataggcgggctaggcctgtgcctagggcccacctagcccaggggcccaaaaaacaatatttcccttttaaaattatacaatttttttactgtttttgaaaaataccatatttttttnnnaataagggcccaaaataaatttttttctatgtcccagtaaaagtcagggccggccctggttgtagtagtctcaagccaaggtataatctctttatctcctattcttgttttcttgaaatttaagaaaatggtattttgcatgaaatgatattttggctgccatgcttgctgttagagtttgatatagttttcagaggttgttatatgttagattatgtttttttttaacatgaattggtagaagtttgaaggtttggccaagttttgagttttagaactcaaacttggagctttaatggtgaaaatagattctgagctttaattgttattctatcacttggaaaatgtttattggggtataatatgaaggtctagaaagtttgattgagtttgggaatgatttggttaggggttgaatttttgttggttttgtaggtaaaacaggctaaccggttttacactgctagtaaaactggttacccaaattttgtagcaggggaaacccatttttgagcttgtcgtttcatgttagtttcaggtttctagttggttgactccctgctagtttagggtatttgttgggttttatgccc

SEQ ID NO: 152099 - DNA, 504 bp, Cannabis sativa
cgcgacttcggaagtcccgtgcagacttgggggcaaatgtatcccagtttttgcactatgacgtggcagtatgtactagtgacacgtgtttgtcgttctttacatttggctagagaaacattctgaacagacttcaaacaacatatctgcacgcacaaagtctgcttgaccgagcagagcaaagggcatatgatatgagcaaagagtgaagttacctttctgagccgtgtatcaagatttaacttcttcagagctgatatcgtgaagctcaagcacaaaggcaatccctacaatcatgggattgtatcagagggatacagcaaggtgttccaatcccccattttatgtactctaaatatgtaatgtatgttcttaccaattatagatattgtaagcaaaaatgaaacattccctcatacatttagccctataaatagtgatctagcttcactgtaaaaagggatcgaaagaattgctttagagagagatctaagagaaaatact

SEQ ID NO: 152100 - DNA, 620 bp, Cannabis sativa
  modified_base (44)..(84): a, c, t, g, unknown or other
gtaaggttttcttaaactcttattcattgttttagaattcatannnnnnnnnnnnnnnnnnnnnnnnnnnnnnnnnnnnnnnnnctggtaaaatatttccaacattcacatgtactcttttcaattgaagttgggtcattggttggagacaacttttcactgcacgccataacaaatttttcattttcggtggggattttagcttccacagcttcctccataacctgtcttcggctgaaacatccaacccaaactcaccactaagttgctgcagaagcttatatgcactcttcactgaatacaacccagaaagatcaagcgaccagtttaaagtatccatcattggtcgagacagaacagggatagattgcaccaacaatctatcacgaggcatcagtaaatcactaagaatgtcttcctcccagcccgaaccgtcgatcttcatcaagttacagactttggcattagataaactcggatgggaagagataatcaaagggttctcagcatccggaagccaaggttcacttaggatggatatactttttctatctccaacaacccatcaggttgttgggttttataccctaaataaaactcatttcaatgtaatcagattt

SEQ ID NO: 152101 - DNA, 894 bp, Cannabis sativa
tcttttacgtttattataaatttaatgttaatatttaatgtaaaatagttttataacgattaagttctgtgtaactaaaagggcacttgctttgtatataaaggagtgatccgacatgaataggacaaaatagaaatctgttacaatagtggactaagtagaccgtgatctgactgaaccactatacatctttctgttcattgtttttcctgctcttttattgtctgggcagtcttgtttgaatactcgttgttttaggctgagtactcattactttttcattaaatactaattatttatttttatttagtgttgtttaaattcttcccacaatataaatatgggttaattgcggtaaaatcctcaatagtttcactctgcttgcccctaaaactcaaatttgggcggcaaaaccaccaatactcgtgttctgttagcaatttaacatttttgtgcattttaggtattaagtgacatgttggattgtccacgtgtgcatttacgtgaacacagtgtacacatgacacaattttattggtctacgtaaaaaattattttaaaaaataaaaaattaatttaaaattaaaaaaaaaattgtaaataaaaaaataatttttttttctttctttctttttctcctttctttctttttctttttctttctttttttcttttctttcttttcttgttctttatgctcctttttctttcgtatgttcatctcctctttcaatctccctttctctcgctctatcactttctctatcgatctcctctctctgtctcttagccccaatctagggttttcaaaaccctttgggtagccaccacatgccaccccagcagttctcgaccaccctaaggctctcgtgatctcctctctctctctctctc

SEQ ID NO: 152102 - DNA, 609 bp, Cannabis sativa
  modified_base (273)..(275): a, c, t, g, unknown or other
aacccggacccaaacccagaccagaacctggtctgggatctagaccttgagtgggcccagatcgtgtccctgacccgaacccgaatagggacttggactaagatcgagacccggacccagactcaaacttgaacccatactgggacctagactcagacccaaacttgggagccaaactcgaacctgaacttggaccttgaccgggacctaggatccggacctagatgggagacctgggccccaaacccgaacctggacccagatctggaccannnatcaagacctagatgaggcacttggacctgaaactaggccctaaaaccgagacagagaaccaaaacttgaccctagactaaagacacgggacctgtccttggacccaaaacccaaattaaggacccagctgaagacacaggattggtactagaacaagactgagattcaagactgagatccgaatttggacctaaggctttgacctaacctgtagtcagtgtttgaatctaggactaggacctggatgcgtacccatacctggacccagacccagaccgggatccagacccagacttagacctagaccgagatccaaacccgatctcggaccca

SEQ ID NO: 152103 - DNA, 1207 bp, Cannabis sativa
  modified_base (581)..(587): a, c, t, g, unknown or other
ctcgtagaggcctgactgatccagcaaattcacagacgctggatcctgcattgtagaacccaggaaacacgagggttttgtctgctgttaatccaggacagccggcaaacattgggaatggtgaaatagttcctatagatgaaattgtgcctggtgtgcaagagactgggaataacagttctgcacccaactagggcattcataacacaactgtttcgcctggaaccaatgcccagacgactatcggagatgccactgaattacaaaatctacgtgacgcgctcggactcttccagggtcataataataccctacatcatgatcaagacgaactacgcgttgcagtaaatctcgcgttccacgaacaaaggcgtatgttcaccgaatgaagagatagagagatggaggcattaagggatcatcatgtagagatcgaagatcgtagtcggcaagctaccgtgctgatacgaagagcctaccaaactttaggtcggcaatcgccgaatgtcattcccctgggagagacggatgaggatccaacgatgaatacttcgtagactgcaaatggtcagccgcccaannnnnnntcacgagttccactcatgggcctagcggtaggcgagcagaccttgtctagtaattcattaggaggagtcatacatgatggttccaaccagatcaaaagtgccattccacccatcaacaaagcgaatgaaccggtaaggcagccagacgcttctgtgttcgaaaggttagcgacaacccatgacctaaggaatgatctaaacagaaggagggagcagacgattagaatgttacgacaatcgtgcagctcggagcccgtactcaaatccccacttaaaaagatgatgacgtaatcgaaattgaccagaatgccgagcaggtcagcccaaccgtacaagctcagctagacgaagtgaaaaatatgtttcatggcatggtgggacaaagaaataatgatcttaagctagaccgagcatgcagaactcctttctcgccggagatcaatctcctgccactgccccacaagttcaaaatgacgacgtggaaaatgtacacggggagagaagatcccctttcccatctcaagtacttcaaaatgcaaatggatttgcaagaagaacgaggagatgtatgctacagaatcttccctgccactctgtcagaagccgctcagcaatggtat

SEQ ID NO: 152104 - DNA, 527 bp, Cannabis sativa
  modified_base (280)..(281): a, c, t, g, unknown or other
gtatgcctggtaatttacttactctagtgcaagaaacttactttagtaagttgctagagcatttttctaatggcaatctataaaagcttcttgaattctaagcatagattttacttatataaggaaaaatttcaacaattccaaaaaagataaaagccaacaaaagaattccttaggatcaacagtgagatgtattagatatgctttgcattagacaagacacctgttgttgagtgggagcaatgagtttgtatcatattaatccaggaaaggaacattnnaagacaatcaagtaaatcttaaggtcaagaaggggaactttatgttaattgataagggtggtatttaatactcctagaccacaccaaatcaggtatctagacttgtgttgatgcttgaaagtttactgatgtgatggtgattactctaggggtggagtagtgattttggagaagtgtaaaaactgatcaggaatctctaactctaccagtgagactgaatgctaaaattgtaggaaagatacttat

SEQ ID NO: 152105 - DNA, 611 bp, Cannabis sativa
aacataatagtttcacaaataattgttttgtacctgcttaagaatttatatcccatagaaattaattctcactcaaaatttattcatcaaataaaatctttccctgtacagtattgtatagaggtgactcggcgaccatagacctatatttcgaagctccaataaatccaagattattatcaatctcatcaatagaataatttgtttattaattttattattaatccactataaatatggaattgcactctttgacaatatagaattataattacagaatacttacttgtagttcattaatataatcaatataaacagttcgtcctctaattattagttcataattagagttggtcaaaataccactttaccattccaattgtctatttattccttatccaaggacataacacttatccgatgtgtaagtatacattatcgctgattatcatgtcagtctaaatttagtgaactgacaaatcataagaattaaatttttgaacttataagcataattatatttcactgtgctaacgacactataatcatgtacaaatatatatttacatatgtccaggacttaatagaatttatacattaaatataatcat

SEQ ID NO: 152106 - DNA, 677 bp, Cannabis sativa
aataaaacaaactttgtaagtaaaaaagtaggtataagcgtgtatgagtaattttgtaataaattgtgtaaaatggatttttcatataaaaatttctatatactatctctcaatattaaatttatatactatctcttgatattaaatttgaaaaaaaaaaataaacaaatgatgctagctttacctatctttgatatttgttgttgtactccatcaaatcaaaccttggaattttttggattgggctaagtgaagtgtactcctactcaaatatttatacaaatggctccatgaaaattgaatgtgacaaccacttataatataaataaatctcataaaatttttgagtgaaattgtgagatttaaccttataaattttttgagtgaaattgaaagattttttatgccacggaagttttttaattagttaatattcataacttaaatatttaatttttttattattagaaaatagaataaaaagagagaaaaatagaataaaatattaaaattgagagaattaaggagagaaagaaatatagttttagagtgattttaaaataccatgttaccccatcatacttctcctttatatatatatactagcaaaaaactacatgcgagacacgtatattaaattttatgctaggttttttctatgttatttgaaagtgaga

SEQ ID NO: 152107 - DNA, 859 bp, Cannabis sativa
  modified_base (50)..(58): a, c, t, g, unknown or other
gatagattttgtggcaaccatgcttccgggcagagtttatctaagaaaannnnnnnnnaaggttacttctggccgacaatgattgaagatttcaaggcctgtgttaaaaaatgtgataactgccatagattttcaaagataccttgagcaccgcccaatgaactaactcagatgcaaagtccttggcctttcaccatttggggaatcgacctgatcggacagttacccaaaggcaaaggtggagtgcagtacgcagtggttgcagttgattactttaccaagtggacggaggccgagccattagcaaccatcacgtccaaaaaagtgcaagacttcattgtgaagaatataattttcgagttcggattgccgtacaagatagtttcgaataatggcaaacaatttgacagtcaatctttcactgatttctgtgcgaatcatgggatcatcaaaagtttctccccaatggcgcatccccaagcaaatggtcaagttgaggcaaatggtcaagaagacattgaaagacaccctaaagaagagacttgaggatgctaaaggaaatcggccggaggaacttcctgaagttctatggtcgtaccgcacaactgagaagacagcaaacggacagactccatttgccatggcatatggatatgaatatgctgcccgtagaactgaaccaccatcccacagaagattaatatatagccaagaggccaatcatgtactccttgcagaatcacttgatgaaattgaagaaaaacgcaccatagcaaacttaaaattgatagcccatcaacaaaaagtagctcgatatttcaacaaacaagtgaaagctcaaaaattctttgtgggagat

SEQ ID NO: 152108 - DNA, 1042 bp, Cannabis sativa
tatactttgtttcaaatatttgaatatataatattagtaaatctataatgtggtgtatttttctggctattattgttataataatattttcaaatattaaaatcacaaattcattcttacttagcttttaatatccatttcatttcaatcactaattttgaattatactaaataatacctccaaaatatactatataataatatttaaatatgataatataagctatcatctataactttattaatacagtataagtgtaactcaatgagaaaaaaaaatcaaaatattttgtattttgtttgtattgttatatttatagattgaaaagggtatatgtgtaaattaatcagacgaaacccaaaatattgtggcttttatttaggttaaaatcacaaattcattcttacttagtttttaatatccatttcatttcaatcactgattttgaattatactaaataatacctccaaaatatactatataataatatttaaatatgatgatataagctagcatctataactttattaatatagtataagtgtaactcaatgagaaaaaaaaatcaaaatattttgtattttgtttgtattgttatatttatagattggaaagggtatatgtataaattaattagaagaagcccaaaatattgtggcttttatttaggttatagagatatacacatatatccaacataaatataattgagaaaatcataaccaactaagctataattgtaaaaattataaatagaataagtagtcgatccaaagaacatatcaagtcaccaaaaaataaaatttgggaccgaaaccttatttattgattcaaataaacactataagttacattaaataaaatttgttaatgttttaatggttacatttttttgccgttagattactattgaataattatgattaatttaaaaattaaataaaaataaataataattaacttataacctactagtcacctactaatttatttctttataaaactttaattgggattaattatattttaaaattaaatta

SEQ ID NO: 152109 - DNA, 522 bp, Cannabis sativa
cttatgaactttcatctctaaatattcattctcatggtcatagtctgagtcagaatctttcactagaggtcgaggacgtttggatttcctcttcttcgttgattcaccaactgatttccatttagtagaaaaaagtgagctagggctaggagggttgtctttgaaatttctctttcccatggctgattgaggtaatattttttaagattttttgtgggtttttttgacagctggggaagaagaatttgaacgggtatcactatcagccaaggtgaaggaagaagaaatgaatttatacgacaaaaacaacaacaaattgggggaagggggggaatgaaaagggtaaatagagtttgaaaaaaaaaattgaacaaaactggagaataaacaactaggaaaccctccctaatcaaaaacaaacactataaacatgtgtgaatttttaaacgcaaaaatataagaaaataaagaagaaaaaatgaagacgaagatgaacatgggagagagaatgagaattagaat

SEQ ID NO: 152110 - DNA, 746 bp, Cannabis sativa
  modified_base (243)..(244): a, c, t, g, unknown or other
atttttgtcatttatgggaagtttattagaaggagtttggaaagcaaggaatgatcttatttttagaggtcgaaaagttgatatttctgctgttaggaaagccttgctgctgaggctagaagaatcgagtctttttcaaggcgaagatattgagaatttagggtttagaaggcatgattgtttgtagaaaaggaagattcctaggtccacgaggttagtctattagagttagtctcacattgnnaatgtgtggaaataaattaccatatataagataaatgggctattcctcccattgccaattggttttgagatggaacctcattcatcttatcctaaattttaacttggtatcagagtcacttgtgatccgttgtgagcccaaagtgccaccggtatcagagccacttgtgatccgttgtgagcccaaagttccaccggtatcaaagccacttgtgatccattgtgagcctaaagtgctaccggtccaaaaagccatttgtgatccgttgtgagccaaagtgttgccggtccaaaagatacttccgttatctcccctttaacctcaatttgggacctttcggccaaagtgtgccagtttccagtgttgagtctttgacttgtttcaaaatccaaaaatttcccgatgtgtacacccacaaattttcccatatttagccttgtgggattctttcaaatgtcacgttcggtcctgtggtctcttaaaggtcgttcgttatacccac

SEQ ID NO: 152111 - DNA, 755 bp, Cannabis sativa
aataggaccttaactttcttattgctagaatcaagcagtaggtgagtttctttatcaatgggtatcggccttcgccctcaatcagtcttttactaatgtaatagagcagatgttgtatgttgttttccactcttatcagtataacactcacggcatgctccgttacagctaagtatatcttaagttcttctctgtctacaggttttgagagtataggaggttttgctagttgcatttttagttcttgaaaagctttttcacattcctccgtccactcaaattgcttatttcatcgtagaatgctgaagaatggaacacacttgtctgatgattttgaaacaaattaactatccttttcatcgaaaaaaatcaggtaaggcatgtaccatgtccattttattcactcaatcttgtttggtcaataagaaaatatccccaaaaaaggaacaaaaccaaaaaagatagcaaaacagaaaatttcattaccatacatacatatattacgaatcactccttttggaagggagatgtggataagcgtgttatcccaatttttgcactctgacgtggcatcacatgaatggtggcacatggagtctacttggaacatctgcttggaaaacacagttcgagcaggatgcctcactggcatgcttagatcaaagtattcagtaatctgcacagaatggccaaacacttagcgaattcaacttttgcatcgtgagtcatcaccacaatccctataactcagggat

SEQ ID NO: 152112 - DNA, 567 bp, Cannabis sativa
cccctctcagggtttgtggctcgattattataggcgggaatgtaacagtctaactttcccaggtagccatcctgatcgagatcccgtaagcgtgcctctgtgaccttggatggagggctcacccacctggctcccaatgcaccatgccttctctgaggaaccgcgacagtaagttcctcagtaacgaagtccacgccttcaacgaggaaattggtgtcagtgtcaattggcttcccagcctcattatatcccccaaagattggtggtgcaacctcttcctcttcctctgcctcagaaggactacgagggtggacatcgccctactcctcaatctcttggacctcggcatccccttcatgatcctcctcctcctggatggacagatcttgttcgacactgggtaaggtggcatgccggaccacttgagggtcatatgtgtcgattctacgtattgtattttttgtatgagctatcatcctagggttggacgggagatttaagataaaatgtccgtcgctcgaagagggtggactagaacgaagacaaggatgatcctcgtgcaagagt

SEQ ID NO: 152113 - DNA, 758 bp, Cannabis sativa
  modified_base (696)..(703): a, c, t, g, unknown or other
aagatcgtgggatcaatgctgaattcaaggattgtgggattgaggctgaatacactgatagcgggatcgtgtgtatgccatatccacgtaaattgatcactgttatagggattgtgctgatgactcacgatgcaaaagttgaattcgctaagtgttaggccattttgtgcggattactgagtactttgatctgggcatgccagtgaggcatcctgctcggactgtgcttttcgagcagatgttccaagtagactccacgtgccaccattcatgtgatgccacgtcacagtgcaaaaattgggataacacccttatccacatctccctcccccaaaaaggagagtgattcgtaatatatgtatgtatggtaatgaaatgttctgttttgctgtcttttttggttttgtttctttttttgaaatattttcttattgaccaaacaagattgagtgaataaaatggacaaggcacatgccttagctgatttttttcgacgaaaatgatagttaatttgaaattgaaactgtgagtttttttcttctgtaacaatttaattttgaagttcttgtattctttctctctttctcttctgagtttggtgaagagagagaattgttgagtgtagtaagaatttttttattgttttattagagaaagtttgaggctttatatatgagtgagagaggaatataaatnnnnnnnngaagcttcatgttaaggaataaaaaagcaatatgtgagtaaggtggtcataatta

SEQ ID NO: 152114 - DNA, 1144 bp, Cannabis sativa
tatatatatcattaactaaaaaaattcaactgcactctccatatattttgattttttttttgaaagtatatattttaattttgattgtttgatcttttgttactatgtgtattctctcaacctctaactgccccacttttttttttcttttctctcttcatgattgttatcattctttctcttttttctatatagcatcaaaaatattttctttatatttataaataattacataatttacaggtatatgttgaatttcataatcaaatattatatagcaatatctccctgtaatggatctctctcctaccgagtcctagcataatctatcgcgtgaaaggtcttcgataaataattaaatgaattgtaacacttattttagtttcttaaaatttttaggtttttaatttttctcatttttttctttcatctaacaaattgattttatctttaaattttctttgaatgatatatttgaagaagagtgctaattacaatctcctattacaacctcttagtcaaccttcacacccgaagttacatgccggaatatttttttttcataacagtatttattttaattacagtatcatgcctataaatttttaaaaaaatttaaataatttacaatgccttaaacaaagttcttgatatttttattttggatattgtaaactattcaaaaatttacaggaatggagaaatagaaggtagtgacatgttattctaaattggttttattctactctatctattatctccttaattctcttattttttttttaattttttactaaatatataaatattaattaattaattaattaattaaaaaaatctaaatatacaaatatcacatatattgtatattagacatattatgtagtatatacattaatatgtatatatatatattacgtgcataaagaaattttttattttttatttttaaaatcttattccaatatcacttatactttttaaattttcggtaagtaatatctttgaataaaaatttcaagttaggctatattaatttatctatatagttgtataaagttgagtcataaggcagtaacgtggcaatacggtgatgacatcaactttaaatttagtggtgacaataagtgagatatgataatga

SEQ ID NO: 152115 - DNA, 741 bp, Cannabis sativa
ttacaactcattatgaacccacttaagtttgctatatagatttttttattttttttttcctttaacaaaaaagaagaagaaatttaatttgctatagttaaatctaagttaaaagaaaaaaaaaaaaaaacaagaaaatatcgataagaaatttttatgaatactaattgtgacatatttatattatgtatatatattagaatgtttttgtttaataatattaaaatatttctaatattggtacaaaattatttaaattgattttgctttatttcattaagtgttcgccgactgtatattatcacaaattaaaatgtgataagagtaaatattctaaatatggtcagattataatttactaattaatttattttttaattgatggacaaaatattctgacaattaactgtgatagagatgttgatagaaggtcccacttatataaatatagaatctcagtccccgagctcactagtgagaatttggtataaaatgaatgaggttccatctcaaaatcatttggcaataggaggaatagctcattcatcttatatattctattgtttttccacacattagcaatgtgagactccctaacatcccctcaagatggtagctattttatttgctcaccatcttggacaactcgatcataattttttttagattttttgtggttcttttttttttttttttattttgttgctaattttttattatttatgtattattttttttttt

SEQ ID NO: 152116 - DNA, 597 bp, Cannabis sativa
gcattaaaatattagaaaaataaatggtaaaatcatacatagtggtcgaccataggaattggattgggccccattttttttttgaacaaaatggagctttactcaaaactagcaaggcaaaacagaacaaaggctcaacgagcctacaggactgcaaacaaggcaggaaccaaaagacaaagctaccagaccctaattacatcaataatgtatttatcctgctttttaagggtggtacaagtaatacttaagattctagattgagaaatcttcctaatctccatgctcaacttaaaaggacaagtacaaactaaatcaaatatacaaccatttctatttttccacaacaagtaaatcgccgctgcaaaaacagtgtttatcactcggttcttgaaatcaagggggccccggatacaccattgctgaatgtgctctgcatcaatcggctaatccacagaacccaaccatcttcctatttcagcaaaagttaacctggctaacacacagtcaaagaagagatgggagtgtgtttctatatcactctcacaaaccgagcaaaggttcgagagtaaactcagaaacttgctcaattgatct

SEQ ID NO: 152117 - DNA, 695 bp, Cannabis sativa
aaatagtctaagactaacgccaccgaaaacaaaaggtgaacaacatcaaaaagactaattaaactaaaatacacaaaacaaagaagcaaataacatagaagaacttcaaagaacaatcccaaaatgcagaggaggctgctagagagcccaaaacaaacatgcaaaagacaaagagttgctgccaacttccaacaaggaaagtccacactcagtctcccatagcggttctgaacggtgaaggtgctaggaaaagggaagcacatccctttgggtaagacccgcatccccccctctacatttacaacactccgaaagctaaacaacaaccaatgtgcactggagccaggacgcctgaatagaaacccacaaggaaacattgtgacttgaaaaaataggaagaaaaacaacactccaaagccaaaacacctgcctgagaaggacccaaccaaccaaaaacctcaaagacaaaatggtgggagcccaaagaagtccatcaacagcgccaccacgctgcccaaaaggatggaaccaccaagagcctctgaccggcggcgataaccatctcagcagagaaaaaccgcctaaatagcggcggtcggtcacctgagaaaataggtgccatggaaccagtccccaagagcaacgcccaacacccacttgacccgccaacaccgaaacccaccaggaggggactt

SEQ ID NO: 152118 - DNA, 1056 bp, Cannabis sativa
  modified_base (965)..(965): a, c, t, g, unknown or other
  modified_base (1015)..(1024): a, c, t, g, unknown or other
atatttttaagtaattatttattaaattaataaataattatttttattataatactaaaagaaattaaattagtcgcgcgaaaagcggctatattgcctaatttatttaaaaaaaaagaacaaaatatatattgactagttgatagaaatttatgtattttacttatttttttaaaccttcacatttattggctatagtagagaacaaaccataagaaaaataaaagctgtacgattttttttaataataaatatatcattaaattgaataaattgagtataaaaaatagaataaattcatccaataaatttttattcaagagaagtaggaatattttttttattaattaactaaatttgcctgtactttggatttaattgaaactgttagaatattttatatggacttacataaataagtgttgctcacagagtcaatattatcataggaaaactttagggcaccctagattttccctttttttacgatatttagggtattgccatgttatctatcgataggaaaacttttagtttcatttttaagtcctcgaaaagtgatttagcgtgtcactcaccagtttacgattattgtgatttaggggctgtaaatcatcgagcaactgttccactcaggttgaccgacacaccttaattcgaaaataaagtaatattagtataatgatatacatatgtaattacacgtttatttatgagttaacggaagtggtagtaacagatgtaagagagttgtaacattggtatttttgcctccaaaaataaagataaaatatttaagtgtataaaatttaaaatattaagtatttgtaccgtaatttaccgaaagagcaaaatatatgttgactagttgatagaaatttatgtattttacttattttttttaaaccttcacatttattggatataggagagaactgtgcataagaaataataaaagctgtacnatttttttaataataaatatatcactaaattaaggtggcgtttggtaacnnnnnnnnnntcagttttctgtttttaaaagtagaaaagtga

SEQ ID NO: 152119 - DNA, 527 bp, Cannabis sativa
tgggtgtccttatttatagttggccaataatatcatgtcgaataatcttctttgacaagctttgccaacctaatggtccccacaaaagccttcatatatttctcttatgatctcgtttgcttttgcggggagaacacaccgtaggagaggcattgaatagccccttctatacaatttgtcttctactatcgtgtagcgaggcaccgaatatatgagttttcatgccttttttttgtcaacaggaagttgcccgttgagaagatagttaaatataggtttcatccaggtaagtgagctatctatcatctcgacttcttctttctcacatatactttgctcgtttagcatctccactgggaccaagttcaattcatccagttcattctatgaggccagttctgctaaggcatcgacattagagttttgttctctttatatttgtttgattttgaaataatcaatcttttccaagttctttcgaactttctctaggtactttgccatttttaagcccttagcctggtatt

SEQ ID NO: 152120 - DNA, 579 bp, Cannabis sativa
  modified_base (209)..(215): a, c, t, g, unknown or other
ttcatcatcattttggtgaaagtcataggtttcgattatttcatcaaacattttgttccaagaatgagaagcttgcttaagtccataaatagacctattgggtttgcaagctttctcttcgtgcgcaagaagtttataaccttctggttgctccatatagatggtttcttcaagaactccattaagaaaagctgtcttgacatccattnnnnnnntttcataatcgaaagcggcagctatggagagaaaaattttaatggatttgagcatggcgaccggactaaaagtatcctcatagtccacaccttctctttgtgtataaccctttgcgacaagtctagcattaaaagtttcgacttcaccaccaacacatcttttcttcttgtagacccacctacatctaattggatgataatcatcaggtgcgtctacaaattcccagactttgttctttttcatagaatccatttctaaatccatgttggtcgaccattatttccgttctggacttgccattgcatgtttataggttaatagatcgtcatcaatgttgtcaccaacgaccatattgatttcacc

SEQ ID NO: 152121 - DNA, 1264 bp, Cannabis sativa
  modified_base (821)..(821): a, c, t, g, unknown or other
ggcaactcggtcggatcaaatgaaggtcagggaactcagtttcctccaaatgttcggggccgaggtagaggtcccaggggcggggcacgtgggcggggtaatgctaacccgccagaggctgtccaggctgcccaagctactcaggaagctcagaattgggaaaacatgttttcagaaatgcaagccagaattgaggaacaagataatgaaatccagcgattgagacagcagggtgctcctgcagtgcctgctccagaaattccagtggcacctgcccctactgtctaggccaaaccaatgattgcagtgaattggatggaacctctgtatgaaaggttctgtaagcgggcacctctggtttttctgggaggtccggatgttatgaaagccgagcaatggctaattatgatcaccaagatattgaatttcatgggcgtcactggaaatgatagggtggtctgtgccacttttcaatttcaagaggatgcgttagtttggtgggacatggtgtccatgatacatgacgttactacaatgacttgggaaaagttccaggaacttttcaatgcaaagtattataacgagcagtcagaagtgccaagagaaaagaattcactcacttgacccagaaggaaaacatgagtgttacagagtacacgacgcagtttgaccggttggtgaggttggcctcgagaattgtgccaactgatttcagtaaaaaggagaaatatctggatggaataaatgcgaagattagacatgatttgatgattactacaaacaacaaaaccacctatgctgaaatggtggataaggcactncgagctgagggcgcagttggatgcatgacagagtctgttaggactccagtggttggcggggctcctacccctcctgcattaggttttagcaggggaggtagtggttcagccatggatcagaaaaagaaagcatccactgcaaccggtggctcaggtcagaacaagaggttttgggggaaccagggtcgaggtagttgccagggtagttctgagacccgatacacttacccatagtgccccagttgtaaaaggcaccatctgggggagtgtagaggacaagggtgctttcagtgtggcatgctagggcattacaagaaggattgccctcaactcagaactgaagcaccgaagactccgatgaaacccactccagcaagggtgttcgccattactcaggctgatgcaaaagccagtccttcagtggtaacaggtcagctctcggt

SEQ ID NO: 152122 - DNA, 703 bp, Cannabis sativa
aaaaccctcatgtctcatcgtatgttgggaccaccgatccggtctcgcatttgaataacttcaacataataatgcaagctagtaatgtgacaaataatttacgttgtattttgtttatcacctcgatagttggtgcagcaagcaactggttcaacaaatttactcatcattccataacttcctgggaatagttgtccaaggacatcaaaaaatagttccaagccgcaagggataggcgacccgaggcatcctcactaaccaacataaagcaacagccaggcaagacacttaaggcctacttaagtcgttttagcacggctactacaagagttagaagtctagatgatagtagacagcctactggcctccaggcagggatcactactaatctatccactactgggggcgaattgtgggacagcttacagggtcgtccagtgaagaacatcacactgagttcaacaagagggctcaggtgttcatccgaaaagaagaagcttagaaagagatgaacttgttgaaaactagctcaggaggcaaacccaacaatgtttcaacaagtactatctaaactagagttgataactcaggggccttcgactcaaagagaaaagacgattctaaagggtcgtcaaaggaaaaagagaaacaaaagaagcacgataagtacgtgccagtttatactatttataccaagcttaat

SEQ ID NO: 152123 - DNA, 844 bp, Cannabis sativa
ttacacattaattattattcaataaactaattattatctaaaacacaacttaaaattcacacacaaaaaaaaaaatactaatatactaacaaaatacacattaattataaattataaaatattactagaaatataagataaaatattaaacgggtttctgtcggtgcggggagtgtgatccccgtccccgtctcgtttaacactcgggaacaaaaattaatctccgttcccactccgttctccatttaggcggggaatccccgccccattaggggcgggtccccgcgggatcttattcccgtaggaaaaatgtgcatccttatttatattatgttatgtagtaagatagaaagagaagttattaaaagattttaaaatggacaccattgtggcattgtccttttatatttttaattaaaaaagtttgtgaactcaatgggtgtcgagctgtctttttatataagaagattatataattttttgtgttccatatcatttagtatatgtgtatgatcttatccaatgtattaggtgtagttcatatattattctacctagttttgttggtgactgatgccatggattcaggcattatatattgtattttggatttggaattatgtgaatttatattttttaagaaaatattcactatatttcatactagttaatcgagtcaatgactttaaaataaattaattcccgcctgagattaaaataatattaatattctttgtatgatctttgccaagatttggttaagagaatataagtatggttatgagtgtttattggatcacatctaatatttttaggcctattcagatctgatctaattatatat

SEQ ID NO: 152124 - DNA, 532 bp, Cannabis sativa
  modified_base (460)..(503): a, c, t, g, unknown or other
tctctgtgatacgatcccagatttttagggattgcttttatgcttcacgatgcaagtgctgaagttgctaagtgttggcatgctgttcggattgtccactactcttcgtccgtgtagatatatgtggttatctgttcggaatatcttctccaggcaaatatggggagttgattccacgtgtcaccagcgtgtgatgccacatcagagtgcgaaaattgggataacattttccccctaagtttgcacgtgagtacttctgaagttgcgtggagacttcatccgagcggcctttacttttgaatgggtgacacgtgctgggtgcatctgttcgtgattcgatgtgaagctgactaggcgtcccttcggtttttggctaattaatgctctgacttaattaaatcctcgaaacacggttttcttcgcacgctttgtgttggatatattttactaggatctagannnnnnnnnnnnnnnnnnnnnnnnnnnnnnnnnnnnnnnnnnnnaaacaatgaaataaacacatatagagttt

SEQ ID NO: 152125 - DNA, 912 bp, Cannabis sativa
tttctcagttgaattctaaagttcctatcacaagtgtcatccaaatgaagatgggcttagaattttaaaattctcccactcgaataaggtattgtgatactatatccgaaaactttattggtatcaatttctattactacagtaacatattaattggaacaaaaaataagattaagtataagttctaataattttctaatttgttcattatattacatccatgtttaatcaaaatatgtgtgtcatagagtactatggtgtattgagtatagtctagagtttaaaatgaactacatatgtcaatagcttcatccacccctaagtattatagagatcatgtggagttatgaatataatccagatttcaatagatataaaagatcgttgaactgtatatattattcttaacttcttccacccctatcagatcaaaagatcttttattaaacaaaatcttaataatttcttcagaattaacgattattcgtaaacattgaatttgaattcgaagtgtttatgtggtattatctctttgcagagtttaatataccatagaatttgtatcaataataaaacacaaacacatacaaacattgtaaacatataaatataatttgtataggcatacacaagataaagaaatatgaagcttaattcataaatacaattcattatcaaaagagaaaactttattataatattctccaaaaaaaaaaaatgaattatatccaataatatgaaaaatagggaataaaaatcccaaaccaataattgaaatcaaattgttcataaattaaaacaattaatttaaaaattataaatagaatattcagagcttcatcttcaatcttggactatctccacccatctgtccaaccatccgactcaacttgctaggatagcaatccaagt

SEQ ID NO: 152126 - DNA, 697 bp, Cannabis sativa
cctttactaatccataatttaatcgtgcggtcattacaattatccccccgttaaaaggattttgtcctcaaaatcaaacctgaacaactttagatattgagtcttcatgctggactctagttcctaggtggcttcctccaccttgaaattcctccaaagtactttgaccaatagaatggtcttatttcgaagaattttttctttcttatcgaggatttgaattggttgttcctcataggatagattagattgtaattctagggcttcgaaactcaagacatgagtcgggtctgccacatattttcgcaacattgaaatatgaaatacattatgtataagcgataatgctagtggtaaggctagccgatacactacctgcctgaccttctcaagtatctcgaatggctctatgaacctagggctcaacttgcctttcttcccaaagcgccttatacctttcattggtgaaacctgcaaaaaaacatggtcacctacctaaaattcaatatctctgcgcttaggatctgagtaacttttctacctgctttgcgaagaaagcatctgagtcttaattttgcgtatcgattcattagtctgataaactaacttaggacccaaatactttccccagtctcatcctagtgaattagggaacgacatttcttaccgtacaatatttcataaggagccatccctc

SEQ ID NO: 152127 - DNA, 539 bp, Cannabis sativa
gcgacttctggtgcggttcttaagggcttgggctcttccttcttgtgcggcgagaagaaaagtagccgcagccaggccttgttttccgccggaaccagagctggaccctctgtttcaccaaggagaactgtcgttgccgctgcagccgcccccaagaaatcgtggattccggctgttaagggcggtggcaacttcatcgacccagagtggctcgacggctcgtaagtccattcacaacttcatctgaaaactctggttacacatttcatcgaacaccataaaagcaaggctgagtctttttctcttttcttttaatcttacaggcttccaggtgattatggtttcgacccattgggattaggcaaggacccagcttttctcaagtggtacagagaagctgagctcatccacggaaggtgggcaatggctgctgtgctcggaatcttcgttggtcaagcatggagtggcgtgccatggttcgaggccggagctgacccatcagccatagctccattctcgttcggctctcttttgggaac

SEQ ID NO: 152128 - DNA, 613 bp, Cannabis sativa
ttttctcctttgcttaatgaaacttgtattgtgcttattcctaagaagaaacaaccagagtccatgatggaccttcatccaatatcgttgtgtaatgttgtctataaagtcatctcaaaagtgcttgccaatagaatgaagagtgtcttgccttgtgttatctctgaaacccagagtgcttttatacaaggtagattattccgataatattatgatttcttttgagataatgcattacctgaagtgaaagagaatgggcaaaacttgtactatgcctttaaagttggatatgagtaaagtctatgatagggtggaatgggattttctagagatgatgatgattcagatgggtttctctagtaaactggtttcgttaatcatgtattttgtttcttcagtcacttacaagattactcatggcggtaaagtgatgggccctatatccccaagtagaggaattcgtcagggggatcctttatctccctatttgtttcttatttgtgctgaggggttctcttcgcttgtcaacatgtttgtgcgaaaacagtggttaacaggctgtcgtgtagctagaaatgctcctatcatttctcatatgttgtttgcagatgat

SEQ ID NO: 152129 - DNA, 1366 bp, Cannabis sativa
  modified_base (40)..(55): a, c, t, g, unknown or other
  modified_base (557)..(559): a, c, t, g, unknown or other
tttttacgtggttttgcatttaaaattctgcatagtccannnnnnnnnnnnnnnnagatttctgagtatttttttcagggcctcttgcataagagtatttttttgttccccctctttgatcttatcggccactatttataattgcatagtggccgttaattacaaagttgaccaaaatacattgtcagccattatccctaaaattaggggatctgattacaaatcaagccaaataaatgaggtttttacacaactgtgaatatcccactttaattgagccgagatgaacacgtaattaaagatatacagtaagtcttatctcacaggaatgcctcgccgagaagggggccaagatcactttgatagtgagcagttgcttgtcattttggcttctcaagaattatattgtcttaactttgataactatactctctggtgttgagaggatcttcctcgcatgcacaccatcttcaagcgagataaacgccttgttgtctgtcattttggctcatcatactatctatactcagtttgtatatcgtataatatacgctaannntttttagtgttgttgctttcttttcaggcaacgaggttgaggcctcgtcgttaatgtgtgcacccacatggtttctcgtcaatacataagttagcagttcgtacatttctgtctcgcataaggctatccagccagccgagttattaacataccctacgaattatatttccaacgagttattccatgcttagcatacttgtcgtttgcatgtttgagttcttcccagctcgacatgtgtctccctctgatgtgcttactgaacttcaggtataacaattgctccttaaaaagatctttttaattaaaaagagctttttaatgattacaaagggtattttcgtcacgttcctctgtctttgaaaagacgcattccctctgattttggcaattgtggtttcgaggtacatcagaattaaatgattatcttttccacttccgcttcgaatcacatccattggatcaaatcttttttgaaatcattatcatgggtataaaatagttcaagggaaccacctttgcaccatttcagaaagtttgggaaaaacccttaaacttcttcgttaaggatcaccattaaacctgtctagagacttgcatgccatccttgtctttgacctttttcctgctagtttcctccgacttcattttcttaaagcgatccttgctttgtttgaaggtttgcagacggaattgccaggcatcgtcccaaaccctaacttcaaatggtaagttactttcttctttctcatgtttattacatagtgtggatcagttacttgattcgtttgtatcgttatcatctcatct

SEQ ID NO: 152130 - DNA, 748 bp, Cannabis sativa
  modified_base (679)..(702): a, c, t, g, unknown or other
tgtacaaaacattcctaagataaactcgatctgcagcatcaaaatcggaatttgacgcagcaaatcagaccagaaaaggaaacttgttataaatgggtctgatcttgtattgagtcttgattcctaccataaacagtttatatattctgattgtatcaagacacaatcgaatttaataagagaattgcttctcttacaagaagtttccatgcaagaaaagttcagctgtaaaatgcatctttcctaacatagaaaagagcaataaaaaccgaataaacaaggtaagaaaatcggctatgaatgcaaataattcttaccataaaagaaaaaatattttggcatctaacttgccaaaaaaggactttacaatcgccccctttggtactttagatgaacaaaacattttttaacaaagaagtacctgcaaatcaaagttagcaagacaaatcaaaatctccccctgagaaacataatcgaaaaccgaaataacaaaataacaagctaacttttaactcaaaaaaatcacaagtaccaaacacaactccccctggaaaaagggtccagagttgagacaataagcagttaaaaacaaattattactcccccattttctttatctaagggctaaagacaaaaagacatgaaaatatggaaatgttgttagaatttattttaccannnnnnnnnnnnnnnnnnnnnnnntgttgtttaacaccctaaatataaactttctaaaacgataaataaa

SEQ ID NO: 152131 - DNA, 764 bp, Cannabis sativa
tcgtgtccatgtcatggtctgaataaaaatttaggttaggggattggtttgggtctgggatcaagtctcgagttcgggttcgggttcaagttcgagttgcattcctagtctgggttcaggaccgggtctaggtataggtcagggtctggctccgagcccgagtttcgggtctgggttctggtctagtttcaggtccgggtctaggtctaggtcttggccacgaccccagtcctattagggtcttgggcacgttctagtacaagtttcggtttcgtgtcttacgtctgggtcctagtccaacttcgggtccttctctgagtccaggtcctagtccagcttcgggtccttctctgagtcctagatcaagacaccgactatgggtctagtccaagccccaatttctagatcctgagacaagatctggatcccaatcacgggtcccaatctggtttcggttcattttccaggtcccggtctaggtctcagtctagttccgggactgagacttgggtgcagttctaggtctcaatcccaattttgggtccctagtcttgttccatgttcgggtctgagttcaagtctgggttcctatctcgagtcctagtttaggtttttattcaattttgggacccaatctttgggtgggtcggtgtccgagtccgagtactagtccagttacaattttgggtctgggtccaggtcctggtcctggtccttttcttgctcctgagtcccgatcagcttctggtttcgattctagtttc

SEQ ID NO: 152132 - DNA, 511 bp, Cannabis sativa
tcccttcttcaaaatggagttggatttcaccacgtttttctaaaaccaggaatcagaatttttagaaatacaattaaggaaaggctttccttttaggtatttcgcttccaagatccgatagcaaagggattgattgccagtcaacacgttccacccccatttagccaagaaggcaagattcatttctctggtcttgtagaagcccagaacccccctggacttaggaaggcaaagcttgtcccaagctttaagatacaatccatggttaccttttttggacccccatcagaagttgcaaaccataccatcaatattaccattcagagagcttggtcgtttgcatggcatacataggcagggatagtcccacagactttatgagagtggcgtgcccagctttagacagcatcttagccttccatcccaggagtttcgacgtgagattttcaattatgaaattgaagtcggcgtccttttgtctagagcaaaagagaggtaaccctaagtattt

SEQ ID NO: 152133 - DNA, 591 bp, Cannabis sativa
tgactgtcacacaaagaccccacaggatcccactgttacttttgaggtcgaacttatcgaatccaaggttaggtcgattgaggcctatgttggcggcatgttaaagtcctgcgacatcaagtagaggaaaggttgtgtcataaggtccgtggcacttggggaatttagctggtttcctccataaaaggtaatacacgaggagtgcagtgggcctagcacgagtaattcctcgggcattggagccttgagcctcgagcacatcaaggctagggcggtccttccccttagggattattttaaggagtactgtaactacctcagggttgccccattccagctaaactccatcccatataggatccttgcgagcttgaaggccctataccatatcttaggatgggagtgccctactcctttggagatagcttgcttttacacactcaaagtattccctacgaggaagaatgctacaggaggcttttatgatcttaggacttatattggtgattgtaagatcatagttaggttgccaaacaagtcagagtttaaagaagacttcttctggatgacgggcctctctctaataaatac

SEQ ID NO: 152134 - DNA, 797 bp, Cannabis sativa
  modified_base (284)..(284): a, c, t, g, unknown or other
caagaaataagcatttaagtgctcttggttgcagcttgtcttgcctgatgtgagcataggcagtgcaaccaaagactttgagatgttcatagctaggtgctttgccagtctagaaatcttgaggagttttaaagtttaaggctgtagaggaacatctatttatcaaatagcaagcagtttttaaagcttcaccccaaaaaagcttggccaaaccagctcctatgagcatgcaccttaccctttccaacagggttcttttcattctctcagcaaggccattttgntgagggttcttgaccactgtgtgatgcctggcaatgccttctttcctaaaataacttacaaacatatcagagtagaactccaacccattatcagttctgagtttctttatcttcctactagtttaattttcgatcaatttcttccagttaacaaaggtctcaaaagccaggtctttgcttttcaacagaaacacccacaccttcctagaatagtcatcaatgatgctcatgaaatagcttgctcctcccaaggtcttggttcttgatgcaccccataggtctgagtgaatgtagtcaagtctattcttggttgtatgttggcatgtggtgaatttcactttgcagcttttgccaagtacacattcttcacagaagggcaattttgtgtacaatttacctttgagtaatccttgtttgtcaagctctgagattcccctctcacttacatggcccaatctgagataccacagtttagtgtcatcattctgttctgcaacagcaggtgctgcactt

SEQ ID NO: 152135 - DNA, 570 bp, Cannabis sativa
  modified_base (293)..(304): a, c, t, g, unknown or other
  modified_base (532)..(545): a, c, t, g, unknown or other
tgtatttaaaataaaatacattttcgaaattgcataaaataaaataaaataaatccttgaaaaattattctaattcatgttgatctaaaattaattaaaaatcatttttcaacacaaataaaattttcctatttaattaaatatttgagaaaattatcaaatatttaagtattattattagaatcaattaaaatattaactttctatttaattaaatataactagaaaaatatttcaagcaaacagacaataactatctagactttcattgactaattaatttattttctaannnnnnnnnnnnttagtttatttattttaattaatcttttaaatgaaaaatataatgatttaagtttgtctaaaattaaaataaataattttcaactttaatcaattttaaaaaataattcaaaattttctacatttaaataaaaaatgcaattaaaaaaaataaaatatatgtcgaaaattattcaaattaaagttgttctgaaattaaaatttccaacttaaaataattttcaatttnnnnnnnnnnnnnnaatacaagaattaaataatcaagta

SEQ ID NO: 152136 - DNA, 592 bp, Cannabis sativa
cctaattaggtgatgtgattttccataggtacgggcatcagtggctatgatgagtaccgagcgtagatacaggctcacctatttaggtgatgcaattcacttggcgacgtgtagatacgacatcagtgatatgaaaattgctaggttatagcatagaatgaaaccgttgtagggtttcctactagcaacgtgtagatttggcgtcaagtatatgaaaattgccaggttatggcatagaatgaaaccgttgtaggatttcctcctggcaacgtgtagatacgggcgtcaatgacatatgataagtatcaggcgtaggtacgggctcatttgattaggcgatgcgatatattggtgccaagttatggcacgggctcactttattaggtgatgcaattatatgatatatgggtgcaagtttttggcatgggctcacctgattaggtaatataattatgcaatatatggtgctagtctatgacacgggcttgcctaattaagcaatgcaatacaggattatcatatcaaagcatcgactcgcctaattaggcaatgttatgtaatgaagatggttactttatgaagtaacatatat

SEQ ID NO: 152137 - DNA, 876 bp, Cannabis sativa
atagaattagttacattataaaaattattatatatatatattaattttaaaattgattgatcaaaataaacaatctatgagaaaaaaattatcttgaaataatgttttttaatataatgtaacgaattgatatattatttacatcaaaagaaactaaaaggttactttttttaaaagttgcaaaacactaaaatttctggaagcggatttttcaattttttttcattttaggtatttttttaaaatttcggtatttatgctgacgtggcacgtcggtatttgtataaataattttgttgaaggtatttttataaataaaattaattttaagtataaaattaaaaaaacttctaatatatatatgcattagcataaatcaaaatacatattagtataaaattaaaataattattctatttatatttctacaaaaattattatcaaaattaacatttctaaaactatatataactataataaaagattgttttgctcaaaaagatatagtgataaacaaatctattctgtcagatttaattaatccctttatcatccactattgttgcctaattgttgattcttcaaatttactataataatatagagactcaacataaaatatttatctcttaaaactttaccactttatttgttcactttctcttaacaacatatattacatatataattatttatatatagcataagtgatcttcaaaattagtagaaaaatcactcttgtaatacaaactaataaaattactttgcataaaaaaaaaaactaatatagatgtaatttatttgcaggtatgactcaactttctctagccacaaaaaaaaaaaaaaaaaaaccttattgcgaatttaggacaattg

SEQ ID NO: 152138 - DNA, 708 bp, Cannabis sativa
ttgttaaataattaaaggctgaagtgtgaggtaggtgttgctgacacatatcatcacattttgcgaagctatcccatgttatgtttttctaaacactaagaaaacgccacttgtcataaaaagaatctttgtaatgaatacaaggtaaacggctatctgtcaaaataaatgaatagaaagaaactaaacactgttctgtcaaaaaaaaatagttataacattaaaacagcatttaatttatagaaatgttaaaagttacaagtggtggctagtattctcatcgttattggcctaactaaatatcagatcttatataatttaatgtaatagtttttatggagtattaatagcaaatcacaacgtaacatgtcgagaagatgctaggcactattggtgcctaataacaatactctttaatttatgactgtactaattagagataaaaatttatattgtgggaatggattattgcggggatttatttttaatgggataagaattctcgataaacgtatctgtataaatcgatattattccattctaattccttcccgatacctcccaaagaaaatcccaaatcggatcccaaattaacgtgttagtgtgaggttatccatgcggttatgcactcttcgtataggaattcattttctgaaagatcctggctttcgtgctttggtgggtctccgagatcctttcgatgaccta

SEQ ID NO: 152139 - DNA, 614 bp, Cannabis sativa
attaattaagacaaagagtaaccaacactgattgagtgtcgagttgatacaaattgttgttctgttaccatctgcttaatcttttcttttacacatgcctccagtaccaattgtaattaactgtgggagtatacttcccccaagatctattctttacaaacacacagtggatccatttcacctgtacgtttccttatttgtttgccacaacccacacatatttgcccaaagttggttggttccataacaattgtttctaaagcccgaacccctttcttttcgagacttacaaagttctgaccaagacacataacaatttctccaaaatctgaaactctttccataaaaaagatcgacaaataacattgatttgctcaaaaaaaaattgcgtaacaatattatttgaacccaataagcatgaatataaataaaaactcatactaatacaaaattagactttagaggcagtttttaagggcttttagcgtcgatttttcgtgaaattctctaccgacgctgtttcaggtgacgctgtaaggtttataacaactgacgccacagggtcccaatggcgttaattattatgaaaaacagacgccatagggaccctatgg

SEQ ID NO: 152140 - DNA, 704 bp, Cannabis sativa
cgagagggcatcttcctccccccaagctttacttagccctataaatagtgatgcatattctttgggcaagagatcggtcgaaaagcagttgagcttggactataccctaaatatataatctatgaattatatatttaaagatattgttgtaagagctttaagaaaagaaatcattccccttgatcttaagtcaatacaagtaacggggattaggctattaccgaactgcttggggctgaacctctataaaattcataagtctttttattgctttatcatatatttgttattataaatcatttatcacttataaaatagactcgttgtcgttgcctaaaagcgaggtcaacaaagggagatgtggataaaggagatgtagattgtagagtaaaggtaaaaaaaaaacatagataaatcaaatcttaaaattttaaaaattaatcccattaattaattataaatgaaaaaaagaaaaaactcatttaagatagaagatacgttttgggcttcattccattccttaataatacacctacctcacaatttctaattaaactataataatatatggagcatgcattgcaggctctctaattctcattactctactctcaaactactctcttaactattctctcgctctatacactctatgactatgcatactataagctcactcaattttttatttctctttctatttt

SEQ ID NO: 152141 - DNA, 574 bp, Cannabis sativa
aaaaattacataagctatgtaaatactctcgttttacatcaaaacttatgttttcctattagagcatttctaatattcacttcttagatttcacattaggatcataaatcatatttaggatgaccagtctaaaatatgtaattaaaacaaataaaaacaaatcacacaatatagagaagagaaactaataatcacattaactaaattaaagaaacatcatataacattcatcatatccctaaattgggaatttagttcaaaaacactcatgttcagatccataaaaattgaaacaaaagttaacataaagacataaaaaataatgtagatatcttcaaatggtgaaattacaaaactggccaaaaatctcatctttagcccatagtcgcgactacctaaagcctagtcgcgaccataagctaatcttaaaaaataaattttctgcccaaattccatagtcgcaaccctgaaaaaaggtcgtgactatagaaaatggtagtcgcgactactggagcaaattgtcagctttagtatctctcagtaaaatgtgcataactttcacatgcaaactcca

SEQ ID NO: 152142 - DNA, 883 bp, Cannabis sativa
gagagagagagagagagaaagctcctgtaatgtaaagagaaaactgagatattcaccatgaattcttactgcaaggttctttagtttagttcttgagtggattgagggttgtaaaagagattattcactcttgaagtgacttctctaagtgtgtgagatttgtttgtaattttcagtttcatgattggtgatctcaaagttgtatcatttctctctttcagatttccattacaatgttatgacatatttgattcattcaacttgattaaactcatctcttgttaaatttcttatttctggttttctatttgtttgttattgctgtcattgtgattgttgtccttgaatctttattatggtaatcttgatcaagttctctaatccgtaacaaatggtatcagagctggtgtagctcaagaaaatcaagatttgattgatcaaagatccaaggttcaagaatgtcaatggctaagttcgaagttgacaaattcaatggagaaaatgacttcgggctttggagaatcaaaatgaaagccctgctggtacatcaaggcatctcgaaggccattgacacttctacaattgcagaaattgaagacaaaaaaaagtgaaggaaatatagatcaaggctcatagtgccatattgctatttttgggagatgaagttcttcgagaagtgtctgatgaagaaacagccattggtctctgggacaaattggcaaagatctacttgaaaaaatctttggccaacaaactttacttgaaaaagaaattgtttactatcaagatgggtgaatcaaaggagctgaggaaacacctggatgaattcaacaagatcatactcgagctgaacaacataggtgtcaaaatcgatgaagaagat

SEQ ID NO: 152143 - DNA, 624 bp, Cannabis sativa
gtgctcataactcacacgcagacgcattggcccgtttggcctcgactagagaagctgaattactcgatgtaattcctgttgacgtattgacttaccagataataaatcgagaagaaataatggaaattgatatcgcccaagaagtcacctggatgactccaataatcgcatatctggagaggggtatcttgcccgaagacaaaatggaagcgagaaaactgcggcagcgggctgcccgatatgtcatctatgatggaagattgtatcgcagaagcttcagtcaaccgctactcaaatgtattgatggggaacattacgactacatacttcacgaggtgcacgggggtatttgtgggaatcatactggtggtaattcccttgccctaaaaatcatgcgacaggggtattactggcctaccttgcggcaagacgctttcaacttcgcaaagaaatgcgacaaatgtcagcggatagccacgtatgcccatcaacctccgagccgcttgcattccatcacaagcccttggccctttgcaaggtggggcattgacttgataggtgaactacctaaaggaaaaggcggagtcaagtacgctgtagtcgcagtcgattactttacaaaat

SEQ ID NO: 152144 - DNA, 822 bp, Cannabis sativa
tgtccatatctggttctaaaagtattcttcggtatgtcttcttctcgaactctgagttgatgataatcagatcgcaaatcattcttcgaaaacactgtctttccttaaagcttatcaaacaaatcattgattctggataacagatacttattcttaatcgtaagcttgcttagttcccgataatcaatacacattctgaggaaaccacctttctttttcacatacagaaccgaaactctccagggcgatacactaggtcgaataaacccaatgtcaagcatcccctaaagttataacttaaactccttgagtctcgctggagccattctttcaggaactttagaaacaggttcgactccatgtgtcatatcaattacgaaattaatttctcgttgtgacggcacagcaaccccggcaactcctctgaaaatacgtcgagaaaatctttcactgtcctgactgcctctgtcccaaatatttcaggtctgctgaaattgattactactgctagaagttctacacagtcactgcatagtaaatctctagccctttatacaaagacaaccgagatccaagacccctggactgctccatcctaaacaaatggatgttcaccttcgggttgaaaagtcaccattttctgcttacaatctatactggccgaacacttggacagaaaatccattcccagtataatgttaaactctgttaattctaattttataaagtcagcgctcaactccctatcttcgatcctaaccggcataaacctagagcgcctattagagatatccaacgcccactaggcattagggttccaaa

SEQ ID NO: 152145 - DNA, 764 bp, Cannabis sativa
cacaaaaaccaaatgttgaatgaaaggaaattgaactcctaattgcttgtatggtaaccaagctatcagactcaaccaccacatttgagagatcatgtacaacaatccgagttgacatttaatggtaaaatttaactaatgttttaaatttgcaaataaaagtgaaattaaaaggatattgcaaaaaaaaaatcaaaaaattaagtgtatcaaaattaaaccataaaccataaaggagtttcattcctaatttccttttttttttaataaaagaaagaaaaaaaaaatagtaacatatttggtttacttgttagttgctcttgtgtaatataatcaatggtaaacttgacaagaattaaaataaaaaaaatgattttcgagtcaacaaaattgttagtaatataattaattaataatccaagttgttggatgcaaaaaccttgactttaatgttgtctcacgaccttatctctcacgtattaaatcaacctataaatattatttttttttatatataaaatataaattaaaaatttgagaaatataaatttgacatttaagttgaaaattctgttttatttattaaaaaaaaaaaatcaaatttctatattaaaactgaaaaatgataccgttattaccatgaaaaagtggtataaatttaattgaaaaaaattagggttgcttaattgggttcataatcttattagtagaatttacgtggagtatgggttttttaaaccttttatgataaatatggcataatt

SEQ ID NO: 152146 - DNA, 514 bp, Cannabis sativa
caggccaatgtgtagatgttgtgccaataagttaggagagataagatattattggccctataccttagtttcaatgtagggattggcggactataggttgagacccaatggaagaattggtgaacactatttacgtgatatgtcataaagtaactattggtgtagcctccattcttcaacatgggtgtgtcattagttccgcccaaccactgatagccctgctggctaaagtaaaagtatccagtcatgttctggcctagattggatttcagctcaaagtaatacttcacctcgaaaggtaaagattgcggccaacctagctcagcatataggatgaagagcactggaaggtactttatccctttcagtgtaatatgagtcaggcacaacttcaagaagtttgttatgtccctaaagtatgggtgcaagggaagtaccgctccttgctcaatgtaacgtgcgtgctaagatggcacgttacaagctaagtgatgcccacaagttggccaagtgg

SEQ ID NO: 152147 - DNA, 944 bp, Cannabis sativa
  modified_base (69)..(69): a, c, t, g, unknown or other
  modified_base (189)..(196): a, c, t, g, unknown or other
aaagtcaaaactcaagaagtttgacattttctcgagttagggcgaaaaatttcatgaagcttagaatangcaagatgaaagacagacgttacgcatttcagaaagcaagcattattgaccgtaaaattgcatgaagccatgacaaagaagaatcgcagagtttgtgaacctagggtttcgtaaatattnnnnnnnncaaagtcgaaggtgcattcaaaatgtaaacatgcaagaataagcataaaggacatcaaaaacttactcaagagtcagatatctgggttcgagcaacatcaatccaacaagtagatttgatgaaggcacttcagcaaacttgaagccaagaacctttcttttcgctctgaactcacttagcaaagagggatggtgaaaatgagtttatgtgccaatgctggttgatatttataagcaagtcacgaaaagaggtaatcatttcagaggaacctcagacgcttcggttccctccttaaaagcaaatatgggaaatcaaaaataatcaagtatagccgtcagccgtggtgagagaaaatcgaatttcgaaatattcattgtcagagcatttattagccgaacaccaaagggacgcccaatcagcctcacatcgagtctcggacagtcgcgctcgacaggtgtccccatcaaaggcagaagcagctcggatgaagtctacacgcaacttcagaagtcccgtacagacttgggggcaaatattgtcccaatttttgcactctgacgtggcatcgcataatggtgacacgtggaatccacttggagtatttgctgggacggtgcagtccgagcaggattcctcggtggcatgcccaaatcaaagcaatcagcaatccccgcagagcaaccaacacttagcgaattcagcttttgcattgtgagtcatcaacgaagtgttggatatattttaccag

SEQ ID NO: 152148 - DNA, 744 bp, Cannabis sativa
tggtgttattttgatattatatttaagtttgagcattggagatgaccttagaccatctccaataggatggtaaaaatttaaaaatagtgtagtttttacacaaaaatatttcaactcaactttaaatgtcatcttatatataagagaatctacagtgctccactaaaaatagtgggacacagtgagacactgagacatagcaaatttttttattgttactttatgtacttttaaataattaaattagtttatcaaaaagtaaataattatataatattattatattaataaaataatataataataaaaaaaattgtataattttaagtattataattagaataggaaaaaatataatattaaaatagtatatttttagtgttgatttaacacaaaattttatcactggaatggcttttattgtgatttataacacgctatatttatgaaaagtttgtttacaaaattcatatgttatttctaatctttgaaggttatatttataactttaaagattcaaaatagaaggaacaatttgcatttcattatgcaaccgtatatattactaatttttagaaaaaaaataataacgtatgagtacatttttttttagaataattcaacaattattataaattaagagtcatttataataatagaaaaaataaaatgaagtattactaaattaaaaataaaaaataacaagcgtaaaaatactccaaacacgattaaaacttaattaaa

SEQ ID NO: 152149 - DNA, 565 bp, Cannabis sativa
tatatctttgggttatcctctgccccttggtctgcgagccgtgaggtttgccttgtgaatctctttttcccaaggtcaggttgattttgggtagcatcttcctgcgcggcctttactgtagctatttcacactccaactcggtattacgccagtttacttcctccaatcgacgcctaaggtggcagttttctaattccacgactggtatgtatctggttgggttgtaagctccatcctcatcaacctggttagggagggaccgattgttgctcatccaaggtgcgtcaagccaggggccccaatactgggtcttcctggggcttgcattatgttcatgcgatgactcgatagatccctgaggactcaatagttcttttccaggatgatgattgattccttcttgacgattattatctttggtatcatccatcacttttatgtcatggggctatttcagagctttttcacagaggctctcaatgaaagcatgaaactgttaacgtagattttcattaaccaaatttgagcttcacgatgataaattcaacacagaaaaaataaaag

SEQ ID NO: 152150 - DNA, 582 bp, Cannabis sativa
ttttttttgtgttttatgtttttgaacataaagaaaagtaacattaggtgaccatcgggccactatcggaccaccatcggaccatatctactaccaattttttttatatttttgtacataaaaaaatagcatcggaccaccatcggaccactatcggaccaccatcagactatatctgcatttatagatgttaagctccatcattaagctcgtgaggaaggcatcgggccaccatcggacaggccatatcatcgggctaccatcagaccttcatcttcaacctttactcattttaacaacaggaaggcatcggacgaccatcgggccagacaaaaaaaccaattttttgcccaaaactcaaatatgaccattttcgaccctaaatctaacatctactcacatattacaaacattaattatacaatttattcctttgacaatattgccgatagtgaagcagtggtccgcgatggtcattgagtctgtgagtatgtggtcatggtggtcgtggagagaaggaaccaagattctgtggtgggttgtgggtcgattgtgtgctccttcgtgtgcgtgtttacagag

SEQ ID NO: 152151 - DNA, 710 bp, Cannabis sativa
ctaagggcattaagtatttgtctgccctctttgtcctctacgcttcccaaggatggggtaccccttctcctcacgaggttgcctggttctttgagttgaagtccacctgcaaacaaggtaggtcggggtacttctatttctctctgtcaggcttcaagtggttgactaacatgaatatcagcaaaatagggcgttttgctcataagtacttcatggtgaaagatgcgagtattacccggactcgattttagcagattgtgacatatcactgtcctcccttcactctttctttagggattgagctcaaaaacttggtcggttgccaaggaagactgaaatatattatccagcctccgatgataatcttgtgaggtacgggctttatcctaaggattttattcctaagtccgtaatggggaagaagaggaaatctggtactggccagactaaatgagctcatgaggataatgagttgattcaactgaagcttgaagctaagttgaaaaggaggtgccagggccaaacaatatgctcaggagcctttgaatcccgaggatgaagctgaagaagagcaggtgactccactgaagaggaagaagaaactcccagcctcgcccaggcccgttgcacatgcattcgcataagggagcccatttaacctgctcagccatctcctcttgtgtttagaaaagggaaagccgtcatgtttg

SEQ ID NO: 152152 - DNA, 510 bp, Cannabis sativa
aataatttcataattaatcacaatcaactgataatttccaaattaactaagcgggctttacactaattgaattctagcttctaaatattaaaggattatggtgatttgtttactactactattttgtttcttctatgtaaataaaatattagaatgcctatagtacttaacatagttcttttggaaggtgagtagtacaaatagaaattgtgatgtattgatataaattctttttttaaaggataatatattctaaccgtaatataaaaaaaaattgattgataatataaaaaaaaataaataaaaattgattgataatatacaaaaaaaattgattgataatataaattaaataataatatatatatatgtatatacaaaaaaaatgattgataatatacaatcagaccccttcgtcccccctctctctatctatctctctttttctctctcttcaaactcaaacacaaaagaaaacccacaaagctccataaccaccacactccggcg

SEQ ID NO: 152153 - DNA, 522 bp, Cannabis sativa
  modified_base (160)..(167): a, c, t, g, unknown or other
  modified_base (266)..(273): a, c, t, g, unknown or other
tagtgattttccagcatatgcaaatttattatgatggagcactaaaggaaaatatgcatgcccatcttgttatcaagatacttattctttgttgttgaagcatagccaaaagtattattatatgggtcatcatcgttggttagaaaataaccactcattnnnnnnnnatgaaaagtctttcgacggtacaaaacagaaaagatttgctccaataccattaagtggttcaatgatactagataaaagtaagaacacgaaggtttttnnnnnnnnttttgcagttaaaattctgcatatgtctacgagtcaatgttattagatttctgatacagttctagggccttctctcttatgaattttttgtccccttttttagtacaacatgcctctatttataattacatagtccgacagttaattacatagttgtcggatatctttacaacaattattccctaaaatcgtggggtttgattacataccacgtaaaataaatgcgattattgttggaaattattttac

SEQ ID NO: 152154 - DNA, 879 bp, Cannabis sativa
gttttcaaccataaggggtcacaagttgatcattaatgccaatttcaaccataaaagtgatgaaagtcagaaaaattatcataaagagttgaactttttgcttatataacttgtattggcaataaaaatcaaaactttacagctcaaaatttggttctacaaaataaagtctgttttcttttgctactttcttcagtcctttttacaacaattgacatttatataacttaacaatcataactttacagagcaagttttagtttgtaaaatcaaaactgtaaattcacaacagatgatttttgagttattctatttctaaagacctccattgtgaaaacatctgtacttaactactacaatatctatagagagagagagagacttatgtaatgatatcatcacccttttgtctcatcctttatatatcaatatctccatttcagataaagttaaaatcaactatcaactgcatatcataaatatcattattttattagaaaagagaaggatagcttaagaagcaacaaataatacatatgaaaaaaatccaaatctgggaaaactaaaccagataaatacaccaaaacagctaagcttttactaagttcaatgttggagattttcattcaaagtacaaaaaaaaaatgctaaaaatgtaaccttcataagtaaagtacattagttcttaatctttactttgtttcaatttcaaacatctcatgatttgataaataataaaacacagaaaaacaaactaaagtttccaactttacacaaaccagattataagtattgcttattcatgtgggcaaattttacattaacaaagtaaaaagaaaaaaaaaaaaaaaacagctgccgacacaagaagaaaactcc

SEQ ID NO: 152155 - DNA, 601 bp, Cannabis sativa
  modified_base (413)..(421): a, c, t, g, unknown or other
tagatagttatttctagtaactaattatattttttaatatttaatgaattagaaaaatatattttagttaaaaattaattattttaattaattttggatcaatttaaattagaatattttttatagcattaaattagaattaataattggattgattttattcaagatactaaattatttgtttctttatttaatacatttaattaaattgaaaattaaatatttaaattgattttattctagacacttaaatattagacacttaaatattatttattttcagaacatttattttcagaacaacttaaattagaataattttaaaaatatattttattttataattcatttttccaccaatttcgaaattgcattatttaatgcagataattttgatttttttttttttgaannnnnnnnnaaagttgaaaattaattatttttagattaacttaaatcaagtaaatttttcattaataagtaattaaaataaatggactaaaatatattatattagaaaaaaaaagtaattagttagtgaaaaatctacatagttattttctgtttgcttgaagtatttttctagttacatttaattaaa

SEQ ID NO: 152156 - DNA, 584 bp, Cannabis sativa
aaatcaacgcatgtgcgccatgagccattaggcttgggcacgagtacgggatttgctaaccagtttgggtagaacaactcccttatgaagtcgcatgctaaaaggcgatctacttcttctttcagcgcttggtacctcgcgggggccattttgcagcgcttttatcggacacctcgcacttcgaggtcaatgttcaacaggtgatacatgacctgcggagatattccgaccatgtctgaatgtttccaggcgaaaacatccagattttgtttgagagaagttacaagatttctccttgttgaaaagttagtttagaaccaattttcaaaaccttgttattatctaagggatcaatggtacctcaatagtgtgttccgcggcttgggcggtggtggtgtaatcgaggaccctaggacccaagtctggtttgtcttcgtgcggtatttcctctattttgaacacctcctgtcgagggggtggtgcttctaacagataaatgacattaaccgacttcttttctgcgagcttcaatgtcgcgttgtaacattctcgtgagtccgattggactcctcacacagatccta

SEQ ID NO: 152157 - DNA, 885 bp, Cannabis sativa
agctaaggtaagccctagtagaacccttctctagtttttaagtttttgcttggtttgagtttatgattttgagaattagtggctgttaggtttaggtatgcatagggttcaaattctaggcttaatttgagttgattttaggttctagcagctggtagtaatggttggtttggttgttgtgcaagtttaagctttgaactctaatggcataaattgattcattgggtttttctgtgaaatactggttggaaaatattgtttatgcattgtttaggtactctggaaagtttggtagcatttggtggaaaattgagcaagaggtgaagagtttggggataactggtgcaaaccagctagccggttttgccagacctctaaaacctgacaggattcccgaacacttcattttctcaattttcgtccattttagtgctgtggttgggtgcttccctatttccagagtttgtgtaatccctagaaagtgtaacagaacctagggttatggttttaggttacccgggattagggttttgttcatgtaacttacccggtttcataatgtggttagggcatccatctagtgcgagacttttcgttcaggtcagccagcacacttgaattcggaaagaaggtaagaactgaatataatgtgtgatatcaataactgaatgtatgtatatgttatgtgtatatacatgcttaaaatgttagttgtactaccaacacttatacgattaaggtatagagtgtattggtatagtgattgttgtctgagagtaccgttataccagcataagtacagggaggtactgtgtatgtgtggtacatcactcagaggtactcagggtatgaaataaaccctaccaacactcgtacagagaggta

SEQ ID NO: 152158 - DNA, 640 bp, Cannabis sativa
  modified_base (308)..(310): a, c, t, g, unknown or other
  modified_base (532)..(532): a, c, t, g, unknown or other
acccgaactcaaacacccacaccttgaatcagatccaaacctagacccggacccaaacccaaactcgaacccagaaaaagatcagaaccaaggacatagatcaacaattgaatacagactcagatcgagattggaacttgggactcggacccaagctagaccaagacctaggacgtgaacccagaccaagagcctgatctggacctagactaaaatttggacccgaacccaaactcagacgaggactcgaattccgacccgaactcaaacccaaacttgaactcagaatcgcgaatggaactagaacnnnactaggacaaggaccaggaccaagacctaaacccaaacccaaacccaaatcaaaacccagacagagacctaaacccgaactgagactaagactcgaacaggaacaaagactgggacccaaacccacgcaataacaaggaccttgacccagaatcacgatagggacctgggaaacagaactaggaccgggacctagtacatgacccagacccgaacttgaacntaggacccagctcgtgacccagcaccaaaactggaaccagacttggacccgagattgggatccggagctctacacagggtttggacaaaacccgtagtcggtgtctgg

SEQ ID NO: 152159 - DNA, 556 bp, Cannabis sativa
  modified_base (46)..(47): a, c, t, g, unknown or other
  modified_base (397)..(397): a, c, t, g, unknown or other
gaacaccctattcatgagatccataaaggccgcaggagcattagtnnatccgaatgacattaccaaaaactcatagtgcccatatctgtaactacaagtagtcttcggtatgtcctcctctcgatatctgagttgatgataaccagatcgtaaatcaatcttcgaaaatactgtctttccttgaagttgatcgaacaaatcatcgatcgtgggtaacaggtacttgttcttaatcgtcagcttgtttagttccagataatcaatacacattctgagggtaccatctttctttttcacaaatagaactggggctccccagggtgatacactgggtcgaataaacccaatgtcaagcatccccttaagttgtaacttaagctccttgagttctgctggngccattatatatggagctttagaaacaggtttgactccaggtgctagatcagttacaaaatcaatttctcgttgcggtggcaatcccggcaactcctcaggaaacacatcgagaaagtctcttaccaccctcaccacctcaggcccaaatgtttcgggt

SEQ ID NO: 152160 - DNA, 769 bp, Cannabis sativa
ttttctaaggcttcagcccttcactaagtcgagggggccgttcacttctgctggaccggtggcatgtccggattaacattacggatgtgggttatgacatgtggacttatgccggtcatgtcttcttgacaccacgcgaaaacgtctatggcgcccctcagtgtctttattattttttctttttcctccagttctaggctctttcctagtcggaggacttcggtggactcgaggtcgcacactaacacttcctcaacgtcctccatcggttctacaatttttttggatcccacgcggggatccaactcatcttcttccgccatttctggctcaataatttctcggaccattaggacgggtaggtgggcagcaaaaagttgtaacacttcctggcctcccgttggtttcctctcacggttcctatcccaggcatttgagtgcggagcttcaggcacaagtgccgtattgacgtgactgcaccaaaatccactagggccggtcgcccaaggattgcgttataagctgttgggcagtccaccaccacaaatgtgcagtatttgaaagtgctttagggtgtgtccaggcacaaggtaactgggagcctcacttttctcattgggataagtgttgttccattaaaccccgtgatctgggaaccgttcggtgaaagatctcgatctgtcaagcctattacagtgaaggcctctttgaataataaattcacagaactcccgttgtcgatcaagactctggccacgatcttattggc

SEQ ID NO: 152161 - DNA, 675 bp, Cannabis sativa
aaaaataaattatgaaatacctaagaaaaggcgtgaaccttttagtgttaagttttgccgacacagtaatgcgtcgatcaaatatttatttaaaataataaattaattataataattataattataataataaattaattatattatatttatattaaaaaatacaaacataatttacattgataattaggaatttttataatcaaactaatatagcaaaagtgttgtactaaaattagtaagtaatgcaaataaacaaaatattaaaagatgttcgattggaaaaaaaaagtgaagttccaattggtatataaaatatgtaatattatatagacgagtaatgtcatcgtcattgtttatctgagtctcggaaggctgcgatgacgatccagcaccaggagcaagtgatgatgatccaataccaggagcagcggggaatggtggaagatccatggggccgaagaattcatggcaggtgctcttttggccccaactgccttcagtctcgggagatggccaaagcctcttagttgtcgagattgctcccccgagtacttgcgtcataacaggcaagtctcgggggtattttgtgggatctacggcagtctcatcaggctgatcctctgtgggcgcaggttgagttgcagctatttcaactatttgctcctaaaacaa

SEQ ID NO: 152162 - DNA, 626 bp, Cannabis sativa
agtccactgttgcaaagattttgtaggtctcccatttcacggcagatcactcctttatatacaaagcaagcgtctaataatttacacaaggactgcattgattgtcaatccatttgcacattgatatacaataattaatctaaaataacgtaaacgttaataaataaagaacagtttctattcactaaatacagcaacgtatccgactattaaggtacgagttcgctgttcatattcttgcataagcttgtggacttagaatacacctaacattttagttgagtctaagatgtctgcgttcttgtatagtcgcatttacggacatcgtataacgagctgataaaaccaatacgtgtgagtctatattagtttatcgaggctgttgggtcatcgagaccaactcgcgctatagagaatcgatctctatggttttgtaggaggatcgagaggatattcacatatatcttggtttatgcgagttaaatctgttccttggtcctatataatgcgagtcacacgaatgcgactaggctttgtcatatttgcatcatctcgcttgagtttagctcaggcgaggtttaaactcgaggagtctctcattgacatctcagctttccttggggaaa

SEQ ID NO: 152163 - DNA, 654 bp, Cannabis sativa
tagaacctgaacaagaatcgccgaaccaggaccctaaaacaagactaggaccgtgacgaggacccggacccagacgtggaaccgaacatagacattcctcagaccccaactgagattggaacttgggcccggacacggtcgtgtaccaagaccggaacatagacccacactttgactaaaatctgggacccgatccccaacacagacttggacctagatagggatctggatacgaacctggactcggaccaagacccagactgggatcaaaatggtggacctagatctagaccgagatcctgaccaagacccaaaccttgacccgcactcgggacctgaacttggacctggactcgaacctagacccagatttgggttcagacctggactcaaacaaggacacagactctgactcgaactcaaacccacacctagaattcgacccaaagctagacccagacccggacccaaactcaaacccagacaaggatcagaaccaaggacttagaccgagaattgaatccagacttagatcgagattggaacttggtacacagaccaaacctagagaaagacccaggacccgaacccacacccggagcctgatttggacctagactgaaatccgaacccgaacccaaatttagaccagga

SEQ ID NO: 152164 - DNA, 756 bp, Cannabis sativa
  modified_base (258)..(259): a, c, t, g, unknown or other
  modified_base (315)..(316): a, c, t, g, unknown or other
tgttgatgacattttgattattggtaacaatatcaagaaaataactgacatcaaggaatgcttgacactcaatttgaaacaaaagattttgctggaattgcttattttcttagtattcagattatcaaaaaccggaagaacagatcccttgctctctcttaagcaacttacattgataaggtgttagagagattctcaatgacaaatgccaaaggggcacaaatgccctctagattttgtatccgtctatctaaggannagtgtcccactgatcctcaagtgatagaggacatgagaagagttccttatgcttcnncagtttggagtctaatgtatgcaatgttatgcgctagacttgacatatgctatgcagtaggaattgtgagtaggtatcagacaaactcaggacaggaacattagactgtagttaagcatattttgatatatttgaaaagtactaggaattatgtgttagtctacaagggtggtgctttcaatcccatatgctataccgactcagatttctaggcttgtcttgatgaaagaaagtctacattgagatggtttttactcttggggtggagaagttctttagagaagccctaagcaaaccgtaatatcagactctaccatggaggctgagtacataggtgtcgttgaggatgctaaggaacttgtttggctaagaaagttcttctcaggacttggtgttgttcttggaatggaaaataccactggttttactttgtgacaaca

SEQ ID NO: 152165 - DNA, 806 bp, Cannabis sativa
cctcagccttccgtttgtgatcagggttgccactatcgatccccttactgacattaccactagcaggaggattcgatgccatgacgacatcctttatagtctgctcttccgcaacatgttactcagcctcctcagcaatcaaggctagctctacctctttcttgtacaaagtttcatgcgaagtggtaatcttcaactgattatggcattcagtcctctcacatttttctgtttcctggtgacatctgtgggcaccaaatcaccagcaaacttagacagccgatcaaactccagagtatattcggcaactgacatcttcccctgagtaagcttgacaaagtcttccatgtgagaagttctcacagcgatgttgtaaaacttttcctcaaacaaacttttaaattcttcccaggtcattacactgacatctcgggtttggcccacgatatcccaccagacgcgggcatgatcttgtaacatgaaggttgcactgttcactcttttagttcccgtcacccctatattatcgaggatagggtaacagtgctcatccactactctgcctttattatatcaatacctcccaggaaagtcagaggctgtagcttcacgaaccgctcaaataccgagtctctatgcggcataacaaacccctggttaccctctactggcacaggtgctggtggtaacacttgatcaacaggggcagccggtgccggttgccttaatcctcgcaactcatcttcttgacgaagtatgacacttcgcatttcttgaaacatctgctgccagtcagcaggaggatt

SEQ ID NO: 152166 - DNA, 684 bp, Cannabis sativa
ctgccctatttgtggggaggctgaggagaccacagagcacttgttcctgtattgcaactttgccttccacctttggcgatcttctccttgggggattatgcttgttctggattcgggagcccgaatgtgggactgggttacttttctatggaatcttaaatccagaggagttgatactgataagctattcatccatgcctcgattgtggtagatacgatttggagggcccgcaacaacaaggtacataataaatcaatgtgtaacattaaacactatatcgactctatttcttcttgttacacagactatggctcctgccttctttcttcccctgcacagtctgttgggactcaggcttggtctccgccgccggaagattgggttaaaatcaattgcgatgtcaaagtcggaggtgaaactatgtgtgctgtgcaattgcgagagaccataacgaatcagttttatgggtggcggtaaaaaggctacacttctctgacccactcactggagaagctgcggcctgtcttttagccatggagacggcgatctcattgcatcatccttttattgtggtggagagtgattcagagactgttatcaagaacctaaaaggggatgactctatttgggggattgagaactatgtgcgtcagtgcaaactcctttctacttttatgacaaat

SEQ ID NO: 152167 - DNA, 1433 bp, Cannabis sativa
  modified_base (1270)..(1273): a, c, t, g, unknown or other
ccatccctaccataaacaggagtaggaagggtgggggtcacacaaacacttggagtcactcggggctcctgaaggaatttcaccgcaccctcggcttgcggggccttttcaaccatctccacatatgatgttgcttcattagtagtaatcaccagatcatgtgtaatcttcacattcaaaccggccagatacttttctttattactgaaatctgttggcatgatacacacagtgattttagccaaacggtcaaactttgtggtatattcagtaactaacatcccctcggtttgcactaactcagtgaactctttccgcttagcactgcggatatcttcattgtaatacttggcattgaataactcctagaattcttcccaggtcataatagtgacatcccgggtgagggacaccaattcccaccacactagggcgtcttcctggaactgaaaactggcacaggtcacccgatcattaccaaccacccccataaaattcaaaatttgctcaatcaccgtgagtcaatgctcaaccttcatcacatctggacctcccagaaacactagaggttcttgcttacagaacctttcgtataacgactccatacggttgccaacaacaggctgctctgctggcaccactggagctacaacggcctgagcttgctgtggagtcactgcaagaagaccctgctgccttaatctcaaaattttttcatcttgttggcggattcgatcttcatctctgcaaacatctgctcccaatctggaggagcttgtggtggatttacaggacgaccaccccgagctctaccacggccacggccgcgaccacggggattctagggaatttgatttccctgaccgcctccggtcccaaccatgttaccctgacttcttgtatttcgctaggcgtccattttataagacttagcctgcgaacccataagccacgcaggttagacagcggtcgtaaaacttaataccgctcttatggattttaaggcaacacactttaaataaataaccataatctaacatgctttgatattcaaataaatactaaacaagtacgagcttactgaactgtgagccaggctttctctgatgaagattgtacacgtcttgacaaacttcggtagacaaacctggcgactctgataccgaaattgtaacaccctaatgctaaggtacgctactgtgctttttgaattatagtgctatcttcgctaatcaaagaattttattgaaaaacgtgtcaaattaaaacnnnnatattaaatattaaactttataatttacataatcatttacaaacactgggatcctgttttttaaactcttacacaaaatatgccaaaatacataactaggtcgcacagcgactacaaaataatatccccagatgtcccgagaccgaacactcaaggtcgc

SEQ ID NO: 152168 - DNA, 663 bp, Cannabis sativa
aaaccctagaccctaaacccttaaaatctaaacccaaaaccctgaaccctaaactataaacactcaaccgtaaaccctaaagctataaaacataaaccataacctctaaaccctaaaccatataccgtaaaccgtaaagcgttaacgcataaagagtaaaccataatgaaaccctaatgtcataacagaagaccctaaaccctaaactcaaaaccataaatcctaaaccacaaaccctaaacccttaacgctaaatcctaaacccaaaacccaaaaccataaaccgtaaaccctaaatctaaaccctaaacacttaaccctaatccctaacccctaaccctcaaaccctaaaccgtacacccttaaatagtaaaccatataccctaaactataacaaaccctaaaccttaaacctaaaaccctaaaccctacaccctaaaccgtgaaccctatgccctataccctaaaccctaaaccctataccctaaatcctaaaccttaaactctaatatatcttaaaccctaaaccctaaaccctaaatccaaaacacttaaccctaaaccttaatcctgttatttttttttttttgcatttctaatgaaaagtgtcacctaatttttaggctttattataaaccgtcgggaatactagtttttcttgac

SEQ ID NO: 152169 - DNA, 547 bp, Cannabis sativa
atatttgttaatcatcaaaacaaggagacctaaaagtttgagttaacaatcttcctatttttgatgatatcaaatatttgattattttgaaaaagagagatgaaaaattgaaccaatatatattagattagcttccctttaatgtgtgcaagggtaaaagaaaatttatcttgcatgattttgtaaactccccctcaattttatactcaagtttaaaaattattagatatcccaaaaaaaatatttatagaatttctctcccttttaattcatcaaaaagggtggcaaagaatttacaaaataaaagccaaaataaaacataccattcaccaaaaaaaaaaaattgacacacataccattcaccacaaaacataccattcattataaaaaaaatgttaaacacataacatccaaaataaaataaaaaacataacaaactaacacatcaaagtcaaaaggcactaagcttttgcaaataaactaaaaacaaataaacatgagaaaagatgcaaaaaaaaaaagcggttcagcaggaatgccgagaccg

SEQ ID NO: 152170 - DNA, 517 bp, Cannabis sativa
agttttctattacaaggttaagaagagaaattttgaagataagtctattcaatggacttatcaaaacttccttatcctaatattataggtttgagattgtctaaacctagggcttgtggtatgtctagaaatttacttactcaaatgcaagcaacttactttagtaagatgctggagtatatttctaatggctaactctatggaaagttttttgattcctagacatagattttaattatcaaaggaataaattcaactattccagagaagataaaagtcatgaaaacaattccttaaggattaacagtgagggctctcaggtatgctttgcaatgcattaggccagacacctactgttgagtgggagttttgagtaagtatcaatttaatctaggaaaggaacattggaaaacaaacaaatgaatcttaagatgaaaaagaggaactatatgttagtcgactaaaatcagttttgtagactacaccaaatcagttttctagacttgcgttaatgcta

SEQ ID NO: 152171 - DNA, 512 bp, Cannabis sativa
atggtttggaactttaccccacgttttgtcacgacccgagtcttaggccgtggcagatatgtaatatccatagcttcggtggtcaaaggtcacactttgacccttgtaggaagataaagcttataaatgatccttttatttatatcataaaatactaatttaaaagtaatggattaactcctatattaataagaaaatattagtaacaaaatcaggaccactcatctatataaaagaacaattatatccccacagttatgtaatcaccaaatagatagatttaataagtcaataaaatatcaaaataataactagcatccattattcctcatttctaactagtacatagctaaattaagtcatccagaccatccatttcagcttaaatataaaattttttcattagatggttaaagagtaaaataagactaaactaataacgacttcctttcccaacggtaccatcctcatccactagcatcaaactgagttcgtggaatgggagaaaatag

SEQ ID NO: 152172 - DNA, 505 bp, Cannabis sativa
  modified_base (27)..(27): a, c, t, g, unknown or other
attttgctcaaatatgctatcatcttntctccccgagcctcgtattctccggatatgtgatttaccaccagctgtgaatcactgcagattttaatgttctcggctctcatctctcgggccaactttaggccagcgattagagcttcatactcggcttcgttattagatgctttgaatccaaacttgactgcaacgtgtaggtgttgcccccaggtgtgacaagggaaattcctgcaccagatagctgatctgtagccgacccgtttacgtgtagtttccaagtcggcttatcttcactgttacttggctgaggtgtttgtatcggctcggggttgctttctggtacgcttttttctttgcctgcgcattctactacaaaatctgctaaggcctggcctttgattactgttcagggttggaaactaatcttgtattggcccaactccaccgcccactttagtagcagtccagaggcatccgacttttacaatatttggcgtaatgg

SEQ ID NO: 152173 - DNA, 579 bp, Cannabis sativa
tcaaaactccgaaattctctcttttcttcaatggatctcttcatggattctttgaatcaaagagaggattaagacaaggtgatcccctctcacctctattattttttattggcatggaatacttgtcccgaatcctaaaaagagtaggagataagagtgattttgctttccatgacagatgcgatgccttgaagctcaatcacttgagctttgctgatgatgttctacttttctgtcgaggcaattacaaaagcatcatcctattgctacaaggcttgaaactcttttcagcctcatccggtttacaacccaacaaggcaaagtctgtaatttattgcagcaacatgcctgaatctgatatcactagagttttggaggcttcgggtttctcgaaacaacagacaccattcagatatcttggcatacctatatgtagctaaagaatttcaaagcaagaatgtacattgttgacagaaaagatgagtgcaagaattcaatcttggagcaccaggcatatctcatttgcgggaagggctgtactcatcaattcagttcttaccgcaatacattcttattggt

SEQ ID NO: 152174 - DNA, 515 bp, Cannabis sativa
cagaatattcttttatttttaaatatattctgttaaaccaagaaatgtcgttacataggcacttctaatatataaagatatgtatataaacagttgttaatagtaaccaaacattttagggaaatcgattatgtttttcacatttttttatatgcaatttttatccataataatttttttggaaaaaaaaaaaagtatgtatttacacacataaacacatataaaatgtgtaaaatgtgtaatttccattttcactaatttattgttttagtgccatctgatctactaaacaattgactatatatatctacatatgtctatacatgttaattactaaatattacatattaattgtaatattattaaataattaaatgaatatacatacatatatatgacctgtattatttcagaatataattgaagcaaaatgcctggatgattacaacgtgccattatattttccaagtgcaagagaagtgaaaagtttgattgaaaaagaaggatctttctgt

SEQ ID NO: 152175 - DNA, 530 bp, Cannabis sativa
agtctttagtgaactcaaacataaatattgtgatggtaattagataaataatgtaattttttaatcttgtgatgttgtcaatttttttttgagtattataggttttttttttgagaaacaacacaattaatcacaggaataattaatgtttaattttcttctctttttttttgttttgagagcatatatttttgatgatcgcccagattttattaccacataagaaatctctagatagaaatgatttagttccgtacgtcactgtattaattcccttccaaaatagtaataataataataatgtcattttctttttttcctttcgaaaataatgtcattttccatacccatgaatctatatagtgtaatctcatatatttttcatgcataagtaatatactcacgttagtaagtgaatatacacaatgaataagtaatatagatattattggataaatatagtctatatagtctccaaattaaatgatttgatgtgtaatattactttttttaacaaaaaaataaaaaaa

SEQ ID NO: 152176 - DNA, 808 bp, Cannabis sativa
atcgcaaatcactaaattaagactatgacaaccacaatgtgtatataatgctctaggatttatctctaataatcttttttgtacaccttggtgttttctttttatgttggagagagcagatcctctatctaatattggtgtctattttcctgtctaaccaattagaaatgtccacatcatttaatgaattaatagctttaatacatagcccttaacttaccgtttgcattattggaaactttccgtctaacaactatctaaccttcactcattaatatattgttctaaatacaataatatataaggtgtactgtgcagcaaaaaaaataattattcttttattggttatttttttttttccaactatataattttataagaggttcttacacaaatattaaattttgagcaaaattttataattttaatatggggcgaatttttttataaaaataatgtctttttataaaacaaccgttaaacaacaaaacagaacaattaaaataacagtagaataactaaaaaataactgtagaataactgtgaaaacttaacacattacacagtataaaacttacacattatttttgaaaaaaattccaccctacaataaaaaaagtaaaaacattaaaaatttcagtatgtggtataaaaatccctttttataaattaccttgtatgatataattgattagcccaaaaaaattgtattatataatttattcatcaaaaaagttaattttatataatttttaaaaagataattacataatgtactatttctttttataaaagaaattatattttt

SEQ ID NO: 152177 - DNA, 634 bp, Cannabis sativa
ttgggcagtcaccttgcatattgctttgtcttgtttttgagcttcttgactttcatgccttaggtttctgatgtctgttttctaaacatgttgttttttattttgtacagacatgtctcgtcaaatgtttgaggctctaaaaaagagaatgggcagaagctctagcgcctctcctgtggccaagaagtctaagggcggtgaggggtcctctactaaggaaaagaggccttccggggaggtcattgatctttccgatgatcggactgctgcaaacacctctacccccaaagctgccaagtccaaggagtctggaccaccgatagttgggtctgaacttgtcaggagtgatcctaaacgagtgcgggcacatactccacctttgccagtgcttccaaaggccaagaagggcaaggagatgttggcccattacatgaaccggctggttcccgaggtcagtgagcaactggcttatgctgacagtgactcttctttgaaattgctggggggcggagtcttgaaggagttcactttggtaagtctttgttaatgcttccctttaatattccatacttagctcaaatgctaattttttttccttgtgcaggccggtctgaagttggcatacacttactcc

SEQ ID NO: 152178 - DNA, 538 bp, Cannabis sativa
atgactttattatgaaattatgtgttttttgttatgaattttatgatatatatcatgtttatgaattttttattcttattgtcgaggcttacgccttgtggtattatggcaaaatgcctctgaacccgttttcgcctttcaaaacattacttcccactatttactcattgaagatggtgttgtagattttttaaacaacgcaaatatacgctattgcaacaagtaatatagagtaagtagagtatcaatcccacaaagactatattcctatgataatcaaaataaagtaaacttcattaagcacatcttctcaaaatggttatgcatgccatataggtatattcatatccgtatagaattaatttttgcaacaggtgcaaccgtctcttgataatctattccataggtttgagtaaagcctttggccacaagtctcgctttatacctctaaatacttccatcagctttgaattttcctgtgaacacccatttacaccctacaatcttcttgtccctcggtaacattacaatctcccaa

SEQ ID NO: 152179 - DNA, 690 bp, Cannabis sativa
  modified_base (342)..(345): a, c, t, g, unknown or other
  modified_base (545)..(545): a, c, t, g, unknown or other
acgaaacgacgtgtcgttttccaaaaacgacatgtcatttttagtgtttttggctgctgtcatttgatcaaatgacatgtcgtttttcctttttgaaaaaagacgtgtcgttttttcaggatcgtgctgctgtcgttttctcaaacgacatgtcgtttttcccctattgaaaacgacatgtcgtttttcatttttgagatcagccctttagtttgtaaaacgacgtgtcgttttgcgttttgcaaaaaactacatgtcgtttgtgcagtgcatttttcaaaaaaaaaaaaagggggaaaattctgaatttcttataattttttttatttatttggaatattnnnnattttcctattttgtgttaatttagtccataaattgcatttagtcaattttctatttttgtttaacacatatatctagtataaattgaaaatgaaaatttgtttaatttagtaatttattacctgatttatttagtcatgtaataattgtgctaatttgtataattgtgcatttaattatatattaccaaattgatgcantttattttctaaattaattttgaaaaatcttccattaatttcatattaaggaattagcatttaattaattgtcaaacattaattgtattaatttgtatttatttgacaaatttttgtttaatgcaattaatttagatttgtatga

SEQ ID NO: 152180 - DNA, 593 bp, Cannabis sativa
aacggtaagtttatgatatcttttgcattgtcaatatcgatccagtttgatggatactccatacatctaatactagtatactttactaatgccctagaaaggacataccacttatactaagtgtaagtaaattttattactgattatcacgttagtgtaaattcgatacactgataaatcatgggataaaagtctttgaagcatataatcataattactttccactgtaatgacaatactataattgtgaataactatatgttgtagacttaatagaaattgtatattaaaccataaacatgaaataatatgtaaatttaaatgacctttaatcttctattgacaacaagtaagattatattgaaatagatattatttaggccattaaatcccaacaaactctcacttgcactaacataaaactagaagtgcatttcaatcaatctattatcttgatatttatatcaagtgtagtgtgtttgactacacccaaatattaagaactgtaaggttgtagaaagcaatagcttttgtgacagtcagtagtcccgttatccgtaaggggaaatatcgggtaagttgtgcaatcccac

SEQ ID NO: 152181 - DNA, 517 bp, Cannabis sativa
agtttatttacaattgattgactagatattgagactcaaattgaacagtaatgcaaattataaaaaataaaatatatgtatttatgaaaattttacataattgataacttattcataaatatagaaacaaatctattcataacagattttattctctctcaaaaataaatatcttacaaataatgtcaattgcggacaattttcggccatgctgacgtgttagaattcttccagggtaaacttctttttttttttttaccaaaaggctccttttaatataaagtttttcgcaaataacttacattctacttaaagaaatgcatatatagcagtgtaacgatgaattaggaaaattcttatgtaaattcttagactattgtattgcaattatatacataaatcatagccgcataagtaaattgtttataaaaaatgagcaaaatataacaaaagtgggatatttgcaataatttgtatagtttgaggggaatttttgctaaaaataataataaaaaaa

SEQ ID NO: 152182 - DNA, 500 bp, Cannabis sativa
  modified_base (330)..(344): a, c, t, g, unknown or other
aatctcagcctatatgatataaaaatgagagattttttttaattagataaaaaattaggcataaaaactcaaaattttctaattttacttatttatgggtattaagagagcacatatatatatatatatatattttattttgaatggaatgaacttattttaaaataaaagagtgacttgaaaaaattaaagaaattcaagaaattaataaagctgttgtcgtatggaaataatatatggtggtgtgtaaggaaaaagaaatatattaatgtaaaataactttagtagattagtattggcaatttggcatttttaataataataataatnnnnnnnnnnnnnnnaataataataataataaatatgatcttttccacctaaaccatgacccttataaattttgatgaacccctatttatacaaatacaagagtgaaatattaagaaactaagaaaaaggtgttgaccgagatttttggcaactactaaaatatgattata

SEQ ID NO: 152183 - DNA, 721 bp, Cannabis sativa
tcacctttcacatcgtggtcgaggaaacatcggtactctaagttagaacctcctactttcgatcctttcaggcaacctattgaagaggatgtgcaagcattcttcaagtggtacaatggtgatactaacggtagaagaaccattcgttgtggccagacatcacatgatagaagtttttttttgagatattgttggcaaagcaatgatatattgatagtgagataagctttatcattcaaatatagatcataataattatatcatattatcatcataactaacaatgagaaaataatttttttggcagcatgtagatgaaattatctatttatttagaatggataagtttcataatatctttccaaaagatatatgcatattgacagatgaatttgaacagcatgagcgtgctttgtacaaagaatctcgaaaggaaaacaataatatatgtaagaccaatgaagagctaatgatgcttgttaaaggtaccagaccaattagggagagaatttggtcggatgtcaattacttctatgtgcctttgaatgatgatacgccctggatgttagtggtagttgacagacatagccggacaatatcgatttatgactcgattccagatcactagatctctatagaggcaatgaaaaaatctgtggagccacttgcagcatattttccttttttacttaaaaacagttgccatattgggagcctccat

SEQ ID NO: 152184 - DNA, 595 bp, Cannabis sativa
  modified_base (152)..(169): a, c, t, g, unknown or other
agctattctaaagtgattaggggtagaccatcctatggtcattaggtaagagagtgtttgttacaacaaatactacttctctaagaatatgactaattctgaaaagaaaatagtaaagtagaagagataatcttgattccaaaagtgttctnnnnnnnnnnnnnnnnnnagatggtcccactacctttgttgtcttgatacaaccgatgagttcaataccattaatgttcttagatagaaagtcacggtaccttgtcgtagtgccagggtttcaaggaactctccatgttatgacttggaagacacttgtgatttaaaatctaaagacacttcagatttagtcatattcttataaacgaaaatagcaaagtagaggagataatcttgattctaaaagtgttctatcatcttagtctatataagatggtcccactgcctctgttatcttgatacaaccaatgaggtcaatacctttaatgttcttggatagaaagtcacagcaccttgtcgtagtaggagggtttcaagaaactcaccttgttatgacatggaagacacttgtgattaaaaatccattattagtttaaacaagtaa

SEQ ID NO: 152185 - DNA, 760 bp, Cannabis sativa
tcaaagttagagagtattttctttgttgtgtgaagaacttgagtccaacaagttcttagtattttattattgtgttattctgtactgtttcttgttgaaattgtacaagttgaacactttggatattgttaattaagcttcgggagaagtcttgttcgtgagtcactctttgggaggaagattgcaagttaaacactcttcgagaggaaaattgcatgtgagacactcttcaagatggagagtgcaagtactacgaattgaagggagttcaaggtcttgacacttcagaaatttgattggaagaatagattacaatcgttgcgacaaattcaaagagagagtctttatttgtataagtcaatttggttttgtaaacacttgatattcatctaataaattttattctctgggtgtgatctcgtagactatgaacaattcgaaagagttctgatactacgtataaaatattgtgtgtcattttattttctgcatttttacattttgcaatatgtttctgttctatcagattctgtatctaataaataatttcacttgacaattaaaacaaaatttcaaatatcaatagtatttgacacattttaaaggtatcatgttacaattaattaagaatactctctacaaattattactggtgcaaggcacctcttatatattttagcatttatttatgagtaatttgcggcataaatacctaagttttatgccgagtagcagataaatacctaagtcgtatttttgg

SEQ ID NO: 152186 - DNA, 592 bp, Cannabis sativa
ggggtctgggtttggggtttgggggtttacaattttgtgttttggattcaaggtttgagggttttgggtttaggatttgggttttgtggtttggggtttttgcgtttaggggtttgcggttaagttgttttacattaggtgtttggggtttgggtttgagttcggggttatgagtttggggttttgggttcaaggtttgagggttttgggtttaggatttggggtttgtggtttggggtttgggggtttggggtgaagttgttttacattaggtgtttggggttttgagtttggggttttggatttttaggtttgggatttagggttctgggtttggggttttgtgtttagagtctttgacttttgggttttttgggtttgaggattagggtttggagttttatgactagtatctagagtttaggatcttggacctagtatttgtggtatgaggttttaagtctagtgtttggtgtttgggttttagcgtatggggttttagggtttgggtttggggttttgaatttggggtatggtgtttttgtgtttggggtttttaggtttgctattttctggattagggtttggggtt

SEQ ID NO: 152187 - DNA, 926 bp, Cannabis sativa
ggttgtattgttgaatcatacatcgttgaagagacgattgaattctgctcagactacttgtcagaggttaccactgttggctctcgctctctcaggtcgatagggaaataagcatcctatgttgatttaccttgactcactaatcaacttgtatgttcataggtatatgtagaaatatgtgaatctccgggtaatgtatccagcacaacctctgaagattagctcggtcctccaatacaacctctaaaacaccctgagaggccgagtaaggcaaaagttcatggtcgttatgtccaaccacgccaaacttcctccatcattgccttttggaacttcgtcagaaggtggcccaagtcatccataatctaattctaagttgataatgagctatttggggtcacagatgactctatttggtttgctaaaagtgacatttaaaaattgtgcaccatgcaatacttgggaggccacccaataggagtttggtgcaagtatgatttctaactattcatagtaaacttgataatgttcttttgacagcaatgattattaattataactttttatcaggtacatgaaagaaagactgttggacattggtgggctgaatcgagtatatgaatttttgaattcgggtacgattgccaccgatgcaagggctgatagtaatcgttgttaagcactagtcactcgaatgactaggatgactaattcagataattggcttattgccctatataataatcgggatatgtagatttaaaataagtaatttcagtatttataactcttcataaaatttattattatatatatatattaacaattttacacatatttgtccgtgcagggatatgtttcactagatgcttgtactcatccagccaagtacgcagacggtggcgtacttggattcaggcaatggc

SEQ ID NO: 152188 - DNA, 862 bp, Cannabis sativa
  modified_base (275)..(275): a, c, t, g, unknown or other
  modified_base (521)..(534): a, c, t, g, unknown or other
  modified_base (781)..(805): a, c, t, g, unknown or other
aaagaaaagattctagatagtgatctctagtaactaatttatattttctaatatttaattaatgagaaaaatatatttaagtttaaaattaattttaattaattttagaccaacttaaatcaaaattattaattaagttaattttaattaagatacttaattatttatttaaaaaaataattaaataaagaaaatatatttaagttgaaaattattttttttagttaattctaaacaaagttaaattgtaatttttttcttagatattaaattanaattaataattaagtttattttattcaggatacttaattatttatttctgttttaataaatttaattaattagtaaattatatttaagctgatttttttttttaatttaagatcatcttaaattagaatatattttattttattttaataatcatttctcacataaattttgaaatacatttattttaaatgtagatattttgaaatctttcctcttttttttttttttttgaaaattagattaannnnnnnnnnnnnnttattaattaattttagatcaactaaaatcaattagattccataaatgatttatttaaaataaatagactaaaatatattatatttttattagaaaataagtaattagtttatgaattatctaagatagatattttgtaggtagtcttcttgatatttttctagatatatttaattaaaatagataatttatatttaagtcaatttcattctagatacttaaatatttgatatttttcttaagagannnnnnnnnnnnnnnnnnnnnnnnntatgttgaaaattaatttatttaattttaaactaacataaataagaataatttttcc

SEQ ID NO: 152189 - DNA, 1261 bp, Cannabis sativa
aagcatcagccttccatttgtgatcagggttaccaccgtcggtccccttactgatattaccagtagcaggaggattcaatgtcatggtggtatcctttgctgtttgttcttttattacatgttgttcagcctccccagcaattaaggctagctctaccactttcttgtacaaagtgtcatgagtagttgtaattttcaagtctcgactgattgtggcattcagtcctctcacatatttctgtttcctggtaaaatctgtaggcaccagatcacctataaactttgacaaccgatcaaactccaaagtgtattcggccacagacattttcccttgagttagtttcacaaaatcttccatatgtgaggtccttacatcaatgttataaaatttttcctcaaacagactcttgaactcttcctaagtcatcacactaacatctcgagtttgtcccacaatatcccaccagacgcgggcatgatcttgtaacatgaaagctgcacaatttactctctctgttcccgtcacccccatattatcaaggattcgggttattgtactcatccactgctcaactttgattatgtcagtacctcccagaaaagttggaggttgcaacttcacaaaccgctcaaacaccgaatctctatgcgataacatgaaccactagttacccaccactaacacaagtgcgggtggtaacacttgctcaacaggggtacctggtgctagttgccttaactgacgcaactcttcctcttgacgaagtatgatacctcgcatttcttgaaacatctgctgtcactcaacaggtggattagcattgccaacacccgcattatcccccggattctgcggaggcgcaggctatgcccgtggattggtttggtcaaccaggctttacttgcttaccctgtagtctagatgattgcggaggggccatttttacaagtacccttgtaatcaacaaccccgacgagttaaacaccaataccgcacttatgcacttattgccttaaaccctaactcaaatatttattccgtttaaataaacacttatcatataacattttaagcatggcatcatatatcacttaaatattatgctcgcatactgcctaaaatggaaaacagtaaataaatgatcacataagtagtataacatttactctcaacacttactgcaccatgagtcgagcttgtttctgacgatgattgtacatgttcggtcggtctacaagaagtttaaaaaccttggcactc

SEQ ID NO: 152190 - DNA, 1042 bp, Cannabis sativa
  modified_base (839)..(847): a, c, t, g, unknown or other
tttttttttaaaaaaaagaagtgattttagagttatcattctttaaattatgtgatatttgggatttttttaaaaaaaaatggaaagaaaaatgtgagttatcatatttaaataaaatagctaataaagaaaaaaaatagtttcaaaaaataaaaaagtaattttagagatattttttaaattacatgatatttgcgttttaaaaaaaatcttcaaaaaatgatgtacaacatatataattaataaattgaaaaaaaaattaaaaaaagtggtgatagatttagagttattattttttttttaaaaaaaataaaaaattaagaaaataataaatagatatatatatttataaagctaataaaaaataaaaaaaaataagagaattaaggaaaaaacaaataatattaattaaagagattttatatatatagatatagataagtgtataggtttaaatatttataaatataattaaatattaaaaatactaagagaataaatgagaggagaaaaaaataattttgctacgattttagagcgtcatgtcaccgtttcatatagatatatagacatattgataattaataataataataataataacaatgtagaattttaaagtattatgtcaccgtcacatatagatatataaatatattgatgattgataataataataaaaataataataataagaaaaatgtgtggtatgggtattatatatagtgtttttttttaaaaaaaaataattaatttataaaagatatttttataaaaaaattgttaaaataataattaaatatcataaatatattgatgattaataataataataatannnnnnnnnataataataataataaaaaacttgtggtatgggtattatatatagtgttttttttttttttcaaaaaaatgattattagtttatgagagatatttttatagaaaatttattaaaaaataatcgtaaaatattaatttgtaaatttatattttaataaaatattaaaaatgtgagaattaaagagcgaaaagaaaa

SEQ ID NO: 152191 - DNA, 548 bp, Cannabis sativa
attaaaaaaaaaaatgtcaaaaaatacatctttttacactatatcaaaattatatttataggaaaaatattttaagtcaaactcaacttttttataacttttttgctgagtttttttttaattattttttttcagcacatggaacaattccaacccatataatgtaaaaatgaattttttttctaattaaatagaaaaattaataaaaaaaaaaaactcaattttttctaatattacccactaatggttaatacccattaagagtgcacccatacatataaataagaaatacaataataaaaaataataataaatgataacaaataataaaataattatgtaatagtaaaatctgtaaaatacatgtgaaaatctgtaattttagtcaataaaataaaataataaattaattaaaaaagttaataaaattaaaaattaatctttaaaatcatagaaactataactattattaaaaatgtagcataattatgtttcttttataaatatatgagaaaatgaccccatatcattaacttttaagaataaaa

SEQ ID NO: 152192 - DNA, 1158 bp, Cannabis sativa
  modified_base (27)..(33): a, c, t, g, unknown or other
  modified_base (178)..(197): a, c, t, g, unknown or other
agctagaggtggttatgagtactttgnnnnnnncatcgacaattactctagatatggtcatatttaccttatgcataagaaatctatattaagcgtataatcatgaaataaatcatgtgaaccatgcatcataaaataaattatgatcttttatttattagtaaatttgattatattnnnnnnnnnnnnnnnnnnnncacaaaacccaacaaactcccatttgcactaatataaaactaaaagtgcatttaaattaatctcaacaccttgatattcagatcaagtgtagtacgtagtattatctctgtaatgggatttgacaggttgtattcaatacaaactttccccaccattacatccctttaatcacaaaatccttgatattgtgaaattctttactattcggcaactatatatgtgttagtcatgaagtaacactagtagttaatccgttattggaataacgccaaaaactgtataaaactttctataggctgaataagtagccttcttggccactttaacattcagtctcacttgtggagttggagacttcagattggtttttacacttctctaaaaatcactgctccacccccaaagtaatcaccatctcatcagtagactttctagcattaacgcaagtctagaaacttgatttggtgtagtctaagagtattaaaatacaacacttatcgactaacatatagttcatcttttgatcttaaaatttacttgattatctttcaatgtttctttcctagattaaattgatacctactcattactcccactaaacagcaggtgtttggtctaatgctttgtaaagcatacatgagacctctcacttttgatccttaaggaattcttttaatgccttctatcttttctagaatagttaaaactattcctgagataaataaaatctacatctaggagtcaaaagactgcctatagagttagccattggaaaaatgctccaggatcttactaaagtaagttacttaccctacagtaagtaaattaccagttataccacacgccgacaggtttagataatctcaaaccaaatatactaggatcgagaagttttgttaattccattgaataaacttattatcaaaatttctcttattgtccttgtaatagaaatttttt

SEQ ID NO: 152193 - DNA, 578 bp, Cannabis sativa
ttaccatttttacctcaatttctataaataggaaagctagacaactttccttccaaatttagatacacaaaatatggacaccaaattaaactctccagccgaaaatatataataaataataaaatatttttgtcaattaaatatgccaaaaatagattaatagacctgatgacggagagtttgattgaggaacacaaaatcctcactagcggccatgacccacctctcttgcctcaattgactcatggaggttgatacttgatcaaggacatccacaaataatagagccacattgctacctatttctacctagctaagtctaaaatccgtcttttgttgcgaacctatccactattttcctcttggaaggaatgtttggatccttggcagccaactcggtgttctgcctcagagcgatctaaccagtagccgcatggacatcctccttcccagcatcataccttcagaggacactacaagaaatgtcacttttgccaacacaaaaaaagcaaaatagaatttacttctgatatgttggcaaaaagggttagcaaattaacgttggtattagaactttt

SEQ ID NO: 152194 - DNA, 541 bp, Cannabis sativa
ataaactactaaagcaataaaagcttactgcaccgtgaaacgagctgaatactgatgatgattgtacatgtcgtgacaatcttcggaagacaacttggcagctctaataccaaattataacaacctaactagcataggcgtgttagtgtgattttaaacgtactatgcagctcattgctaatcaacgaggttattgaaaaacgtgaataattaaaattagcttatttaattagaaacttaaaatattatatatacaaaagtttgggatcccttttacaaaatactttttaaaagtttgctatacacataaataaaagtttgtcgctcagcaactacacaacaaaagcctcgatgtcccaaagaccgtacgctacaggcctaaccgccccgacatgtcaatcttcatctgctcgtgctcacggctcctcaactttagccttacccttaattacacataaagatagcactgtgagtcaacagactcagtaagaaaaacataacataaacatacaaataacccgggttataacctggcgcccat

SEQ ID NO: 152195 - DNA, 591 bp, Cannabis sativa
gtcacctatgaatttctcataaattaagaattcagttatataggcacactttatatagaatagatatagatggctaaaaaagctgcatatatattagatgaagtttgaatgtggctatatcaaataaataaatacaatagttgtaattacttttagttattaaattattattagattgttaatgttaatttaaattaattaataaattacttgcaatttaatattaataaattttatttatttttctaaaataaaaaaacaataaatatttataaatattaatttttaaaaatgttttattaattattttaattaaataatttaatctttttaagtataattaatttaaatttaaacatagaaatttaacatgtcaatcacctgtaatagcataattataaaaaaattgatggttacatattattataaccattgaatactcacacaatattatacatatgagaaatttacacgatacaccttgttgtctttaattttgtccaaaatacgtggaccaacgcgactgcgacacgtggatttgaggagtaaggttttgagataattcggctaagtctttttaatcaagaggat

SEQ ID NO: 152196 - DNA, 803 bp, Cannabis sativa
aatcacatctctaataaagtgcatcttgatgtcaatatgtttagtcctctcatgaaacatgggacttttcatgagatgtagtgcactttgattatcacggtgcacagtgacatcctttgagttaatgttgagctcacatgtcaatcccttaagccaacttgcttctttaatggcctctgttgtagccatgtattctgcctctgtagaagatagtgcaaaaaccttttgtaggttagatttccaactagcacatcccccatagacattgaatacaaacgctgttaatgactttctactgtctaaacaacctgcttaatctgaatcaacataaccagtcaccgattccttgaatttgctagtgccatcataggttaaactagtgttcaatgtaccttatatatacctcatcacccatttcaaagcagtctggtgagcatttcttggattagcaacaaacctacttgtcatgctcatggcatgagctaaatcaggcattgtacaaaacattgagtacatcaaactccctacacaactagcatagggaattttactcattttctctttctctgcatctgttgttggtgcttgggaactagacaatttaaaatgctgagcaagaggagttgaaacaattttggagctgtccattccaaacttatttaacactttctgcacgtagttcttttgagacaaaattataacatttgatgagggtctttgaatgtcaattccaagtattttctttgcattaccaaggtctttcatttcaaactcttgattgagttgcaatttaagcttgttta

SEQ ID NO: 152197 - DNA, 618 bp, Cannabis sativa
  modified_base (413)..(420): a, c, t, g, unknown or other
tttaagtttgatagttatcaaagtttaggacacaaagttaccaattgacaaagacacgtcattatttaaacggagtaatgggacgaaacctaacaaaatgactaaatttctataaatataaaagttcatgagagatttttaacaagccgtatattttaagagccaaaatcagtattatcaaaagttcagaggacataattactaattatttttttttatcatataactgatgacttttgtttttaaagggacagtggtgcctaatatcatttgataatatacaattactaatgtaattaattatatcactaagaaaatacatttaatgataaatttttagtctagtcacgacataataattttttttttgtaactaaatgtgatttatagtcacaacaaaaaattatttgtgnnnnnnnnatagtatttagatacaagttgtcgctaatttaattttattcatcacaagtattgtgactaaaataaatttagtcacaatacttgtgatttttatagctaatacttttagtcacggattttttagtcacaacataagaatgatgatttataattagtcacaaattttattgtgattgaaggtaagactttttgtagtgt

SEQ ID NO: 152198 - DNA, 513 bp, Cannabis sativa
aatagtgaggatgagggccttggataaggctgggtacctgggcaaacttgaatgttacgtctcctcttcgaaacaccaggcaagtaacccacaaaaagggttttgtgcatagtcgggtgctcacactaagcaaggggtgatagtgcctttgcacccgtacttcaagagggtggtagattatttttgcctttgtctgacccagttcactcccaagggcattaagtacttgtctgccctgttcgtcctctacgccattcaaggatggggtgtgccgtccccgcacgaggtcaactggttttttgacttgaagtctacccctaagcaaagcaggtaggggtacttctatttctctcagccagacttcaagtggctgacgggtaccgtggactaggatgttagcaagattgaggtttttttttatgagtattacttcttggaaggcatggataccacctatactcgattttaacaaatctcgatatattaccatccacccctcacattagaacttag

SEQ ID NO: 152199 - DNA, 508 bp, Cannabis sativa
atattctattaatttttaaaaaataataaaaaattattaaaaaacctgacaaaaatattaaattaattaaaaaatattaattttactaaaaaaattaaattattcccaaaaaatattttcaaactttattttatttataaacacgtattttaaaaaaatcaaactaaaattattgagaatctaataaataatttaaataaactaagattttttgaaaaaaaaaatcaaacttatttatatttatgaactcatatcttaacaaataaaaaaaaataattaaaaattcaataaaaatatcaaactattttgaaaaaaatttataaattaaactaaaaaaaatattatgtttacttaaacaaatctacattttctgagaaaaataaattaatatactcaagtttattgtaaaatttaatttttataaaaattggattttaatatttttttaaatatctaaatgaatttttttaatataaataaataattttttaaattgcttaattagttt

SEQ ID NO: 152200 - DNA, 657 bp, Cannabis sativa
aaaataatttccaacagtatattgtctgaccaggtgttgctgatactcttcctgttggccatccaagttctggtaactttgatatcccaatagctgtccttgccaatactgttgcacgacacacatcaatattcgtccaaaagaaggatgatggcccacacaaagcagacgatgcggaaagtaaatgcgtctgatcctcaagtggcccagcttgccacattaccaagtgccgagcaagatctgcccgttgttgaggaggaggatcacgagggggacattgaagtccatgagatagaggagcagaacgacatccgccctgatagtccttctgaagccgaggaggaaggagtggccggacctccaaattttggaaggtataatgaggccggagagctagtatccgcggagggtgacatcttggtcgagggggaagactatgtcatcgaggagtttacagaggcagtcccccgcaggaggcaaaatggtttatgggccatatgggtgtgccctccgtccaaaataagcgaggggcgtatgagggacctggataaagttaggtatctagggggacttgtgtgttacctcccttctttgaatcaccaggcaactaacccaaagaagaggttttgtgcctggtcgggtgcccacactaaacaa

SEQ ID NO: 152201 - DNA, 500 bp, Cannabis sativa
aagacggtattccgttgcccacagcagatcaaaccacatcgcaatccaatcccgattccatttccgcaccagtcgtcaacccttccatggcatctcgtcgacctccaacttccagagctcgtccttcccaagaagaagatcccatcgaaccaaatgtgttcttccctgttcaacccgctcctcaacctgctcctcttaatcgcagaccctctctcgatcgattggctcatgaagatgtcttaagccctttttttctcagcacggcagatcacccagggcttgttcttatctcccctgtgctcaacggtgaaaattaccaatcttggaagagaggcataacaatggcgttgacagccaagaacaaatctgctttcatcgataaaacccttcctcggccggcttttggtaatcccttactcaattcttggaatagatgtaataacatggtaatttcttggttgataaactctgtgtcccctgagattgcacagagcatcatg

SEQ ID NO: 152202 - DNA, 953 bp, Cannabis sativa
  modified_base (649)..(668): a, c, t, g, unknown or other
taacagattcatttcgaagtcaactgataagtgtgtactgttcttcaatatattgcgaggcaacaacaagttcaagtggacaaaagagtgcaaagaggcatttttagagcataaaaaggcatgtcgcaacgcctccaattttggcaaaaccaataactggagaggcattatttctttatttagccatcttggaagatgtgattagtgcagatatagtgcgagaagagggcaagcaccaacaacctatttacaacgtaagtaaaaggttactaggggcagaatccaggtatccccctctagaaaaactcgcgttatgcctagtctatgagtcttgcaaactatggccatacttccaaactcacactataaaagtgttaacccatcagcccttgagacaagttttacataacataccatcctcgaacattcatcaagggtcaagctttagctgatttcttgatagatggtataactgtagaagaaatcccacctgatcagcgagatgtggaaacctagaagttatatgtggatggcgcatccaacgaataggatttgggtgtaagggtaataataatatcgctggaaggctttaagtttcactatgctctgagattccaatttgatgcatcaaataacgaggctgagtatnnnnnnnnnnnnnnnnnnnnaaagatagcagaggccttgaaagtcaaaaatcgcatttttcatagtaatttgtagctgatcatgaaccaagtcctcggggaatatcaggcaaaaggcataaaaatggtgaagtatttaaagaaagtttgaaagaacttagaaagattcgattactttaaaatcagacaaattccgatagaacaaaactccaacgccaatgccttagcaaagctggcctcgcagaatgatatggatgaactaaatctggtttcggtagaaatgctgtgtgacagtcagtagtcccg

SEQ ID NO: 152203 - DNA, 730 bp, Cannabis sativa
ccatttgttgtccttgcagtggaactttataaaagtatccacagcactgggaagttcccccatctggggatcagcctatttttaaacaaaattgaaaattagaagaatattattaaaaattgcttattaacaaaatattactatgttgaaaatatcataccccgctcacaatgtgaccaattatggtcttagatccccatccaccttgaaccttcatctgtcctcggttttttatattttgttcagctcttgcttgtaatttaacgtatatttgttgttagcaaattgagaaaaaatattaagtaaatagaaattatatattacaactttcaatttatacctgttgttttgggtctttctagtatgtgataacctctgcccacacttccggtgtcaccatatctggacatgatttcctggtcgcttcttcctccccatatttttgaatattctccttctatgccttcttcgtatctgctctccaatcatgtaatccttttgacattaatttggacgcataatccgcgaacataggatttttagttggcaactcaaacttggtctaaaaaaacactagtcatatatatattgtattttttgtgtaatgattttgtttgatctattatatatatatataaaaaaaaatagaatgttaccgttattttatcccatatagtctgaatgattgtatcctctgttgggaatatgttactaggatctagatttacta

SEQ ID NO: 152204 - DNA, 676 bp, Cannabis sativa
aattatttatttttaaagaatgtacactaaataattttttaatatttacttaaaatttactaatcaatacaaaattacatataaagatttagtttttaaaaaataaactaattatacaaagtggagatttagtttgtcattatgatgtaatagataacatattattatatttaaaaaaaaaattaattgttgtaaaaataccaaatatttaaagaatataacaattaaatacccaattttttattttgcaataaaaatatttaaaggtagttgatcattaatatttaggataaataacggcgtgagtacctaaaattttaagtttgtaagtgacataaatccaatatttatatttagcggcataaatacctaatttttataaaactataatttttctctaattttgtctgtacaaattaagttattgtcttaaatagggcatatataaggcctagattcgtaatcattgggtctagacagaaatatgtagtatctaaattcaaaacagagtctgtactgacaaaactggaaaaaagttacagttttacaaatgttgggtacttatgccgtaaaaaataaacattaggtttatatagcttaatggtgaatgttgattctttagtttatgttgtgttctcagcttatagttttgtttagaatgcatgaacataatgtt

SEQ ID NO: 152205 - DNA, 515 bp, Cannabis sativa
ttaggtctttaattttgtttgatcaattttattttgttcttttgtgggtttggctttttattttgattgttattactttcgttacagtgttcatttgtgttttaggttttgtatgtgtttgtaatttattgttagatattttaaaacttctgttttcgttttagtgtgtgtaatcagtgggttgtagtttcctcttagtttgtttatagtttaatctgtttatgtttgatgtgttttgagatttttattaggtatagttgtttgctgttagtttttagttatcaatacgatttcagatgtttgcagtttatattcgtatagttgtttctgtttgggagtttgtttttagttttgttatagttttattatagtttatatacttgattattgacaattaatatttattgtttccattttggttatcttgcaggtctgggactacaaatttagtccctctgattattacagatctaaatgtgtttgcactagccttttttctgttattgataatatta

SEQ ID NO: 152206 - DNA, 831 bp, Cannabis sativa
  modified_base (665)..(679): a, c, t, g, unknown or other
aacgacatttcctaccatatagcatctcatagggagccatccctattgtactctggtagctattgttgtaggagaactcaatcaagggcaagtaattactccatgaaccttcaaactctataacacaggctcgtagtaagtcttccaatatctaaattgttctttctgactgaccatcagtcttagggtgaaaggttgtgctaaacttcaacttggtacccatagccttctaaggattcacccaaaacatagatataaattttggatccttgtctgaaacaatagatttaggggctccatggaggcgaaccatctcatttacatgcagtttagcgtactgatctactgaaaatgtaactttcactggtagaaagtgagctgattttgtgaatctatccactatcacccataccgaatcatacattctcgtggttctaggcaaccgagttacaaaatccattgcagcgtcctccaacttccactcaggaaggactaaagattgcattaaccctgccggcctttgatgttcacccatgatttgctggcaggttaaacatttggacacgtagtccaccacatctcttttcattccatacaatcaaaagtagggtttcaaatcttgatacattttggtggttcccagatgcagtgaataaggtgtggtnnnnnnnnnnnnnnntatctctttcttaagctcgtcaataccaggaacgcaaactcaagctttatacaaacaacattccattattcgagactgaaaagtctataagtcgaccagccattacttcatctcaaacttaactaactaggatcttctagttgagcttttct

SEQ ID NO: 152207 - DNA, 734 bp, Cannabis sativa
gtctttttgcctattgagttttgtcttttagtgagggtttaatattaagtttaaatatgatttttaaagcttagtttggctgaagcaatgtattacctaaggaaaatcactcatttactcttttattgaaaaattggaaaaagaagcaaaaatccctttttcctctcaagtctttctctctttctcgaactcacctaggggcagctaggttttgatttgttaatctgcatttcaagctggtttaagcaagaagtttgtgatctcaagttcttggtaagtttcttgtagcttttgttgatttcttgagttggaagaaaaatgaatttttgcatgttttggacttttagttgctgtagttgccgaagttgttagatgttatgtgcagaggttaaattatgtttgattgtgttggtttaatcttgtattgatggttgttagttatatttaaccaagtttgagttttaaactcaaaacttggagctttaatggtggattttgattctgtacttgggtagttgttttgttgctttagaaatgttcattggggtctaattagcaggtctggagagttttatgtggtttgaggttgttttggtgaagatatgaatttttcggtgtttcctgcgctgaaccggaatcccggcttagagaggcctgtaggaatcgaaattctggttggcttccaggaatttttcccaaaaccagaattctggttggggaaccggtctaccggt

SEQ ID NO: 152208 - DNA, 744 bp, Cannabis sativa
tttcttacctttttgaaaattttgagtcaaattttgctgctaattatgtgaataaataaatattgtgttaaactagtttatactatatttagttacgtagatagtaattccagtacaaattgcacaaaccaaacatatgatttgattgtttttaacaaatttaattgagaaaaatcttaagttaaaaactttcattttttgtgagaagtgagaatttagaaaacgactttttgaacatatattgatcttctgaattggtaaaatcaaaattttttgaaatttaaaaatatgaccattactagagggatactttttgttagaatcgagcctaatgataaatttatacaaaaaaaaaatcaaataagagcaacatttctctatcaacgtagcttggtcaaaattttttttaaaatataccaaagaaaattttactacggtaattatttattgtggatattgtcacttaaaaaaatatacatatatcatataagagcattattttagttttaatcatttagcaatgtaaatatatatatcgataaaaatatatatgcatatattatatatataagaaaatcatcatcgatcaaaaaaaactttgctatagtttatttttcataaatattattcaccattaaaaaaatcgttgcttatttctttatttttggctctagatactgtaataaaatcccaaaagttaacttgtcatttgaatttcaaaatatttttggttagcctatctat

SEQ ID NO: 152209 - DNA, 1281 bp, Cannabis sativa
  modified_base (906)..(909): a, c, t, g, unknown or other
  modified_base (957)..(970): a, c, t, g, unknown or other
  modified_base (1015)..(1026): a, c, t, g, unknown or other
  modified_base (1081)..(1082): a, c, t, g, unknown or other
  modified_base (1129)..(1142): a, c, t, g, unknown or other
  modified_base (1246)..(1255): a, c, t, g, unknown or other
aggaaatccagtgatggctgggctgagggagctcatcaggagaatgaactcattcaactcaagcatgaagctaagttgagaaagagcaggagactccactcaaaaggaggaagaagcttacggccgagcactaacctatcaaacatacgattcagattagggcgcccagtctacctgcttggccatccactcctgtagtaggaaaggggaaagacgtcctggaggagcaaggagactcgtcagatgacgatgattcatcacatcttgcccggccagatgcttctgccaatgtgcaaaataccccatcttgcctttaacattcttgattattatgctttcgtatttatcatgctttttcctaacaatgttgctttcattccgtacagacatgtctcataaaatgctcgaagctatgaagaagagagtaggacgaagcttgggcctatctcctccgaccaagaagtccaggggcggtgagacaaccttgttcagagagaaagcaccgaccaaagcagttattgatctctccgaggaaccaaccgtcgtggacccttctgccccaaaaatgactaagtctaaagactctcgaggagggagctcggacaggcctgagcaattgaagggtggatccgagctggtcagaagcgggtctgaacagatcagggcctttgccaaacctcaagtgctgcatccagagactaaaagaggcaaagatatgctcacccactacatgacttgatcggtccctaaggtgaatgagtagctggctggggctgataacgacctttttctagagttagtgatgggaggagtccttaaggagtctctggagatggcattttctcaaaaatgccatattttccaattcaaccacataaataccaaaacaatttatttaataattannnntaattatcaaataaaattgccatcaaacatatttattaattagacttnnnnnnnnnnnnnnattaacaaataaaccctagaatctgttttcttcacaattaagccnnnnnnnnnnnnaaattcataaactagacgtagtctaattttagaattagaattgattaattaaaannaattaactgagtcttacaattagtattgtctcaactagtatgaggannnnnnnnnnnnnnaaccgagcttccaataagaagaactagaatttaccaagtatattccctaacttattaattccttattgcatcacccatagaacttagtgttggaaattattttnnnnnnnnnntagatatactcacaagtatgttgatt

SEQ ID NO: 152210 - DNA, 758 bp, Cannabis sativa
  modified_base (594)..(595): a, c, t, g, unknown or other
aaatactaactgcatttttcatatcagtagctgcagacaaagatctgatcccacgttcacaaccctataatataatagaaacataataagcaaccaaatatatcatgaaagttattttcatcaaaattatatttttgttatatttgaaatcacatttattaccacaacaagcttatcgtccttgttacaagcagatgaaacctccttcagaaaccctgaatttttcaccctacctgaaatgaaataaaagcagaaataataaaactcaaaaaattattatacaaattttcctttttagaaatgaatattaaaaaaataaatatgtttttatttaagtaaattaatataattgatataatgttacaaataataatagggtaaatggcagcaaaactccgttttatcaaaccccacaacccaaatttctgcgggtaaatccctaaaaccactattctgttagcaatttaccatttccgtccaaatttagctgttaaatgtcaagttggtttgtccatgtggacacaatatacacgtggcacaattttattgatccacgtaaataattatattaaaaaaatttaaaaaataaaatannattaatttaaaattaaaaaattttaaataatttttttttctttttctttctttttctttccttttttttaataagcaaagaaaaaaaatttatttaaaattttttaattttattttaattttattttattttttttaacttttttaatataattatttatgtg

SEQ ID NO: 152211 - DNA, 503 bp, Cannabis sativa
ttgcttctgcgggaggaacacactgaagtaggggcattgaataccttcttctatatagtttgcatttgatcattgtgtagcaaggcactgtatacaaaaaatttcgcgcctcgtttttgtcatttggaagttgcccgttgagtaaatagttgataataggcgtcatccatgtcggagagctatctatcatcttgacgtcttcagtttcacatatacttggctcgctcagcagttctaccggaaccagatttaattcatccaggtctttctgcgaggccagctttgctaaggcgttggtgttggagttctgttctctcagaatttgttcgattttaaagtaatcaaatctttccaagttcttccaaactttctctaaatactttgccattttcaagcctttggtcaggtattccccaaggacctggttcacgatcagctgcgaatcactatgacaaatgaatttttgactttcaaggcctctgctatctttaagccggcaatca

SEQ ID NO: 152212 - DNA, 758 bp, Cannabis sativa
aagaagcctcttaaagttgttaacacagcaaataagaataagaaggctgctaatccgaaaccaaaggaaaaaggaaagtaattctattgcaacgaaaagggtcactggaaacccccaatgtcctaacttcttagcaaagaaataaggtatttttaacattgttattgttatacccgaaattcggctggaggacatgtgtcaaggtaaagggaatgtgaatcggtgccatatctttttatggaataactcattaattgcgtaagtatcagagtatatttgtaacccgctgattgtaaggtcttaggcgaggaatcaatgtacgaactggtacttagtgtattaatgagaaatcatatgtcgctaaaggaaaatagcgaggcaccagagaagagtaacacatacattagcttataataagcaaactaagtgtaaaagttggatcggctcaaagaacaagaatgtgagatgaccatctcgctacgaggaaaattcctatagttccatccaactaacggaagcgagactcataaaacatatcttgtcgacctcagaaagaagaatggttccagctcgccattgggatcactacaatcaagtttctgtcaagacatctccagattcaagacgtgtttagtacacgatatttttgacccagtaaaagtaagacaatcacagctaaatgattttcaaaatcatacaccgcatttacatttcatgatatgtaattagatcccacgatttaagggataatgactgta

SEQ ID NO: 152213 - DNA, 940 bp, Cannabis sativa
  modified_base (309)..(309): a, c, t, g, unknown or other
  modified_base (426)..(432): a, c, t, g, unknown or other
  modified_base (599)..(600): a, c, t, g, unknown or other
ttttctataaatatatatgacagaatttgaaatctaatgtataaaaaaaaataatacatttcaaaattcttcattaaaataaaataaaatgaaactggaaaaattattctaatttttgttggtctaaaattaaataaattaatttttaacataaatataattatcctatttaattaaatctcttaagaaaaatatctaatatttaagtgtctagaacaaaatcaacttatatattaattttcttatttaattaaaaatatctagaaaaataccaaaaagtctacttagaaaatatctatctagataatncataaactaattactaattttctatttaaaatataacttattttagtctatttattttaaataaaatcattaatgaaaaatacttgatttaagttaatctaaaattaattttcaacnnnnnnntaattttcaaaattgaaaaatttaaaatatgtgcatttaaaataaataaatgcaattcaaaattacgtggaaaaatgattattaaaataaaataatatatattctaaaaattattctaatttaagttgatctaaaattgaacaatttctaacttaaatataattttnnatttaattaaattcattaaaatagaaataattaagtatgttgaataaaataaacttaattattaattctaatttaatatttaagaataatattctaatttaagttgattcaaaattaattaaataattaattatcaacttaattataattttcttattttaattaaatttcacgaaattgaaacaaataattaagtatcttgaataaaaatcagcttaattattaattctatttaagttctaagagaaatattttattttaagttggtctaaaattaattactaaattaattttcaacttaaatatatttttctatgtaattaaatattagaaaatataa

SEQ ID NO: 152214 - DNA, 846 bp, Cannabis sativa
agggcataaaatcccaacacatgggtcctatgtcataacaataataaactaataagtgtttatcccaaaacactgcataacagttgtaaaggacaacctagggtttcctaacaaatctcgtagttcaaatacattaaaataaaacttatattttggctctaaaacatacaccatatagtagagctcgtcgcaagctttgaaacagtatatagaatatctaaaacggacacccgagtcaaaagttatggcaaaaatacaattcccaagttctcgaggcagcccgaaacggtaaacaggttggccagaaccggttgaccgattttttaggggtaaaaatgtgattttacaagtttacgcactcaccgaaaggctaccaaaaccaatacaaaccactccaaacttcatagggcgcatatataccatacttacgcaatagaaactaaaatcaagcccttgatggcaaacgtcactagtgttcaggcttaagttataaaaaagttctaaactcaatttttaatccaaaatcttatcaatttcagcaagaaaacatcagaactagtccatgactacccgagaacaattctataaggtcataacctttataactattctaatttgcaaaaccactatataaaatcaattgtgctcgacttaaaacgaaacaaattcttactttaaactctccctcttcaaagattcactattctactactactagaacttagatcgctaggtttcgggttaaaaattgaaaaatatggatataagaggagagagaattttgacagaggatgaggattttgttttgttcgtaaattttgtttataaacttattttatatgaact

SEQ ID NO: 152215 - DNA, 811 bp, Cannabis sativa
atttcttcataattttttattgctctaaatattatatttgaaaaggtcattctcaaacaagttgatcgaccaatatgtttttatttctaaaataataataaaaagaaaatgaaaatcccattttatatttttttccattcgtactgacattgtacagttcatggagaggaagctaattctctgttatctaccactgtaccactctgtctttgtctgagagtgttacacaccttacttatatagatctgcatttagagtaaggaagtagtatcaaatgactaaaatagccttcaaaaatacattttatattattattaagattttttttcggcaactcattgaattcaacaattttttcttccatacgtgggaattctggaaagttgatatgtgagcaatggcaaatcccatggtttactgaagagaatatagtttttggtttggcttgagcaaaagtatcttcttatgcaaatactgtccaaagtaaatataaaaactcaaccaagttcttttctcttctttttttacaccttataatttgattcaatttgaattagtagtgttttaaaaactatttcgaattgtttgtgatactaggtcatgattaaccaaacgtctgtttaatattagatagtgtaattcctattttaatattcaattgagaattactatgaaggtttttaattgttttaaagctaacttttatcaatatctattctatataaaatgtggttatataatagaattgttggtttataataaattatagggtgacttttttttttttaagttttttattcaaaaaaaaaaa

SEQ ID NO: 152216 - DNA, 525 bp, Cannabis sativa
tgaaccctaaacccaaaacccctaaacccctaaaccctcaaacccttaaaccgtaaaacactaaaccctaaatcctaaacgccaaaaccaaaaccccaaaccctaacccaaacaccctgaaccctaaccccagaacacagacccttaggtggcattttgttagaggtaatgaaatggaacgaaaaagaaataattttcattccattcttttgtttagtttctttttaaagtattagaatgtcatcccaatagaatgccctttccaccatttaggtggaatgaatattctatttcataatggaaggaacaacaattatcatgtaacaagagaaaaagtttaatgatttttatccacttttttatgcattttaaattttattttattcaattctcattcccattcccctaaacccgaaaccctgaacccagaacactgacccctgaacccctgatcccaaacccctacccctaccccaaaccctaacctctaacccccaaacccccactactacaaaaaacactatt

SEQ ID NO: 152217 - DNA, 719 bp, Cannabis sativa
  modified_base (373)..(376): a, c, t, g, unknown or other
cgagatttttaaaaactaattaaaataaagctgaagaaataataaatgtggtaagtaaaatagacagagagttttacgtggttcagacgttaatgagccttagtctatgagtcagtaaggcttgtgtaatattttacagtggtgtttacaagaaaacccttactctactctttttgtttctcattattttaaaagggtaaattgcggcataaatacataatgtttcagattttatacacttaaatacttaatgtttatttttggaggcaaaaatacctaatgttacaattctcttacaccgttactactatttctgttaactcataaatatagacacgtggagggttcagatgcattatatttatttttattnnnntttaaaacttaatattcttaatataagaaatacttgttctaaaaaaaaaccagttctcataacaattttcacatgatattgacacttcaattcgataatcatgttccatatactacactgaatcactcaattattgtaatttagtattgcatatctctcttttttttttgtttaaacaagtagtatttagtttttgatattaagaatattaaattttaaaataaataaataaatgtaatgtattggagccctccacgtatctatatttatgataagttaacggaagtggtagtaacggtgtaagagaattgtaacattaagtatttttgtctccaaaaataaa

SEQ ID NO: 152218 - DNA, 749 bp, Cannabis sativa
ttgttttttaaaaataatttttttaaaaacaaagattttacttttattttgtgattaaaaaattaaaaaacaatgcatggttaacttgtttgcactgtgcgtctggcagggtcggccagagggtagggcagtcggggcctcggccccaggccccacaattttaaaggccccgaaaaaattaaaattgatatatatacatataaaaaataaaaaaaatataatatataaatatttaacttaacaatttacatgaaagacgtatggcataattggaatcggggcttttattggctttgaggttgagggttcgatcacttcttcagtcatcttttaaaatgtatatttattatctatttttttaaatatatataatttaaacacatttttttttctttcaaatgtgttaaaatacatagcactttaataaatatgctcttaataattaaatattttttaaaaaaaaaaagaaatattacttgactgagttagcttacgttaaataaaaaaattaaaattgatattttgtcaaaatttcattaaaatttatttaaaatttttatataaaaaaggtctcaatttaaattttgccctaggcctttcatcaccttaagacgggcctggcgtctggttatatgtgataatatatttttatatttttttaataaatatagggaattttacaaaaatactgcttttggaccaaaactttacaattatactgggacacggcaaaaacaacatttttactg

SEQ ID NO: 152219 - DNA, 706 bp, Cannabis sativa
  modified_base (672)..(674): a, c, t, g, unknown or other
gctaattgcctttactaatccacaatactagagcggtcattacattattagtgcttcttggaactttaaaattattttttatgttgtaggtatgttgattgtcttcatataaatggaattttttgttttaaattttgattctaagtgatcaggctactaacgttcttaaagcaagttatctagaccattctataatataaatacacacatgataaggctttgactcacaaaacagtcaagaaagaatgaaaagaacgtaattattattttataaagaagcaggataaaactccacaagaagaaaaaaaactcatagattataacaaaatgagatggcaatatatgcttattcaccaacattgatcaagattcagggcagcaacattgagtgcaactatattgtcatgtcatgctatatattacaatacaaaataaattcttatataatattgtgtattattgtgttaagatttcttttaaaatcatcactctcatcattttgtgctacgatattagacatgtatatatataaataaatatattggttttaattttatatgacgtctttcactttatttttcaaattgctttgaaaaacatgtatatatattagtatttcttataggaataattacttaagacactattttttataaaatatttacatttttnnnttcaaagaatgtttttttttttacatttttac

SEQ ID NO: 152220 - DNA, 551 bp, Cannabis sativa
taaatagatgtttagttttttttatcagttcatattaagattctttgtatgttgtgcttatatttttttaaagttgtcgacaatatttgttgatatttgattgattgacatatttaaattgtggagtagtatttttgttattttttagttggtccaaaaaaattaaaagtcattttatatatatatatatataattttgatcaaattgttaataataaataaaactatactatttaaagcattttattttacataatttattatattatttattgaagtactttttaagtactttatttctatttttttttccattaagtaatttgtagttacttttgttgttttgaaatttttcaagctatctacactattttgttgatgttcaattaaattgcatatctaagtagtgttgttatgtagttgttattgttatttgaccaatcacgaatgactatattttttttttgttatgcatacatatatatttatgagttgatatatatgtgttttgtagtttttttttattttttttatattatttttgtgttatt

SEQ ID NO: 152221 - DNA, 1019 bp, Cannabis sativa
atgcattgcataccatccgcgcacatagatggggatgcctgaccaagaaaccttaatggaggaggctgcgtgcatgatttctgcgcgcggatagggccttcagacaaaatcttgaccgagcatcctcggacaggtcctgtctgaatgtgcatcaagaccgagtgatcctcggctgtgcacgcgctttcataggagtgcatcccaccccaattctttcaaaatttcaaaaaatcataactaattcaatttaaatcgaaatttagttttgtaaaaggtaaaatttttccatactatccaaataaaataattttagatcgtaaatccaattattttttgtaaaaaaaatcgtaaatatcaatcaatcatcaaataaaaacatagatcaacatgaatcacatccaaatcacacattcatcatttttaaatccatatttcttgaaagtaaatcattatcatggctttgaggccaattgttggaatatattctacaaagatctagatttactaacaagtatgttggattatattttataatctcaccctaaatatgaattcttaaaataaaatttaaaaaaaaaaacacataaagtttagtaaaccttacattggtgacaaccgaatggtatggatcattccactaagatctctaatccttgttcctttctgtcgcagagtaatagcaagatttgagcctcgatctccttcaagtgttggattcttcacaatcttccacattataattgagttcttgacttgatatgagtgtacatatactctatcactaaaggctcgaaaattgatgaagaagcgaaggaaattcgaaatagcaaaggaaggaggctctctttttctagttgtctaacaaagaataaaaactaggttatatcacttatcttagggtatgataatgagaggcatattatttattttatagtatttcatctagggttaggatttaaactatatggaataaaaaaaaagacaaaataaagcactaagtcaccgaccataggatgtgg

SEQ ID NO: 152222 - DNA, 639 bp, Cannabis sativa
aataggtgaagttagttactctacaacaactgccagcaaaatatacataaatctgaaaacagattatgtagcatcattagtagaaaaattttctaccatctccaatggtgttgaagtgatagagaggtcaaatgtgaataagatttcacctgaggaagagatgttccttaacaggatgaacattgaagaactcttaaagactgattggagtcctcaacttaaggtgatatttaataatataaataattttcacatcccttcctcatttattttttgttgaaatattttataattttaataaataaaaaattttaattgtaggaatatttccttactgtgaggggaaaaataacagaaatagacaacacatttggatggtactatatctcctgccaaaaatgctttagaaaacttgaacttgaagatggtgtttataaatgttccaagtgcaacaacaaatgtgactatcctcttgtgaagtaagaaaatgattctaattttttatctccaacatattagttatattattgatttttttactgtgtaaagaaatattttaatataggtacaaaatacatataaaagttgaggacaagactgcagagacaactttggtgatatttaatgatatagctgaga

SEQ ID NO: 152223 - DNA, 514 bp, Cannabis sativa
ttctctagctcgaaccttgccatcgacattctccttcaatttgtgttcttgtagaattccttgatgagttcttagtgcagaagcaagtgatctttgactctaccttgttgatcgaagaaccaaactctgatttgaaggaaatttagctttgatacatagggattaacctctgtaatttcagattcaagatcacacttaaacaaacaaaagttaaatcaaaacaaataaatcaagaacaaaaaccagcaaacacataaaccagaaaaatatgacaacagatgaatctaaataattgtcagacacaataacacagagatttatactggttctgatcctaagttcaatgtgaacttgatcatactccagtttgaaagcattgccaccaatctttattgataatgagaacaaaagattttaatctcaggagctacaaggaaataatcacagcaagtcatccatggtgtaatccctcaacactcatcaactcactaacccgagccaacataatcaacaa

SEQ ID NO: 152224 - DNA, 593 bp, Cannabis sativa
tatgcccttgaaaatgcttatgtacgtttttttagccctaagggcaaaatggtcatttgaccataattgagttatattgaatttaatggattttgagggaaaatgaattgtattttctttttcattctctcacccgaaccctctccctctcttactctcttgaatcgcaacttggaattttgaggaaaagcttgggattttaaggcttgatgcttggaatttgcttgaattggctttgattttggaagtgaggtagtttcttgttgaattaattgaaactaaatgttgaattcttgctgaaattttagggtaaaaagcatgttcttgagttttaaatattcttgttgcatgatgagtgaattgatgcttaatcttgttagtttatgtgttaatcttgaggaattgagcttctatttattgtgtgttttgtggttgagcttggccagtgattatatggtgttcctaggttggaatttcaggttttaaatttagtgtttgtggctggaaaatgatttgaatagttgaagataaagctcttgttcttgagcttgagttttgcttagtttaagcatgattttgttgtgtttgctcaa

SEQ ID NO: 152225 - DNA, 821 bp, Cannabis sativa
  modified_base (216)..(218): a, c, t, g, unknown or other
agagagagagagagagaaattatgggaggggtattttgggaacacaatgaaaaattaacataattttgtaatgggcacgtattcaaaagaatttgagaagattcgagcaatgaatgttgcgatttcattatatcttaaggaaattggatttacgaaatgggttcgatcatactttctaagggtacgttacaatgtaatgacgagtaactgggctgnnngcttcaacaacacaactaaggacgcaagaggctttctgatcactacttctatagcattcctgaggtccaaagtccaatagtggtttgttacgcgaaaagaaaaagctaataagtggacgaagaccctagcaccagaaatggaggaggacttggcattgcagtttgagaaatctcagtatttgaacattgacacatgtagaccttacacattgaatgtccaccctgggggatcagttgagactggtgtcgtagtggacttgcaggaacagacttgcacttgcggcttgttccaaatcatgaagtttccttatcctcatgcatgtgttgcagctcagcaatgaagtattagcatgtatgtactatgctcgccatattatacaataaaatattggaggagcacatatgaaggtacaattatgccagtttgtgacgagaatgattagaaattgcctgatgacataaagaacatgacagttggagtatcttttgagaagcaaccagtacgatgacccaagaagccaaatgtaatacccggaattaagaaaaaggattagcaaaaccctaactagataattatgtataattgaggaattatattattat

SEQ ID NO: 152226 - DNA, 522 bp, Cannabis sativa
tcttgctcaatcaataaagaagatttggttatgttctagcactggagtagagccataaatcacactgatctatagatttgaactaatatatatcttttctttattttctgtttttattgttctctaatttttcctactctaatcatttttgtttttgtctaattattgtttgtaattttttaattttgtcattgctaattgtttgattgtttaaaatttaattaatttaattctgcactgttagtcataattcctccacatatttatataaaaaaatttggaatgttatatctctccaaatatcaaaataaatagagatgcataacagtccaattgcacttgcatctcatatctataaatatatttaagaagattcttattacattagtgcataagcggacttaggagtgttgaggggttaaataaaataattggttctaatctaccttatagtttttcttttaataagtttaaattgattattccaattgccaaagcttttgtttatttattgggctttag

SEQ ID NO: 152227 - DNA, 621 bp, Cannabis sativa
ttttgttaaaataaattcataacacatttataaaatccaacagtcaacttaattttcaaacaacaaaatagtgataaaacatttaaacttataattagcaatccaactaatagtctcaaagtaccctctgcctaactacatcaaaatattcatcaaagtggtcaatagcatttggtctactaaaatgtgaaatgaagtcatcatattcccctattagcaaagcataagtccacttcagttcatcttgtacacctgttgttaaggagcttctcttatattctctttactactccctttgtaactaagggtgttcattagatcacatctaatggatttggacccaatcgattcaatccaattatttattagatattaaattttgtcatccgatccaatctaatcgaatggagtcatccgatccgatccaatgaatgcattggattggatcggttccaaccattcattgactggttttctattagattagatttgatctatccaatctattttaattaccatttaagttgatttcattaaacaatatagagaaatttagataataaacattagtttagtccaatctaattctcatgatctcataataaaaccaccaaaaaataa

SEQ ID NO: 152228 - DNA, 618 bp, Cannabis sativa
accataaaaagacctaaaaaaaaagtaccatataaattggtcaaacttaaatgtgacatatttatcataacaacttttaaaatctcatagtaagtataatttcctcaaaaggtgcctagcattatcctcagtatcaattaattaagtatcagattttatataacttgaaaaaatagtttttaagaagagtattgctattggacaccagtggtccccgacacctctagacaggggcagacccacatagaggcgaggtggggtagtcgcccatcctgaaaaaaaaaatcgagaaaaaaatatatatacattttagttaattacaacatatatttataaataaaagtgatatccatacacataaaataagttttggtataatgttaaagtcatttcatgcatctaaaggagatcatgagttctaatcccaatataagcatgtttactttagcatttttattttactttttgaacatctaccaataatacttatatttaatgttttaattattgaaccagatgtatcttattgttactttttttttttactttatactatatttaatactaaaatataaatttgcattaatttttaacatgttatgcaatgtaaaaaaaaaa

SEQ ID NO: 152229 - DNA, 1268 bp, Cannabis sativa
caaccgggtcttagactcggactgggacctaggaaccggaccaggatggggacctgaatcagggacccgcgcttcagaaactaccaccgagacccaggacctgaccccggacccatatcctaaacccggactaggaccaagacctaggacacgaagttgaactagactgggacctgagaccgggatccttatttagacccgtggcttaaacctaacccatagtcgatgtttggatctgggacccatacccggactaaaacctagaccaagactcggacctaaacccagacccagacccagactcagacctaaacctgaacccagacacgaactcagacataaacaaataccccgtgacccaaaactggatgcgaaactgtaagcgtacctggacctgggaacaagaccgagggactgggacccagtctcattcccggaacaagaatttgactaggaccaagacccagacccggaccgggacacggagccgaattaaaactcagatcgggactcaggacacgaacccgaacccaaatacggacttggacccaaacccagacgcataacccggactgggattggagactcagacttggaccaaagtctcagaagtagattggggaaccaaagttgaaattagaacaaaaatcgagacccagaagtgggattgggacccaaggcccgaccccagtttcagtcctcgacccggacccacacccggacacggacacggacaaagagacggactaggacccaaatatctgaatcggaacgagaccgggacccaagattgggatccgaatcttgacccacgacccggggcttggacccaacccgtagtcaatttctcgatcttggaatcgtaccaagacccaaacctggaaatatttctagactaggaccaaatcaagactcggactcgggacccgaaatctgaacaagaatcggaatgaggaccttggaactggaattggacctggacccaaaatcagatctagatgcataaccgaacatgaacccagacccaaactaggatcgataccaagacccaaactcgtacccgaactgacacttgtgccaggacctgcgacacagaacctggaaccctggacccttgacccaagacctagaccataacccagactcgtaccagaacctatacctaaacccagacgcagacccagaccaagactcggacccaaactcagaccgaaaactggaccctgacccagaacccaacctagaccaagagatcggaagagcggttc

SEQ ID NO: 152230 - DNA, 518 bp, Cannabis sativa
acataggatttttaatccaacatgctatgttgtagcatcaatgctattcattattttttttaataaaaaattgaagttaaaaagttattgtagttaaaaattaagatatatattaaatactagaggagtgctagagaaactcttttttgcactctcttttacattctcttcctaattgagtgacttgtaactttctaaagtatgtttaagtatagttacaatcataccctttttacttttcattaataattaaaatatcttatctaatttacttattaatttttttttaactattttattaatttctcaatttttttacttaataatatgtactactatgtatctttcttttaatttctttttataataaatatgtaatattttatgttattaaaaataaaaaatactaattttttttcaacaaattttagtttttttttttttttcatattgtatcatttttaaattattttatttcatatatatatatataaatatatataaagaaacaatgaaga

SEQ ID NO: 152231 - DNA, 1321 bp, Cannabis sativa
  modified_base (778)..(781): a, c, t, g, unknown or other
  modified_base (1289)..(1289): a, c, t, g, unknown or other
gtccacgtattttgggcaaaatcaggggcaataacttttaattgtcaaaattataaattacattctttagatatacattataataatatcacctaataactaataatatttttttttaattgttaatttgtatcacttttaaataaagtagattatacctaacataaaatgtagtatacgtgcctcgcacgtaacttttaattagtatttatatatgtgtatatattatagttaggtgtatcaattcaaaaatgataatccatttaaaaataatgagttagttttatcaactacaaaataatctaaattcatttaaacgtgaattcatttattttgtgcggacttcgagtcgaattattgtaattcaactatattttgctctcccttataaataaattggatctatattggaaatagatgtgttttaaaaataattatgtacagtaatttgtgaagaagtgaaacgaaaaggaaagaattttttttttgagtgtagcgtaatagtattttacatcatatatgagcttaatagcttaaaggttctgggttcgaacccatgacctctcccttttttccatccctccctcaccattaagctagccttagtggctttcgaaaaggaaagaaattagttaagtaaataatacaacaactgcacaaaaaatatgtttttcttggtagtgtatgtaattttctaatcttatgattataagaagagtaatttgcggcataaatagctataagtttaactttgagttacaaataaatacctaagttnnnnttttagcggtaataatacctataattttaaaacttctataggtacctgattaagtaaattgacatgtggcaatccctgattggttcaaatcattaaatttttattaattttaaaaaaattagttcaaatataccaataagaaaataacacatggatttaatggcttaatatttaacggttaggtacctatagagttcgaaaaatataaattaggtattagtaccgccaaaaattaaacttagttatttatttacaactaaaagttaaacttaggacttctaaaaactaatgttacttaaccctagaaggccaataatatcgattaccttcgcagctaacctaaacatctagtatatatatatagatatatatagattgattaataactacaattaattaggaaatttacaaaaatattgatttttccactatctttacaaaaatactgccacacggcagaaatttcttttttactatcttgggcaatttttttttttcttttatactntaaacaccaaaaaaaaaaaaatgaggcctcca

SEQ ID NO: 152232 - DNA, 541 bp, Cannabis sativa
atatatggcgtcagttttttaaaaccctttagcgtcgccctgatcagagtcggtagcgaatttcgccaaaaccgacgctgaaaggacttaaaaaccgattctaaatgaggtttttgtagtagtgtaagcagtaggggtatttgcttaaaaaatgttcggggctcatttttccaaaaaaaaatgatttttaaatattgatgtgatagttgtgtccgttgttacttcttttaactactcattttcttcatttcttcttcttcttctcagttcactcaacaacatcctcttctcatctcactactacaaacaaaggcctttaatcccagtttttaaggccttttatctcggtttttgctaaaattaaaactgggatatatacttgggataaaaagtccttgaaaaatctgggataaaaatggaccttttatctcggttttttataaaaactgggataaaagatatctttttatccccgttcttatgagaaaagcgagataaaaagtaccattttatcccagttttctcataagaaccgggataa

SEQ ID NO: 152233 - DNA, 664 bp, Cannabis sativa
ctatcaccgacgaggtatcaccaacgactttttaccaataacatgtcgccattgataatcattgctgaagaaataaccatcttttactgacaaaattcattctcattcttttatgttttatttataattttaaggcttaaaagttttaattacaaaattacgttagtaaaattttaaaattacaaaaatacacattgttcagtaaaattaaaaaaaataactaaaaaacaaccagaaattaatcttaagacaattataaatcaatcataaataaactataaaataaccaaaaacaactagaaaaataatcttatatgacaactataatacaaactataaataagctataaaacaatgaagaaaacagtttattatttttacggtagaggaatttttgtaaataaaaaaatttaaagagtaaacattcaaatttttccgtgctagcgtattttataatttttttttcaaatttttgatttattatatataaatttttcaaaaaaaaaaaaaaaaaaccaacccaccataaaatggtagaattcgaactagtatggaattccaaccttcactactacaaaattcactattcacgtctgtttttaagtgacacttaaagaatttacgtcggttttataaaccgacgtatataccgtagtcgcaaata

SEQ ID NO: 152234 - DNA, 697 bp, Cannabis sativa
aaatgcatgtcccagatcaagagcatacaagcttcataaccaacatgggactctattgttataaagtaatgtcatttgggctgaagaatgctggggcaacatatcagtcattggtgaacgaaatgtttacaaatcaaattgggcgaaacatggaagtttacgtcgatgatatgttaatgaaatcgataaaaattaaggatcataccacagacctcgcgaaatgcttcaaaatattaatgaagtataacatgaagttaaacccaaaaaaatgttcctttggagttcgtcaggaaaatttttgggattcatagttaatgtgaggggcatcgaagcaaatcccaaaaaaatcaatgcattgatagacattccatcaccgacaaagcctaagcaaggtcaagccctaacaggaaggatggctgcacttaacagattcatttcgaagtcaactaataagtgtgtgccattcttcaatgtattgcaaggcaataagaagtttaaggggacaaaagagtgtgaagaggcctttcagaacataaaaaggcatctagtgaggcctccggttttggcaaaaccaataactagagaggcgctatttctatatttggctatcgtagaagatgtgattagtgcagctatagtgcgagaagagggtaagcaccagcaacctatttactatgtaagtaaaaggttactgggg

SEQ ID NO: 152235 - DNA, 765 bp, Cannabis sativa
aatttttgagtaaaaatgaagtttatataatgttgggataaaatgtagccgtttatagccgttagcacacattccaagaagaatcctgctgtgaaccaaaattctagattgattacaaccagaattttggattccaatcggaattctggatggctaacagtggcaaaatatgcatttttttagactaaacgtgcataactttttactcgattacccgattttagaaattctaattttgttctcttagttaaataaaatgtgatttaaaaagtcaatcaaaaattttttttgaaccatcgagtgagaaaacttgtcgcacaaattagtgagtgggccaaaatttgtacttataaaccctagtgtactatgcaaatcactttaacaagactaaagtaaatttataccatttgattgtgtgtagtcttaatgtagatgagattcctagtttgattttcatgttttgatccaaaattaacttttttcgagagttgactttgattttcgggttgatttttgactttgagcttttgaagacctcttttgaatagggtcttgaattcttgataccttgatgaatcttttgctcttatcaagtatgaagtagttgatttgcttgctgaatctactttgggtcacttttagaagtttggtaaaattaatattttgccttgaaaaaaattattttaccttttaattgtactacaaaatcaacaaatctttagtaacaaataataatcaaatatttgttaatcatcaaaacaagga

SEQ ID NO: 152236 - DNA, 976 bp, Cannabis sativa
  modified_base (320)..(330): a, c, t, g, unknown or other
  modified_base (673)..(674): a, c, t, g, unknown or other
  modified_base (786)..(787): a, c, t, g, unknown or other
  modified_base (907)..(930): a, c, t, g, unknown or other
aaataaaaatatataggatactaataaaattatatattatgtcaacaaaagtacaataaaaaatagaacttaaatattatttgaaaaaatattataccgtataacaaaaactacatatatcattcaccaaaacatatatactattaataataaaaaaatatatattactagtatatatatctgtatacactaaccaaactatataccacaattaaaatatatatatcatgataataaaattatatgtcactattctatataataaaatagaaactgattaaatattatttaaaataaatatatatcatacaattaaaatnnnnnnnnnnnataattaaatatatgtagcatgccaataaaattatatacgtacattaaaatatttgtatgatgctaacaaaattatataccactattatacatagtaaaataaaaaataaatattatctaagaataataatatactatacaacaaaataaaaagtgtacaacaaaatctatataccaacaatccacaacaactcataaaaaattaaaaaaattgataacttttaaataaaaaaagattttaacaaaactaatataaatataccataatctttaagtaatttgcttctaattctaaaaaaaatataaaaaaaattattaatttttttatgtggcaaaagacaanntaaataataaataatctaaaaaatgatcattttgctacaaattttaaaatgtggacatttactaacataggtatatgattgggataatcaaatacacaaaaataacaaaaannttataaaaatacggttttacagaattttaaacatttttacaaattttttgattttatttacagaaaataccagcattttatgttgtttgtatttatcttaatttattgttaattttttgnnnnnnnnnnnnnnnnnnnnnnnnttgttttgatgttattttcatattacttttatataatttttttgtt

SEQ ID NO: 152237 - DNA, 700 bp, Cannabis sativa
ttaatcgtgtaaggctaaataaaaaaaaaatcgttaaaccaagaattgttaaaccaagaattgccgttacatagtcacttttaatatataaagatattcatttatcatattaacaaattttttaaaaaattatttataattttttttttaaatatttaaaacaaagacgcttctatcaatattagaccaaaagtatgaccctaccaaaaaaaaaattgttaaaagtgtatgtgctttgctataaatattttaaacaattatgttttgctatacacacaacacggttttgacatttattaagagcaattactttgatcattaaattaacataagacttcgactctttattgaaaaaaaaatcttcagtagtctagcaagtgttgtagtcaatacagtgtaataaaactttgattttttttatatatctaaacttttaatactaaaagattttccgacggttaaaaatagtcagtggtataatattaattatcgttcactttataccatcacaaaattagatagaaattagagttttttttaatattatacttaaaattgattttatttataaaaatacctctaagaaaattatttatacgaataccgttgtgccacgtcagcatacataccaaaattcaaaacaattaccgaaaatggaaaaaactggaaaaatctcgtttctagaaattttcgctttttg

SEQ ID NO: 152238 - DNA, 932 bp, Cannabis sativa
atgtattgcaagtttattttcatttggtttaatataaaagtttaaattctgcgctaatttgattagtaatcccaactaggggattagggtttcataagtattttgggtaacgtgcctaattatttagggcgttacaaaaatgaactcaccacctagccttatacagagtttccaagagaaaccacgcataaggccacaattgtatatgcctctaaggccgtcatgagcccctagtcgaggtcaaaagagggagaaaaattggctgcccacttggagccttggccttggccggttagggtttcaggtcctagtggatgacgagaccccaaggcccaatccagtggctggccaggaaccctagttccaggcataggctggccagcctagggacacagtccccatggccggccaaaccccatgaaggccacctatgcaggctaggcttcaaacaaagcctccttggttggccagcatttgcatggattacggattagaacacatgtcttatcaagaactcaagcatgttcttcgtgactcaaagagccaataatcacaacgaaggtcagattcagttcttttttgtctagaaatcacacaatttctatcctaaggctatcatgcagatcaaaatagcgaatggactacaatctaacgtaagaatcaaaacatattcaaaacaagaaataatgttcatgcattcatggcaaaatcaatcaaaccaaatgaatatcgggaatagaaagcttacccactataagatttcgatgaagaagaaggtgggaagcttggatcgttgaaatagcgcagaaatctcgagaagaatagtgcttgtaggcagggccgaccctgagttaaaatgggccttaggcgaaaaaaaaattgggcccttactataaagataaatggtttttttttaaaattattaaaaaata

SEQ ID NO: 152239 - DNA, 631 bp, Cannabis sativa
aataaaaggatcaagagagtattaatacacaatgggagctcggtaaatatcctttacaaggagactttatcgaaaatgggactcaaaaaagccaagctaaggctttgtatggtgaacctttgcggattcaccggagacagcatcgctagccttggcataatcaagctcgcattaacattaggcgaggcacctctatctgctactgttatgcaagacttcttagtcgtcgacctgccttaacttacaacatattgttgtgttgtccagcactgatcagactaggggcaatcagttcgatcaagcacctatcctcgaaattacaaacactagaaagcgtgggggtggtacgtggcgaccagatgctggctggcgattgctatcgcatagagctgtagcataaaaaagccaatcatcagttgatggccatcttggaagaagaaactgaacaaaaagacaaagatcttgaccattgagttcaagatgaaagagacgtgctaaaaccaatcaaagaattggaagaggttattctcgacgcacgaaatagcacaaagtgtgtatacattgggaagaacctggacgagcagctcaaatagcagctaataagctttttgaaggcaaaccaggatcagtt

SEQ ID NO: 152240 - DNA, 722 bp, Cannabis sativa
  modified_base (426)..(435): a, c, t, g, unknown or other
  modified_base (687)..(691): a, c, t, g, unknown or other
acatacattttttttaatatgcatgacatccaaacaatgtcgaacaagtaaacttttccaatatggaacacgaaaaaagattgactttctttgaaaaatccatttttttttcatctctgcatacataaaatctacaagttctacttgttggagaatttgttcccctgacagtggcaaaggagccatatctccctcttcggtaccatcgaatgctgtcttcttctgtctatcaggatgatttgtaggtaagtacggtctgtgacccatataacacatcttgtgtccattttccaagcgacgagcacatgtgttagtgcaacaaatcggacaaccttcgtaacctttagtgcttaagcctgataagttactgtaagctgcaaaatcactgacagggcacaataacactgctttcagattaaagaattnnnnnnnnnnaccatcataggtctgaacaccattctcatacaattctattaaatcatcaatcaatgattccaaatatacattgatattatgtccgggttgttgcgagcctgatatcattaaagaaagcatattaaatttcctattcatcactaaccagggaggaagattgtacatataacaaggaagataggccaggaactatgatgactacttagagatctatgtggatttactccatccgcagacagactgagacgaatnnnnnttggttcagatttgaattcaggatttatgta

SEQ ID NO: 152241 - DNA, 743 bp, Cannabis sativa
  modified_base (587)..(592): a, c, t, g, unknown or other
tttcgaagtacttgagatggaaaatgggatcttctctccctgtgtacatcttccatgttggcattttaaacttgtggggcaacgctaggagattgatctcaagtgaaaaaagagtttcgcgtgctcggtccagctcaagatcattgtttctttgtccagccatgccgtgaaacatatttttcagtttgtctagctgtgcctgtacggctggactaacctgctctacattctggtcaatttgaattacgtcagcatctttctgagcgggaatttaagtacgggttctgggctgcacgatcggcgtgacattctgatcgtctactcccctccttctattaagatcattccttaggtcatgggtcgtccccaacctttcgaatacagaagtgcttggctgccttagcgattgatttgctttgttgacgggtggaatgacaccattgatctggttggaaccatcaggtatgacttctccagatgaattactagacaagctctgcccgcctaccgctaggcccacgagcccttaaagcctccatctctctatctctccactcgataaacatacgcctttgttcttcgaacgnnnnnnttaccgcagtgcggagttcttcctgatcatgatgtagggtattgttatgaccctacatgagtccaagagcgtcgcggaggttttgtaactcagtagcatctcgaatggttgtctgggtgttggttccaggcgaaacagttgtgttatgaat

SEQ ID NO: 152242 - DNA, 859 bp, Cannabis sativa
tgttgaaaccacgtacaaaaaccttatgtgtttttacttttctgcgctgtttgtttttctagtttattctggagttacagagttgtcttttgtagttacagaaaaaactactttcaataactgttttattattctgcatttaattaagaatttaattaaattataaactggtaatattaaaatacaaaatttcaattggtattagagcgagtcactaaactcttagtgagatcttgagattattttattccgtataatttattttgtgtgaggtgtctttgtttgtagaaggaagctccattaattgaccacctctgctgaattatttgaattatccatattggaaggtcatgatgagagcattcatcaagtcacaaaatgagaaggcttggagagctatacttacaggttggtcgcaacctactgaaaatgacgataaaggtaatactaacgtaaaacttgaacttaattggactactaaagatgaaaaaatatctggttataacaataaggctttacatgctatttttaatggtgttggtgaaggctttattaaattaattttgtgttgtgaatctacaaaggacaggtgggaaatccttcaaactcagtttgagggtaccgctgatgtaaaaagatcacatttaccacgttgcaaattagatttgatgaattgagaatgtcagaaactgaaactttgtctaaattttatgaaagattatctaatatttttaatgaattttttgtcttgggagaaaaattagaagaatatgttttggttcagaaaattgttcgtgtgcttcctgacaggtttgaccacaaagttgctagcaatggaagaggcaaaagattttggcaa

SEQ ID NO: 152243 - DNA, 739 bp, Cannabis sativa
  modified_base (634)..(639): a, c, t, g, unknown or other
ctacgggttttgtccaagccctgagtccagatccagatcccaatctcgggtccaagtctagttccatttctcgtgtcgggtcacgagctgggtcctaggttcaagttcgggtctgggtgcggtactatgtcccagtcctagatctgtttcccaggtccctatcttgattctggttccaggtcgcggttattgtgtgggtttgggtcccggtctaggttcggatttgagtcctagtcttggttcgggtttgggtctctgtctgggttttgatcagggttggggtttgggtttaggtactggtcctggtcctattccttgtttggttctagttccatttgcgattacgagttcgagtttggttttgagttcgggtcggagttcgagtcatggtttgagtttgggttcagctccgggttacgttcgcgtcctgggtccttgtctaggttgggtctgagtcccaagttctaatcacaatctgagtttgtattcagttctgggtctaagtccttggttctgatcctagtctgtgttcgagtttgggtccgggtccgggtctagctttgggtctgattcaaggtgtgcgtctttgagttcggctcctagtttgtttccgtgtttgtgtccaggtctggannnnnntctgggtctaggttcgggtccaagtccaagttcgggtcccgagtgcaggtccacgtttgggtcttggtcaggatatcggtccagatcttggtcgagcatt

SEQ ID NO: 152244 - DNA, 565 bp, Cannabis sativa
  modified_base (58)..(58): a, c, t, g, unknown or other
taacatatgtatgatattatactagtcttaccttaattccgaattcaggtgtgtcggncaacctgagtggaacaactgcttggcaaattataggctcctaaatcgcatcgataataactcacataagtgactcgctaaatcacaatcgggactaaggtttaaaaccaaaaccgtatctactgcaacttaatatggtaatatcccaaactaggagggaatcaaccaactagaaaccagaaactgacacgaaacgacaatctgaaaaaccggtattccccctgctgcaaaatatgcaggtctggaaggttttcctccctgcagcaaaatttgggaaccggttttgcaagcattgtaaaacaggttaatcggttttacccagaaaaccaacaaaaattcataccctaaccaaatcgtttccaaactcagtcaaaccttccagacctgcatattatgccccaataaactatttctaagcaacaaaacaacaatcaaagcccataattaatattcaccattaaagcttcaatcttgagttctaaaagtcaaagcttgctaaaaccttcaa

SEQ ID NO: 152245 - DNA, 1158 bp, Cannabis sativa
  modified_base (790)..(791): a, c, t, g, unknown or other
ctccctatgaactgttgtacggtagaacgtgtagatctcccatccattgggatgagtcaggggagaggaaatacctaggttcagattcagtttatcggaccaatgaagcaattgaaaagattaaagctagaatgcttgcttctcaaagcaggcagaagagttatgcatatctgaaatgtagaaatgtagaatttcaagtaggggatcatgtgttcctacgggtgtctcctatgaaaggaatcaagcgtttcgggaaaagagccaagttatgccctaggtttacaagaccttttgagattctcgagaaggttggacaagtggcatatggtttagctttgcctccagctctttcagcagttcacaacgtatttcatgtctcgatgctaagaaaatacgtttcagactcagctcatgtacttagttatgagaatcttgagctgcaaccagacatgtcctatgaggaacaaccagtttagatccttgacagaaaggataaagttcttcggaataagaccatagctttggtcaaagtactatggagaaatagcaaggtggaggaagcaacctgggagttagaatcagacatgaaagctcaatatccagagttgttcaggttagatttcgaggacaaaatccttttaagggggggataattttaaagactgcttagctttaatttagaaattagcagttaattagggctttattatgaaaatcatttattaatattgaattaattatttacgatgatttttttgaattcaggatgcatttttatgtcacatatagnnatttcataattttgcatattttggtgcgtggcaatattggaacgcggtgtatggcttcttgaatcacatcttagtatttttagtatagcgggataatattgttagacattgagaatgtcgggaataggtgggattttagaatttcccaaaatacccctaagtggccattatgacttttagtgtgggaggggcaaaatagtcattttgccccattggccttttcattttgtgagttatttaagttgataaatctgattatttttaatcaagtattctgatattatctttaaggaaatagattttattcattttttttcacaaaataagaaaattggaaaaagaagcattttctctcaactctctctct

SEQ ID NO: 152246 - DNA, 603 bp, Cannabis sativa
ataaaagttatttctgccgtgtggcagtatttttgtaaagattgggtcaaaagtcagtatttttgtaagttttcttaatattatggtagaactaaactcataaaaatgtttaaaactaacaaaataccataaaaatggggtaaattgaaaaatacatttttatttatcaattaatcaaatctacctctaatttatatttaattgaaacatacatctttttatatgtattgtacccaaaataccctgatatacgaaagtcacatggagagtatattaaagtgacaatgaaaaaattggtaaagtgtttaaaaaaaatgtaaaaataattgactttaaaaaagagagtaaaaataaacgaaacaatataaaaatggtagagagtctaatttcctcttaaaaaaaataagtaaaattaaatctaccatatttaaataaaaagttttaaaaaaacccaagcgttaaataataaaagtaatgaccaaacctcacttcttaattacccaagcccaaaaaaaaatggggtaagttgaaaaatgcctcttttattcattaattaatcaaatttacctctaattttatatttatttgaaacatacctctttt

SEQ ID NO: 152247 - DNA, 1113 bp, Cannabis sativa
aaaaaaaaaaaaaaaaatctgatcctccattgaaccacatcagaatatccattaacaccattaaaacagttaacgtcatctcctctcaacgtagaagagcccattattcactatcaattttttttttttagtgtttttgatgatttaaaacttacaaaactcacaaaacactatattatctgtttcaaacatctttcatgatttatttgttttgtttgaggatttctttttccttaaaaaacaaaatctcaaaattggaaattcacatattttcaaacaaaaacaatgtttaaaatgatggtttgcgattgtctcgttaaaacttggtttttgacgctcaaacgatgttaaattgatagtttgcgatagttctatgtaaattttagagaccgaaaataatgcaaaaggatgtcattttgattgtctttcaatgatcgcttcaaaactttatttcagagattaaaaaagataatattaaaataacgacttacaatggtcccaaaaaaatttaattttttaagactttgttagtgccataaaaactttattttagaagtgaatcaatgtagaattgtaaattctgaattgatgaattgttgatgtatgatcaggtaatttttttattcatgtaataaaaacttaaaaattataattttacactcaaattgtgtttaaggccattatccccgcctcaaaacataaaaataagatgtcgtttgataacacttttattttttaattttttaatcacaaaacgaaagtaaaaattttctttttaaaaattttatttttgaaaaataaaaatgcgatctgtaaccacttttgtttttcaatttttaaaaacagaaaacaaaagtgtcttctgtaaagtttattttatttttagtttttgattttatttaagtaggatctaggttcggagtcagactcggatttgggtcagaggccgggttcagcgccagggccatggggagagatttgggtccggatctggtcggagtttatgttaattaaaaaaaaactgtttaaaaaaatattgaaagtgactttttttttaaaaaaaaaaaataataattctcaattaaaaaattaaaagtgaaaacagttttatag

SEQ ID NO: 152248 - DNA, 593 bp, Cannabis sativa
  modified_base (194)..(213): a, c, t, g, unknown or other
tggagaaatgtttggtggatatgcagttcaaagatcattaagttgaatttaaaattgtattcaaacttaccttcctagaaattcggattgcatattgatgaaattgaaaggtttgtgactagttactagtagctgcctaagcccttctagggaaataccttagtgataaaaaaatttcaaaatgatggaatggnnnnnnnnnnnnnnnnnnnnattactagattcatggatgtcatgatcgtgatcttaagaaaagctaaaactgttaactaaggtttggatgtttgataacgattctaatttattagaggtggaccatcctgtggtcattaagttaagaaagtgtttgcttcaacaaatactacttttctaagaatatgactaagtctgaaaataaagtagtaaagtagaggagataatcttcattccaaagtgttctatcatcttattctatataatatggtcccactgcctctgttatcttgacacaatcgatgagaaaaataccacttatgttcttagatagaaagtcacggtaccttgtcatatgggagggtttcaaggaactcgccctgttatgacttggaagacac

SEQ ID NO: 152249 - DNA, 680 bp, Cannabis sativa
acattgttaatgtgtggaaataaattgtgatatataagataaatgggctattcctccaattatcaattagttttaagataaaaccccatggttctcatcagtaacataggccttcttcaaaaacaaaagaaaatattaagttcagatgtaagaggatatattgatatttgatgttaataggttgagtcttttgtttctctctatatatagatcactcaactatacataaatgatcgaaaatataaataattaattgttaacatataaatttaacggatgttgttagtatgtttgtttaataattatgtaaatattaatattattttatttaatatttttaatttatttttacaatataaattatataaaattaatattttaattagatttcattatagataattaaatagatatagtttaaaattcttagttctttaataaattcattatttaattttaattaattcaaataatattatctttttaaaatttagttaaaataagtttttcttatattattaaaacaaatttagttaaaagttaattttttttaccattaatataaaatattttgttaagtaataatatttttgtaaaaattaatattgaaaatgaaaaaacatagagtaatttacggcataaatacctaagtttaactcctagttgtaaataaataccta

SEQ ID NO: 152250 - DNA, 653 bp, Cannabis sativa
aaagtgtatgttagaggacattggttttcatttgctgaaaaggaaggatatttccaaggctttgcaactgccaaaaaatgtgacaaatgctataatgtctatggattgccatttgatgctcactgaactcactggtgcatgggttgaatggaaatctaggcagagtcttcgaattacacatcttacttatgctcatgcatctctcatgaggtttgcacttagcaattgggttcccaattctaacaaaaccgtggtgtctcaagatgtggcctgatttctctttcgtatcaccttgggagcatccatcaacttggcttaggttgtgtcattccgaagaggtaaaaagcaaactcataagcttgtgtttcctaacttagtctataaaatttttccctctcagaaagatgtgtcctactctcatgaaactcttaagcctttccttactggcaccatattccaaccctcgaagtattttgatggagcttttcccaagcgtcctaaagctggtgttgctgctggtggtggtgcaagcttgagttctgctcctgcagatgactaggaagtcaagcatgaggtccaactggtgaacaatcgtcttgctgccatggaggaggttcagcaagagatgtccaagcagctgtcctcattgatca

SEQ ID NO: 152251 - DNA, 628 bp, Cannabis sativa
  modified_base (51)..(81): a, c, t, g, unknown or other
aactttatatgtgtttattattgttttaaaaagttcatatttaggatgttnnnnnnnnnnnnnnnnnnnnnnnnnnnnnnnctggtaaaataaattccatcacaggaacccctcgtccataatttagaagtccacacatacactctggaacagttatagaaaacatatgatcatagatatggtaaaaatgataacaataatcttatgagatatattatcaccaagataattatgaatcatatgtgtatgagggggaggcatattcatgttgcactcttttttccttggttcagattttgtcccactgggtttttctagcaagatttttaacgaggcaacttacaaatagttatgaatataaaacttgtattgcactcttttttccttagctcaggttttgtctcactaagttttcctgacaaggtttttaacgaggcagctttaaatcatgttaacatacttgtagtttatgaagcaagtagagaatgtgtgggtgtgagatcattgatataatatattcaggaaacatatggctaacactcaataaagaagtatcaacacaagcagttttctatgaagataatactacttgcatcgctcaattaaaaggagggtacattgaaggaga

SEQ ID NO: 152252 - DNA, 740 bp, Cannabis sativa
  modified_base (27)..(27): a, c, t, g, unknown or other
attaaaaataactttttaaggggcaantgttatacccgaaattcagctaacacatcagaggaaaacgcgtgtcaagcagggaagaatacggactaagacacataattataattacatttgaggtggaataactcgttaaaagcataattgacagagtatattcacaactcggttgactgaatagtcttatgcgagataaagctatacaaactgttgccttgcgcatcaacgagaaaccgtgtaagttaaggtgtataagacgaggcactaacctcgattacatggatgaaatatattgattgtgaagacacttagtgtataatatgaaggctaagtgtagaagacgggtgaaccaaagcaagcgatagcgaggcgtccacctcgccattggaagacatgcacgtgaaaaaagatcacctcgtcaccaaagtggcgattagatagggtgctatgtttccagagtaaaagtgacaagatttatattatagaccatggaaagaaataggaaaagctctagcttgctatcaaggttatcgctgctctattcctagcaagacgtccaaatataatacggtttgcaacgtatttaatacagtttattttgacccagtaaaagcggactaatcacagctgtgtgatattcaaataattagggggttttcattggatcacatccaatggatttggacccatccgatccaatccaattatttatttgatattggattttgccatccgat

SEQ ID NO: 152253 - DNA, 1604 bp, Cannabis sativa
  modified_base (1352)..(1353): a, c, t, g, unknown or other
  modified_base (1578)..(1578): a, c, t, g, unknown or other
aggtcacccgatcatttccaaccaaccccataaaatttagaattcgttcaattactgtgagccactactcagccttcatcacatcaggacctcccagaaacattaaggtgtttgcttacggaacctttcatataatggctccatatggttgccagcaacaggttgttctgctagcaccgctggaacagcaatggcctaagcggcttgttgtggaggcacggcaggaagatcatgctgccttaatctctaaatttcttcatcttattggtggattcaatcttgcatttctgcaaacctctgctcccaatccgaaggagcttgtggtagatttacaggacgaccaccctgagctctgccacagcctcgaccacggggattctggggaatttggtttccttgaccgcctccagtctcaaccatattaccttgacttcttgtgtttcactgggcgtccatattataggacttagcctgtgaacccataagccaggcaggttagacaacgatcataaaacttaatactgctcttatggaattaaaggcaacacacttaaattaaataattataatctaatatgattcctatcatgctttaataatcatttaaaatactaaacaagtacaggcttactcaaccgtgaatcgaggtttctctgaagaagattgtacatgtcttggcaagcttcggtagacaaacctggctgctctgataccaaaattgtaacgtcctaataccaaggcacgccacagtgctttttcaattatagtgttatccttgcaaatcaaagatatttcttgaaaaatgtgtcaaataaaatttttttataataaatatcaagctttataatttacataattatttacaaactccgagatcctgaatcaaaactttttatacaaaatatgcaaaaatataatatccaggttgcacagcgactataaaataaaatccccaaatgtcccgagaccgaacagttcagatcacgctgccacgacatgtacaatcccacccaagccaggctcactcctgttcatctttcgccttccctttacctacacatggtagtaaaactgtatgagtcgacaaactcagtaagaaaagcatacagcatattatataataccgacttgtatcaaggtgcccatacacctatttataaggctcaacagatgagtaggaacgttccatactacatacactacgtaccttgttgtacgagtgttggtagggtttgttttgtaccaccgagtgatataccacaactccctgtactttcccgtacttgtgctggtaccattataatgtactcttaaacaatattcactacaccaatgcactctgtaccataacnntacaagtgttggtagtgcaactaaaccataagcatgcatatacacttaacacatatatacattcagattttcatattacacattatacacagttcttaccttatttccagattcaagtgtgctggctgacctgaacggaaagtcttgtgctagatgtattccctactcacataatgaatccgggtaaatcacatgatggaaaccttgttgggttttatgccctanataaaactctttacaatctgattagt

SEQ ID NO: 152254 - DNA, 624 bp, Cannabis sativa
ttaattatcctatcgataataattgcttgctaaggatgcttaatatggtgaagaaaatttattagatattatgaatcacaatttatctaaccttttgattgtaaatttatgtatttgattataatatttaataaattattctcatctgtgtatgatttctattttattttatttgtctaagaactctagcatacatgatgatcatttgttattttgcgatcatttatttatgagaaaaagagcacaaatgacatgattttgttataacatgcatttaatggttattgctcttgtttctcattcaactttaagcattccaagaacttgtgccatgttgacattgaatggaaccacacaaacagtgggtagaatctctcatgttgaatttgactcttatgagagtggatttggccttgaagtagatgcaccacgtaaatctgctgatgatgtcactgaaaaggataagaaatcctatgaggattgggagcattccaatcgctgttgtttgatgcttatgacgtatcacatagatgagtccattcgtgatagtattcctcaaattgaaaatgcaaaggattttcttgctgccattaaggaaaagtacaaaaagttctcaaagaatga

SEQ ID NO: 152255 - DNA, 533 bp, Cannabis sativa
gatggatgtgagcatggttaataggctcaaggagccccaaccctatgggcagccaccaccgaaagctcaaccacaaggcaaaaggtgccctggtgaacaagatgcaaaggaggaggaaaatgtgccacaacaattgcctggcccaaatgatccagcgatgcagtacacacatgcccaacttaactacatcattcaacaaaacaatcatatgtagaattacatggttcaaaggatcatatatgatgagagtcaagtcactcaacttaactctcttatcactcgcatgaacattgggatcgaggaccccaactatctggcaccgcctccttaatttcatccatatgatcaaccgccaccaccgaaccccttctgatgggggtctcaggtaagtctcttttccttgagttttatttgcacattggggacaatgtgaatttaagttttgggggggacttaaaatttttaattttttctgctttagtttagtttgtttttatgctttgaaaataagctgaagatagttgtatgctgct

SEQ ID NO: 152256 - DNA, 548 bp, Cannabis sativa
gctcgcttctgggagaagaagaagaggcttgatgccttgcttgaggagcgcagggggcctcatcttccaacctgtatcgattaagccaactatcatccgttactgcttttattactatctctatttttccttttttacattgatagtctcttttcccttttttcagacaatttcttttttttttctttaaggggagacaattttaaggcccgtccccaggcccttaatatttttttagagcttgctgctgggtccgaacaccttatatttatgtttaaatacatactttttgctttttaatttaaacttttggcatgttttacatttgttcgtgtagtatgccttattaccccctgagtgtcatgaaaattgtttttaaggcactcaacttttacaaatattaatttggaggttgcatatacttgtctggtacaaatttactttactgagcataagtttatatttcttgaatattggtaatacttccggaggtgatcggcattccaggccctaggcaccatggtttcgtccattcttttgagcttgta

SEQ ID NO: 152257 - DNA, 688 bp, Cannabis sativa
aatgaatgttagcttctggctcgtcaagattgtaagcctcaccgagaaaatgtctgaagttaactgggtgaaattactagaagccttcccaaagcgagataggcaccttgctattactaggtctcgagccaacccaactgttgtgcttagcttgttcattatacaataagtgcttccgcagttgacatgtatcgttttcttcttcctagatgtaatgtactcaatgcctcgctattcgcattcagcgacatatagtttctcgctaatatactaagcaacagtttgtatattgattcctcacacaagaccttacagtcagcaagttacaaatatactctgatacttacacaattaatgagttatcccataaaaagagattgcatcgatccatatttcttttatcctgacatgtgtcccccactgagatggtagctgaatttcgggtataacaaacatcaagacttcactcatgtggttcttagtgactaggttaaaccagttagagctgatgggatgaaagctttatttctaaagctcatgagattaaagcacaaattggagaaattcaacaaggagacaataggggatattgggaaaggttatcaggcagcaaaaactcattatatggaaggtagaatggaagcttaagctcatgggcaagatctgaattatcaaaagaaggagaaag

SEQ ID NO: 152258 - DNA, 584 bp, Cannabis sativa
aggaggtaatatacacttttgaaatcacctttacaaaacaatagtacatcatcagcaaagcttaagtgattaagcttaatttctccacatctgtcatgaaactaaaagtcttgtaaggactcaattttcttcaaaattctagatagatactccatcccaaggacaaagagcaaaggggacatggggtccccttgcctcaaccctctctttgattcaaagaatccataacatgagccattaagaataagagagaatttaggtgtcctgatacaagtcatgatcaaattaatgaactgcttaggaaaatagaaagccatcattacctattcaatgaattcccactcaatcatacagtttggctttgtcatcttccttccataatgtctaataagatcctgacaaatcatgatgttatgagcaatgtatctatccttgacaaaccctccttggttctgtgctatcaaatctgggagaacatgcttcagtttggaacaaatcactttcgttgcttctttatagataacattgcagcatgctattggtatgaagtctttaacagtgttagggcattttaccttaggaat

SEQ ID NO: 152259 - DNA, 555 bp, Cannabis sativa
actaggccgaataaaccctatgtaaagtaacccctagagctgaattttcaattttttaagctcagctggagccattctataaggagccttgaaaactgattccactccaggtgccaaatcaattatgaaaccaatttctcgctgaggtggtaaacctggaagttcttcaggaaaaacatctagaaattcctgaaccaccttgatgtcttctggccgaacagagtgtggccgagtggtgtctactatcatggccagaaaccctagacatccatcacacaacaattctttagctgacaaagccgaaatcactgggatgcgagatccctgaaccgaaccgacaaaaacaaaccgttcctcaccttctggttggaagattaccatcttcctcttacagtcaatacttgcagaatatttggatatgaaatccattcccagaataatatcaaaatcttctaaactcatctctattaggtcagcacttaactccctattgtcaatcctgattggcatacaccttaaccaccttttggcgataactaactctccgccaggtaa

SEQ ID NO: 152260 - DNA, 708 bp, Cannabis sativa
cccttcatggtgtttactcttgctctttctttactgattataagcatatcatctacatatagaagtagatatatgactttgttaatatcagtccccttgtattacaaagagtgatcataatagcttctagaaaatcccagttttagcataaatccatcaaaccttttgttccattgtctaggtgactgtttcaacccatatagtgactttactagcttgcagacatagttttccttccccctttctatatgacctttaggttgcctcatgtagatctcttcttcaagttctccatgtagaaaggctgtagtgacatccatttggtctatttccatgttgtactgagttgctagacttagcattatccttatagtcttgtattttgcaactggtgcaaatacttcattaaaatcaatgccttccttctgtgtaaatcctttggccactaacctagccttataccttataggttcatccatagttctgccttctttttctttaaataaccacttgcaatcaacaatgctcttgtctttaggtttcggaaccacaatccaagttttgtttttcttaagagattccatctcttcatccatagctccattctatttcctagaatttggtcctttaatagcctcttcataagactgaggttcattattgaccatttccaattcactcataaaggcatatgcaatgtcttcatcc

SEQ ID NO: 152261 - DNA, 605 bp, Cannabis sativa
gagttcaatctttgaaaagaccgtcttccccagaagtttattaaaaaggtcatcgatcctaggtaaaggatacttgttcttgactatcagcttattcaattctcggtagtctatacacatacgcaaagatccatctttctttttgacaaacagtacagggcctccccaaagtgacacactaggccgtgaaaaccctatgtcaagcaacccctgaagctgaattttcaattctttaagtactgctagagccattcaataaggggccttagaaatcggttctactccacgtgccaaatcaataataaaatcaatttctctctacggtggtaaacccggaggttcatcaagaaaaacaactaagaattcctaaccaccttgatgtcctctggccgaattgattcaagccgagtggtatccaataccacggtcagaaaccctagacacccgtctcgtaacaattctctggctattagtattgaaattactaggatccgagatcccagaactgatccaacaaaaacaaacggttcctcactctctagtgggaagattaccatcttccgcttacaatcaatattggatgagtacttggataagaaatccat

SEQ ID NO: 152262 - DNA, 719 bp, Cannabis sativa
  modified_base (30)..(42): a, c, t, g, unknown or other
tattaataattaaatctgattatattgaannnnnnnnnnnnnagggcataaaacccaacacaacttccatattttcgggagacaatttagtcatttgaactttactaattaattatgtaaatataactttatttacctatttttaagggatattagggatgtaagctctactatataaagggaattagtcaaaccctaactctctaagtcttaagctctcacttttaactctcaagctctaagtttgacagtcatctcttctctctctcacacaagcatatgctttctccatcacttgagatttgccaactccattctaatattgtaatcttaagagagctaccgcagattccacaacacttgtagtctgagtagtattatctctagtattaatacaaccaaaaggggagcaggtcattacctactaactaagggggtcgaacctctataaaatctcttatcttatttacttttctattcatattgtgtaacacatggcaagcattagtaataaatatgactctgctattagttggccaaatctgaggtcaacagtttggtgcttccattgagagcgagttgttaatttatctgatcaaatgtcatagttaataggggtgttcattggatcacatccaatggatttggacccatccaatccaatccaattatttattggatattggatttttccatccgatccaatccaattgaattga

SEQ ID NO: 152263 - DNA, 526 bp, Cannabis sativa
ctgggtcggacaaaggcggaagaattctgcacattcttaaagtacgggtgcaaaggcaacaatgccccttgttgggcatgagcacccgaccaggcgcacatccccctgtcagggtttgtgacttaattattgtgggcaggaatgtaacagtccaattcgcccaggtagccatcctggttgagaacctgcatgcgtgcctcagtaaccttagacggagggctcacccacctggcacccaaggtaccttgccttctatgacgaactacggcagtaacttcctcactgacgtagtccaggccctcaaccaggacgttgccatcagcatcaactggctccccagcctcattgtatcccccatagtttgggggtgcaacctcttcctcttcccctcggagggactgctaggacagacatcatctaactcttcaatctcctggatttcagcgtcccctttatgatccccctcctcctggacggttggatcttgttcggcggtggctagagtggcgtgccgagccacttgagg

SEQ ID NO: 152264 - DNA, 594 bp, Cannabis sativa
aaattgtgttttttttgcacattttttgtaattatttaagaaaatgtatacatttatctaaaatgtctattgttttatctaggatggaatacactatattaatttggcttgggcttgcttctaactgaacagaggtatgatttatttcaactaggcctgacatttatcccatttcaactatattcaaattgtggtgtacttttgcttggtctgagatacatgctatctcggatccttgatatgctctaccttaacttggtccaaatataattatgtcttggtttggcctgcaacatgttctgtctcggcttgattcgagatacaatttatctaggcttgatcggagttttgactggtctcggtcaagtccagagcaggtgtgtcttggtcagtaccaggttaaattttagaggaaattagatggtataccttttttaagggagcccatctcatttttacttctttcttaaaactcattaatttatgccctcttttttaattattattccaattatgcccctcttatttcatacaattaacgcctccccaaccatataaatacctactagctattaattaaggtaacatatgtaa

SEQ ID NO: 152265 - DNA, 834 bp, Cannabis sativa
tctttgaggagatttgaggggccttcctagttacctcttgaatggggctctattgacatctaagttatcgctggatgtcaatagagcagaagtaaaattacgctccgtgtccatttataatatttaataaaatttatctagtaatgtatatggcaagttaaattgtttacaaagcaaattttaattaccaatttaggactttttgggaggaaggaggatttagggtttccttaagagaattacaacactccatacttaatacattctttttttaaattaataaaggtgtcatgaccattactgttaagtaccagtggtacctaatattactaacaaagttagtacttaacaacctgcttaataactttgaataataattataaaattataatatacaaggtctagttttcaattgtatcgattaattacaatatattataattattaggttaaatattattttgtaccttatattttgtaagagttattaattagaccatttgttttgttaaatgataaaatgaaccctgtattttttaaaattgtacaaatagaaccttgagcttaatttttaacaattttattttttaacataaccaactttaaaataatttttaacacgaacagatacaagaaatataactaattttgtcataacatctctagattagattattattaaattttattttgacaaaaaatcagttcaagttcctatttgtataattttgaaaaatacaagatctattttgtcatttaacaaaatagagagtcaaattactaacttttgtaaaatacaaggtgtaaaatatagtatttacccttattattatt

SEQ ID NO: 152266 - DNA, 609 bp, Cannabis sativa
tttatcgttcaatattccgaccaaacactcatcttgtgtgctgtcttttgtatatgaacccaggtgagttttggggaagtgaacaccaaatcgacaaggacttgctataactcttgcacgaggatcatcctcgtctctattgtagcccaccttcttcgagtgaaaggcattcttccttaaatcattcgtccagccatagaatgatgactcgtaccaaaaggacaacgcgcagggttaacacctctgaccctcaagtggctcggcacgccaccttatcgagcaccggacaagatcccgccgtccaagaggaggaagatcatgaaggggatgctgaggtccaagagattgaggagcaagacgatgtccgtcctagtagtcccttcgaggcggaggaagaggaggaggtcgcacccctaaactatgggggatacaatgaggccggggagccaattgatgctgatgacgatgtcctggttgagggcgtatactacgccattgaggaacttattgtcgcggttcctcatagaaggcaaggtaccttgggtgccagctaggtgagccctccatccaaggttactgaggcacgcctgcgggatctcgaccaggatg

SEQ ID NO: 152267 - DNA, 569 bp, Cannabis sativa
  modified_base (533)..(544): a, c, t, g, unknown or other
ggctgaagagtcaaactcgtatttgcaggatgctattgtagatatttgtagagtttcttgaggaagaaaattgaagcccggacttaatgggatctattccctgatcagtgtgttgacaactcggctagtttgagacttgtctttttgacgagatgcaatcttgaaaggtatgttgatattctctctcaatggctatcatattggtgattcggctagatactttataaaaggtaatatgcaataaaatattgatatcagccttatgtgggaacttccaggaacgctcctgatcaaaagtcccatggtatgccaaatgtcagctaaatgataccgcatgtgattgtcacgtcatgtgggcaaaaattaagaaaatatttgtccccatgtcttcgtgcgaacacctatccagatggagacttttggtattttcccaaatgttaaacgcgtgtgagtcccacgtgattgactctgcctatcttgtgcagggttgacgggtctattggattttgtgctctaaataaaactcatttcannnnnnnnnnnnttactaattaataaaagatcagaaa

SEQ ID NO: 152268 - DNA, 550 bp, Cannabis sativa
atattgaaagattctaaaagaagagattgtatatattgttataaatgaataaataaaattaaaatatatatattttttaattatataacagtctgtgcccattcttaatattactcgtttaaaattatatttttagttacttttaatataataataataacataatgtgagatgtattattatttttattgtattatgattactattaatgctaattatatatataagaattatatacatatgcaattttaattttacgcattaaaaaataaaaacgtatttgagttaaaattttattaatgattaataaattatttttcaatatataattttaaaaaattattaaaatcacggaaagcacaggtttattgcctcgtatatatatatatatagtatatattccaacagttcgttattaagcgcaaacggttcatctggtcttagaacataaagcccatgttccaaagatgcaatacaaaattgaatgtaatttcgagaaataatagaaccagaactcgaaaaattcaatttgtattgttgcaactgtaaa

SEQ ID NO: 152269 - DNA, 515 bp, Cannabis sativa
tgtcattgataatattactgatttgtggcatgaaaaacctagtcatattcattttaaaaatctgaggagattgtctaattcagaaattgttcgaggattaccaaaattaggaaaagagtcattgggaaaatgtgagccatgtgagcttggtaagcaactaaaaatttctcacaagagtgttcctgatgtgaatacttccagagttctcaaactcctacacatagacttgatgggtccaatccaggttgaaagcttgaatggtaagaggtatatttttctatgtgaagatgatttctcttggttttcatgggtagaattttttagaaaaaaattttatacttttgatgtttttaagtatttttgcttgaaattaaaagttcaaaaagattgcaaaatcggtaagttagttcatggtaagagtaatcatggaaaagattttaaaaatactgtgtatggtaaattctgtaaatcttatggtatttttcataatctttctgctcctaaaactccacaac

SEQ ID NO: 152270 - DNA, 813 bp, Cannabis sativa
gattttaggattcctttcttctacaaccatgatcaattcttcttgctcgtgttatgctgtgtgggcatacctctcccgagctctgaatctcctgctatgtgtgggatccatcgatgacatgcagatgtccatctaccggtggaggtagcaagtcttggttattatcacctctctaattttgatcggtcttgacatacttttgtaaatgcgggttatttttcctgataaggaattcaatttcccgcttcagattgttacattcattggtgtcgtggtcgtagtctccatgaaatcgacaaaacttggtcatgtctctcttgcccacatcttttttcatgggcacaggcttcttgtatggggccaatgactgagtggccatgtaaaccctttctatatcttcagtcaagagggtaaatgcagtgtacttggcttgattctcccggggtgtttgttcaattttgccagtgaactttcccttctttccatttacctacctattgttgttgctggaacgtttaccattcaaacttgaattgctcgagtattgggggagttgggcagatgttccagtggaaggagctttaggcttgcgaggtttttgctcaccttctcctcgttgaatagcctcttcaagtttgttgaagcctttagcacggtcgagaaaatcgctcatcgagtctaccagaccgttcttcgttatgtccttccaaagctcacctgggactttaatgccccccagtattgcggacaacttttcatcttcagttacctgtaaaaccttaggcgcctccatcatgaatctgctgatgtagg

SEQ ID NO: 152271 - DNA, 570 bp, Cannabis sativa
tgagaaattgtattgagcaacatttttgattatgttggctcgggttagtgagttaatgtgtgttaagggattacaccatggatgacttgctgtgattatttccttgtcgctcctgagattgctatctcttgttctcattatcaataaagattggtggcaatgctttcaaactggagtatgaccaagttcacattgaacttaggatcggaaatagtataaatctctgtattattgtgtctggtagccctctagattcatctgtgttatatttttctggtttatgtgtttgctggttttttttcttgatatgtttgttttgatttaacttttatttgtttaagtctgatcttaaaactggaattacagaggttaattcctatgtatcagagctaaatttcctacaccgattataattggagtatggtatatactgtaatggaggagtatattttatttgatgaacgatttttttggctgttcgctttttattaacaagtattgatatacatcaactataaaactagttatcctgtatatatgaatataaattatatatttcatgctaactta

SEQ ID NO: 152272 - DNA, 840 bp, Cannabis sativa
  modified_base (787)..(788): a, c, t, g, unknown or other
ttccaccgtgttcctcttgaggaagaaaaagcttagtaggaatattctggagttaataataggttacagtaatgtgttttcttgatgaagagttttcaatccaaaggtgaaggtttgaaaaaaaaaaaaaaggatcagaatccaaagaaaaagtctctttctttgtgcttcctctagggtatttataggccaactccattgcatgggctatcttggatggatcttcctagggatgaatttccaccattggattggtaggaggcacatttcccatgtggcctttatgggtgtcgggttgtactggctgtgcaggctgatcttcgaacgtgtgtcacctcagggtcattctcatttgaattccacgtatttctaatcgtaggactgtttggctcagtacataaggacatacatgctctgcacaatagcgcggtgtgggagacaacttctgacattgtacatgaaaaagtctagtcactgggtccgtagcctgacatgcgtgggttgaacattcacgggtcaaaggcgtaccctggactgggtgtagggttgttcaaaaaaatttacaaatcgctgaaaccaaatcgaataaactgatagaaaataaattcaaatcgcccaatgaatatattgggcgggttgaatattattctagcccgctcaaataacccgaatgaaccgatttacatatattttactaaaattatttataacataatatataaattacttttaatagttaacctattttacatttaaagtttatattttatagtgtttaatttaaaanntagaatttatagttgataattttaattgtatttgaatattgaagttgaaatt

SEQ ID NO: 152273 - DNA, 852 bp, Cannabis sativa
  modified_base (28)..(48): a, c, t, g, unknown or other
  modified_base (94)..(104): a, c, t, g, unknown or other
taattaaaaagtaaaattttaattaatnnnnnnnnnnnnnnnnnnnnnttgattagcaacgagctgcagagtacgtttaaaaatcacgtaatannnnnnnnnnngttagggtgttacaattatcttctctttgttcatattaattatttcattcttcatttttattattttttatcttatattttttttctttgatggagagataaaatattttaataatagagcagcttaaattctccatcttcttcactgtatattgtttaatgtcatttatattttttgaaagtatcaaatatcatcaatatggaaagagaaaaagtagacaaggtatctaatgacatcaataagtgtgtgatgcatccaattttcaatgtacgaggagtgctaccgtcacttttctgttataatctctaagttcgaaaatacatgtcggtatattgttttttcaattttttctattggggtgttcgttatgcttacatcatcatccatgtaaattttttaaaaatttcgaatagtttacagtgtcgaaattacgtttgaagttttttgaacgcacgtggtaaactggaatatcaggaactctattttcgatattgtaaactattcataatttttcaaaaatttataggaatgatactgtaactataatgaataccgctataaaaaaaattaaaaaaaaatatttcgccatgtgatttcgaacgtaaaggttgactaaaagattgtaataggaaattttaattagtatatgtaacgccctaattctaaggcacgctacagtgctttttcaataattgtgcaatctttgttaatcaaagaaatttcttcaaaaaacgtgtcaaattaaaa

SEQ ID NO: 152274 - DNA, 510 bp, Cannabis sativa
accactttcttttccagggccagacatagggagagtagtggtcccaccagcactaggcgtctctcaggtttcttgccagaacttgactgctccttcagctcgaagagccttgtcaaccatctcagcataggttgtggtgtcatttgtagtaataaccagatcatgcttaatcttggcattcaaccctgccaagtacttttcttttttactgaagtctgttggtacaatcccgaaggctaacttagccaaacgatcaaacttggtcgtgtattcagtcactgacataccctcaccttgtaccaactcaacaaactctttttgctttgcactgcggaccgcctcattgtagcatttagcattaaataaatcccaaaattcctcccaggtcatcctagcaacattcttggtgagggataccatctaccaccacaccaaggcatcctcctggaattgaaatgtggcacattccactctatcatttctgaccactcccatgaaattcaatattct

SEQ ID NO: 152275 - DNA, 706 bp, Cannabis sativa
ccaccatttgaaatacttaaccaacattcccacaacaaaataaaaccctaatttctaaacaacgggtaaaaatgataaagtctctaggaaatcctaaaggaagtagatatgcgagtattcaagatgttcatccaaatacaagcgaatattcagggataagcaatcaaaaaggtgcgagtattcaaactattcttcataaattggcagttatgccaattacaggtccattttttcttggagattatcctgttttaacaaagaagtaaaactctatgtgtattccctacaactaaacatgcatttccaaacttctcaaagtgccaaaaaactcagaaacacagttttttttcaaaattagaaaccaaaatacacaagtagtttccaaaactgacctttagttttgatgattctccctgtgattggtctcgattacttctgaaacttaagagattcaagaagaaaaggcagaaatatggatgaaggacgtgagtctttaaaattccagagaaaaagggaaaagaggaagttggaaatgagagggaaaataaaagatttgtttcgtatcatggggcttaaatactgatagccctcacaaattgggattgtgacacgcggcaacaggaatgcctaaggtcatctcatccaacggtcagccatgggcatgcctacacgaaaaccgaagggtttcgtgacgtggcaccataaa

SEQ ID NO: 152276 - DNA, 743 bp, Cannabis sativa
accaaaagtagtaggagagagattcaaaccttttttggtggagatgatccttcaagggatgaatagttaactcttttagttggaatcaacttatgtacttcttggtgtggtggtgattcaggttgtgtaccactttgaagtgttatggccttgacattcttcattgggttactttctacatttgcatgtaaagtatttgaactttgaatttcatgaccattcatagatgtttccattgactctacaagattctctaacttttgcaaatattgttgaaggctctgcatagtttcatgaaagcttattgaaactgcaaggtattagctgctaacattttaatcagctcagcagcagttggtttttcactatatggtgcaacatgagaaggttgttaaaattgtacattattttgttgcatccgagtagtagaagcctccaaagtgttgagcagattaataagagaatgatcttgatcttttggtgctacatgaggatagtaagaagttagttgaacatattgattgatcccactgtaggaagtgctagaataatctcaccattgttgattgtgtgtgtaagtgtcgtagtaatgattatattgatacacttgtggcgagatataatatggatcacagtattattaatggtacattgccatgttgaaaattaaaaccacaactcgaagaacaagttagtaaaaaaattaaagatgaataataaaataaaataatagtccccgacaa

SEQ ID NO: 152277 - DNA, 1786 bp, Cannabis sativa
gttcatatttaggattttaaacaaaatacttatgagtagatttaagatcctggtaaaataaattccaacagaatcatcagcagagggttgttctttgggcacaaactcttcacttaaaacagacaaaccctctgcttcgtgatcctcctcagttccttcttcaagttcaaaatccgaagatgagacggaagtgagattttctttgagacttttggcctttgaagatgaagacaccaccttttttcctttggaatacttttgggctgaaccactttgggtttttgaggagtggataccttggaccttgttcgagaacacacggtgggcaaagacaccattgctttcacgacatttggaccaccattcgaagaggaagacttcgacgatgtgtgattggatgaataggattcatcatcatcaccaaacccaggggttggagtagcaatcggagaagcaatgactggaggagaagcgaggttgtaagtcgacttttgagcttggatcttcaactttctgacagctttcgtcgaagtagatgacgaactaggaactccggtcactggagcaggtggcacaggtggggtgatcggagaagcagaggcagagccaagagaaggcttcttggacaattgagcatttttggtttttgccattttttctttgaaaccctagaaagcaaacacactctcaaacttgaagaaggttagactttaaaaaaaaatgagaggagtagtgaatagtggtgatcgtgggtaagtgagaagttgaacatatatagcacttaaaattaaatacccaataatcaaaaaaaaaaaaaaggaaagtaacttccttaccttgttcaccacgtgaggagagaaaaaagaaaccaaaaagatatttcaaaaattggtcaagggttaccttaaatggaaaaaggaaacaatatatccccacaaaatctaaaaaataactataccaacgaaattcgaaaatgccaccaaaaaggaaaccacaaaataattaattaaataaaaataagtttcctaaaacaccacaaaaaataagaccaaatccctaacaagaataaaggaaacacaacaataaaaaattgcaataaaaatatgtttccataaaagaaaaaataaaaagaaaaaaagtagccaaaaaaataaaaaaaaaatatgcccccctttttctttaatcttttcaaaatatgcccccgatattaatttgcaaagaacgaacaagacaacacattatgacacataaagaaccaatcaacccttagagaaaaaatagtgtctgagaaaataataaaacacaacaagaaaaataacaagaatttttaagaaagctcaattgaaaaaatcggtcacaatttttttacttttatatatatttttaaaaaaaacagaaaaataatataacctttatatttttgccaacaaaaagtacacaatgtctgcatgtctttgtccctgatgaaaaaatcaaactcataagaatagtcagaaattattttatcaagctaatgaactaatagaatgaggtcataccggttacgcaggaaaaagttgactcagtcactaagaatattaaaggaaattcaaacagtatgtaacagctttataacaccattttcaaggatatgaatattttaccacaaactgtgtcaagcataagtgtgtgaaagtgtaagcatggaacattgccttatttgtcaaaaagactttttctgataaattgtaaccataggagatgctgtcacactacctcaatggtagcccttttcaatggtagcgta

SEQ ID NO: 152278 - DNA, 1008 bp, Cannabis sativa
tttacatgctgcggtacttgtacgcattaggctaacatcatatcacaaattctccccattacaattggcttttggtcaggagccaaatatttcccatctaaaaatctttggttgtacagtatacgttccgattgctccaccacaacgaacaaagatgggttctcaaatgaggctggaaatatatgttggttatgaatcttcgtctatcattaaatatctcgaacccacaactggagatatatttatggcatgctttgttgattgtcattttgacgagacaagtttcccagctttagtgggaggggaaaagaaacagttggaaaaaaattatatgaaatacacaatcattatctcaatttgatcctcgtacaaatcaatgtgaacttgaagttcaaagaataatttatttgtaaaatattgtaaatcaattaccagatgcattcactgacccaaagaaaattacaaaattacacatttcagctgaaaatgctccagtttgaattgatgtcccagaaagacaattagctaatgattctaaagcacgcttgaaacatggtagaccagtttatcattacgtacaaagcatgtggagatagactgtcaccttatttgagagaagatcaataatagcacaattaaaatgaaccatgcctcctccaaatctaacatagccgacatcctcacaaaactactctttttcaatcattttcattaactgatttccaaaatgaatgtaataaacttttacaattcatcttcaggggcctattaaactctaatttaattttaactatgttagttagaaggttaattatttcagttgcaagttgttatatcaaaacaactctgtcttggtcatataaatatattaagccatttactctgttttacttaacttttcaatcaatatagaaatttctctctaaaactaatatgtaattataaaataaggatttttttaatattatacttaaaatggattttatttataaaaatacctttaagaaa

SEQ ID NO: 152279 - DNA, 769 bp, Cannabis sativa
cttcattaccaaaacaattatatatttaataaaatatgtctaattaaatatcattttatttttcgagatattacagaagcagtgttcaagaggtttttattacctcggtactcacgcaagtgatcacaggatcattgtgacattaccaaataagatcgagttcaaggacgatttcttctagacgactggtctctctcccattaacacaacatcgttttacattatacgtaagtgtcatctctttctcaaaagtttggttttgagtttttggattataaaatttaagtcgtttacttattttacttattgtgttgatagaagttactagaaggccaattcctaccctcgagatggttgtctgacataaaattttgttaggtcttccttttggattgcgattatcagattttcttttaaacgataccaatcctaggaccatcaacctccttggcactgatcaatttacctgcgactacaagaatctaaagtattctaagtagcagactgtcccaattccaaccgatgaggaggacaaagattatgtggctcacacctactatctcaaaaaagtaatcccttgggaagttgaagaagaagcatctcgaggtaatcaatgtgaatggtcatcaactgtacttaggaccgaacgtacctcgctagtaacctttaaggatagccagtacaacttctatacttgggataatttttgtatagatcgcataacacaggtttgacagttggtaccctcaatttcatgtccaacttagtt

SEQ ID NO: 152280 - DNA, 558 bp, Cannabis sativa
attacaaagcagcaaggtaacaacctccctacgtatgaaatgaggagacatcttgactgttagaacacttagcatataatatataatatagaaactaagcataacagttgaagtaacttgaacaacgaatagcgagatatccatctcgctataggagggcatactcatggtaccttcactaattagcttcaaacatctttcaatgagattcactgctccatcgagttagctttctcagatagaaactgatcatattcaaatgatgttgactgctaaagttcatcttgtcaccaagaactgcgattgttagatgaagcattatctttttaattgcagaaatgacgagatttacattataaacctcgaaaagacatgggataagctctagcttgctatcagggttgttattactatgttctcagtgagatgtcccaggactatacgctttgtagcgtatttaatccacgtccgcattgacccggtaaaaacggataaatcatagctgtgtgatttttaaataataattgcattaattttacatgggacgtaatcaaatcc

SEQ ID NO: 152281 - DNA, 966 bp, Cannabis sativa
atatttttgaacttttacaaatcactaatgacccttaaaaatcactaatgacccttaaacatcactaatgacccttaaacaatcaatgacccttaaacaatccgactcgacccttaaacaatccgactcaacgacaacatgtgaccatccatttgctttactccaagagagagcttcattggttccaatggcttcaacaatatgaggttgcaaagcaccttctctagataagcttctggcccccaaaacccaacccgtagcagaccttgcaatcaaacccagaccataccgcccttggtcggcaaaaagtgcaccatctacattaactttgataaaagggaaatcaggtgttgtccattgctccacaagtagtgcagttggcccgtttaagtttacatctgtgacattaagtttttgagcattaaaccaatcaatataatttaactgagccattgccactacctcccctgcatcagggtgtttagagttccagaccaaatcgttacgatgagtccaaattgaccaacaaaccataccaacctcaagagcctcagccgtattccacgatgccaaacccgcttcgaaccaacttgagaacgacattgcatcaggtgccacagcagtaattggaaccttgctccaacaactttgagcaaaagagcaccgcaccagcacatgcagagtcgtctcaggagcagcaagacagaacggacatgttgcagcaattggaagatattttatggaaagatgaaaccgagttgggagactattggtagaagctctccacagaaaattaagaacctttggagggagctgtaactgccacaagagctgccagaacctagagctatctgggatatctctgatggatttcattgattgaagcagagaatatgcactcttaacagtgaaaacccctgacgcatcatgtaaccagtaccacaaatcagaactcatatgactact

SEQ ID NO: 152282 - DNA, 606 bp, Cannabis sativa
ctagaatccaacaaccattcaagggtttcttcagcctaattcagagtgctagtaggatcttgttggtttcaatctaaggtacttttccttagctcatatctttttgtttttcttaaattcatgttagttttccttgcatgattttaggtctagggttttatgatattgaagggtgtttgaatttgtattctgtagttgagttagtgttatttgagttgatttggagttgtttggtggcttggaattgtgtttggacaaggtttgagctttagagctcaaactttggtctttaatggtgatttgtgtttatgtggttgattcttgattttattgcatgaattctattattgtgatgtaattaggaggtttagaaggttttagatcatttggggtcgaattggcttgtttgtgatgttttttgtgtttcccgcattgaaccggatgatcggttcagtgggacctgtaggaaccagaatttcgatcggtccccaggaaacccattggattagacttccgattggggtagtttaggaaaccctagtttttcttgtttttgcgatatttagcatattgccatgttatccatcagatcggaagagcggttca

SEQ ID NO: 152283 - DNA, 509 bp, Cannabis sativa
tttagtgtagaatttgggtaacaaaatatgtgagattaaacttgttcagtattctctattctatgtaaaaaagaagagtttcacattattataaacaaaatgactaaaagctatgtttgattttggtaggaaatggaaaataaggtaaatattattttggatctgtcttttgcaaaagttattaattggactttctgttttgttaaatggtaaaaatagtatttgagctcaattttgaatagttttattttttaatataatcaactttaagacaatttttaataaaaacagatacagaatatataactagttttgtcataacttctttcgatcggattattattaaattttatattagttatggtcagtttagtcagttagaagattaagggaaaagttagttagttgataactctatgttatagagttaatttttatgcttttaaactaaagtattgtgaggagagtagtgaaaatgtgtttattttgcttaattttaattagtttta

SEQ ID NO: 152284 - DNA, 552 bp, Cannabis sativa
  modified_base (491)..(508): a, c, t, g, unknown or other
ttttctctcttcaaatctattaaaaccccacatgggtattgctcttttctcagttttatagaaagtctataatgggttttataccctgaatgtttattgcttagaaaaagaaaaggtcagtactatcactctttctctctctcatataaataatattctcttgtctttgagtttttgattgaaacatgtgttttcatgtcttgtatttttgcttattgtggatttttgaggttgaaattaattgtatttttgcttctcagccggccgtggtcggagaagatgaacctcgaacataccgttgctgccgtggtcggagaaggtctcgcccaacactttctctctccccggcgctgatggatcgtcccgtagtcgcagaagaaggtctcaccagaagctgatgggttgtggtcggagaagaacgtccagccaccacctttttctctctcgccgactctagttccacagatttagtacatgtttggcatcataannnnnnnnnnnnnnnnnntttttaaaaacagaaaattgttttaaaaaataatttggcttgtt

SEQ ID NO: 152285 - DNA, 536 bp, Cannabis sativa
  modified_base (180)..(182): a, c, t, g, unknown or other
acttattaatttctccttgcaccactatagatttagaattgcactatcaattatatagaacgttctatttcatgatatagatacggtatgagctatccattattataatcctaataatctatgatcctctatagatgatttacattgagtaaggacaaaattactgttacacccttcaannnattttatccttaaaatacttaccaacttataaatgatatttcagtaaactaatataaccactaaaatgagcgctctatcatttatctcttttaagccaagctagtagaaaatcatcgtttcacttttatgtccagatagaagctatatattatgtatctatgattagcgctcccactcaattgaattaccatgtccttaatctatatgtcacgagaagatccattggttgactttaacaaatggattgaataacacaaataatacaattgaactaaaacctaaccatctcacgattgagatcatttgatctaagatcaactaggtgatacttaatcgaatatatattacggtaa

SEQ ID NO: 152286 - DNA, 1302 bp, Cannabis sativa
cttattagttgtaataacatgttctgtatttgttattcaaaactgctttaaaataaggttgaggttgataattttttattgtgaaccaaagacaatattgtgagcaattatgtaactctgtattttaaattatgtaaattagactaaataccaaaaaaatatttttaagtatacagaatatataactgtatttttgattacacaaaacatacaatgtatccataattacacatatattcaaccgacactctggtaaaacaaatcaacgcaccaccgttcacgaaacatcttcatccggtcttgtgtgacatcagctaatccacgtcgcatcatgagatgctccacaaactcaatgcaataaacgccacaatcaccactaaatgcaacataaaatataaagttagtacaatgtaaattatactttaatactaaagtattttttatcgctatgtaccttattgttgccttcggaactaagtcgtgagtggcttgactcgcatgcatattcggaagcatgttgatctccttcgtagttaacaccatgatctggttattatgtgaaaaatccccgattgcacggattagggagggcaacagttcttcccaagtcttcaagataggtgtcatggcggtccaatgacaaatgctggaatcacagagttacacgttaattttccacagctctatgtcaacttcaacagtcacccagtgcctatggtcgggaagatgcaaaatgaagaaaatgaactcattaccccccatctcggaaagaattgggcctgtaattatggagaaaagctaaacaattaacaaaccataataaacttataatcatagttcaacatttaaaatcttactaaaacaatacctgatgaacacctctacaaaactccaggatataatcctcccaaacatagtttctcctgggacccttgtgatttgtccatgcactgctgatcatgctggtaacaaatgtagagagaatgatacccttctgcagaaatatcaatggatagtcgaagcgtcgcctcctcagcatatggactgctgcatctatatgctgcatataaaggttagagaaagcagttagataataaaatatattaattgtagattagttgacttataaagtatagtaaaattataaattagtttacttacgtcatctgtaagtcattcctgtagtgtcaacagcttacaaaagaacgatggaccgtaatcacaacttttcaaatcccgaagccggtggttgggaatgagtccagaacaccactttctaaaagtatccaacaatcgctcatc

SEQ ID NO: 152287 - DNA, 1150 bp, Cannabis sativa
tgaatgccagcttctatctgagaggactggctcgtcaagactataaatctcattaagagatgtctgaaactgattggtgaaaatacaaggagtgtgccatcctattgcgagatgggcgcctcgctatttgttgcctgggtttacctgactgttatacttagtttttatactgtatattatgagataagtgtcttcagagtcattatacctcgcttacgtctactcatacgtatcaccttgtgcatctaatgccgtatggtttcttaatgcatgaggcaacaatttgtatatctttatcttgcataagaccttatagtcatcaagttataaatataccccatcacgtctgcatttaatgtaattattgttacacgcattgatccatattcttcctaccttgacacgtgtcttctattgaaatggtagccgaatttcgggtataaaatatccattaaaataattttaaatattgttttattatgttatttgtttgttagaaaaatattaaaatgccatttattttttttttgattaatttgtaacgtaaatacttaagtttaactctcagttgcagataaataattaagtttaatttttgacggtaatagtacctaagttatatttttgatactttcgtaggtacttagtcgtgatgtgtaaatcaatggccacgtgaaaatctctgactagtctaggtcaataaatttttaattttctatttaaaaattattttaaatatactaattcaaaagtgacatgtggataatgacttaacacttagcggtcaggtatctaaaaaaaattctagaaatataacttaggttattaccgtcaaaaattaaacttaggtatttatctacaactgagagttaaacataagtatttacaccacaaattacattttttttttgtttttgctattttttttacccagaaactggccctggtgacatggacatcagtgtttgacacgtggtaagaaagaaatatcccagagttgagtagtccagaatcatagcagtcgacttgggatgggtccttagccctgcacccaggttgacttttgaagctccgaaatgggtgtttggtgttggaaattattttactaggatcttagatctactcaaaagtatgttgtttaacaccctaa

SEQ ID NO: 152288 - DNA, 514 bp, Cannabis sativa
  modified_base (115)..(124): a, c, t, g, unknown or other
aaagacatcttaagaaaatgacttatgaactatctatccaatgatatattttctaagtaatttttcaatgaaaaagctaagaggaaaaataaagaataatttcgattaaaataannnnnnnnnnatgtcccagtaggcaagagtcaaaattattcttattttatgaacttcttcattatttcatattttaaacactagtctaagttgtcatctttggatgtacaactaggtgtcgcatttacaaatatatatttgtctagatctaatactattttatttgtctaacgaatgagaatcctttaggatttgtcccattaaaaacaacaaattaagttagaccaacaataaagattcgaaattatactacaacaattaataacagaaaacaacatgatttaatataaatccatacacaattaaaaaattactaagcatttagcaagtaacaaagacatgttaaaatacaaaaaatatcatatcttaaataatttcaaaggtttccaacaaactgata

SEQ ID NO: 152289 - DNA, 545 bp, Cannabis sativa
aaaaataaaaacaaccttttagtttattttataatttgttaataaataagtaactaaactataaatttaaataaaattcagtatatctactacttatatgttattagagagttattttctttctatttaataataacttaaagttaaacatcataaaattaactatatgttataagtttttttaatttaggcaatattatgttgtcaaattatttaagatacttttacaattttcttttgtaataacattccaattactttaaaaatctatctacgaatcaaaagcaacatcatcatcacaaaggaagattaacgtaatcaaaatctacattttagtttattatatattttattaagagataagcaataaactttaaattaaacaaaatttatatatagattagattttagttacttattcggttaggtattttattttgattataattttaatttaattttatagtatgtgttttattgttcaagatacacttatgttactttttatttatttaatgatttaagaaattagaaaataatttatt

SEQ ID NO: 152290 - DNA, 673 bp, Cannabis sativa
  modified_base (103)..(104): a, c, t, g, unknown or other
  modified_base (293)..(294): a, c, t, g, unknown or other
ttcatattaggatgttaaacaacatacatggtaataaatctagatcctagtaaaataattctaacaactgcccttagcgccatggtaatgatttactttcatnnaatatgaattaaaacgatgtttgtgatgatttggatggttgcatgttggtttatgtgattatttgatgaatgtatgtcatttaagaaattttccatgaaaatatttttattttctttttgaaaatattttatttggattccttgtgaaaatttaagcaattttctttttttacgaaactcgattccgannaaaattgaaaaagttatgaaggtttgaaaattgaatgttaatggtgtcgagatggtgctcatgcgcaccaggaatctcggacaagacaccgtccacgggcacgtgtttagacaaaaattgtcttaagcctcggtcacgcatgaaacacacacccaagagatgctgtatcctgcccttgtccagacgttgctggcgccaagtttgttcggttgggacaccctgcaagtcccctcctccgcacgcgtcttgggccatttgcagcctccttttgctgcacgtgtagccctcttgggcagcacaccaaaagtgtgatttttgtgggatttttccccaattttggatttttgtaattttcaaatcctaatttcaaaataaaata

SEQ ID NO: 152291 - DNA, 643 bp, Cannabis sativa
ctatgcccagggccgggcctgaagacaacctactgggacgaagtccacttgcagctttcggagagtgagggagagtgcggtagtttttgaactccgttttcgacgatttttttcttcaaagttattagaatttaatttatgattttttggtgatttttaattaattttttgactccatttaataattattattattttaattataattatatagttaaaaaatattaaaatcatttttgatgattttttagaattcgtgaatcatagaaatttttttgggtttcttctcattatgtttcacagtcactcccttatttgatttatcttgactatgtaatctccaccaatactcttttttttacatctttccattatttgttgttttacaatttgtaaaacttgaatgtttgatgcaaaaataatgtgttatgtggacactttattttttattatcaatatattataagcaattaatatatctctttttgaaaatttggttgaaaattattaaattttcaacgattgttttagcaccaaatttcatatgttgtagaaaatatttattttggttggctatatgtgtaattacttgcccaaatatagtagttatatatattaattcatattccatgaagtgagttaa

SEQ ID NO: 152292 - DNA, 518 bp, Cannabis sativa
tagccacaagatctctgattaaataaaattatgaattattcatctcatgttacttttatctttaagtgtgataaattcaactcaaaccagcatctcatctagaatgagaataaataaaaaacattcatttgcttctattttagaggcataagctatgcataagagtctaaataaaactttacattgcatttgtttgaggattattaagtagtatcagaataactaaagttaacaccacattattttttcatacaaagtgatgaggtatctttaaaattttaaatattatattcatacttattttattaagatgaactaacattatggaaatatagttaaccaattagttttcaacatacttcactaactgtgttgattcacgtaaatcaatatttgattacgtctttaagattaccaaaaagttgtattgtggagaaccttaattgttattttcattatggaagttagattcatttattgttttgaggatacatcttgtatgatgtattatagagttt

SEQ ID NO: 152293 - DNA, 583 bp, Cannabis sativa
cagcttcttgatgttagtcaaggcgctgacctccagattgactttccttgcggggacaaattgtcttcggaagctggtttgtaacttattctagcaatctacggatcctagttccagtttcttgaaccattcttctgcggatctgcttagagtaagcgggaagcacaaacacttggcgtcattgctgacccttatgactgtcatgacacggttgaaccctgataggtgatcacttggatcggagttcccggtataagctgccatttcaggcatcttaaagtttttggggagctctgcttccaggatgtgtttagcacacgactcgcagtcctcacaatcagaatcggagtcgttgcctttttgtctccgggagacttgggcgatgtcttttcggagtatggcaagttctgccatgattccttcgtttaacgttcccgtggagaccacgggtccgtatttcttttggtctaggtgttcccggacatcaccttggttctcgttaatctgatttctcagatcaatggggggacatttctggccccttcttcctcttcctccaggctcttggtgcacggaaacgctt

SEQ ID NO: 152294 - DNA, 604 bp, Cannabis sativa
ttaacaaattaattccaaaacagtaatgctcaagataacacttccgtatcttctttattttttgagaatagaggagatggagctgagcgttggactacacctgaagtgaataaaatcaagataaatgttgatgctgcactctttccacgggataactcttatggattcaggattgttgctcgagatagctcgggtaagctcattgaggccaaatcgtgatattatggaggtgtctatgatgcggaagttgttgaagcaatgtgagtcaaagaagctctcaactggattaaaagcaagaactggtctgatgtagaggttgagacagatagcatgctcactgtgcaaggcattcgtagtaatcaatccttaaattctatttttggtttgattattcatgattgtcaaattttattctcttctctaaataatgttaagatttgttttatcagacgatcaacaaaccgagttgcccatgttgttgcaagacactcttattttctctctggtcttagcatttttgagtataatgcttgggatgagttaatctccctcttatattccgaatgctaattattcaatgaagttgctatttcatattcaaaaa

SEQ ID NO: 152295 - DNA, 905 bp, Cannabis sativa
tcattaatgctaatgatgtctctcgaaaccacaaaattgccaaaatcaatggcatgcatattttcaaaatagattatgataaaaataccttcagtaatcatttaaacagcaccttttattaaaaagggagttattacggggcaattgttatacccaaaattcagctggtacttcagaaggtgacacgtgtcaatctcagaggatatgaaccagcaaatataatggcaattatattgttaaatgtaaaatggaataactcattaaaggcagaattaatagagtatatttataactcggagactgcacattctttagcaagacaaggatgtacaaactattgattcatgtattgacaaaaaactatttcacgtcagaggacataatctcaagaagacatcgataacacatagcgaggcatctacctcgcaatatgtagagaggtgtcgacgaggtgaattggctattagaacacttagcgtgtaatatacattattctaagtgtaatagcttgaaggacatgattgtccagtctgtaaggccttatggtcaaagagcaattcttaaattttcccagtacactggtgctcatgccattgctggaagacttatgaataaaaaagttgtttatgtactaggcgagacacctcagcgaggtacccttggcagcgtgtcttaatccacgtcagcgttgacttccttcaaaacggattaaattacagctgtgtgattttcaaataataactgtatttatttacgtggagcataattaaagcccacaatttcggggatattgttgtgggatttaaaattaaatgtaattaactgtcaacctatattactataaataggggcagattatacaaaaaaagggacagaaaatcttagagagagagaggaatacactg

SEQ ID NO: 152296 - DNA, 544 bp, Cannabis sativa
tattgcgtgggagtgggattccctcggatactactgccggagtgacaggtggaaagtgtcccattgttgctggtggtgtggaggtttctccgacttgggggccagttgttccagggaatagattgagaggtcaaatattacctctccctactccgccattaacgacatccacaggtggcgtcctaactccagataacggcacgttcatcattccgatgttgatggactcgttgttagcacctccatttgtttggtttccagccatgatgattctctttcttgaactgaataaacctataattctcgcttcccacagacggcgccaaatgttgtcgagcaaaattcgcaacaccaaatgttcgtaataatattaataacaagaagaaattgcttgaagaacagttgcgagtattcaacatataatagagaatactcgagttgggaatgtgaatgtttaacagaaaactggaaacaacagtaagacaaaggattatatgttgggttttatgccctaaataacactctttacaatctgattagttat

SEQ ID NO: 152297 - DNA, 766 bp, Cannabis sativa
aaaggaaaactagaaaaaaaaaaagacatttcccttgaaagctctctctctctctctctctctctcggctgagacaaaaccagaggaaacaagttggtttcttgctattttatggatttaaagctaaggattcaagtggctttgaggcaaggtaaaccctagaacctttaattgtgtgtttttgaagctttgagttagtttgagtatgtgattttttgtattggtggctgttagggttagaaatgcttagggttcgaattttaaggttaatttgagtagattttaagctctgtatgttggttttgttgagttgtgatggaaatgcataagtttgagcttagaaacctaagctttgatctttaatggcataatttgattgagtgactttttctgtgaattactggttggaatatattgtgtataccttaattaggtactctagaaggtttggttgcatttggtagagttttgagcaaaatatgggattttttgggtgaactggtataaatcggctagccgattttaccaatacctgtaaaaccggttagctagttttttcagggttccccgaatgtcccattttctcaattcttgtctttttcagtgccgtagttgggtgtttccctgtttcctgagttagtgtaatccctattgtatatagcagagcctaaagttattaggttcgagtttctcggattagggtttcgatcatgtgatttacctagtttcgttatgtgattagggcatccatctagcacgagacttt

SEQ ID NO: 152298 - DNA, 715 bp, Cannabis sativa
tcgtaaccaacatgggactctattcttataaagtcatgccgttcggactgaagaacgctggggaaacgtatcagcgattgataaaaaaaaatttcactaaccaaatagggcaaaacatggaggtttacgttaatgatatattggtaaaatcgataagaagtaaggatcatacctcagaccttgcgtaatgctttaaaatattaaaaaagtataacatgaagctaaacccgaaaaaatgttcctttggagttttcttgggaaattttttgggattcatagttaacgcgagaggtattgaagcatatcctgaaaagatcaaggcattaatagacatgccatcaccgacaaagcctaaggaagtgcaagccttgacaggaagaattgctgcacttaacagattcatttcgaagtcaactgataagtgtgtgccgttctataacatattgcgaggcaatgaaaagtttgagtggaaaaatgattgcaaggaggcctttcaaaacataaaaaggcatctcgcaacacctctagttttggcaaaaccaataactggagagacgttgtttccctatttagccatctcagaagatgcaattagtgtagctatagtgcaagaagagagcaagaatccagatatcccactctagaaaaactcgcgttgtgcctagtccatgtgtctcgtaagatacggccatacttccaagctcaccccataaaa

SEQ ID NO: 152299 - DNA, 518 bp, Cannabis sativa
ttcggttctgtggggtttcctaggagccaaccagaattccggttcctacaggcccctctgaaccgaaattctggttttgtgcaggaaagactaaaactttactaactcgttcaaatcaacccaaatccccatgaaaccttccaaacctgttctaagcatccttaagatcatttttcaagcaaaaaaacacagctacaagcacagaatcaaaacttgccattaaagctccaattttgagttctaaactcaaaacttggttaaactacctaataatcactgaaacatgctcaaatcaacataaccaaacataaacaagcttctaaaaacaaacccacacacaaacagtagctgcttaactcaattgctaaaaacatgcataattcataacttcaaactcaagaaaaatatgagggagttactagaagcttatataaaacttgaaaccaccaacaccttgctgaattaagcttgaactgaagaagaaaattgacaaaccctagctcctctaggtggatgtg

SEQ ID NO: 152300 - DNA, 640 bp, Cannabis sativa
  modified_base (439)..(440): a, c, t, g, unknown or other
atcagtgaagctacataactaagttgcttttgaaaagcactggaaatttattcaaactgaagaaagttcttaactgtgttatctctattccatttctggacacaattagagacatgtcttctatatattcagatgccctttataaacagtaaagaattcagtatcgctagaggagtaatgcatatagaaaatgatgctgcataatcttttatgaacacgaagaaagtaatggtggagaaagcagttacttaccacaggcttacagttcccgtaatttgggtttagtcaaatacactacacttgatttggatatcaagacaattgattgattgaaatgcacttcttgttttatgttagtgcaagtgggatttttttgggattttataccctaaataaaaccaatttcaatacaatttgatttgttatcaatagaagattnnaagtcatttatgtttacatgtaatttttatgtttatggtttaatgtatagaatttctgttaaatccaaaacatatagttaagcctatcttttggtccgagtaaaacgtacatttaggaacatgatagtacaattaagtgggagtgttaaacatagatatggaatctatggcttctatctagacatagaagtgatatgatg

SEQ ID NO: 152301 - DNA, 685 bp, Cannabis sativa
tatatggaagaaaatgcagatcacgtattcattgggatgaagtgggtgaaagataattcttgggtcccgaagctgttcaaagaacgagcgaggcagttgacaagatcatagcgtgaatgctcgcggctcaaagtagacagaagagttatgttgatccaaagtgtcgggatatagatttccaagtcggggacatggtatttctccgaatatcccgataaaaggcattaaacgctttggtaagaagggaaagcttagcccgaggttcattggaccttttgaaatcctcagaaggatagggcaagtagccttcaggttggctatgcccctagcgctggcagctgtacatgatgtgttccatgtttcaatgcttcagaagtatgtctcagactcgtcgcatattctgagttatgaaacattggaacttcatccagatttgtcatatgaggaacaaccagtgcagatacttcatagaagagagaaagtcttaagaaacaagatgattgcactggtaaaagtactatggagaaatagtaaagtggaagaggcaacctgggaactcgagaaatatcttgagttgttcatgtaaattttgggacataatttctataaggtgggggtaagtgtaataccctaggattaaaaaatggattagcaaaaccctaattagacaattatgaataattaa

SEQ ID NO: 152302 - DNA, 607 bp, Cannabis sativa
tactcacccatgataggataacctgcaagtgttatgctcacacaagtagcagaaaacctatcctataagtgttattctcacacaaacagtaaaaagtttttatctctatcacatactaacaatactaacataaataacaattcataatataaaattttataagtacatgaacatcaaacctacagtaaattcatatgttttaacatacacactctgcacagatgtccactcttcttacctcagtttctaagtatatccttttttcttcctcgaacctctcaccgagtttctttattgaggacaagatcctaaatctaataacagaataacacttaaaatatattcaagcataacctaagattaacaataaaatcttacttcaaactacataggccaatttcacttgcatgacacaccaaacacaatcatttatatcattataattcacaccaacacatatgatgtactcaaacgaacatttttaacgtaaaacataaactcacacaaatactttttacgtgaaactttactaaaatactatttattaacaaaatatacaattatgtaattatttaccaaaatcagaagctagtatatttcttaatca

SEQ ID NO: 152303 - DNA, 628 bp, Cannabis sativa
tttattggtgatgacatgtctatcaatgccttgattttttctaggttttcttcgatacccctcgcgttgactatgaatcccaaaagttttcctgaggaaattccaaaggaacactttttcgggtttagtttcatattataattctttaatatcttgaagcatcccgcgaggtctttggtatgattcccacttttcactgactttactaacatatcattggcgtaaacttccatgttccattcgatctgatttgcgaacatttcattcagcaatcgttgatatgttgccccagcgttctttagcccaaacaacatgaccttgtaacagtagagtctcatgttggttacgaagctcgtatgttcctgatctgggacatgcatttttatctggttatatctagaatattcatcgataaatgacataaggtcgtgctccgcaatggcatccactaactggtcaagcttgggtagtgggaaacagtcttttgggcacgccttgttcaaatcagaaaaataaatacaatttctcaaatatctgttaggttttgggacgtgaacaggattggctacccacgagggataaaacacctcgcgtataaagtcattgactagtaacttgtccacttcct

SEQ ID NO: 152304 - DNA, 579 bp, Cannabis sativa
tcatcacactaacatcacgagtcttccccactatatcccaccagatgcgtgcatgatcttgtaacatgaaagctgcacaatttactctctctattcccgtcacccgcatattatcaaagatacgggtgattgtactcatccactgctcagctttaattaagtcagtacctcccagaaaagttggaggttgcaggttcacaaaccactcaaacaccgagtctctatgcggcaacataaacccctagttacctaccacaggcacaggtgctggtggtaacacttgctcaacaagggcaactggcgctgatttccttaaccgacgaaactattcctcctgacgaagtatgatacctcacatttcttgaaacatctgttgccagttaacaggcggattatcattgccaacccccgtattatcccctgaattctatggaggtgcaagtggtgtcggtggattgttctggtttgcaccaggctctacacgctcaccatgtgctctagatgattacagagggtccatttttacaaataaccctgtaatcaacaaccccggcaagttatgcaccaataccacactta

SEQ ID NO: 152305 - DNA, 625 bp, Cannabis sativa
aagtcaatctccaaaacatgagtaattttcaagtagcttcaataacatggttacgaaaaaattcacttatgcatgtaatccagaatttcagttaaattaaaccattgacaaatttcaatttattttcatttagcttatgaaatcatagaatgtaattaactaactattaaaccactttatgcatgccgattacaatcatcaattcactaacccaaaatttcatatgcttgcaatacttactattctccactaatatagattaatgctcaactaagaatcataaggtctttcaaggcttgtaatgataggcttaggttaaaggtagtcgaaattgtcattttggctttcctataccataatcttctccaatcatgtcacccacaatattttctacacaatcccaatacctttatttctaattacatgaaagaattctttttttttttcaacaaaattgcaacaactttatatgtatcttttttttttttgaatttgcactagtggtgaacttttttttttcaagttgttggcaatctaaattttttcatattctctcaattttcacactttttctcacacacatacaataaatttcccatccaaattcccccaaactaaagatcta

SEQ ID NO: 152306 - DNA, 572 bp, Cannabis sativa
tttgtatgattttgtcatatatggctaatttataagaggacgacgacactctttaatgttgtgtatggctaatttatagaagggtgatgtcatgcctctcaaattaaagaaaaatagggagtggagtgtttggcattgttttcagtttatagactcaaaatataagacgctttgactaatgttttttaatctgattttagattttttttttaactaaaataatgataataatatgattttagatttggacctaggacttgaacctttattggagccagatcagacatgtaaccttgactcagctaggatccttgaccgagacacggactcgatcttgcttggactccaaggccttgacctcagactccaacttggtctggactccaaccccagatctcggacctcagtccagaccttgagcctcacacctcggacctcattttcttgggatttttacgttaagtattttcacaagattaggatccaaagcatttacttctccagattatacaattttattttatttttggaaaatttatcatatatacccatctaacgaataatttgacact

SEQ ID NO: 152307 - DNA, 510 bp, Cannabis sativa
agaaaaatatcggtataaaagaattctcgacggtttaaagtcgtcggctatagtcgatactatatgccacagtttaaaacagtcagatatactatagctgacggttttaaaccgtggcctataatatatccgacggttttaaactatcgctatagtggattgcccccccccaaaaatattttctccatcctcctcgaaaccacttctcgcatatgtcgcacccgctccaaaacctttacaagcttcatcctcctccaccgttgttgtgctcgtcttcatcctcctcgaaattttcttttacaagtttcagattgtttttcacttgacgatcctcaaaaaaaaatttggattgcaagcttcgacttttttttcgaacacacacagatcaaaatcaacaaatcaaatcatggctaatagaaatttaaacaacaaataagagaatgttgtacttacctttgtgctgtcacgagagagggatagagcgagagagcgagagtggaggagagggac

SEQ ID NO: 152308 - DNA, 744 bp, Cannabis sativa
tcccagtagtcaggtcctgggttctaggtatagggtcgggtctcgtgtctcgagactgtggtcgagttttaggtctcggtcccagtttcagggctcattttcggatcgaagtccctcatctggctctggatccttagtacaagtcttggtccaggttcaggtgtggggcgaggtcccccatctatgttcggatccttggtcctggtctaggtcaaaatttagattcgggtttggatctcgagttttggtgcgagtctaggtcctagtacgagttcggctttgagtccgggtccggttgttggtcgaagtccaggtccctgttcgggtccgggtcggggtcccgatccgggtcctagtcaaggtctaggtccaagaccaggttttggtctgggtttgggtccgggttcaggtcctgagtttgggtctaggttcgggtctcaattcaggtctgggtctggcttctaggttctgatctcggtatgggtatgggtctaggcccgtgtcaaggttagggtttagggatttcggtttagtgtttatggatttagggcttagggtttaggggtaagtgtaaagagtttaggatttaaggtttaaggtgtagggtttagggtttaagggttcccttccagttctgattccaattttcggtcacagggtacgatttaaggttcaggtgtgggtctgggtttgagtcctggtctgggtctaggtccgtattcgggtccaagcctctggtcttgg

SEQ ID NO: 152309 - DNA, 548 bp, Cannabis sativa
tttaacttaaaatatataaagctctatgttaaatttatccaacacatgttgattcatgtggtgctctgcaccatacaagaaaaagaataaaataaaaataattacccacttacaaatgcagacaactcaaaccgagtaatatcatataagtttaaatcaaatccagaaccaccatgaatagctactaactctttctcttccttaatatatggatttaaacatccatatccttgtgcaaatctcgtttaatttgatatcgactccttatcttttgttgatactaacaccttagatttgaacaacccccttccatatagtctccatcattcgtctcgaaacaattccattcatccaacattgatgattcattttcaaatgacacttctttattcttcccactgtcttcaaattgaacattgtcataaccaatgcaatactttttactacaactaacattcaaactattttcatctaccttatttaccaatattttttttatctttcacattaggtataatcgaaatatcaagatcactactgctaaatcc

SEQ ID NO: 152310 - DNA, 541 bp, Cannabis sativa
ataatagtaagatattgaaacaaagttttataaagtaaatattgtagtagtttttacctcattcagttgtagatttttcgtcaactctgaaatttggatgttagtgacaatttcgtgtaatccaaaaaaagattttggagaagattcatatgtcaagcagtttgctattgtgtttttaatttctatttccgttactctccgctcttaaaatagagtaagtatgataattattataaatatagtatacaaaaatttaatttttttgtaaaatgtgtagctataatagtatgtgtatttgattttatgagtattaccattccttcagtgcttctgcctcggggagttgaagattgattttgaaggtactcgtgtcgcgtgacgatagagacagccctaaatcaaaatgtatgtgttaattgaatttttgaatttccacttttaaatatcagtagtttaattaatgcaataacctctcttggtttgaacaattagttttgatcccaatattatgggtctgtcttcgattacttctgctatttgt

SEQ ID NO: 152311 - DNA, 805 bp, Cannabis sativa
aaccaaccagatcaactttgtgaacgatgtttgcttggaaagcaatcccgaagaaattttccaaaggagtcactatcaagagccataaagccacttgagctcgtacacactgatgtttatggcccaattaaactaaactcatttggtaatagtaaatacttcctcctctttattgatgattttcaagaaaagtatgggcttatttattaaaggagaaattagaagtgttcgagaacttcaaaaaattcaaagctctagttgaaaaagaaatcggtcttcctattaaggccatgagatctgactgaggaggagagttcacatcaaatgagttcaacaaatactatgaagataataaaatttgtcatccattaacagtgccaagatccccccaacaaaatggagtggtagagagaaagaatcgaaccatactcaacatggctcgtagcatgctcaaaagcaaaagaatgccaaaggatttttgggctaaagcgatagcttgcgcagtctacttggtgaatcactctccaacaagaagtgtacatgagaagacacctcaagaagcattgagtggaagaaaacctagaatttctcatctcaaagtctttggaagtattgcttatgttcatgttcccgatcagaagagaacgaagcttgatgacaaaagtgagaagtacatcttcatcagctatgactcaagatcgaaaggctacaaattgttaggttttataccctaaataaaactctatttcaatgtaatctctatcatttgaatatcaataaagaaacaaaagtattttcatcactt

SEQ ID NO: 152312 - DNA, 795 bp, Cannabis sativa
aggactaacaaaagtttcctacccatagagaactctttttgaccattgattttagataatgtggttattatgatataatgtgtatattcttaagatagaactgcttgtgtacaattaaaattttatacatataataataatatttaagaatatatttattttaaaaaataaaataatattaataaattataaaatttatttatttctaatttaaattattattatttttttaaaaattaatttgaattatttttatataggtatttatattaaaaaaataattttagttacaaagtttgttattaattttttttatactaataattaactataacaaaattgaccacttaagtactttcgccaccaatttatttacatacatagttttactataattattttaaattaatttactttaatagttttataaaattatatattaatatttttatttgaaatattttattattttttaatcaagaaagacaatttctattaattaaaccgagccaattacatccacaaggagattcctcttcaaaagataaacttacaattcttttacatttttaagaacaattctatgctactatctatacaattcagattcatatattttttctcattatacacaaatttctatttagccaaatgtcataaattgcacctactaacacataatattaggagtagtttttttttaaaaaaaaattaagttttttttttttttttttaattatagggtgtaattattattttatggggtgtaaatataactccccaaacttaaagtat

SEQ ID NO: 152313 - DNA, 501 bp, Cannabis sativa
gttggatttgaagcataatcttggtggatctttgagcttacctttggaatgaagttgaggtagctttctatgattttaatcttagttttaactactggatttattgttgaaaagcatgagtttgttgaagatgatgataggttgcatggtagtgatgttcttttgttaatttgagtgagtgttgcttggatttttggtgtattggttgtttgatctctagagcaaattctagggtttttatcttgccttgaattcaagttatttgttaatggtacgttgctgatgggaatttattgggatgcatggttttgaagctctagttcaagagcttgaactttgctaagttaaagcatgattttgggttatttgtgcaatcttaatttttagagttgtagttgatgttgttagctctctattgtgatgatttttatctgtaagaagttaatgttggatatgatttgattaaggttcaaatatatggaaaagtgagcatttttagac

SEQ ID NO: 152314 - DNA, 766 bp, Cannabis sativa
atgcttgtggatggtacggtggttaggtagtggtggtttcggtggattggtggtggtgaatgttgatcatatgaagaagatgaagaagaaaaaaaattaaaaataatgaagaaaaatatttttggaatgaaaaaagtatttttctttattataaattaaattattttaaatattattttaattttaaatatatatttacgtgggctaattaaattgtgccacgtgtacactgtgtacacgtggatattccaacatgacattgaacacccaaaatggatggaaatattaaagtgctaacacgagttttgggagtttcaccacaatttaaaattgggggttagttgcaataaattaagaacttatagaggttatgctccaaattactcataaattattaggacaataagatcaatgtttctaatgattataaaagattctatcatagtaaccttggtatttgttgctggtttaattcattaatcaattccaaacagtgaactaaaggagaaggtatacaaattactataaagattttcttctaatagtgatgaacatatgcaagcttaaagagtctagctatagattgaatcaaatttctcataattagcatttcatcttgtcatctttttccttagttttgaaaagagttatgaatttattatatactagaaggtcagtgggagtaatatttattttatatatagacaatatgttatttgtaaataacgataaaagttttctatataaggtgaaataatttatatct

SEQ ID NO: 152315 - DNA, 693 bp, Cannabis sativa
tacatcttggtggttcccggatgcagtgaataaggtgtggtgtgagcttcatctaggatctatttcttaagctcatcaactttaggaacacaaactagagctttaaacaacagcattccattattcaagactaaaaagtctttaggccgaccagctattacttcatctcgaatcttaactagcttgggatcttccaattgtgcttttctaattctcttcaacagatcagattgaagtgtcaagttgtgtaactttccaaccacaaacgcaatccctttactaaccatttcagaagctaattgaggggcaatcataacagtagtggagatctgcccgggacctcttctactcaatgcatcagccacaacattggctttcccgggatgatacaaaatctcgaaatcgtagtccttaaccagttccatccacctcctctgcctcatgttcagatctttctgggtgaaaaagtacttgagactcttatggtcaatataaatctcaaaactttcaccatgaagataatgccgccatatctttagagcaaaaaccacagcagcaagctttaggtcatgagttgggtagcgttgctcataatcctttagttgatgagaggcataagctacgactctatcaccttgcatcagaacacatcccaaaccctgtctagatgcatcacaataaacaatgaatttc

SEQ ID NO: 152316 - DNA, 743 bp, Cannabis sativa
atccaaccaccaatacgatggtgcaaactcgtagaggtctgtctaatccagctaattcacagacgctagatcctacatcacagaacctaaagagttctagggttccgcctgctgttaatcccggacagacgggaggcgtggggaatggtgaaatagttcctattaatggaattgcgcctggtatgcaagagactgggaataacagttccgcacccaacaagggcatccataatacgactgtttcgcctggaaccaatgcccagatgaccattggagacgtcaccgaatcacaaaatctccgtgatgcgctcggactcatgcagggtcataacaacactctgcatcatgatcaggacaaaatacgtgctgcagtaaatctcgcgttcgaccaacaaaggtgtatgttcgatgaatggagagataaagagatggaggcattaagggctcaccatgcagagattgaagatcgtagtcgccaagccaccgtgctaatacacagagcctacaaaactgtaggtcagcaaccgccgaacgtcattcccctgggagaaacaaaagaggacccaacgatgaatacttcccagactactaatggtcagctgcccaatccccggtcacgagtttcgctcgtggggccagcggtaggcgagcagaccatgtctggtaattaatcaggatgagtcatacctgacggctccaaccagactaatggtgacattccacccgtcaaccaagcgaatcaa

SEQ ID NO: 152317 - DNA, 629 bp, Cannabis sativa
agcaaagtacccattccctctgtaagtgatacgcccaggaaaatgctcagccaaggggagaatgagttctggagccatctgcaaatacagtcaaaaaatctaattaattggacagaatcgcacaataatcgcataacaatcgcacatacatcgcctaaccaaaactacaaaatttataactaccttgtaaaaatcgcacaataatcgcatagaaatcaccaaaaatgtcatttctaagtttaacaaaactttcaacacttaaatcgcataaaatgtcgcacaaaatcgctcaatatcgcataaaaatcccaattccaaaaaaaacttcagtaactcacattatatcgccaaaaatcgccaaaatgtcccccaaaatcgcataaaaaactatctcatacaataacctaacagaattgcattacgtcgcacaaaatcgcatagaaatcgcacaataatctaaaaacccaggacctatgcacactcgtattacgtcgcacaaaatcgcataaaatcgcacaataaataaaaaacccagaaaacagctattgctcgaaacccatattcttcccacagttttattgcacaatttatcccaaataacatacaaaatagcaactttcaattcaata

SEQ ID NO: 152318 - DNA, 527 bp, Cannabis sativa
tgaagtgtaccaagttggaccatccatcaaagatgaatggatccttgactctggttgcactttccacatgactaataataaaaattttatgtttgatttcaggaaagcaaatggtgatagggttatacttggaaacaaccaaacctgtgatatacaaggatgtggttctattagtttcaagatgtatgatggcatggtcaggacactaagtgaagttagatatgttcctaacctagctaggaacctaatttcactaagtgctctagatgacctaggaattgtaagcaagattgaatctggtcaaatgaaaataagcataggagccctaactattatgaaaggacacaaagaaggaggcctatactatctaaagggtacaccagtggtcccatgtaattacacgccacacagcaacagtgatgaatcaaatgccatgacttggcacagaaggctagggcatattagtgagaagggcttgcaactaatgagtgaacagaaactcttaggtaaggacaaggttagtaaac

SEQ ID NO: 152319 - DNA, 679 bp, Cannabis sativa
  modified_base (421)..(421): a, c, t, g, unknown or other
tttttttttttttttgctgtcgatatttagagggcattgccgacattgttcttcgggttggagcttagggttaaagcatccattgttcttgtgttcttcaaggtaagcatgtgttttttactttttttttctctgattttagggtttttttaactgtttatttttgtgggtttgttgaagttatattggttcttaatccttcttacattcttagatttttgtttttatttttttattttgaattttctacttcagtgatgcttaatccgaagagagagagtgtgttgttcttgttttttaaaaaattttaatccgaagttatttttgtattgttttatttattcatgttggattagttgagtattttgtgttttgggttttgttttatggtttacaatgttgttgtttagttttttttttntttttttttttaatttttgttgatattctgtgttgttgttgtgtttttttttttagaatttggttggtttttgggtatgttttgttgttggttttaatgttaaattttccttcattttttagaaacttgttttttgtaatattaatgataatgaaactttatttggtaagattgagtactagtactgtgagatgtacgtacagacatacctttagaatcatctttacagttggattgttgttggttttagtgttaatt

SEQ ID NO: 152320 - DNA, 700 bp, Cannabis sativa
tgctcagctataccataatacgactcgttacagttaatctaaatgtgaaatctagggtactagctgtcaaacgtatgagcaattcgatctacgagaaggggattccaaatataaaaattaaagcgactatctcagaaagtaactaatgtgttatgctcggccctaagtattgtgggtgaccaaccacattgattacctcaggatgctccttcactggcttcccgggggatagtgttttgaaggtattgtgcccgagccacgcaatccctgacttcatccccctctggaacgggaacctgctaccaagaagaatacttggaaaatttataatcgcaagtaaactccttgtcagtaaggaggtccacagatctcagattggcctcgcttagaaggaagtcgcacgacctaaggccgtggggaaaagtcatctagagcttgtgccgatttaccatctcaggagtagggacaggtctctttgagagggctgtgaaaaataaaaccttagtcagaaaacttagaatggaaagaaatggattaatctaaccaagcctgctgaaaacaattacttacgaattgtgaggaagatggttgtgcccattggggagaggccagttgtccaaaagaagttatctttgaaagatattttgtttggcaagtccacaataattttaggctcgctagaatgagtaccgatatagta

SEQ ID NO: 152321 - DNA, 535 bp, Cannabis sativa
ccgggtccgggtccaagtccgggattcgggatccggggtacgggtacgggtcggagattggtgttgatcccaaatcttttgtaaatattataatacaaactaatacggaccatttattatgtattaaataatacaacatacgttgtattaaaatatttagtcgtaataattaatacaatacattgtttaatccaaatatagtgttatttattatttaatacaatacgatccttatacggcgtaccaaacgagtcccaagagtgctaatcatcacgagagcgccttttagtatttttttttcataaataaaatataaataattataaatatataaataaaatgtaaatagttattaattacattaataaatagtaaaataataaataaaaaataatatttattgtagtatataatttaatccttacgaacttggatcccctgtcaaaatttgctgtctaattttttgtcaaaccaattaaaaaaggccatgtcatttaactaattaaccacaacaattaatcacttaacagcttac

SEQ ID NO: 152322 - DNA, 663 bp, Cannabis sativa
ttaagattttctaagtatagaaaatcaaatttccctttcttatttatatcaaaatatttaatttagtatagaatacatatggtctctttcaacaaatatatctcaaaatattgtaatttgcaaaacttttatttataataaatattgaaaaaaaggagctatttacaaaaaatatgaaaaaatgaaaataaattttgatatatattatataacataaatatatctatattttttttaaaataaatatcgcataaatatttaattacactaaatatggtattttttaaaaaaacaacttacaaatataggaaaagtcacgagaaatgtcataaaaaactttaaattagtgtttctttaatttttttatttcctttttcaaaaaataaaatactaaaataaataaaaaatgatttcaactgtagatactgtttttttttttttttcaaaaattaaacctattttttattataactattatttgttttttgttttgttaaaaattaattatttcattaaaatgagtagaaaaaaaatctagtttcattaacatgatcttgaaaaaaaaacaataaaaaaacttataatttaaaaataatacaaactttaaaaatcattttcatcaacattgaaagaaactaataattttattaaaagaataaaaaa

SEQ ID NO: 152323 - DNA, 912 bp, Cannabis sativa
aacaagaatcgccagacaaggacccttgaacaagactagggccgtgaggaggacccaaacccattcctagaaacgaacacagacctagccccaaacgcaaacccagaccggaactcgagcgcagacacggtcgtgtacccagaccgggatcgagacccgaacccaaacctggacttagatttgggacacgatcccaaacccaaacttggacctacatagtatctgaatacaaacctggactgaaacccagaccgagatcaaaactcgggacctagatccagatagagaccatatcccagaaccagacctacacccgcatctaggacccaaacccagacctggacccaaacacagacccacaccgggatttgtacctagactctgacacggccccaaaattagaccaagactcagacctcgacccaaactcagacaaaaacccaaacccatacactgaatggtaattgaaactgggactaggacccaaacacgaacatggacccataccgaaaacctatgacccagatctggattggggacctggacctgggcctcggaaccaagacccagatcaaaacttaggacttggacctgattttggaactagactcgaaccctgatctagacccagaccgagattggaacttgaatctagtctcggaccaagacttgaaccccgatcgagtcttggactcggaccgagaactaggactcagacctagacccgggacatgggcatcaaaactgggactgagacccaagatatgaacttggacccggaccttgacctaggacccagaccgagacctgggaccccaagtggaactagagtaggactcgacactgtgatctagatctagacccagggcttggacatgacccgtagtcactgtttggatctaggacccatat

SEQ ID NO: 152324 - DNA, 679 bp, Cannabis sativa
aaaaaaaaaaaaaaagtattgcaagcaatgattttaacatttctttgttaaaaaaagataaacatatattttatttattatttagtgatacatttcactttttcttatattagtcctatgtactcattatataagtcattaattttcatactaattagctgaaaataaagtaaaagaaaatagtatatatcttatagtgttattacttggaaactgagaattgatttaatttatttagaccttaattagtaggaaaagcagttgagatttcttgtttcaactttgtaactttgtaacaattttgtaccaatgttcaagaaaattgtaaacaacatgacaataagtcttcgctgtcaaatccacgtacgagagtgttgatataaattttgggatttttttataaatatgaaataatgcagtagaatttacttttgtatggtataaaatctataccataaataaacaatgcaaaaaaatatggaaatgaaaattagttaaagtttaaaaatgagaaaaaaaaaacaattaattgttataaatattattaatgtaatgtccaaattttttatttattagcattaatgttatcaacattccatttttcttagtttcttaatatttgagtcttgtatgtgtataaataggagatcacctattggaataaaatactaagaaaatt

SEQ ID NO: 152325 - DNA, 531 bp, Cannabis sativa
  modified_base (322)..(343): a, c, t, g, unknown or other
aacatcaaactcaacaacatgcataaacaagaacaccgcacccttttcatgctcaacttacaactaaatcagtaataagtaaagattaaaccaaggaaagttacctcgaatctcaattcaagagcaagttcaagattcaacaacaacaaagcttcaaagcaaacaaagatttaagcttttctctcaaaatcaagatttcttaatgaaagggttagagagagagagaggggtcgggtgcgagggatacgaaagccataaattctaattccattttccttaaaattccattttaatcaaagtatatcaaataaggtcaaaagannnnnnnnnnnnnnnnnnnnnnctcacatattcatacatacaagggcataattgtcatcacactcatttatttgcaaataaaatttcagatttcttactatcaagcaaaatgccaattaattcaattcaaattgcatttcgggcccgaacccggttcggcctgaaatacccggttgtgactataccgcgccaacctgtcagaacacacct

SEQ ID NO: 152326 - DNA, 795 bp, Cannabis sativa
tcctttctcttttcttcccctctcttattaattacctttttattaaattttttttagggaattaccctatatactattttttttaactttttttttaatttacagtaattgggtttccaaaatagttgcagcgctagttgcaatagaagtttctatacgattttttattgcaatttaaattgtaacgctagttgcaataggggtttcgatgtagaatttcgtaaaaatacaaaaaaaatatatatatatatatattttgaagtgtaaaaatgaaaaaactcaatttttttctactattttcctcatattttaatcaaaatatttaaatgatgtaaagaaaaatgataaagaatcatatagtttaatgtataaaatgaaaaataataaaagaagataagttgtttttttgagataaaagaagaagataagttgttgggagttgttattaattatttttatactttattaatcttattaattaagaaaaattaactaaagttaaatttaggatattattatattatattctaaaatatagaatacgattactaaaacaaaactttgatttttatttttttggtttacatacacaattataggtataagtatagtatatgtaacatattttcatttgaatttaataatatatttttctttctaccctcggaatatagagttagatcaaattaagctgatagcgctagctagaagagaaaatatcaatggaaggtgaaataaacaacttggtgatggtgtggataactgtggtggcatcactctgttactgtcacacaa

SEQ ID NO: 152327 - DNA, 565 bp, Cannabis sativa
tttatgaaatttttcaatgtttctagggttagttttgctcttgatgttagtcagggcgctaacttcgtgattaatctttctcacggcgataaactgtctcagaaaactaacttgtaacttgttccagcaatccacagatcctggttccaactttttgaaacactctttcgtagaactgcttaacgttagtggaaagcataagcacttggcatcattactaactctcataaccgtcattactcggttaaaccgggacaaatgatcactagggtgtgagtccccagtgtaggctgccatttcgggcatcttaaaatttttggggagctcggcctctagaatgtgtctggcacacggctcccagtcctcacagtaaaagtctgagtcgtcctcctattgtctccgggaaactcaagcaatgtccttgcgcagtattgctagctcagccataattcctttgttcagcgttcctgaagagaccgctggtacgtgtttctttttgtccaagtgatcccgcaaatcaccgtgcttctcgttgatctgatgtcttagatcaacgggagggtat

SEQ ID NO: 152328 - DNA, 611 bp, Cannabis sativa
taagttgtgatgatattactctttagtccaaaagacttacggtgtggccaaaaatattttttaaaaattcaataagaaagaattatctcaagtaagactatattctacaatccctacttaaaaataaaaaataaataaattaaagcctctaaaattgtaatatacatgatcatgtcagcacttaacacctattgtattaaaagcaaaataattaaaattcaaacggtataataaaaggtaatattttgtattaaattagatcacaagatttaagtaaataaattactatcaacgtgccataatgtaaattttccttgttttattgcttggaaaatgtttattggggcataatatgcaggtctggaaagtttgataaggtttggaaacgatttggttagggtttgaatttgtttggtttttttgggaaaaccagctaaccggttttacaggtgcctgtaaaatcgggtaaccgatttttgcagcaggattctcaaaaaattcaacttgtcgttttgtgttagtttcaggtttctagttgattaattccctgctagtttagggtattgccatattgagttggagtagacaggtttttggtttaaaacctaagt

SEQ ID NO: 152329 - DNA, 590 bp, Cannabis sativa
tttttgggttttgtgccataacttaaactctatttcaatgcaatcttaaatattcatttatcaataaagaaataaaattatttcattacttgtttaatgtactactttgtttaatgtactacttagttcatatgtttatttcgttcatatgtttatttcatgatcatttgtttgatttataaattcatctaaatccttatcacattgatattcttgattattgtgttgtcaacatagtagaaagtaatcaagattatgtaattaaatatagtcccacgatttatcagtacacatgatttctactgatatgataattaacaatgtaatttacttaaatcttagataagtattatgtccttttcagggcattggtaaagaaagcttagattagatgtgttgttatacatcaaattataccgatcttgaacttagataagatataataaacatactgtaatatctatctaagttaatatcacatagttgatgatcttagatcaatgatctcaatcttaagatggttaggttctagtttaattgtattatttatgttctttgatttgttaattaaagtggaccaattggatctt

SEQ ID NO: 152330 - DNA, 506 bp, Cannabis sativa
  modified_base (356)..(372): a, c, t, g, unknown or other
cccctaattcttaacttctacctccgtccctgtctcatatatatatatgttcttctaaacaagaaagtctacttatctaatctatttttctaaaaagtcttcttattatctaaatttgtttaatcaattgaacatatttatataaacttaaatttaattaatatagtgttatttactgtataatatttaagtttaattctcagttacaaataaatatttaaatttaatttttgacgacagtaatacttaaattatatttttgaaacttttgtaggtacttaaccattaagtgttcaatcaatggttacgtggcaatccctactgattggtccaggttattaaatttttattttttnnnnnnnnnnnnnnnnnaatataccaataagaaaataatacgtgaataatgattaaacggtaagatacttacgaaaattctaaaaatataacttaagtatctatctttacaataaaaaattaaacttaaatatttatactgtaacgttcgt

SEQ ID NO: 152331 - DNA, 607 bp, Cannabis sativa
  modified_base (54)..(67): a, c, t, g, unknown or other
aataaagtagcaaagtagaggagatatttttaattccaaagtgttctatcatcnnnnnnnnnnnnnnatggtcccactgcctctgttgtattaacagaaccgatgaggtaaataccactaatgtttctagacagaaagtcacagtaccttgttttagtatgagggttttaaggaacccaccctgttatgacttggaagacacttgtaataaaaactcatggttagtttaaaacaaacaatggatagtcacaataaggaactaaaaagaaaaaccaaaagaactatggttaaaaccattcgtatggagtaaccaaaagttttctattataaggacaataaggaaaatttcgataataagtctattcaatggacttaacaaaacttcctgaccctagtatcataggtttaagattatttaaacctatggcttgtggtatacttggtaatttacttactctaatgcaaataacttactttagtaagatgctggagtatttttctaatggctaattctaaaggaaatcttttgactcctagacataatttttttttatctaaggaacagtttcaactataaaaatcatgaaaagaattccttaagcatcaa

SEQ ID NO: 152332 - DNA, 1019 bp, Cannabis sativa
gtaccgcgtgctcataactcacacgcagacccattggcccgcttggcctcaactagggaagctgaattactcgatgtaatctatgttgacgtattggctcacccgacagtaagtcgcgaagaagtgatggaaatagatgttgccaaagaagtcacctggatgactccaataatcgcctacctagagaaggatatcttgcccgatgacaaaatggaagcgagaaaacagcggtagcgggctgccgaatatgtcatctataatggaagattatatcgcagaagcttcagtcagccgctacttaaatgtattgacggggaagattgcgactacatactccgcaaggtgcacgggggtatctgtgggaagcatactagtgataattcccttgccctaaaaatcattcgacaggggtattactggcctaccctgcggcaagacgctttcaacttcgcaaagatatgcgacaaatgtctgcgaatagccacgtatgcccatcaacctccgagccacttgcattccatcacaagcccttggccctttgcagtttggggcatcgacttgataggtgaactaaaggaaaaggcggagtcaagtacgctgtagtcgaagtcggctattttataaaatgggctaaggccaaagcactagcaaccatcacagcggctaaattgcgagagtttgtctacaactccacaatctgtcattttggcctcccctataagctcatttcagataacggaaagcaatttgattgcaagaagatgcaacaattatgcgaagaattggggattaaaaaagcgttctcagcagtcgcctatccgcagagtaacgggcaaactaaggcagtcagcaagataataaagcacaccatcaaacgaaaactcgaagagcgtaagggggtatggccagacgaccttttgcaagttttatggtcatacaacacgagccccaatccacaactggtgagactcctttctctctctcttatggatgcaaggctatgataccagttgagattg

SEQ ID NO: 152333 - DNA, 678 bp, Cannabis sativa
gactttgctgtagaaaatatctaggaaaccctaggtccagaaacttctgtgattcttctttgtcatggcttcatgcaattttacagtccataatgcttattcgaaacttcatgaaatgttttgccctaactcgagaaaattccaaacttcttgagttttgacatctctttgaacattcttgttcttgaatcactagagtactcctggtcagcatatttgcttgtttatcgttcgatgttccaacaaaacactcatctgtgttgtcttttgtagatgaactcaggtgagttttgggagaactaacatcgtatcgaccaggacctgcttcaacttttgcacgaggattatcctcgtcttcgttctagccctccttcctctaatgaaggtcattctccaaacattctacccagccatagaatgatggctcgtacaaagaaaacaacgggtctggttgacgcatctgatcctcaagtggctcggcacgtcactttgcccagcgccgaacaagatcaagctttcaagatggagggggatcatgaaagggatgctgaggtccagcaaattgaggagcaggacaatgtacgttctggagaggcggaggaagaggcagaggctgaacccctaaatttcggggagtacaatgaggctgggaaacaagtcgatgctgacggagacgtc

SEQ ID NO: 152334 - DNA, 541 bp, Cannabis sativa
tataccacacacacccagtacttttccgtacttgtgctggtatcaccgtaatgtactccttaacaatatacactataccaatacactttgtaccataaccgtacaagttttggaagtgtaacaaacatatgagcatgcatatacacttaacatatacatacattcgcatattcatattacacattatacaaagttcttacattctttcaagattcaagtgagttggccgacttgaacggaaagtctcgtgctggatggatgccctaatcatatattaaaactgggtaaatcacatgttcgaaactctaatccgagaaacccgagtctacgactcaaggttttgttatactctctagggactacactatatcaggaaacagggaaacacccaactaaggcactgaaatggacgagaattgagaaaactggtttttcggggaacctaccttaatcggttttacaggtactggtaaaccagttaaccggtttctaccagtcctccccaaaaaacctccaatttgctcaaaacttgtccaattgc

SEQ ID NO: 152335 - DNA, 642 bp, Cannabis sativa
  modified_base (52)..(63): a, c, t, g, unknown or other
  modified_base (212)..(215): a, c, t, g, unknown or other
tttcattgttttagaaattcatagtaggatgttaatgaaacatacatgttannnnnnnnnnnncttggtaaaatatttccaacatttcgaccatttggtggaatgacaattccattttgagatggaaggaaagaccattccaatgcatgatgagaaaacaaattaataatgtttttatcaatttttttatacatttaaattttattccattnnnntcctattcccattcccattcctatgttttcattcctcccaaccatacgccaagcaatgggtgtgtatttatttaaatttttaatttaatttttatttatgcttattatatataatttatgcttaatttaattaatttaaaaataaaataatatatatgaaaaaaaataaaattagatttttattaaatataaaaaaataatattaaaacataaaatttaaagcttaaaaaaaattataggaagcccctccactcgctcaactgccttcaagacgtgatgcgtcgaagggaaaagctccgatgctttctccacaaggcggtagtgcaccaaaagatgaattgttctcggaaaagaagatggccttgatccctaaatcgctaaaatggatggttcttgaactcctgagcctcaaagataaacgtgatat

SEQ ID NO: 152336 - DNA, 627 bp, Cannabis sativa
tttggtgggacactgtagacaaagacatttatgaggataggtttagtgtcccattggaataaatatagtgtgaaactacactatatttagtgttttagtgtcccattggagatggactaaactcttccaaccacacggtaaaagtcatcctatcaatgagtttatctacagtgttccactaatattagtggtgcactgtagaccactgtataatttttgttttactttttaataattaaataatagtttaataattaaatattatatattatttataatatatcttcttggtgtaacatatgcttttattatattaataaaataatgaagaatatatattttagtgttgtaattggaattgaaaaaaatttagtgttaaaattatttttttagtgttatttcaacactatatttaacttttgtgattagagatggcctaagctgagtatatatgaagcttgaaaaattcttattaaaaatattttagaagagtaatttgcaggataaatatctaaatttaactcgcagttgtaaatatatacataagtttaattttttacggtaataataactaagttatatttctggaattctgtaggtacctgacagttaaatgtcaagtcatta

SEQ ID NO: 152337 - DNA, 532 bp, Cannabis sativa
ttgcacatattttgtaattttaattaaaataatgtatacaaaattgtaaaatgcccttaaaaatatacttagatcaataaactatattctcttataaaatattatttatgaatgtccaaatctctaaattaattatcacaattaatgtttagtttcttattcttttagtcatatttttgtataaataggggttcaccccattaaaataaacaagtgagaaattctcattcactttctctttatctcttcatcatcttcttcttcttcttagaatagagtcgtatatttgttataagtgacgaacctaaaatttttactttgtggggacttatttatcattaaaaaatatttatacttatattataatcactcttactagatttatttaattttgtggggggttttttattattttggtctataagccataaatgttgaatctttggtgctatgttgggctttattcgggaaaataaatctgtctgcatgtaaggcaatcaaaaatctctcactagttaattgtgaatgggat

SEQ ID NO: 152338 - DNA, 1064 bp, Cannabis sativa
tttcaaaacttaatagatcaaatatatattctattcttatatataatttttctacacagtttaaaatagtaacattttttatacatacaatttttttttcttcctttgaatttgttatttgttatttattttaatgtgttattttttttttttggtaaattagcaagtgtattgaatccaaacaacaatttatacaacctaagagcatcctctaattagcggaccttcaaactctataatctttacaatgatttaaaccaattctcctcactacttgttacaatttttggccatatacatgctattctatttttaatgaaacctttaattttgtatacaatttatcacaattttccatctcaccattccaaaatttgttgtttcggttgctccaaatcatatataccagcgctgcaatggcagcagcgtaaaccttcctttcaaagctgtcaacttttgctttctttatccacttgctgatattcttcaaggtcacagccatattcctccattgaagccattgctaaatttgtgctaagcaattcttcaaaaacaggcagttaaacaataggtgtccattgtctcgctgccatcattgcacagtaagcagttatcattgtcgatcacaccaaacttcttcaatctttctctcgtctttatcttcctaagcatagcaagccataggatgaaactatgcttaggaagattaaaacgactccaaacaaacttactccaatccaccttagccggttgcttgtgtaattcactacaaccaaccgccactatgtagttaccatgtgactggtttaagttacccaaactcttcatttgttcttttactagcaccaacatcctccaataccaactcgcttgagccatagatttataggtccaccaatcctcatccttcacatatacattgtgaaaccatttaatccataggttatcttccttcttagccatggaccaagcatatttgaacattgcagccttgttccaatccaagatgcatctaaatcccagcccacccgagctttttgactgacaaatcaaagcccaagcaa

SEQ ID NO: 152339 - DNA, 797 bp, Cannabis sativa
gttgctacctttgcttcttcagagtcggtcccacgaccctaaagtattgctctatgtcaaagagaaagttttggagctccttcgcatccctcgcccctccatagcatttgggctcgggtgctctcggtcggccatactccatacctccgtgccccccagtatttgcacgctctactactatcatcgtaagatttagcttagttgacattcctcctaagtcttcccgaatagttgtgacagacacatgacaatcctctatcgtagcattgagggagacttgtaatgcagtctactcattttgtagcatggtgatagtagcctgcatgtctgttgttgcttgttctaatgccctgatgtgatcctccatctgaggcgcacctgatgttccaatagcagcatctcttctctcgatcgcagctaccctggccaacaagttagcatagtcttgagccaacgtggcaacttgttgttgtgtcactattggccctgagttttgattgctcgaggttagatccctaaccatctcgtccaagccatctagttcccctatgcgcttctcaagctcttgaactctttgggtattgctcaccattatgtcgtgttaccaagcttccctttctcttggatctaataccaactgtcacgggccgcctctttggacactcccaagtaggtggaacgtgtgacacttgctggcacaccgagctagcaagtcagcctaaacgcgcctgcaggcaaacaagttcaaaggttaggcacgatacatgtctcgcacatgttgagtgcaaacaagaagc

SEQ ID NO: 152340 - DNA, 518 bp, Cannabis sativa
ccttatgtccttccaaagttcacccaggacttcaatgcctcccagtatcacggacaactttccatcttcagttacttatgaaaccttagtcacctccatcatgaatatgctgatgtaggctcggagagatcgcctggtctttgcttgactttgatcaggtctcctagatgcaacaaaagttggtgagaggaggagaattgtgcatagaatttcgaggagaaagctttccatgagttgaattttccagggccagcttgaaataccattgttgggaggcttccgagagggtggcaggaaaaattctacaaaatacgtctcctcataccccctgtagatcctttgcatctcgaaatacttgaggttggaaagagcatcttctcttccagtgtacatcttccaggctggcattttaaacttgtggggcaatgtcaggaaattgatcacgggggagaaaggggttccacgtgcttggtccaactcgagatcattgtttctctgtccggccatgccttggaaca

SEQ ID NO: 152341 - DNA, 781 bp, Cannabis sativa
tggcagactctgtacaatgaagccatttagccgttctttactcaagaacattctatgccgcctctggaatttgggggacaccgactgggatttaaaaatcaagaaaaacacgaccacagcagtgttcttggttctttcgttcaaaacgaacatccatttggaaaggattctgggaaaaaccccttgggtccttaatgctggttttctcatattggaaaggatgcagagcataccgacggactgggaaacgactttaagttccttcacaatctcaggtcgtgttctaaaccttccaatcaaagcaataactaaagcaaacatgttacgactggcaggaatggcaggggacatcatcgacattcaagaagcggatgttaaccgaattgctgtcaatggtttcttcaaattcaaagcccagaactccattcattccaaactcttcccaagatacctattcccccacgaaggacggcgaatttggctccaatttcagtatgatagactgccatatatgtgctttaattgtggcagaataggccatgaaatgcgtcaatgcaaggaacctaaagctacgggaattcatgaagatggagaggcgagaccaatctttggttcttggctaaaagtggattcaggtgtaagggtggaacagaatcactacaatgaaccaaacacagaaaaccttcgagaactccctggcaatcaaaggactcactccatgaatgacacagatcagaaagcacaagagagaggggtcacacaaaccagtactaaaccagta

SEQ ID NO: 152342 - DNA, 544 bp, Cannabis sativa
ttttacggcattaggaaaaataaagtttttattaggctcttatggaaaaaaaaaaaatgtgatatttttaaatattatgtgtattatttaaaaaagaattttttaggggctctaagattgtgtgggtcctaagctcaggcctaatccggttagcttagactaagccctggttcattcttatgtactgaaaaaatggggttttacaaaatattgaattttggataaaaatttacaattttactgtcatataattttttttacaaaagtactgttttttttataaaacaaccgtaaaacaataaaacagaacaattaaaataatagtggaacaattaaaaaataaccgtagaacaactgtgaaaacttaacactgaacacaatatttttgaaaaaaaaaacacagtatttttgaaaaaaaatttccatcccgcagtaaaaaaattaaaaaattaaaaatttcagtatatggtgtaaaaactccctaaaaaatattgggattatttcacaaatacacaaaaacaataaaaaataacaaaaatacggt

SEQ ID NO: 152343 - DNA, 508 bp, Cannabis sativa
tttccctaaatgaatatattaattatagtaatataattaattaatatctaaaaaaattatattcatgtagagtatgtatgatcttgtaagaaagtacaatagaattaagatcatacaatattaataaaataaattttttgaatggaaaatgcatctttattaaccatcaaagtccgctaccaaagacagtagcaaatcgaatggaacagactccatctcgaaagtacaaccaggaaaaattaataaaataagttagtaatgtattaaaacgtaaaaattttaataagaaattactaagtacagtttactatgcactatactctagtgcgtgtgattttgcttcgtatcacatatgcgggcagatatttagtaaaattactgtgtaaaatttgatcatgcatgactagaccgataggaactaacatcttttatcaacatgtcatttataaaataaaagagttattcatatcacaacgatgatcagtagtagatcagtttgaatcttgag

SEQ ID NO: 152344 - DNA, 667 bp, Cannabis sativa
gcccatggtccccgcactaactagaataatattgttttgtaatctcaattaattaatttatttttagaatttcaaataaagtttatgtcttatttgtgaattttaccaatgaagggcacaattgagaagaaaagatgaattcaagatttatttattaattaagagaccttggaatgtctaattaataaatatagttatatagtaattttatttgataattaattaattataattattaaatagatagaattaatatttaaataactagagcaaaaaaatggtactattgaagaaagataagtttgctttattaaggaagtataataatgacaaaaatctaactcatgagccttataggggtttgaccatgagtgatttattttaagctattggatcttttaaatcaacccatttagcactaatcctaaacttaatgaatccataaaaataaacgttaagggttttgattcaggtgatgactcaagactttctgaataaaaaaaaaacctattattttctatcattaattttgaatttctcttagtattctttttactaaatttcgtggtccttagtttgagaatatgcccacacatgttaaagcaataatcaacatagtgaggaagattgtgtaacagtcaattgaaggagaatccaagttcagatc

SEQ ID NO: 152345 - DNA, 929 bp, Cannabis sativa
atgtctatttaaatattatttattttctgggatattacaatcacttttagacaaacacttcgccagggaaaaaaagattattctaagataatcttacctatattgaatatgctcatagcaaatttctaatatttcattaatcttccaagattacccatctttcaagaataaaatatcatactattttcactttaatccccattgttctcaataaccttcattaatgcttaacattaaagccaaggatataaattttgggatttcacaagattaaactattcttttgtatgaattctatatcctcatttatcgtatatattgtatacactgatagatagcatattaactcattatgtccaaccattactacttggtcaaaaccataagatcccacaacacatagttcataattgtgtctttatgttcctcctatgggaccttctaaagtggtctactgacttaacttattaataagttaagtattcattcatgatagatattcaattaaagtacttatttgtacttattgacatatgcttatctcgataccttgtaaatctttacttattaacacatcatttcctcttggtaatctctggaacgactattgattctgcatcctaatatgaatctttctagcgtaatttgtcctcacttgtacgctttctgagatgactccccggaagattcccaccttgagattaccctaagttaagtatgcttaactccaaggtaagctcatggcgagttattagaaagtagatacttctttgtcgttcctaattgtatttcttattttcattcttctgatatttaaatccaatttcctaaattcttagctaataataattaatcaaagatcatccattgatctcaaagcttcgtatctgtgttaggtagaaatcctaaaattctccttttaacacacc

SEQ ID NO: 152346 - DNA, 651 bp, Cannabis sativa
  modified_base (602)..(608): a, c, t, g, unknown or other
ttttttattgttttcttgtatttttataaaataccgtaaaaatgtaaaaaaaaactttgaacgtaaaaatataaaaatttgtgttttatgtaattatgtgtacattaacagtggctatctaacaaaaattgttggtttaacaatttttttttcgttaaagttaacagttaaaactaacaccgttaaattaattaattaattattatttttttaaaaaaatagttttaaatatctgaatttaatttatttattaaatataacataaataattatttaaaagtatcaacaaaattagataattagacgttaatttaattaattaattatactttataacaaatttattagttatattgttcaaaatatctaaatttatttacttattttattatttcataaagtagttagacataattttataaataaattttaaattagattaaattttatatattttaaaagtataattgtattgtattagatttaatttttttattattattatttaaattaataattaggtttgcataatactaatacatactatagtagaacctctatctaaaaatacacttggaaccaagtaaattatattctaattnnnnnnntataactaaatagagttacattagaaaaaaaaaaaattaaaaa

SEQ ID NO: 152347 - DNA, 659 bp, Cannabis sativa
cataaaatttgacacattttgcaataatatatacttcaataattgataactctaaaaattgtctaccacggtccacatcacattaaattagtgatttttttgataaaaagtaatttttttcttaaccaaaaaaaaaaaaagaaaaataatgtcatgtggtcataatccatattaagcaacacttcacataaaattgatcttgaaaaaatacgtcaaaaaaatattgatcttgaaaattggatcacatattgcatatgtgacaagaactccaatgggcaatcctcattttggagatgtccttatctcaaagactaaaactatctccaatagaggtgacatttatagttgttaaaatacacatattattctaaaatatatattattctcaaccaaaaaaaaaaagaaaaataatgccatgtgatcataatccatattaagcaacacttcacataaaaattaatcttgaaaaaatacgtcaaaaaaagattgatcttgaaaattggatcacatatagcatatgtgacaagaactccaatgggcaatcctcattttggagatgtccttatctctaagactaagactaactctgtgacagtcagtagtcccgtgatccgtaagggaaaataccgggtaagctgtgcaatctcacatcgcctggg

SEQ ID NO: 152348 - DNA, 704 bp, Cannabis sativa
acagttgtgccaaactgaccctaattctcaaaataaaattaaacagtcattacaacaaaaatagaaaaattaatattacataaatatatatataatattttatatggtgatgaattaggataatatctctaataagattcatgtgcacaaaaacattattttgtcaagaagaaataatttttgtacacaactaaacacagtaataccattttttagacactcaaaaattatgggttaatgctagcaagagaatgacaatgtgaaatgttactctgtttgtttttagggttttaccttgaaatattattctcttagtaatacaactacccttgaaaagagtaacattgacaccttaaaaaaaagacacacttgaattattccctttcattatattaatttgaataatattttttaattaataaaaaaaattaaatagtattaattatgatttattatataaaaaatattacgacatatatttagtgtagtggccaaaaattgctctaagcccaatgaaaaggcccaacaatcgaagtacttacaaagctcacttatgagtcagaaacgaggagcccgtaagcccaatggctcacatgggccacgcccaatccatgtcgtttgggtcatatccatattcgaatgtccaacccacaataaagcttgatcttaaagtgtaatgctagggttgacacgtggaggaggaa

SEQ ID NO: 152349 - DNA, 742 bp, Cannabis sativa
  modified_base (389)..(389): a, c, t, g, unknown or other
gagaaaattaaagaagaaaatacaaaatcaaagaaacaacatctctctttcttccttcctctctctctcttcgaaccagccatagcaaggggacttggttgctgattcttagttttctcagcaaggaattcaaggggaaagcaagctaaggtaagccctagcatctctttgccttagttcttgaatttaagtttaggttgagtttatgattttgtaatataggggctattagggttggaaatgcttagggttcgaattctaagcttaatttgagttggtattagcttcttgtagctggttttgatggttggaatgggtgttgtgcaagtttcagctttgagttcaaagctttgaactctaatggcataaattgattcattgggtttttntgtgaaatactggttggaaaatattatctatgcattgtttaggtactttggaaagtttggtagcatttggtggacaattgagcaagaggtgaagggtttggggagaactggtgcaaaccggctagccggttttgccagacctctaaagtcggttttgggaggattcctgaacacttcattttctcaattttcgtccatttcagtgccgtggttgggtatttccctaattccagagtttgggtaacctctaagaagtataacataacctagggttatggctttgggtttcctgggattagggtttggatcatgtaacttacccagtttcataatgtaattagggcatccatcta

SEQ ID NO: 152350 - DNA, 887 bp, Cannabis sativa
  modified_base (351)..(368): a, c, t, g, unknown or other
gcttctccaattcccaacttcttgaaaatagacatgggcatgagattaatactagctcccaagtcacaaagagctcttccagcatctcgaccccccatagaaattagaattgtaaagcttcccggatctttcaatttgggtggaattttacttttcaacatagcactacatccctccgtcaaagtgacagtttcaaactcgccaaagcctccttttctttgtcaaaatatccttcaaaaacttcacataggttggcatttgctccaaagcttccactaatggtatattaatgtggagctgctttagaacatcaagaaatcttgggaattgaccatcgtcttgttgcttctnnnnnnnnnnnnnnnnnngtggaggtggcttttgcaaagactcttctgcagctgaatgctgactggatgctgtaaccactgggggaattttagcagctaaaattgtaggtttttcttcatttccccctctttttggattgaagagggctccttactgcctattgcagccacatttgattccagaatttttccacttttcaaagttactgctttgcaatgctctttgctatctcttcttgggttttcattgtcactaggcaaagtgccttgtggtctattcttcaaatcattggccaattgccccaattgaatttcgagattctgaagagatgctgtctgactttgaattacagcgtcattcttggccatatagtctctcattaagctctccaaaagaactagtttgagagctttgaggttggtgtggttgttgatgtcttggctgttgagaaattcccagtggaaatgattgttttccttgtgcttgtgctccacttgaacttgccccttgacctccccatgaaaagtttggatgat

SEQ ID NO: 152351 - DNA, 1011 bp, Cannabis sativa
agtattaaactagtttataaaatcacacatatggtgtccctatagattagggcgttacatttattattaattaattatcaatggttagtcgagtttcaatatcttaaatattcaaccatagggaagtaggttttgcgaatacatgtactgcggtcagttgggtagataatttttgtattgttaatgttattttgtttattttgtattttttatttattttgtttgttattaggcatgtttaaaatttttgggcacgttcaattatagtcgttatgctactggaattttggtagaattaggataaattttgatatattatatggtgttttgtatagggtccactagctcaaccaccatcaagacgtgatgtgtcgaagggaaatggtcccatgccttgttaaaaaggcagtggtgttcaagcttatctattattcactccaaagatcatggcgctaatccctaagctaatcaaatggagggttgaagaatttctgagaatcgaggcacaaaatgtgataatcccaattcaagtaccacgtggattcatagtgcctcgtaaccagatcaggatatcaggagaagattcacagcaggtggcattgtgtgacttcatcaaaaaccagggaatgcttttcagaatgatgtatactcttccttaacctaattaatcaaatatatcaatttctagtgaaattattataaaacattaatatttaacaattaaatgcaggcacatttgggaggagttacatgatttgagatgaatttcaagttttacgacctagagcttctcacaatgcatggtaacaacgatttagagaaggaagagtctcttaatgttgcatcagaaggattggctcattggttatcattgatgaatagccaacaccaaatgttctttattccctggaatatcagttaaacactacttttgacataatttaaaattattttctctattgtaacttgaaattatttttacacttgttggaatttattttaccacgatct

SEQ ID NO: 152352 - DNA, 689 bp, Cannabis sativa
aagaggaaaaaactcagcagcatcccgtgtactatcatcccgtgtactatgtccccgtgtactatgtcagtgtactatgtcagcaagtgctatgtcagcaagtgcatgataggagcgaagacgcgatacccggcgatcgagaaactagttttattgtctcctaatggcctttagaaagctgagaccttacttccaagctcacccaatcaaggtattaaccaaccacccgcttcagcaagtcataaaaaagccagaggcatcgggaagactcctcaaatgggcaatggagctaagccaatttgacctacactacattccacgcatttccataaaagggcaggcgttagcagacttcatcacagagtgccatgaagataaagctattgcaaacatacccacaccaccagtcccagcgtggaaggtatttgtggatggcgcctccaacgagaacgagtccgaagcaggggtcgcaatgatatccccgaacatacttcgactcgaggcagccctacggttcgaattctcagcttctaagaatgaggccgaatacgaagccctgattgtagggctgagattggaaaaaaacgtaggggctaaaagagtagaagtctacagcgattcgcaactggtagtaaaccaggtgttgggagaatatcaaacgcgctgagaaaaaatggctgcatatgtgg

SEQ ID NO: 152353 - DNA, 680 bp, Cannabis sativa
gaattcttaatttttctttcttttaagataaaatgaaataaaacaaatattattctattttaattattcatctaaaatcagatctaaacttaaattaatctcacaagaagacaaataactaaatggtcaaaaagactgttatgccaatttttgcactctgatgtggcatcacatgctggtgacacatggaagtgattccccatatctgcctgaaggagatgttccgagccaagcatcgtgtatacctgtacggaggaggtcctcccgaccgagcagtggacaattcgaacagcatattaacacttagcaatttcagcatttatatcgtaaagcacaagagcgatccctataaatctgggatcgtatcatagagatatggcaagctgtccaaatccctcaatcagtgtactctatatatgtaatatgtaatcttaacaattatagacattgtgaacaaaagggaaaccttccctcaagcacatagccctataaaaagtgatccattctcattagaaaaggggtcgaaagaattatccaagagagcatactcagagttatcattgtaagagctttaagagaagaatcacagtattctttgtttttaagtcaatacaaatcgacgggagtaggctattaccaaactgctcggggtcgaacctctttaaaaactctgtgttctt

SEQ ID NO: 152354 - DNA, 712 bp, Cannabis sativa
atccttctttttaaagttttttcttactcttgcactcgttagttttctcttaaaatctcaccctacacatcttaaaaagtcatgaaatttcacaagcataacgccaacaaaaattgtgcatcactttttttgttagttatattaggagaaaaagtagttttcaagcagtaataatcattctaattgaaatagttaaaattttacatttctaatattggtacccctttttgaaatgtggccgggtcccatctcaaaatatttttccccactagtcacaatgaattcatactactaacacgtgaatatgaagattggtttgaagttaaattttgttaaaatgactcctatttcaaaaattgaaatattcttttgtttacgataaattttaacaagttttttccttactcttacagtcgttagtgttctttcaaaatctcaccctacacatcttcaaaaattttgaaatttcatagggacaaagccaagaccgttgtctataacttttctattggggtttggcggtttacgatttgacgttttgagttcgaggttcgagggttttggctttaggatttggggtttgtggtttggggtttttagggtttcgggtttgggggttttgcagttttggcatcttgggttttggggtttggggaatcgttatgggaatgggcttgggaatgggaatgggaataggaatggaaattggaat

SEQ ID NO: 152355 - DNA, 892 bp, Cannabis sativa
  modified_base (70)..(74): a, c, t, g, unknown or other
caaatgaatgaaaatacttctgtttctttattgatattgaataatacggattacattgaaatggagtttnnnnnagggcataaaacccaacaggttactcctcagagagatgaatgacctcttcaaccggcaccttctccttggacggagtctcatcacccttagacttcttagccagaggagacaagcccgagctccccctactcttttctttagagcttcaatcatcttctgagacttttctgcacggaaaaagcaacatagtcaaaagaagacataaaatatgtgacggcatagaaattagggaaaataaatgcaagttaaagtactctgcacgctggcaagagaattatcccgaacaagtacggatggagcgtcatcatccgaagagtcttcctgctcctccaggacagcttttccttttccctccacaggggtcgatggccgagcaggcatgccaggttccctaatttggatagcatgctctatacgcgcttgctcagtcgggagagttttcttcttcttgtgtggcctctcctgctctgaatattcttgagcctccttctcctgcccagaatattcttgagcatactctttggctccagcatcaccctttaacttagcctcacgcttgagtttaatgagctccttctctttctcaagtccctcagccaggctcggcctggacttcttcctcttctccttcacagactagggtacaaaatttgtcgggttaagttggtacttcacaaagttggcctctgttgtcaacaaagtgagcagcctctggcagttggagaattctttgggcccttgccctaagcctcaatgtggagggaggacgacagtatacggggatctactgaaaccgatgttgggttttatgccctaa

SEQ ID NO: 152356 - DNA, 624 bp, Cannabis sativa
gaatcacatcttagtatttctagtatagcggggcattatagttagacattggaaattttagaaatagacaagattttagaattgactaaaatacccctaagtgaccatttatgatttttagtgtgggaaggacaaaataatcttttgccaagggtttcttttgtcttttagtaggagttattttaagtttattttcagattattctttagataatttagtagttaattcctaagtcattacatttatcatttttttttcacaaaaatcaaaaatcaagaaacaagctctctactctctcttcactccttctctctctcgagccctagaagaaccagcaactttttggagttcttcagctagttttgtctttagtagttagattttggtgtttccattgaaggtaaccctcttttagcactcttttctcccatagttttcttaggctttaagtaattaaatatttcatggattgagtattaggaaactgagttgttgattatgtattctttagttgaattaggttttataagttggtttaagcatgttttattttcttggtttgggtttagacaaggtttgagttagaactcaaactttggtctctaatggtgaaatttgatttt

SEQ ID NO: 152357 - DNA, 1057 bp, Cannabis sativa
  modified_base (293)..(302): a, c, t, g, unknown or other
aaatttatttacgccccccctcactttaaattctgggtccgccactgccaatagcaatatttacacataggatggtgctagacaccactggtgccctttagcatttctctttttaaaatgagtaaattgcagcataaatacttaatgtttcagattttatacacttaaatacttaatatttacttttagatgcaaaaatacctaatgttacaattctcttgcattgttactaccacttccgttaacttatcataaatatagatacgtggagggctcaaatgcattacatttannnnnnnnnntttaaaatttaatattcttaatatcaaaaattaaatactacttgtttttttttaaaagagagagagagagagatacaatactaaaataccatagctgagtgaatcattgcaatatatggaacatgattatcgaattgaaataccaatataatgtaaaaattgttatgagaatgaggtttttttttaacaagtagcatttaattttttatattaagaatattaagttttaaattaaaataaaaataaatataatgcatctgaactctccacgtgtctatattatgagttaacagaaatagtagaaatagtgtaagagaattgtaacattaggtatttttacctccaaaaataaacattatgtatttaagtatataaaatctgaaacattagatatttatgtcgcaatttacctttttaaaattgaggatattgcattctaaattcaatttattttattgttttaatttttatctttattttcaatttttttaagatataataaaggtatattagataatccactcataaaagtgagtaaattttaatgacatataatataaggatattttagtggacacaaaaaataggtattcctcaatttatctttttaattagatttttttttttattagtgtacaatatttttaagaaaatttcatttacactctaaaaatttctaaagacacctaattttaataattttatttttataaaatgtatatctttaattgtactaattttttttttaacttttt

SEQ ID NO: 152358 - DNA, 1146 bp, Cannabis sativa
  modified_base (438)..(446): a, c, t, g, unknown or other
ttaaatattgtaccaattttacccctgtcactttaagatactctccatgtgactcacttatgtcagggtattttgggtaaagtatatatagaaagagatatgtttcaattaaaataaaattagaagtaaatttgattaattgattaataaaaaagacatttttcaacttaccccaaagatttttgtttgagatttcatctagggataattacataaaacataattttttgtaaattttttttaacatttttaggttttaagatttttttatatatatatatttttacgattttctataaaaataacacgaaaataataagaaaactacataaaagtaacagaaaaataatatccaacaataacaaaaaattatatacaaataacaaaaaattaacaagagtataacataaaaaaaccatattttctataaataaaatnnnnnnnnncgtaaaaatatttaaatttccgtacaactataattttgtaattatttttgtatatttgtgaaataatccctttcatttaagaagaaaaaaaaaacatattccatcattttatttcttatttatcaaaaaaaacaaattgagaaacccattattaattttttatttcttatttaacaacaaaacaaatctatcaatgtaaacatgtagatttggtccgacccaaaatatattcggttcaaagtgtttgttacacgcaaaagtaggggtgttcatataaaccgggaaaccgcagtttaaattcggaccactacaatccgaaccattgtaaaccgtaaccggagaaaccgtttttaatggtttggtcaatcgggaccgtttacatcgtaataattcgcttgcggttcgtaatatataattaatggttaaaccggaccggaccgtttacaacaaataattaatttatatatttttttttttatatatatgactatatctataatttaaaacttttttgtgtgtcaagttttttttacataaatttagattttcatgttatgtttgacttttgagaatatttttataacattatttatatctcatagatctattacttatcatgttaaatatatattttgaaaaataaaattaaaaacttagtaaaaatagtacaattactaaaaaaatatgaataattattaat

SEQ ID NO: 152359 - DNA, 617 bp, Cannabis sativa
gaaaatcttaatcttttgtggcaaagacagggaccataagaagttccaccatgaagcagatgctgaagaacttgagctatcatcggtttctgcaagagaagcagctaggtgatagcctgtttggaccgaatatattccagaggagcaggggttccaagcaagggtatcttcataacagaaaaaactcagcggaatggttaagatacgatctacatctggagaggaaaaccattggtttagaagtgctaaatcccattgcctttcttctgtaattaagtttgagacagtcgtattaggtggtccggagaagtgatatggtcgaaaggtggaatgtcctggaatccacgggtcatcagcacaatttatcctacatccttctccaattttccaacataaaccagcaataagaaggcttctaccccaatggatgccttgccaagttaaagagggagagtgaccaatgttagcttgaaggaagtcgttattcgggtagtatctactcttcagcacctttgcaagtaaggagtctggttgtttaagaagtctccaagcttgctttacaagcattgcttgattaagagttacgcagatccgaaacagatcggaagagcgtcgtg

SEQ ID NO: 152360 - DNA, 709 bp, Cannabis sativa
attttgtagatgttgagatatatgactatgtaagttttttttattacgtgtaaaaatcccacatggattaagaactacattataaatatacttctatactataaacaaagtattcttatattcatttaatttgtccaaaaatatatacgtgattgataacttgattttgctcaattaattataatttaactttttatcattattattttaggtcatcaaatcaaatttatatatttatataatatatctatatatttattagccaaaaaatttgagttagcaatctattattttttttcttttttatatttttttatttatttctcttctaagtgatatttgatatacttacccaaaaaaattatataaaataataaattataaataatgatggaataaaatttaattatataattaaattaataaatctataatcaattcttttataataattaataataatataaacataaaaatgttatattttaaattatatcactcattataagtacaacatatatttatatataaaaatttgggaagaccgcgcaaagcggggcttagttccctagttcataatacaacattgcattaaattatttataacattgcattaaataatttatagtaactaaataaatctgattttatcattgctcaaatttatgttgatgatatagtttttggttctacatctaaccatgaagtg

SEQ ID NO: 152361 - DNA, 514 bp, Cannabis sativa
  modified_base (466)..(470): a, c, t, g, unknown or other
acataaatcaattttacttgcatgcacaccaaacacaatcatttatcactataattctcaccaatacattgcatgtacccatatgaatatttttaacgtaaaacatgaactcatacaaacaatttttacgtgaaattttactataatactatttattaacaaaatatacaattatgtaattatttatcaaaatcagaagctagcatatttcttaaccatttatacagatcataaaatatgtttaatctgcttagaaatatgtacaaaatactacccataattatgtattaatttatatgttaaaatgtataaaattcttaataattaatcaaaaataataaaacatctcaacatagtctccaattaatttcagacactataattatattttagcattatattgaaggttccttaaatagtgaacacaatttttactatttattctatttaaaacccaattaaatannnnnttagtcacaaataattataataaatacctacaacaactaataaa

SEQ ID NO: 152362 - DNA, 509 bp, Cannabis sativa
acccattcccaacaaaacctcaccagaccattagaagcactcaagccctgactgttttcgagctccgaccgactaagacatcccatgaccgagaacacccatgatgacttgcgacgacccacgagaagcacccgacaacccacgaccaccgcaccacttccggcgaaacccactcgcttgttttctgcattttttttttctggtttttgacgatatcgcgaaacatcgctaaatatcgcaaaacatcacgaaatcatgaaacatctctaaatgtctttaattcacaacagcgcttgttttctacattttttttttaatttttgacgatgtcgcgaaacatcgcaaaatcgtgaaaacatctctaaatgtctccaattcactatatcgtgaaacacattgcgaatatcatcgctaagcatcgcgaaaacatcgctaaatatcgcaaatcatcactaaacttcatccctgacctcagatttgttctatcattgcaaatacatcgctaaata

SEQ ID NO: 152363 - DNA, 578 bp, Cannabis sativa
  modified_base (527)..(529): a, c, t, g, unknown or other
ttcatgaagcttagaataagctagatgaaagataggcattaggccgttcaaaaagcaagcattgcagacgatggaatcgcatgaaccggaataaaggaaaattgcagactttctaaaattagggtttcttacatatcttctacaacaaagtcgaaggtgcattttgaaagtaaatgtgcaaagtaaatataaaggaaattgagagagaacttactcaaggattgaatgcctggattcaggttacgccaagccaaacgagcagttttgatgaaagcactttagcaaacttgaagccaaaaacctctcttttcgctctgaacttacttagcaaggaaggttggtgaaaatgagtttgtggacaaattctcacttgtatttataagcaaacgatgaaaaagggtaatcatttcaaaagaacctcagacgcctcgtttccccccaaatgcgaatatgggaaatcaaaagcaatcaagtatagccatcaactgtggtaagagaaaatcggatttcgaaatattaattgtcannncatttattagccaaaaaccgaaggaacgcccagtcagcctcacatcgag

SEQ ID NO: 152364 - DNA, 597 bp, Cannabis sativa
gcccggggaaccctgccaaaaccggctagctagttttacacgtacgtgtaaaatcggttacccggtttgcaccacttcacccaagaaatttcattttttgcacaaaactccaccaaacataaccaaaccttccagagtatctaattagggtatacacaacatattccagccactaaaccacagaaaaacccactgaatcaaaacatgccattagagatcaaagttaacgtttctatgctcaaacttggacaaaacctaaatcaaacatcaaaacgagctgctaggaactagtatcacaaactcaaaccaagcaaaaacttaaaaattaaagaagggtgctactagggcttaccttagctccaataacacttgaattcttagatgaattccagaaaaataatggtgaaaagaagtgatctcctctggtttgctttagccgaaagaaagaaagaaagaaaactctctattttgtgatttttcttttaatttcctttttccttgattttcttctaaatgaattgaaggctaaaccttaaccttagctgaaataaacttatgctaggtgtgactcctataggcagccacccaatacaccat

SEQ ID NO: 152365 - DNA, 1273 bp, Cannabis sativa
  modified_base (1219)..(1238): a, c, t, g, unknown or other
taatggcgtttttcatttaaggggtcgatttttattttttttacataaggatggtaatatttatgcaagatatgcgccctgtgaagtttgaagtgatttggataagttttggtagtgtttcggtgagttcaaaaattaggattttcgacttttataggttttatacattcttcagatatcagacatcgtatttttgtcataacttttgactcgggtgtccgttttggacattctatatattgttttaaagcttgaaacgagctctacaatatggtgtatgttttatagccaaaatataagttttattttagtgtatttttactgcaaagtttggtagaaaacccttgcttgtcttatgtgaatattatgcagtgctttgggataaacacttattgttttatcattgttgtgacatagggtcgagatcatcggtcatagttctccacttgggttggccgaaatgtgtgaacctggattaaaggtaagaaaagtatattgtactgcttagtacattgtgtgtaatacaattactattgcaatgaattgattaatattaagatatagttaatactgttatataatgaaaagattgattggttgagtattgataatgtgatgatattatgcatgtgatatatgggctcacctaattaggtgattcaattttcctgactacgtactgggcataagtacgacgttagtgatatatgatgagtaccgagcgtaagtacaggctcacctgattaggtcatgtgatactcctggcgacgtaccaggcgtaggtacgggcatcagtgacatatgagtatcgaacgtaggtacaggctcacctgatgaggtgatgtgacactcctggcgacgtgtagatacgatgtcagtgatatcaaaattgctaggttatgtcatagtatgaaaccgctgtagggtttcctcctggcgacgtgtagatacaacattggtgatatgaaaattgccaggttatggcatagaatgaaactattgtagggtttcctcttcgcgacgtgtagatatagcgtaagtgatatgaaaattgtgaggttatggcatagaatgaaaccgttgtagggtttcctccttgcgacatgtagatgtcggcgtcagtgacatatgataagtaccgagcatagtacgggctcgtttaattagacaatgtgatatattggttccagattgtggtacaggctcacctgattaggtnnnnnnnnnnnnnnnnnnnngggtgcaggtttttggcacaggctcacctgattag

SEQ ID NO: 152366 - DNA, 522 bp, Cannabis sativa
gtttgttaaaaaatactttgattaattagtcattggaaaaaaaatacataaatgaatatttgatttttttttacaacaatgataattttattgataaaaagaaaaaatatattatcgtacaatttaaaaaatataagggtaaataggagcataagtacccataattttaaatttgtaagcgggataaacctaataattttttttagtggcataagtactcaatatttgtaaaactgtaatttttttttattttcgtcagtacaggcttcgttttaaatttgttcaaaaaagatttggaagtaacttatactacatatttttcatccagaccaaataatttaaatatgggtcttatatgtatcctgttgtttaagacaataacagactgtactgattaggggtgtgcgtaaatcgatccaatccaatgagaaccgaccgatctaatcacaaccaactgccaaacattggacatccaatcgtgatcggatcggattaaatgctatttttaaatatccaattgga

SEQ ID NO: 152367 - DNA, 920 bp, Cannabis sativa
  modified_base (299)..(311): a, c, t, g, unknown or other
  modified_base (391)..(395): a, c, t, g, unknown or other
tgagagatttttttaattagattgaaaaattaagcataataactcaaaattttctaattttactcattcatgggtaatacccattaagagtgcacacatagattaagggttgtataagttttaaacttcttaataaaaaataaaaattaataatataaaattagatagtataattttactgttatcatatattggaattatattttttattatcgtattaaaaaaataaagggatttttttttttttacacttcaaaatagttttttttttttggcatttttacgaaattctacatagnnnnnnnnnnnnnaactagcgctgtaacctaaattgcaacaaaaaatcgtacagaaacccctattgcaactgcaaccactttagaaacccaannnnnaaatttgaaaaaaaaaaagttaaaaaaatagtatatggggtaattccctaaaaataaattaattacgcgaaaagcgactatattacctagtatgacataaaaaagtttataaaaatgtaaacataactaaaagtccaggatcggccttgagcataggcgggctaggcctgtgcctaggacccacctagctcaggggcccgaaaaaaatttgtccctttttaaaattacacattttttttataaattttgaaaaataccatatttttttctaaatgagggcctaaaaatattttttttcctatgacccactaaatttcagggtcggccctgtaaaagtccataccctattaattttagggtaaatagcggcaaaacctcccaatactttggttttcgtttcgctaaaccccccacaacccaaattcctgcaggtaaacccccaaaactactactctgttagcaatttaccatttccgaccaaatttagctgttaagtgccaggttggcttgtccacgtggacacaa

SEQ ID NO: 152368 - DNA, 1358 bp, Cannabis sativa
  modified_base (313)..(315): a, c, t, g, unknown or other
  modified_base (799)..(805): a, c, t, g, unknown or other
  modified_base (1182)..(1182): a, c, t, g, unknown or other
taagtaaatctgattatattgcaatgagttttatttagggcataaaacccaacactacttcggtgtgttctcccagtagaagcaagtgaaatcatcagagaaattcatgaaggcttttgtggggatcatgcaggctgccaaagtctatctataaagatcattagacaaggatattactggccaacaatcaataaggacacaaacgagtttgtcaagaaatgtgataagtgtcagaggttttcacatatacctcgcgtaccaccaacagaacttagaatgataacctcgccctacccatttgctatataggggnnngacctaattggggcattacccattggacgaggaggagctaagtatgcggtagtagtagtcgacttcttcactaaatggacagagatcgagcccttcgtttccataacctgcaagaaagtccttgactttgtcatcaagaacattatttgtaggtttgggattcccacgaagatagtatccgataatggaacccaatttaatgtggacttgttcactaaattctgcgacaggaataaaattatcaaaagtttctcgtcagtatccatgcctcagacaaatggacaagtggaagttgttaataaaaccttaaaggatgctatcaagaagaagctagatgctgccaaaagcagatgggttgacaagctacctcaggtactctgggcccacagaactactgagaagacagctacgagacacactccttttgtcgctagcatttggctcgaaagcaatgcttcctattgaagtgaacatatcgactcannnnnnngagttttataattaagaagagaaccaggaacttttaaaattacccttggatctacttgaggaaaaacgaattgagtcgaaaatcaccaacgcagcataccaacaccgagttacaagatacttcagcgaaaaattcaagaaaagactattcaatgttggagactttgtgttaagacgagtctttgcaaatacgagagatgcatctgtaagagtgttcaacctgaattgggagggtccataggtcatcgaagcagtagttggaattggagtttataaattggctcgactcgatggctctctagtaaagaactattggaacgtagaatatttgtgaccctactaccaataaatggtgtaacttgcattactgatgtaaantttaacttcagttatgaataaagagaatcatttatattaagtaattacaaagttttattccttaaaaattactttagggacatttatgtatgattaaccagaattcatctggaaatacatggaataatgcaaacctgccattttaatttttctttttaaattcaaaggctctcgac

SEQ ID NO: 152369 - DNA, 1034 bp, Cannabis sativa
gatcacggtctcaggtcccaatctggttccacttcggttccctggtcccagtccgggtcctagatcagggtctgggtttggggtcgggtcctgggtctcagtcctagttctgatgcctgtgtcccgggtctaggtcccctatcaaagtccaagtcctaggtcccattcctagtccaggacccggtcagagttcaggtactggtctgagtctgggttcgggttccgatctcggtctgggcccagatcttgttctgaggctaggtgcaggttctggtccgagtcccgagttccaatggtctgggttctaaggcctaggtctaggtcccacatccaggtctgggtcctagatctcggtctgtgtccatgttcgggtttgggtcctagtcctagtttcaaattcgattcagtgaatgggttcgggtttgggttcaggtctaggttgggatctgagtcctggttcgagtttgggtacttatatgggtccaagtacgaatcccagtctgggtctgtgctcgggtccaggtccgagttcgggtccgtccctggtggtgcgggtccaagaagtcgtctgggtctgggtcagggtctcggtccggatctaggtcccatgtttcgatcccaatctttgtctaggtctgggttcgagtccaggttcgtatccggatccctttctaggttcgactctgggttttggatcgggtcccaagtctaggtccgggtctcgatctcggtttgggtacacgaccgtgtctgagctagagttccactcttgatttggatggtgctaggtccgagtttggttttaggcttttgtctgggtcctggtcacggtcgtagtcttgttcgagggtcctggtctagcaattccttttcaagttccaggtctgggttagggtccaggtttgggtcttggtccgggtacaagtcctggtctgagtccaagattatgatccctgtcacgggtcctggtctggttcttgttcaggtcccgggtcccaaattcgagtttggtttcgggaccgatactagggtgc

SEQ ID NO: 152370 - DNA, 1324 bp, Cannabis sativa
ttttgttgaccttaatttcaagtctgtcatgattgtaattaaggatattcaaaaaaaaagttaatgtcatttatgatcgacttctgttgaggtatttattttcacagtttttgtttcacactttttttcctgttatagttggttgttttcctgttttattttagttgcactactatttttaaaccagattaagtcatctgatgaatttgtcacccaagattctaatgatgatgatgacaaaggattacctaatccagagaatattgaaactgattctgatgatggtgatgagttgggtgaagatggtggtgatggttctagagttgataaggttgttggtgatgttccttctgttgaagtgattcaaactaaggttgttgcaggcagtgaagagaggtccaatgatattgacaatgtcaaaggcaaagaatctggtgtaaaaggagatgattttttcaatggtttaagacaacttgaaattgatgatgagcaagttgtgtttgttggtttagaggttgttgctaaaatcaatgtaagtgtattttttattctttgttaggttgtgttagcatgttagtttttctttagttgttagagagttttatgttagttttgtaacttttactttttttattttttattttttaattttctatttcaggttctagattccaatccaaatgttgttgttgaaaagaaagctgccattgcttctgataaagaagaggatgacactgttacttatactcctgtattggataagagaaagcgtgccacgacattaaaatcgccttttgttgattttgagtcggctgatgtgagtagcactccaatggcggtaatgtcctcacagtacgagaaaagctactttttccggcgcttaagctcgccggcaaacgtacgtgcaactcgcaggcaaagctgccgacaatggcttgtcggtgaatgaccttttgccagcgacataataacttacgtcggcaaaagtacttacaccggcacatttgtttgccggtataagggacttgtcgacaatacgtctgtcgactgatgtgtccctagcgacattttgccggcaacgtaatgcgccggcaaaacttttggcaaggattagggcatttggcgccttattttttccggcgagtttagtccccggtaaaactggaataaaaaaaataattaaaatttaaaatttatctttgccgacgacatatgtgccgacaaaagtgtatttttttttttattttattaaataatacttttgtcggcgcatgttaggcgccggcaaaagtttcatttttaaatttaatttataaattaattt

SEQ ID NO: 152371 - DNA, 612 bp, Cannabis sativa
aaaaaaaaaatatgtatatattcatttctattgaataaacaactaaataataacaaataaacaattgtataacaattccactacaatatacaaactacatggacatgtaaataatttcacaaattgtatcaactccaaaaaaagaaaaaacaacacaaatgtataaaataaatttacaagcaactacaaaacacttgtataccaactcaataatgccgataaaagaactaaacatatactcatttttttacttgttgaacaacttaataacaacaaacaattaaatgacaacaatacataaatatacaaatcaatattgaacatcaacaaattgtgcattctgacacactcaaatcgcacacactatttataaaaatgatgtgtttttcatatatgattatctatagttgaaatttaatacattttattgtgtgtaaaaagtgtgacatttatttttgtgtctctaactttactcaaactcatttagtacgatttatttgatattttaatttcaaaatatatttattttgcttgaattgctagaagttagaaataagttagttcctagatgtattacgtggtcaaaatatatttgaataaaaaattttattt

SEQ ID NO: 152372 - DNA, 611 bp, Cannabis sativa
gttggaactgaaatattggggtcatggaacactgtccaagattgtaagccaggttgggaaattggttatgcttgattcaatcactagggagagagaacggctgaactatgcaagagttatggttgaggtgatgatggatcagaaatttccagaatttttggaatttgcattcggctcaactactacagtgatgttgaaatatgagtggaaaccagtggcttgtactcactgttctgggtttggacatatagcagaggaatgtaggaaacactctaatggaaggccacaatgggtaatgaaaaagaacaataggaagcaggttgagacagatgcagagggctttgtgaaggtgactcgaaataagagtaaggctgagtatactgaatctaaagttgctgggaagaagggggcaagtaccagtaattcttttcagattttagaagataatcaagagagcttggttgatcaggaaaaggaaaatgagcatgagatagatggatttgatgctagggaagtggttaacacaagagggggggaagcaccctctctttccaatggataagttgctatgttggaacgtccgaggagccaataatcagcataaacaacag

SEQ ID NO: 152373 - DNA, 577 bp, Cannabis sativa
gtgggcatgcactcaatcactaagcctcgaatttttaaagtgaagaagactaagaatttcgaattagaagagacaaaagaagaagaggaagtcttaaaactctaattgtctgttagaatgaaaactaggtttaaagaattagaagcattagtttggatagtgagaccttactcttctttttatactaattctactagggttaggattgaattatttggaataaaaacttataaaaatatagcaaaaatagggttaagtggccggccccttaagtgggtccatcattagttagattttttaccatttttttaatcatttatctatttttcgaaaataccactttttgcactttgaattccataaatgccaaaactatttatttaataattaaattaattatcaaataaaatttccatttggtctcttaattaacaagtaaaccctaaaattatatttcttcacattcaagccataacttagtgaaagtttaactttagaattataattgatttattaaagtcaattaattaagtcttacaagcactttgtctcaactagtatgcggaccatgggccta

SEQ ID NO: 152374 - DNA, 610 bp, Cannabis sativa
aataaaaaaaatacatatcaattaagaatttattacctttgagcaaataaatttcttaaaaaatatatatattaaatcaagtcaaaaataataatacatatttatttaaattattatctttgggaaaataattaaaatatacacatttaatattaactcacttcatgaaatgtgaactaatatatataactactacctttgggcaagtaattaccatatagccaaccaaaataaatactttctactgaaatttggttataaaataatcattaaaaatttaataatttttaaccaaatttccaaaaacttatagattaattacttgtaatatattgataataaaaaataaagtgtccaccataacacattatttttcacatcaaacaatcaagttttacaaatttagaacaataaataatgggaagatgtgaatgtaagaatattggtagagactacatagtcaagataaatcaaataagagagtgactatgtcaaacagaacgagaaaaaaacccagaaaattttctatgatttacggatttcgaaaaattatcaaaaattatttttaataatttttttaactgcttaattatcattaaattaataataa

SEQ ID NO: 152375 - DNA, 657 bp, Cannabis sativa
  modified_base (603)..(603): a, c, t, g, unknown or other
tgacaattaatatttcgaaatccaattttctctctccacagctgacggttgcactcaattaattttaatttcccatattcgtttttgatgcgggaagctgaggtgtctgaagtttctttgagacagttacctctttttgtcccttgcctaaataaccacagattggcacataaactcatttcatcacccttctttgctaagtaagctccagagcgaaaagaaagttctctggcttcaaagtcgccaaagtgccttcattcaactgctggttggattaaacccagacactcgaatcttgagtaagtttctgatttcctttatgcttatctttccatgtttacattttgaatgaaacttttactgtgctgtagaaaaatgcttaggaaattctagggctagaaacttctgcgagtcttctttatcatgtcttcatgtgggtttatagccatacaccttgtctccgaactgcattgtgtccgcctttcatcttgcttattctaagcttcatgaacttttttaccctaactcaagattttttttttacttcttgagttctgacttttgtttggacatagccgtcctttaatctgttgggtactcctngtcggcatatttgcttgtttatcatttgatattccgtccaacactcatctcgtg

SEQ ID NO: 152376 - DNA, 539 bp, Cannabis sativa
aactatgtccttcccccacttcatagattacagaagcttcattggtcgggaggacattattggaacttattttactaggatctagatttactaacgtgtatgtttgatattttctttagtctaacatcctaaacatgaattttctaaaacaatgaataaacacatgtaaagttcaagaaaactttacattagtggcagcaaagtatcatggatgcttccgttcagatctctaactcttgttcctttctgtcgtagagtattgccaagatctgaacctagatctcctttaggtgatggaattcttcacaatcctctacactatgattgagtattaacttgagttgtgtgagcaaggtaatcttcactatggggttcgaaattatgaacagaaggagagagtaattcaaattctatatagagatgctctcaatttttagttatctgacaaagtagaaaactaggttattaggttatgagagccatcttattctttatataggatttcatctagggtgagaatttaaattatatgaaattaa

SEQ ID NO: 152377 - DNA, 714 bp, Cannabis sativa
gaaggcggggacggagtcgacacaggactcgaattgtgagtagaaccaccaacctccgattggtaaaggacaatgtcacgacagggattatacatattagtctcgagtgtagattcaactgcaggatcaacagtagttgacacagatggaacgaacatggcaatagggggtactacaatgggagtggtattctccattttagagagagttgtgaatgttgccagacttaggttttctaagagtaaagtgaaagagtgagactattcactttccttaggccttaaatataggctccctgacaccagctgaccaggcaaagaaaactaatgatgatttttttaaaaaaatttgatctttgccaaaaaaatgtacacacccaaaatgaataatttccaccacataatacggcacacaaaccgaaacaaacccaaagtcaccaggtaatgagagtagtattgtgacttgaaaaatttcaaatatgccaacaatatttgcacacaacccacacttgaaacatcagataaaaacatagacacttagagatactcaaaattttagaaaaaaaacaagtaacaactgatcaatgaatatgattaaagcccctcaatattaaaaaatgcacaccctgagcaacagatcatttcagcacacccatccacaatgatactcatgggatcactaagacttgaatctctatacgtgtgtgagcagtga

SEQ ID NO: 152378 - DNA, 515 bp, Cannabis sativa
  modified_base (461)..(481): a, c, t, g, unknown or other
ttatgcgtgtcactaaatagtgtctctaaaaggtcaaattgtagtagtgccggttatggtggattcggtgacaaaggagagagatagactgacttatcctagaatcttaattgaggttaggatggaccaacagtttccaggtttcattgattttgagaatgaacatgggtttaatgttcaggtgggagtaaaatatgaatggaaacctgtgagttgtaatcatggctcagcttaggccataaaacagaggaatgtaggaagaataccaagggaaagggaatggattgtgaaggaagacaaaggcagaaacaaaagattatagataaagatggtttatggaggtgacaaaagggtataaagctgcagataaaactgctaccacagaaactttagaagttgataatgatggaaattattttaccaggatcttagatctactcaagtatgttgattaacacccnnnnnnnnnnnnnnnnnnnnnattatgaaataaacacatattaagtattagaaac

SEQ ID NO: 152379 - DNA, 651 bp, Cannabis sativa
caacaaatagctcaattaacctccatgatccaacaacttgctttaggccaatagataaagccatgtggaatatgtcaagttgtggggcatactactgatagttgtcctactctctatgaagggacaacagaagatgttaatgctattggatgtttcccaggtcaaccaaggcagcagtataatccatattcgaacacatataatgaaggatggtggaatcatccaaatctttgctatggcaatcaacaaaatatccagcaacctacaaaattgccttttaattatcaatagtggacacctgccagacagaatcaagcaccacaatctgccccaccagcacctcccaaggctactactgaagatcttattaatgccatgttggctgaaactcgataattcaaacaagaactcaagcagcgttaaaaagtttagagaatcaagtgggtcaactctcagaatcatgtaatcaaatgcaatctcaattgttcaatagactaccatcccaacctgagaaaaatcctaaggagaatgctagtgcagtgactttcaaaagtgggaaatactacgacccacctatcatcccaaaaccaaaaccagtgccatccaaaccacaagatgatagtccaaaagatgaaaaagaggcacctaagc

SEQ ID NO: 152380 - DNA, 789 bp, Cannabis sativa
gtgctaggcaccactggtgcctaatagcaatgctcgataagaaaataacaggtaaataatgacataatatttaatggtcaaatacctaaatttaagtatttgagagaccaacacttttttagggaacaaatattcactcatataaatatgttcatagacaaatgtacaaaagttgtagggttaggcttgagttaaagcggactaggtccgcgcttaaggcctactcggtacaaggaccaaaaaaaaatattttccctttaaaaatattacatattttttgaataaaatgtctaataatttttattttcttaagatccaccaaatctcaaagttggctttagtggcatggtgtcttgacctcttgtgacaaagcaaaatatgtaaaccattatgcctaagtaattgagtaaagagagaaaactcaaaagttaaaataattttttttaaggataaatactattttggaccctgtattttgtaaaaattaccaattggacattctattttgttaaatgacaaaattgattctgtgttttccaaaattatataaataggaccgtgaactaattttttgtcaaaataaaacttaatgataacctgatctagaaatgttatgacaaaactaattatattttctgtatctgttcgtattagaaattgtcttaaagttggttatattaaaaattaaaattgttgaaaatttatttcaggttctattttttactattttggaaaatataaggtccattttgtcatgtaacaaaacagagggtccaattaataactttt

SEQ ID NO: 152381 - DNA, 978 bp, Cannabis sativa
tgagggggctgctagtgtccaaaatatttttcagcaaacaaagtggcaagttaagaatagaatttcttttgttatgccaaagaatgtaaagaaagaagaagttgaatgatttgagaaattgtaattaatagtgaaaattgtatagaatcatatgacatctcttgatggtcattaggtgtaaaattgtttgtgtggaatgaaagtctgattcataaaaaaaaaatgaattgtttccaatatacgaaaaatagactaataggcttattggtgtatatcattatctttgattatagtttactttactttatattgaaaaaataaaacaatgttccaacaaacaaaaattagtaggtttattgacatatatataatggtagattatatgaaatgacataaattattgttccaatatacgaaaaaaaaaaatttatttcaatgtgtcaaaataaattaatagatttattagcatatacgatgttaggctatatgaaaaatgtaaacaaagaatgaaaatttgttttaatatgccaaaatatattaataaatttatttgacatatatgagtacaggcatatctgattatactatatttggtatgatcatcatcttttttattttaaaattgatgattttatcaaagtaaccaattggtatcttatcgaaatcataattaattggtccaaaaaaaatatcgtatttgtaatgatttaaaaagttacttataactttattctttatttaactaatcaaaatacatatattaatttacatttaaaaaaaaaatgtgcgacttaaacatttatgatatatatttcttaaaatacagtttactaaaatagtattatactggatgacaattcattcttttaaaaaataaacttaaaaattactcaaaaatgtattaatataatctaaataattaattgattattaaaatgtatacatgtaagttttaaaggtaaccacgatgtatatcaa

SEQ ID NO: 152382 - DNA, 1035 bp, Cannabis sativa
  modified_base (986)..(990): a, c, t, g, unknown or other
aagaggttttttatttttacatttgaaagcaatttttttttttttttttttatatatttttacggaattttttacatagaaaatcacatatagcaaccaacaaagcaatctaaattgcaacaaaaatacacgtaataactgatataaaaactactgaaacaatccaaatcgttaattaaaaaaaaacttaaaaaaataatatatgagataattctcttttaaattaggataaataccattttggattctgtattttgcaaaaattaccgattggatcctctgttttattaaatgataaaatagactctgtattttctaaaatggtaaaaatagaattctaagcttaatttttgacaatttttttgaatataaccaacttgaagataattcctaacacgaacaaatacagaaaatgtaaacatttttgtcataacacctttagatcacattattattaaattttattttggaaaaaaatcagtccaggatcttatttgtaccattttagaaaatacagagttaattttgtcatttaacaaaacaaagagttcaattaataatttttgcaaaatacaagatccaaaatgatatttacactttaaattaatatatagatgttgcatacatatttgttcaaaaatcataataattatatttaaactctctatgtatacaagcactatttttttgtatctttcttatcatatacctatagcaagtaccacatattcagatataatatttaagcattatcatcttttatttcatatatcacccttgaagtgtattatttattacttatgaatgagtagtattagaaaaattgaattttaatgtttactttttcttttatctaattaaaaaatcttttatttttatattatatggactaaaattgttacatcagttaaaaaaaaaattaaaaaaaaattcagcaaaaaaaaaaaatagaattaccccatatattatttaactttttttttttnnnnntttaaatttacgatttgagtttctaaagtggttgtagcggtagtt

SEQ ID NO: 152383 - DNA, 525 bp, Cannabis sativa
ttgatattttctcaacctaggccacttaaaatggagttttttaggaattttttcgagcatcttctctttcttcaaaaaatattgagattcaactatttttgggggcctaacagaatttctgagggggtagaataaggtcccaacgccctagttaacacctagtgctgggcccagtgcctaggttaacacttggggcttgccctaggacccaggttgacattttgtcaacttgggccgtttcctatcaagttcagcaaaaagttccgaatatttttcccgtcatcaagaaataacaaagattcaagtaaactcgagggaaaaccacaaacccaagtccctagaaatagggcccagtgcccaggttgaccttgggctaggcccagcgcccaggttgataatcaacatgggacgctgccttcaattgctcaaatgccaaatccaatgcaactattaaatttgacatggtcaaaattggaggaggagaccctgtcctcaagtttagaatccttgaaagtatcaaaaata

SEQ ID NO: 152384 - DNA, 671 bp, Cannabis sativa
attttttttaacattttttttcttaatcaatattttggactccgactctaacgtggaccttgttacctggactttgactcgaccccagactcgaaccacagccccaaccccagacctggatgtggaacctactttaataaaaaaaaaatgaaaataaaagttacataacacattttgttttttgtttttaaaattaagaaacaaaagtggttatagaatacatttttatatttaaaaaaaaattacttatttttgtgattaaaaaaattaaaaaacaaaggtggtgtttagtaccacttttgtttttaaaatttttaagcacaaaaataaaagtgaatttttattttttaaaattttatttttgaaaaacttaagtgtgttctataacaacttttgtttttcaaatttaaaaataaaaaataaaagtatgttctataaatttcatttttatttcttttttgttgattttatttaagtcgggcctaggactgagtctgaggtcgagaccaggggcaggtctaagtccaaggccaggtcctggttcggtttctaagatctaagttgagatcggagacaaaaatatagattaaaaaaaaaaaattgtttaaaaaaattataagtaactttttttgtttttaaaatttaggttcttaattaaaaaattaaaacgt

SEQ ID NO: 152385 - DNA, 520 bp, Cannabis sativa
ttgtttctaaaattttgaagctgccaaaggatctttctgccctttcgagtttgatttggaagatcagtctctctttattctccttttctaatgcaacaatcatttacactcctagaagtaataattctctggcgcataagctagcacaaaccgcattaggaactgacgaagaggatgtctggaacaattgtgtttctagtcacctttagatccttgtaactggtgatttcttgttgttcttctttaattacaggtcttgtctcaaataaaaaaaaaaaaggatgtgacttgaagagatgattaaagctaatattaaaattgttggtaattctataatacatctcacaagggtatattttgtatattttttttttatctcttttagtattcataaaagcttttaaatttatatttgttttatgattatgtacattgacattatttaaaattatttgtaaaataaaattaagaaattgaataattaataatattaaaaataaaattcaaatattttattaca

SEQ ID NO: 152386 - DNA, 535 bp, Cannabis sativa
agatatagaaagtgtatatatggcaactcagtcactgatcccgtacaaaaaacctggacccatgaagaaagactccaacaaaagggacatgacaaagttttgccggttccacggagactacggccacgaccctaatgaatgctacaacctaaagttggaaattaaattcctaataaggaaaaacaatccgcacttgcaaaaatatgtcaagaccaccaaggttagaacaaccaagatttgctacctccaccagtagatggacacttgcaagtcattgttggaggtccgcacattgctagagattcaggtaaagctcgggagaggtatgcccgaacagaacagcacatacaagaagaagtaatcctggctgtggaagaaaggacgcccaaagtttcacgggcaggagagccaaccatatcgttcaacgatgaagacgctatcaaagttaaattcccactcaacgacccgctagtcgtggaggtccagataaccaataagatggtggccagaactatgatcgacaatggagcctctt

SEQ ID NO: 152387 - DNA, 992 bp, Cannabis sativa
  modified_base (280)..(284): a, c, t, g, unknown or other
atagggatccggatacgaacctggactcggactaagacccagactgggatcgaactgctgaacctagatctggacaaagatcctgctttagacacaaacttggacccacccccggtatcccaactaggacctagaccccgaaccttgacccagattggggtctagacctggacacaaactcggacccgaactcgaacccacacctagaatcaaacccaaagctagacctggacccggaccaaaactcgaacccaaacaaggatcagaaccaaggacttannnnnagaactgaatctagactcagattgggattggaacttggaactcacacccaacctagacaaagacccttgacgcgaacccacacccagagcctgatgtggaccaagactgaaatccagacccaaacccaaactcaaagaaggactcgaactccgacccgaactcaaacccaaactcgaacttagaattgcaaatggaactagaaccgaactaggactagcaccaggaccaggacctaaccccaaacttgaaccaagataaaaacctatacagagacctaaacccgaaccgagactaggactagaacccgaacatagactgggacccaaacccacacaataaccaggacctgaacccagaatcaggatatgtacctgggaaacagaactaggattgggacctagtacccaacccagacccgaacttgaacctaggacccagcatgttacgcagcactagaaatggaaccagactgcaacccgagattgggatctggatctagacccagggcttggacaaaaccgtagttggtgtctaaatttgggacccagccctggacccgaaccctaaaaaggacctaaacccacacccggacctgaaccctatcccaaacccaaaagtgaacccgaacgagtaccctgtgacgcaaaattggaaccgaaaaccggaagttgaccgggactagaactaggtcttggacttggaatcat

SEQ ID NO: 152388 - DNA, 552 bp, Cannabis sativa
taattgtattatatatatattagacttttaaattattattttctttacattaaaatattatttatatatataattttttaattttttataaatatatatggattgaattggatgtgttacttttatatgtcaattaacatttaatttgcacaagtgcggattttgaattttctaatccaatcaaatccgcataactgtaaatagtcgcactttacgaattggattgaattgaatcgtacagattagattgaatcgaatcgtacggattagattgaatcgactgttttataaacacacctaataataatgtgttttaattattaataatcaattgactgtagaaaatacaaaagaaacaaaaataagtaacatgcatatataaataaacggggttacactgtctctctgtaacagagattacagcagatgaagacatagatattgagtactagtagtactagaatcaaaaaactggaaaattcactgttgagtcggcacaaaaaccaatgttgttaatgtattcaattaatatgcaccgctcatatatatata

SEQ ID NO: 152389 - DNA, 561 bp, Cannabis sativa
  modified_base (76)..(77): a, c, t, g, unknown or other
ccgactctgattttgagttagagcgagcaaagttccaaagtctcccaaatctgagaagtttttttttttttttttnnattgatcttgtgttgttttaaggtttttctcaagttgattatattattatttaccatttctcttttttttttttacatgttttttttgttagtcctcctattttatggttttctgtttgtttgactctgtgtcttgttgttgttttggttttgttttgttaactcttagggaaatggtaagtaccaagtgaagattgttcaatcaactgatctgtttgaagacataattagaaaaagagttgttgaggtttgtcatttcattattttagttctaatatttttttatgcttgttttttatgttctttattttattttatttttcgttattttagttttgttttagtagtgtttttttatatttttttatagaattgggaatccaagaacacccaatcggaatactactattctagatttataacctctggttattactctgttattgaagatattaaaaaaaattcttactgaaacccaattaaa

SEQ ID NO: 152390 - DNA, 532 bp, Cannabis sativa
aaaaaaatgtaaaacaaaaaagaaaaaatataaaaaaaatgaaaaaaaaatataatttttattgaaacttttttatcatgtcacaccacatattatgtatactttcctttatattgaacttatttctccataattacaatatttataaaagaaaatagctataaaaaaaagaaatagctaataaaatatttttatttgttaaaaatacatataatatatatttttaattaaaattttgaaaaaaaaattgtaaatgaaattttatgatttgtcataatatattttttattttattaagtatttattataaatataattctaataaaataataaactaaaaaatatagctaggccaaattgaataatcacaaaaacatcactcaactacatacaaattttgtgagtagtgacaaataaaaataatgcaagaaatattttacttacatatatatactagtaaaaagttatgtgtgaggcccgtatactaaattttatgttaatttttttgtatgttatttgaaagtgatacaat

SEQ ID NO: 152391 - DNA, 720 bp, Cannabis sativa
  modified_base (80)..(80): a, c, t, g, unknown or other
ctcaagagcctcggccgagttccatgataccaaacccgcttcgaaccaactcgagaacaacattgcatcaggcgccacancagtaattggaaccttgctccagcaacttcgagcaaaaaagcactgcaccagcacatgcagaattgtctcaggagcagcaaggcaaaacagacacgttgcatcaattggaacatgttttgtggaaagattaaaccgagttgggagactgttggtagaagctctccacagaaaattaagaacatttggagggagctgcaactaccataatagccgccaaattccagagactatctctgttgggtttcattgattgaagcagagaatatgcactcctaacagtaaaaactcctgacgcatcatgtaacaagtaccacaaatcagtactcatatgactactgagtgaaatcttccacaccaaagctcgatctctagcagtgagcagatcagctaatacttccccatcccattcaacctgctcgactttcattaaagagtcgaccgactttcccacaaaacctggatagacagattcaatgaaagggttcatctcatcaggaagccaaggctcagacaaaatattgacggtagaaccatcacctgccaaccgccgaaccccagccccaactaactccttagcctcaaacacacttctccaaatataactcgggttactccccaaggtcgatgtaagaaaagacc

SEQ ID NO: 152392 - DNA, 645 bp, Cannabis sativa
gggtatgaagagaagaaagggcggttgaaacatttgagtacctctcttacaccagcattaatggaagagtctatcaatggacgggaagcgaatcgttgcctgcaaaaggaaataaaaatcaacgatgacgatcattaatgctgcacacgcgcttggggcacgtgccactttatttataaagatcggagatggctcacaagtctcatttacccactactaaataagcttgagaggtaaatgttgccccaattttttccgaaaatacatgaccacgactatgtatgacacatggacctagaggatacttaacctgaaaattagttaaaaattgtatagaagagaataagtgtggttcggggagtaatctcccagaccagtgtaaaaagcacaccttcttttatgggagttgagataagtaaggcatctccaggatgagaggggtctattcgaacagtcacctcacatttaatgcagcatggggaaagtgtctggaaacgcccattagaggacaggtcagacatcgtaagccttatttagggtgattacacgataatcaaaggggatagtggtagctccattatgaagaatcacatcaatcaaggaaggatgaaggttaatctcacttaatctctatgacacctacta

SEQ ID NO: 152393 - DNA, 670 bp, Cannabis sativa
taaaatagtatctaacaatggaactcagtttgatggtgagttgctcactgagttctgtgaaaggaataaaattattaagagcttctcgtcagtttcaagaccataagcaaatggaaaagtagaagctgttaataaaaccttaatggatactatcaagaagaagttggacgctgcaaaaggaagatggatagataaactaccaaaagtactttgggctcatagaacaacggagaaaacaacaacagggcacactccattctcattagcatttgcctcaaaagcaatgctaccagtataagttaatattgtgacccacagacgtgaattctacaatcaagaagaaactaaaaacttcttaagttgtccttagatttacttgaagaaagacgtactgagtcgcaaataactaatgtagcttatcagcatcgaatcacgaggtactttgataaaagagttaagaaaagactctttaatgttggagatttagtgttaagacgagtatttacaaatatacgagattcgtctgctggagtgtttaacccaaattcggaaggtccttatgatattgaagtagtagtaggaacaagagtttataaattagctcagcttaatggctcgttaataaagaatcattagaatagtaaacatttacgacctaattatcagtaaa

SEQ ID NO: 152394 - DNA, 511 bp, Cannabis sativa
ccatgcaaatggaaaactgaattgatgaagaacgttcaaatttgatatttgtttagttcattttacaaagtttttatttattggtttacttatcacttgatgtaatcttcttaaaataataatgttatttctttatgtatgagaatttcaattgggtggtccatttcgagattgatctaagtaataaaatatttagattaaaagtcagcattaatttgttaaaatcttgatgatatttttttaatccataatttgttcaaatattagtgacatgcaatgtaactaaatattaggatcggtaatttaatgatgtaattaattaattgttaagtaataaaagaatttttttaaaaattaaatgtgtgttgagtatttaacaagtgtttttgaatatattttgggactctaaattaatacttttttgaaacgtgcacaacatccttggggaaatgcacccggtgcggtcggtaatcgagtagctctagaagcatgtgtacaagctcgtaatgag

SEQ ID NO: 152395 - DNA, 855 bp, Cannabis sativa
aatacttaggtatccctatttgtgtgaaacgaatttcaggaaaggaatgtatggttctagcagataagatgacagccagaatcaaaatatggagtactagaaacttatctttgccagggagagcagttctggttaactcagttctcatgtcaattcattcatattggagccaagttatagtgcttccaaagcgaactataagggatattgaagccatctgtcgagcatacttatggaaaggaaatcaggtttcacaagggtcgggtccaattgcttgggaccatgtgtgccaaccaaaagcagctggagggatcggtttgaaaagaatagcagaatggaacattactgcaatgacaaaatatgtatgggcatttgcaaacaaagaagataacatgtggattaaatggatacactgtgtatacattaaaggagaggattggtggacttatcaagctccacctcaggctagctggtattggaggaaattgaactcgattaaaacacaaatcaaaggtgttatggacattcagcaattcataagcaccaaatacagtatatcaaatggctacaaatctctttgcccctcacaaagtaaagtgaattggagtcatgaggtatggaatagactcaacatccctaggcatagcttttgcttgtggattacaatccaagatagacttaaaactagagaaaggttgttcaaacataacatcattggagaagactatttcttgttctgtatggatcatcgcaccttttcttctcttgtcctttctctactatttgtctctctcaagttaaagcttggctaggatggagagttgaaacaatagacttgagcagattgtgcaggtg

SEQ ID NO: 152396 - DNA, 671 bp, Cannabis sativa
  modified_base (619)..(626): a, c, t, g, unknown or other
aagcaggtgagccaacattactccttgtggtaaaattaaattaccactcacagtcaaaattaccctatggcaaatattactatgactacctttatagtgatcgataccaagtctccttggaaggtcatacccagcaacctttaagccatctcaattatctacctcttgtctgtcaagttcatgacaatagttggtatcgactgcctccttggcaactaaagagtagaatgcaaatgttacaacacatcattgacattcactaagaagacctcctcaactgttctaaggggatgaggaacacctcttttgctatgataatagcctaggggaaatggaagacctgttttgctatcaagacaactaaggggatgaagaaggcctcttccattgtgaatacaaaagaagggatgatggagacctctaaggttaagaccaaggataaaatggagaccacacctacaattacactaaggtgcatccgagatggggaaaaaatcacccccatcttgggcatattaatttgagagttagtcacatcctcaattgaccaaagaataacaactaactactacaacacatcatttacaatcattaagaagactgttggaaattattttannnnnnnnttagatctactcacaagtatgatgattaacaccctaaatatgaac

SEQ ID NO: 152397 - DNA, 669 bp, Cannabis sativa
gatgaatccaaccaatagccaaggcgtagacagaccacctccatctcgggtgatagaacaacatcccaccgagagagagagttcaattcaacaactaaacaaccagaaaggtaattccatacatactcattacattaataattatcaacagtctagtataaatactaaggataccattctaaccataaactctactcctccatttcaaattcgggctgaggattgcattcaagaaactatgaatcccaatcagcaacaggcagaaatggcaattaggaagagaatgggaacaaaattggggaaggaggcttcaatgagtccaaacaagaatagatattgcaaggcaaaatttaatgaaacagcaatagaagaattggaatcaagcggcaacctattcgatgtccccatcacctatgatgctgggaaaaataaccaaccgaaaagactaagggagaaaaggagaaaatttgtgccaaagtcagcaactcgtgccaagaatcaagtaatcgagaccaaagaatgggggaacagttttgatgctataacaggggaagtttcaatgccatacgattcaactcctgaacagaccaacgaagcggcgaactctgcggagcagggtcgccgaggactatgaattctctaatctggaatgtccaagggattggcaac

SEQ ID NO: 152398 - DNA, 595 bp, Cannabis sativa
  modified_base (568)..(569): a, c, t, g, unknown or other
taaactattaaataagatgatttttcaccataaatcttcttgatattgaccgaatacatattgttaggcttagcctttcatattaaacttaaaatgattatattttattgcagattgttttttctcgtcctggcaatgtggcaacctttactgatccatataatggtttcccttctgccaatggagtttgattgatgatgtccttattattgaagtaaaacctattttaatattactttaagacttactattatattctattctatataagaataatgccatcctcctaaattggttgttttaaaacttattgaaaactcagttatatatatattgacttatatggtctctttggtaattgagatgatactgcttttagatttaattaattaattttaattaatcaattataattcttgttggaacttttgtgaaattgtataataataaaaaatgttaataattggagtcccacatgagataagaacactttattaaaagtgtataagtagtgcatttgagaattgcgcatgggtgaggactcacactgtaaagaccgcttagtttnntttagaaattagcagttaatcatgtt

SEQ ID NO: 152399 - DNA, 1023 bp, Cannabis sativa
tgcccttcaaacactgttctacaacagtatttctctactacctaaacctcaaaatattggactcaatatgacaatctagacccgtcacgaaagaaaactcctcaacactgaacctaattacttttcgcataacattactcacttttgcgttccatgtggcgtgtggcctttttgaaactttacattcatgtcctatgtggcctgagacctttttagaacactttctttcatgtcctatgtggcctaagaccttttttttagaatattactttattttcaactccagagccttcatgttcgtatctttagccataagtcctgtgttttttaacactactagtatttgaccctattgcttttttatatcatgaattgtgtgaatatccaggcggtgtttaatcttggcttcttcttatggccttaacaagtaagagtctggatttacttttccaagttgaaatatgcatgcacgacttagagacaagtttaatagcttatactaagcatttaaatttatctacataagttctttgtactagttcgatgcattgtacagtatgggtgccccccaagtgatcatgtagagaaatctcttggtcacttgctattcaccaagtttcacagactttgcctgggttctatcttgtagggtaccatagtacgcatgtggaactaagagaataactttaaaaagttaatctgtgagcaaatggttcatagacacaataaacaaaatataaatatcgatatcattcattaattggtctttgttgctgtgcaacttacataaattgaatctacaagcctatattatacaaatttagctttatcgaatctttatgctattagtaaatatgtgtgggttattactaccaagaaggacaacttttagttaaaattggttaacgagatgtatcttaaaaatcaagattgatgggactactaagtcccttcggaggctaattggtattggaaaagaatagttcaaactaaggaaaagataaaacaagtcttctcccaaaa

SEQ ID NO: 152400 - DNA, 529 bp, Cannabis sativa
atccacataattattaatatttataacattctaattattattgttattttttctttggttttgtagggaggttcacagattagcagaagctaaacttatatagctttagtggttgcactggattgatctcttgcattggactacctaataaatcgttgggaaattttcatgaggcacctaaatttggaaattatttacaaaactaactttgtttttgtgagtagaattgatttttacatatcatatctgtttttctatcttaatatcaaatataccatactcaatttaataagctatttcgttgccttttatacatatttaataacatttttttttcatatgtagtatttaaaatctcacctacctcatatatatctttattgattttttattttctttctatatatgtatttttttaaatgactatagtagttgttagtggccatttaattcacaaaaatatataaatatacccacaagtgacaatttaattcacaaaaatatataagcatatacaaaattcattgcc

SEQ ID NO: 152401 - DNA, 567 bp, Cannabis sativa
  modified_base (98)..(118): a, c, t, g, unknown or other
aatagtggcaaacaagatcaaaaaggagacgaaaaactcatacaagagaggccctgggaaaataattagaaagctaaataagattgactcgtggactnnnnnnnnnnnnnnnnnnnnnaccacgtaaaaaaccctgtgttcaaactttttcttttatatcttttattttttctttgtgaaatcgttactgtgaggctcaaatttggttaacgaaaatttgcattaacaattatagaattataaggttatatatttgaatattaggtatattttaaattaaatgatagccttatcttttaatttgaaatattatatattaaaattaccttatatgataaattaaataattataaatttgaaatgaacctaaatatttttatagatattctaatcataatatttttcaaattccaaattggttattttgtggaatatttaattgtttataaattataagttagataaatgatattttatatcattttacttaaaatttataaatagtaatttaaatctttacataacctagatatttttgtacaaatttaaaaaaagcttaatttgaga

SEQ ID NO: 152402 - DNA, 564 bp, Cannabis sativa
taaatacctaattggaatatcggaggtaacttttgttataaatttattatcaataattagtggaggttgaatatcttaaatattcaaccatagtgaagtaggttctacgaatacatgtgctgcggtcggatggatgaataaacaattattttatctgttttgtttgttattaggcatgtttaaaaaatttggaggcattcagttacagtcgttatgctaccaaaaatttagtagaattaggatcaaatttgatattatatggtattttgtataaggtccactagctcaaccaccatcaagacgtgatgtgtcgaaggataaaggtcccatgccttctcgaaaacacggtgttgatcaagaagatgaattattcacaccaaagatcatggctttaatctctaagtcactaaaatggatggttgatgaatttctaagagtcaaaaataaacgtgatataatcacaattcgggtaccccgaggattcatagcacttcgtacccaacgttatctggagaggatttgcagcaggtggcattgtgtgacttcattggcaaccagggaatg

SEQ ID NO: 152403 - DNA, 552 bp, Cannabis sativa
gaacacatccttaaggtgattgagacagtttttgagctggggattcttttcttgcttagtttcagcatccaaaagcacatcttggaggacggatgtctttcgcttaagcttgttgagatcatctttcatgccccatgccaagctaatctcgttgtaagcaaaggaacccaacttgcccaagacatttccagctaagttgtaagctagatctgccattttcaatctggatgaactgagaaaagtagtgagttgttgagacttagagagagtgagtgaataattaagataagagtagttggcctcattatgatcgtttttatatattcaacaactcttataatataattaatagacccaacattaattgagcaacacactgtgttaggggcatgtacgatattataattatgcatgaacaaaacatatttttgttttctgagcgttttttattctatacatgaataaaaaaatataaaagaaagaaaaggagagtctcccttgatatatctatctattctatataaaatgtgcctatataactgaaattcttgg

SEQ ID NO: 152404 - DNA, 671 bp, Cannabis sativa
  modified_base (622)..(622): a, c, t, g, unknown or other
acatcagtgtaaattaaatcaataacattaaattttctagaaagtgaacgtgtatgaaaagaaactctatatgtttttccagctaagtaatgatcacgagttttaagaggcgtaccttgcaaattcggtaagaattgctttctagctagaggttgaagtcctttctcccagatatgaccgagcttctggtgctaaagatcaatgtttgcatctttttgaactgcattaatctctcctttatgtagcttagcttccatgacataaaaagtattcactttcttttctctcgccactacaagagaaccattggtgagcttccatttactttcaccaaaccaatttataatgaacccctcatcatcaagtcttccagtagatatcaagttaaggcgaaagtctagaacatgcctaacatatttgagaatcaatttgctaccaacattggtttccaagcaaatatctccaataaccacaatcttcgatgcaccactgtttcccattctgacattgccaaaatcaccagtagtgtaagaagtgaaaaaatcactacgagcagtaacatggaatgaggcgctagaatcaatcacccaactacaatcttgggtagcaagactaacacacncatcatcacatacaatgacaacatcaccttcagtggaaactgtattagt

SEQ ID NO: 152405 - DNA, 895 bp, Cannabis sativa
tccttcattcactgaattttgtgcgaaccatggtataatcaaaagtttctccgcagtggcacatccgcaagagaatggtcaatttgaagcagtcaacaagaccttgaaggacacattaaagaaaagactcgaagatgccaaaggaaattggccggaagaacttcctgaagttctatggtcatatcgaataattgagcaaacggtaacctgacaaactccatttgctatggcatatggatatgaagctatgctgcctgtagaacctgagccaccatcccacaagagattgatgtacaaacaagatatcaatcacgtactcctggccgaatcatttgatgaaatcaaagagaagcgaaccacatcaaacttaaagttgatagcccatcaacaaaaagtagctcggtattttaataaacaactgaaggctcggaaattcttcgggggagatatggtcctaagaagggtatttctaaacaccaaagccagtacgacaagtgtactcagacctaactgggcaggaccattcaagtggtcgaagttctctaatccagagcatacaaattaggtaagtatgatgaaaaaatgcaacttattctagtacacggtattggaatggggaacatttaagaaaatactaccaataaagtaccaggtcagacgaccatactaagtactgaaagaacatttacttttaagtgaatggcctactgggtagactacgctcaaaggtttcgacaaaaatgaaaaagtactcaggtgggatgaccaccatttaaagtacaatttcttattttttcaatttgttttattccatgttaatctaaaagatcaaattagatcaaatagccttgatgtaagttatgttgggttttatgccgcaaataaaactccattt

SEQ ID NO: 152406 - DNA, 654 bp, Cannabis sativa
aattttttcggccaaaaaagttcagaggacacaattcgatacatatcaaagttcaagaaaaaattactaattaacctaaaaaaaaatattaactttttatatgctaatataacatgtacttacattaaaataaaaataaaagacaattaataaaataacaaaactgaaagatgagtaaatcatatttgaaacaataagttttgttttggacttttgtcttttagtgtgatcatgatattttgtcactataagaggattagaaagaatacttcaattctcacacaaattggttgtcctaaatgaacccaagaacttttcatgaattacaattaattttatttttaatacgatagtatgatttttttttattatttttatgataacatagtgtttgtcttatcactaagattgaaattggtgaatttcttttttatgatatatcttatggttgtttgaacacaaaataatatttagtacctcttaaaattcacttttttttttcttagttatttttctcccattcttaatttgtcttttattctcatgattaaagtcttagtgtaatataatttgtcagtaggtcgtaggagggttaaagagtagcagattttgaataatttgattcttgttataaatattaataattatgtggat

SEQ ID NO: 152407 - DNA, 510 bp, Cannabis sativa
caactagaagcttcaactccttcagaattccttgtagccaaattgcttctttgaatgcctctatggtcgccatgaattctgcctctgtagttgaaagtgcttctaagacccttgcttgatgcatgatcaacatcaacatatcctttcaaagttactttctctgaaactctcttgtatgtcaatccaatatccaatgtccctctcaaatatctcaacaaccatttaagtgccctccaatggtttatcccaggatttgacatgaacctactcaacatgcttaaagcatgagaaatgtcatgtcttgggctaaccatgacatacatgagacaccccaaagccattgcatatggaatttcttccatctcttctttctcttctgctgttatagggctttcttccttggttaaaaaaaactgtcctccaagaggcactgaagtgctcttagaatcttgcatcttgaactttgttaagatcttctcaatgtaattcttttgcttcaaatgcatgact

SEQ ID NO: 152408 - DNA, 609 bp, Cannabis sativa
agttgggattggatcggtcgattgagattggattggataactttctgcacacccctattgacacttgcattgaaacatcaatcacaaaattaaatctttcaaaaagttatcaatcaacaagaaagacaacactaataataatttataataataggaaatcaatgttaacttcaaaaaccatcagattattattattattattagttttgtaacctaaaactattagtatattgcattttagtccattttaagactccataagtaggaactcacttctattgtttaagtgtgtaatttttagagtagagaaactatagcaaaattcctctccacttttcttctcatctttctctttagaaattttatgggaatagttagcataatggcataatcttccttggaaggttagagatgattccatatgcaaagtgagattattttgtatctttgattcactttttgttgtaatatttatttgagtaatgcaagttcatattccacttttatttttattttctttataaatccatactactatatatactattatataccaaatatatatatagacttagtcatgctctttctatatatttttatttagtgatt

SEQ ID NO: 152409 - DNA, 651 bp, Cannabis sativa
ggtttaagttattttgtgttacttgtttttattcattatgttacagaaccggttatattttaattataatcggtttgagttactttgtgttatttatttttagtaatttcttatagaaccggttctatttttattatatccgagacatttgatccccactttttttttaaaaaaaattataaccggttttatgaggtattatgtgttatgaagtattttagtatgaaactagttttttatttaatttatatttcattgttttaggaactgatttcttctttctttttaattgtaatcggtttgagttattgcatattacttgtttgtatccattatgttatataaccggttctattttagttatatcaagtttgagttctttcgtgttatttatttttattcattataacactgttatagaaccagttttattttaattataattggtttgagttattttatgttatttatatgtatttattatgttacagaaccagttatattttaattataactggtttgagttattaggttttattcctataaccagttatatttttagttattgtgtgttattatttgtgttatttattttgttatggagttggttcttttcatatttatgcctcagtatttttttcaaattgatcc

SEQ ID NO: 152410 - DNA, 517 bp, Cannabis sativa
gtcgggttataacccgtaacccgaaattataattttttttaattaaaaaattaatacttaattaccaatttaataattaatgtcatttcaaaaagaagcctactagactattcatattcttcaatatttgacagaagctaagcctattacaactaatctattagtgtataaatgtggcgtgcacccctaaaatttattattagtacttttttaattaaataaataataaatatttatacttagcagtaagtaatgcctttccacgttccattcttttttgaaattcaaaatcctacaaagtcaaatttcatcactcccaatacgattccggacccaccactaattttatatttataaccttttttataaaacaattataattttttgacaaaatattttttttttgagacctcaagcaaaaggaatgaatctcctcccttcttctgttttcatatacaatgaagcaatcacacaacgattcaacaaaagcttgaggtcttcaatgctttcgtccaca

SEQ ID NO: 152411 - DNA, 907 bp, Cannabis sativa
  modified_base (870)..(878): a, c, t, g, unknown or other
gcataaagaaaaacatcctccactctgatgccccgcccattaaggctccaaatgaacttcacccaatcccaaaccctaataccaatatcacaaacagggaagatcccccacggagaagaacgccataagtgcatcgctacatcacaggtaagaaatagatgttccatattttcctcacccataccacacatcggacaacttgtattatcaatctgaaatcttcttttaatcactgctcgaatagggagagcttgggaaaggatgcaccaccagagaaccttttgacgctccatgatgttactattccaaagcttattccaaagagcaggggcaacattacacaggggcaacacaattcaatcaaacccaccaaaactttagataatttctttcgtaagaaaacaaaaataaaaaatatatgaatacagaaataaataatgatctaatttgagagattagattaccattgttagcaaaaaggaggtgttgttaggaaggaagtatgaagaggatgagtgagtgagtttgtttcattatttataagcgttacactaacattagtcacaagtgtgaattgtttcaccaaaccagttgcatttttctataatctgtgtgcctatacagatactatgggcctatggtccaatgggtcggcccatcaggcatatgagccccaaagtatctcaaaaagcccacctaaaaatctgtggccatatgacttgaagtgtgtattgcttcaccaaactaatggtatcttttggatgggcttttttgagatatgggctccctatgggcaacccattgtgccataggcccatagtgtctgtataggcacacagattatataattattttacaaatacacaaaannnnnnnnnaaattacaaaaatacgattttacggaatt

SEQ ID NO: 152412 - DNA, 506 bp, Cannabis sativa
  modified_base (255)..(257): a, c, t, g, unknown or other
ataatatgcaagttaaataggcataaaaacaacttcataaattacatcaaatacaagaaaaaaatacacaaataatctataaaataaatttaaaaataactacataacacttgtacacaaacttaaaaatatatctacgcatttaaaaaataaatatatttatttatgtttctttttgttaaacaacctaatagtaatgaataaacaacacaataacaattgtattttaatataaaaattaattgagcatcaacnnntacgtcaacttaaaaaataaaataaaaataacacacaaataaaaaaaacatgtatatatacatttatttttattggttaaacaactaaataacaataaaaaagtaactgcataaactccactacaatatacaaattacataggcataaaaaaatctaagaaagttaaaaatatcactaatgtataaaataaaataaacatgtatatatatatatatctattctatataaagagtgcctatataactgaa

SEQ ID NO: 152413 - DNA, 520 bp, Cannabis sativa
agaactttcattgtagagcacctagacacccggtgcttgggcaccctagcactttggttgacaatctgtcaacctgggccacttttcaagtgtcaaattgaacattcgactcattcatcttgtttgtcttcatcaaaagcaaggaaaaatgtgcttttagtgaagaaatagcccaacctgggtgctagaataagggcccagcgcccaggttgacattttgtcaacctaggccatttcctaggatttttttgagaagtcttttgggaatattctacgtttttagcaaagattatgattcaactatttctagagaccaatggaacttccaaatggcctgaagttggacccaacacccaagttgacatattgccaacctggcccctttccaatcagtttctcaaaaaagtattctgggctttttttctatcattagaaataatgaagatacaagcaaacttgggaagaaaaccctaaacccaagggctagaaattgagcccaacacccaagttgacctggtgt

SEQ ID NO: 152414 - DNA, 704 bp, Cannabis sativa
tagactctcaattttaactaattttagttttgggattatgaagatggtgaatctgaatctctttctagtgaatctctcaatgaaagcaccaaactattgacgtgatttttcgtcaacttaatctaagatgattattaattcaagaaaagaagagacaaaataataaatgaacaccagatatttttatgtagttttgtagttaaaatctacatactccacgagtcaatattatttttgagttttgattgtattttcaatttggctgagtttctgtaaattagaagtgtcccccatttccctttgagtgaactcctatttataggaataggatgatgattactcaatcttatcttagtgaaaagttacaattgacaggtggttaatgcccacgttttacgtagaagtgaatatttggataagtataaataactattttatatttaaaatacaaagaagtagtctttgaagtggtatattgacttggtcaaaccatgttatttgtgagcaggtgcacgtactgtgcaatacgaggcaatgcattgctgattgtatattacgagatagtgcatcactgactgtgtattactaggtgatgcatcattgctgtgtaatatgaggtgatacaagatctttgtattacgagatgttgaatgttttaccaaaataacatcccaacaatgttgaaatacctcattttatgaacc

SEQ ID NO: 152415 - DNA, 724 bp, Cannabis sativa
  modified_base (58)..(70): a, c, t, g, unknown or other
tgtttatttcattgttttataattcatcataggatattaatgaaacatacatggtagnnnnnnnnnnnnntggtaaaatatttccaacacaatattgggcgtatgaggccattttggaggtagggaagaggtatggcacgaatcatgggattccgtttcccaggatgcttagctggacgagcaagggtgatattgggaagaaagaagtcagtgcattattttctggacaggtatgaatttcacttatgttcagagtaataatttaacataaatgcttgtaataaatgttaaatggttttactatgatattttttgaaccataaacagaatcttaaagtggtgaaggggctacttccacggacagaagaggaggcatttgtgaggaccatctcttatgatgttgtggaaaacctggttgatggtggtatggatgacacagaggctgaggcagatactcaggtaccacacactcaggtaccaatttttaaaacttttttttatggttgtatacttgattgttttattgtttttgttctgtgatattcgtatgcttaccgtatttttttggtatatattttttcaggccagtggttcagaccctcagcccagtgcaccatcttcatcaggtgttcgtggtgctgagtacatcgatttagtggggaggttggataggatcgaggctgaccagaagggtatgtacgtttgtcatgccgagctgaagaag

SEQ ID NO: 152416 - DNA, 659 bp, Cannabis sativa
  modified_base (392)..(394): a, c, t, g, unknown or other
  modified_base (473)..(480): a, c, t, g, unknown or other
gttcctgaggtcagtgagcaactagctggtgctgatagtgactcatctctggatgtgttggtgggcggagtcttgaagaagatcaccaagttaagtcttttttgatacttcccttttaactttctatacttagctccatatgctggcttttttctttgtgcaggccggtttgaagttggcttacacttactcccgggctaaatctactacttccaagagtgtggctctgtccgacaccttgagggcggaggcgaacctggccaaaaaggaagctaaggaggccagggcagaaactggagctgttcggctggagttgggcgaagccaacaagaagctgtttgctaccgagaagaagatctctgtgctaacaaaggacctcgaagctgctgatnnnttgaggagaccatcgagatcttatctcttgaagttaacggtcttcaggatgagaggagttctctgcggcaagttcttcnnnnnnnnaaggaggagagggatgccaaggtggccgaggtgcaccaattgaaggagaaggtcaatgccctagagacagtaggcctcgagctcttcttcgatttctggaaggctaatccccaggccaattttgactacttaggcgaggctaaagacatgtaccttgagtactgcgcgacccaagttgc

SEQ ID NO: 152417 - DNA, 585 bp, Cannabis sativa
attttaaaatacagagtactaaataagcattattaaaaatacatggtaccaaacttgtatttagataaaacacagggtaccaaatatgtagacaccctaaaatttaattaatcattccgatgatattcttctcatttgttcaagtattcctattattacttttatcatattagtgtttgatcaccatgatatgaattgaaatctaaagtttatggtcaagaatgataactttatagtagactttgaaatacatgatataagatggtttgtgagatcgagagatttcttaaatcctttgagtgatcttttaattaatttttaaaatgattaataatttatggagaaggtttcaatggttacattaaatatgtaatcatgatggttatatttatttttagtcgttggatcattattagacggttatgattaatttaaaaaaatactaaaaataactaataaaatacctgcaacttgatactaacttaatttgatttatttctttaaaataaaaaaaattataaatattaatttctaaaaaggttttattaaatactttaattaaaaaataatttatttaagtctaaa

SEQ ID NO: 152418 - DNA, 640 bp, Cannabis sativa
aaaaattcggaatttttccttttttttttttgaaaaatgcactgcacaaacgacatgtttttgcaaaaagccaaaacgacacgtcgttttccattcttacaggtgctgaaaatgcatgaataaaacgacacgtcatttttcacaaagggaaaaacgacacgtcgttttgaaccataaagggctgcccaaaaccacgaaaaacaacctgtcgttttctacagggaaaaacgacacatcgtttgggcaaacgacagcagccaatatacatgaaaaatgacacgtcgtttgagccgtctttctcaaccaaactgggtcgttttgacccgtttttctgcacgcgggtccgacggacccgacccaaacccgatcggaaattgcattttcgacgaccaaaagactccaaatcaattggattaatgaatctaaatgcaaaaattaagacattcatatggatttcatgcatcgaaaacacgtaaaacaaagactttaaaatcaccaaaaaaatttcgggtccgaaaaactatttccaatttttttttttagatttatttgtttttcaaaatgagttttcatgtttagaacaatatatattaatatatgaatgtattgattcagaatgtataatgtatatataaacata

SEQ ID NO: 152419 - DNA, 595 bp, Cannabis sativa
gagaaacaacgtcctccagttatgggttttgccaaaattggaggcatcgctagatgcctttttatgttctggaaggcctctccgcactcttttctccactcgaaatttttgttgcctcgcaatatattgaagaatggcacacacttatcagttgactttgaaatgaatctgttaagtgcagccattcttcctatcagggcttgtacttccttaggctttgtcggtgatggcatatctattaacgccttgattttttcaggatttacttcaatacccctcgcgttaactatgaatcccaaaaattttcccgaggaaactccaaaggaacattttttagggtttagcttcatgttataattctttaataatttaaagtattccgcgaggtctaaggtatgatccctactctttattgactttaccaacatatcatcaacgtaaacctccatgttctgccctatttggtttgcgaacatttcgtttattaatcgccgacatgttgccccagcgttcttcagtccgaacggcatgactttataacaatagagtcccatgctggttacgaagcttgtatgttcttgatctgggacataca

SEQ ID NO: 152420 - DNA, 539 bp, Cannabis sativa
cagcgtctttgtctcatatttagagctctctgggtaaagaagtattttagactcttgtgatcagtgtatatctcacatttctcgccatataggtaatgccgccaaattttagcgcaaaaacaactgttgtgagttataaatcgtgagtagggtacctctgctcatactcctttaactgccgagaagcataggctattacctttccagcttgcataagcacacagcagagaccttgtctcgaggcatcacagtaaaccacaaacgtttccttatctaaaggaagagttagtattggagcggtaatcaagcgctgctttaactctaggaaacttttctcacaccaattagtgcaaacaaacttcaagttcttccgagtcagtttcattaagggtacaacattctttgaaaaaaaaaacctcaacgaaccggtcataatacccagctaatgccagaaagctcctaacttcagtaactgattttggtgttggccagtcccgaacagcctcaattttggctagatccaccatgatcccatcttt

SEQ ID NO: 152421 - DNA, 700 bp, Cannabis sativa
gcacaatagctaatgggctcccacaacagctcatgggctcgcacacccaattgtccctattcagtggccttagtattttgtccataactctctcgatatatgtcagaattgaacgattcaaaatgtgttggaaagatgagaaagagatctatagattttatgtttatgacaatatctaacttcgaacgcatcattatgagaatcctccgataattgtaacttagtaaattgatcttactagctctactcgtgagttgttacggggttgacctccaagttgcgtgggtataccccaagacttgcaagcattaatccctgatatgaacgagccttaggtcacacgtgttgattcagtcattcctcccccaactcttacagacaatatctctcgactgccaagactaattgttgactaatcttgaaaatccactctgtcgatttttggggttaacacacctcatagtggtgttagacatcattggtgcttaataacaatatttttttctaaattatcaaacagtgaatacaagtaaagaatttgtgttgacttcgactattattagttatgttttctttaagaagaattttttttttgttctaaaataaaagggacattattctttagcattatatattagtctattttatttgagagagtgtccacaaaaatactttctatcaatatctattctatataaag

SEQ ID NO: 152422 - DNA, 547 bp, Cannabis sativa
ttttatttttagaaaataaaaaatcaacttagggtactactttatattattttcaaaaatacacgatttgaatttacatttaacaaaataaagagtttaataatcgataattttttacaaaacactggatctaaaatgatatttatcatgtattataacttgtactattcttgaaaacatataataattttgtatacatatttatgtaaaagaaaaaaaaactaacaccctaaaatattatcaaaataagttaagtatttttttttggcttatgccgatttttaatatttaaagaaaattgtttatgcataaaataataaaaaggattaaaaagtgcatgaaaactatatataaaaaaaaaaaaaaggaaaatcatttcatatacttttttttttacccttttttttttttaatttttacagtttgagttgtttcagtagttgctaagtaaatttgggttacgatgtggattgctatgtggatttccataaaaatcaagaaaaaaaaaaggaaatttacaaaaatactgaaatttgggttaactttt

SEQ ID NO: 152423 - DNA, 710 bp, Cannabis sativa
  modified_base (433)..(443): a, c, t, g, unknown or other
ggaataccaagccaaaggcttaaaaatggagaagtatttagagatggttcggaagcgcttgaaaagatttaattattttaaaactgaacaaattccgagagaacagaattccaacgctgatgccttagaaaaactggcctcattgtgaattaacttggttccggtggagatgctaagcgagtcaagcatatgtgaaatggaagatgttgagatgatacacagctctcctacatggatgactcctattatcaattacttactcgacgggcaacttccaaatgacaaaaacgaggctcaaaaactattgtactcagtgcctcgctacacaataattgaaggcaaactgtatagaagagggtattcaatgcctctacttcggtgtgttatccctacagaagtgaatgaaatcatcagagaaattcatgaaggcttnnnnnnnnnnnatgcaggttggcaaagtctatctaaaaagatcattagacaatgatattactggccaacaatcaataaggacacccacaagtttgtcaggaaatgtgataagtgtcagaggttttcacatatacctcgtgtgccgccaacagaactaagaatgatgacctcgccctacccattttctatacggggaattgacttaatttgggcattacccactgggcgaggaggagttaagtatgcggtagtaatagttgacttcttcactaaatgga

SEQ ID NO: 152424 - DNA, 1094 bp, Cannabis sativa
cccctcctcctacacgggtggatcatattcggcgctgggcaaggtggcgtgctgggccacatgagggtcaaacgcattgactttacgcattgtctgtttagtgcgggccatcatcctatggctggatgggaaaattgaaccaaaatgtctgtcgcctaaagagggcagactagaacaaagacaacgatgatcctcgtgcaagaattaaagcagatcctggtcgattcgttgttcgcttccccaaaactcacttgggttcttctacaaaagacaacacacgagatcagtgtttagtcaggatatcgaacattaagcaggcaaatatgccgaccaggagtactcaatagattaaagaataaaaatattcgacaaaaagttaaaactctgaagtttgaactttttgtgagttagggcaaacattttatgaagctttgaataagcaagatgaaagacatgcattttgcagttcaaaaagcaagcattatgaatgatgaagttgcatgaattgttacaaaggaaaattgcagagtttctaaacctatggttttctacatattttctatagcaaagttaaaatcgcattcagaaagtaaatgtacaaagtaaaagtaaaagaaatcgagaacttactcaaggattgtcgtctgggtttaggttacgcaaagttgaacgaacaactctaatgaaaattcttcagcaaacttgaagctaaaaccctctcttttcgctctgaacttgcttagcaaagacggttggtgaaaataagtttgtgaacaaatgctcgatggtatttataggaaaaatagcagaaatgggtaatcattttagaaacctaagacgccttgtttcccccaaaagcgaatctgggaaatccaaagcaatcaagtgcaaccgttgaacgtggtgagagaaaatcggttttctaagcattaattgcgtaagagcatttattagccgaaaactgaagggacgcccagtcagcctcacatggagttgcacacagacgcgcctgacaattgtcacccatacaaacgcaaagatagctcggatgaagtctacacgcaactttggaattcccgtacagacttgggggg

SEQ ID NO: 152425 - DNA, 813 bp, Cannabis sativa
ataatttcaagaatgtgatgccgatggacacgacaccgttggatttagggagaataatagcattaaaacccactaaaggcacagacacgtgtaacacgggagttatttattggaatacaaacacatggcagggggcaaaaagaataaaagaacgagaacacgtgtcaataaggggataggtagatgatagataacccatgcaatcaaaaaggacgtgcgagataaatagaaaaagatcacgtaaaagagagaggattaggaactggaaaaagaaagacccccaaaaagaaatcttgactgttttcgtaagataatcaattaaagatatggcaaatgaacaggaggatctcacccctttcaacaacccagataacgtcctcggaacaccaccagacactggcgacgccggcgaggacatattaaacccaaccttgccatggcaagagatcctggaaaggctaaaataacaagaaggaagaatggcaacccagggaatggaaatttcccttcagaaggaacatatccaaaggcttgagagcgaaaacggacagatgaaagttgtcctcgaaaggtaccaacgaccaccgcatgcagaagaaaccggtaatcgcaaggtgggaggagggatttagaaaaagaatcacactaataataacgacctctcaagaaaccatacccgatgcatgcatgaagaaatgggagaaaaaggaaacttggcaattcaaagggccccaattcaccatcgagatcagcccagaaggaccagagacgaggtacaagagataactaaagcagaggcgctccgcacaacac

SEQ ID NO: 152426 - DNA, 681 bp, Cannabis sativa
ctcctcactcattctgattattcaacaaagtctatctaaagagagttgagagagcgagtaagcacgaactccaatactgaagctattgcagggattgaagctcaaagaacaatagttggaggtatttcaatctttcattgcatatgtttacgatatgtttatattttatttacgcattacatatcattatatatatgttgtatttcatatactatattatagtctaacattagacaagaaaatcaacctaatccttagagttgttaaatttttcaatgcttttttaaagttaagctaccatacaagtgataacaaaaaagatgtcttcgtctcacaggtacattttatatttgctgaatttttttacttattgttgatgcttctaatattctaaattaataatttattttttttcttttgactataaattatgcacatgaacatggactagtaagaaaatttctactctttttgatgaaaacatacatgagtctacattctcttcagtaaatggtgcagctccaaataatggtaccttttaaaattaaactacatgtgcaattaataataatgatgacagtaataatctatatataaatataaaggaaagcacaaaggagtctaggtggcatcttacatttttttttattgtatttttaaaattttgtgacattttcatat

SEQ ID NO: 152427 - DNA, 887 bp, Cannabis sativa
ggagatcttgaggaagaagtatatatggagcaacctcctgggttgttgctcagtgggagttagggaaagtttgtcgtcttcgtcaatctttatatggattgaaataaagccatcatgtttggtttggtaaatttagtcagactgttgaaaaatttggtttgttgaaaagtaagtctgatcattctgtgttttataaaagatcaactactggcatcattgtgttagtagtgtatgttgatgatattgttattactagaaatgatactgaaggcatctcatcggttaagtctttcattcatacccagtttcacacgaaggattttggagagctcaagtatttcttaggtattgaagttactcggagtaaacaaggtttttttgtctcaaaggaagtatgtacttaattttttaactgagacaggaaaattgggagcaaaaccttgtaatgctccaatgaatctagttgtgcatcttacacgtgatggggaaccatttgaagatcttgagaaatatcgtagattggttggaaagttaaattactaattgtgactcatccagatattgcattcccagttagtgtcattagtcagtttatgtcttctccaacaattcatcattgggcagcactagagaaaatttatgttacttgaaaggagcaccaagacgaggtatagtttacaaggatcatggacatacccagattgagtgtttctctgatgcagattgggcaggctccaaggtagacagacgatccacttcaagatgttgtgtattttttgggggcaatttgatatcttggaagagtaagaaacaaaatgttgtgtctagatccagtgctgaatcagaatatagagctatggcacaatctgtgtgtgaggtaatatgga

SEQ ID NO: 152428 - DNA, 759 bp, Cannabis sativa
  modified_base (728)..(729): a, c, t, g, unknown or other
acaagaccctagccgaggtcaaaatagtgaggaaaactggcttcccacttggagccttggccttaaccggccagggttccaggcctgagtcgccgcccagaccccaagacctagtctagtggccggccaggaaccctaattccaagcataggccgaccagcccagggatacagttcctatggccgaccagaccccgtgaaagttacctacggtcagtcaggcctcaaacaaggcctccttggcctgccaggatctgcatggatcagaacatcatgtgtctttttttcaagaactcaaaaatgttcttcgtgttcttcatgactcaaagagccaaaaatcactacaaaggtaagatttagatccttttcgtatagaaatcatacattatgtatcctaaggctatcgtgcggatcaaaacatcaaaaggacaactataacgccctgtccaacagggacgccacgtgtgtattctttaataaaattcttattttatatactatataattatacaaaaatgagggtaattaaattttgataattaaaaaatatatataaaacttctttataataaaagataagtaatattaactacggggtcttgtcttttcaaaatagttacaaactagtttaataatactttacaacataaactttgtattccccaaaatacaatccaaatagatcatcatgttcactgagctgtgccactgcagctgatatgtacattnntgatacgacctcgaactcatggctgctcaa

SEQ ID NO: 152429 - DNA, 501 bp, Cannabis sativa
tcaattattacaaaataactaacacgataaggtgttaaattttttataacaccacatttaggatcagttattttgtaataagtgacgctataggggcacgcctcagttgatgcatatcccctatggcgtcagttattacaaaataactgacgccatagggtttatataaccctattcagccctttgtcttcctcactttgtcttttccccaaaaaaataaccagcaagcctttcacgaaacgctcgcccaaccaccgcctcccatctcccaattctccatttttcatccattttcacccattttttttttaaaatcttacatttttcatacccaaaaacatatcccaagagtttgatcgtctttttttttcctatttttcaggataacttgagcttagagaaggtggttgtggtggttttagctacgactaccgcttttggtggagaaatcgttgaatctcaacgcctattaaggtataaatctaatctctaataatttta

SEQ ID NO: 152430 - DNA, 612 bp, Cannabis sativa
ttctcaaggtttattggttttaacttgtgattttggagaataggggattttagggtttaattgggttttgattcagttttaagtccattttaggttgattatgagttttggatgctggttttagtgtattgtgttggaattgcacaagtttgggctttgaaactcaaacttaggtctttaatggcatattgtgattcgatgtgttttttttttttttgagtttttttggttgtaatatgttgtgtatgccctgtttaggtactctggaaggtttggtggcattcgggtaagttttgagcgatttttggagtggttggggaaacctagtgcaaaccagttaaccggttcgccaggtcctgtaaaaccggttaaccagttttgacagattccccaaacaactcattttctaaattcttgcccatttcaatgccttagttgggtgttttcctatttcctaggatattgtagttcctagtgataataacagaaccttaggttgtaggtttgggcttccaggattagggttttggcatgtgatttacccggttatgctatgtgattagggcatccatttagcacaagactttatgttcaggtcaaccaactcacttg

SEQ ID NO: 152431 - DNA, 510 bp, Cannabis sativa
ttttagcttcaagtctgttgagaagctttcacaagaactattcgttcagcgttgtgtaaactaaatacagacgtcaatccttgagtaagttcttgatttcctttactttttctttgcacatttactttctgaatgcgatcttaaccttgcagtcgaagatatgtagaaaaccctaggtctagaaactctgcgattttcctttgtaacgattcatgcgacttcaccattcataatgcttgctttttgaactgcacaatgtttgcctttcatctttcttattcaaagcttcatgaaatttttgccctaactcacgaaaatttcaaatttctgagttttgacttttcgtcgaatattttcattccttaatctgttgagtactcctggtcggcatatttgcctatttgatgttcgatatccggaccaaacactcatcttgcgtgttgccttttgtagatgaacctaggtgagttttggggaagcgaacaccaaatcaaccaggatctgcttcaa

SEQ ID NO: 152432 - DNA, 549 bp, Cannabis sativa
aaaaattaagcataaaaacttaaaattttctaattttacccattaatgggtaatacccattttaaaagtacacccatatatatttgttagtctttctttctatttttgaattaattgtttttatttacttttatattatttttatactttatatatatttatcattctactcataaatataaatatattcttgagagtgactatatgtataaaatattgatcgaattttaattcaacacattcaagagaaaaacaaactcaaaattagttaatttatgtatatataaatatatagatttttattatttgaaagtggtttttttatatttaagtgtgtctatatatttgtactatatgtgtagtatggaaggttttgatatgcatgtactcaagctattctatgtttaaaaaaaatctatatctatgtaattatgatgctatgtaaattggggcgatatatatctatttaataagattgtaatttttttttatattttgtggtacttttagattataaaatgcacaaataaattagcaataaatgtagta

SEQ ID NO: 152433 - DNA, 507 bp, Cannabis sativa
tatacactataccaatgcactttgtaccatttccgtacaagtgttggtagtgtactaatcattataagcatgcacatatatttcacacatacatacattcgcatatgtatcacatgttctacattattcttaacttgcttccgaattcaagtgagttggccgaccttaacggaaagtctcgtgctggatgaatgccctagtcacataataaaactggataaataacacgtaaaaaccttaatctgggaaacccaaacctccaacttaaggttctgctattactaactggagctacaataccctaggaaatagggaatcacccaaccaatgttctattttaaacacaaatagaggaaaatgaagtgttcggggaatctgccaaaaccgattaaccggtattacaaatcctagcaaacatgttaaccagtttgcaccaggtttccccaaacaattccaaacctgctcaaaatatgtccaaatcccaccaaactttccagaacacgtata

SEQ ID NO: 152434 - DNA, 619 bp, Cannabis sativa
  modified_base (356)..(358): a, c, t, g, unknown or other
  modified_base (574)..(587): a, c, t, g, unknown or other
ccagtttcaaacctagaaacaaaataataaaaagaaacttaaaataaaaatatacaataacatcataaaataaagcaacctcattagagagcccttaaaacttgtaaaaccagtttcgaaattatgaaccttgtgaaactagattcgacactatgaaaaatcataacgaaatataaatgttaaacaataaagttaactgaaataagtcatcaaaattggcatagtcgttggagttgttgccagcaccgggaaagtgatcggagttgctgccggcgctgaaaattcattagaattgatattatcgctagaaaaatcacaaaaaaatactaagaaatcaatttcttgatgaagaaacnnntttcttggtgatttttctggtaattttttcgacgacaatgccaattccgacgaattctcagagtttgccgtcgataccaaaaaagtcaccggagtagctgctggtgtcagaaaaactgtcaaagttgctgccaatgccagaaaaatcattagaattggcattgtcatcaaaaaaattaccgaaaaaatcactaagaaattggtttcttcatcaagnnnnnnnnnnnnnngtaatttttccagcgactatgccaatttcgat

SEQ ID NO: 152435 - DNA, 659 bp, Cannabis sativa
aatcaaaagttacgattagcgcataaagctgaatactaacggctcgcgctaagggaatgtattaaacgagatgtcaaagtgtcttgaaaaaaatacttaaacctaacacgtggttaaaagaactaactactcatgtaagaaaggaaagtatatacaagatgacaagttcattaaaaatgaatttgagtttgcttaaaaaaagatcattcctgatgatcccgaggtgggatcaatgattgctcgcaggttgagggttgggcagataagctgctcgcgcgtaaagtaggacgttaactacttagcatcagaggaaaatacgagcaatggaaacccttaataaaatttatgcatgtgattgtttaaattgtgaatgaaacgcaagcaaacattcgcacatcaaagtttaaacttaaaggcattaaaaaagcaaagtttgcaacccaaccttgcaattctgtctttacaaagaaaataaaaagagggggtgccaccagaggcaaaccattgtctcggccaaggggccatttcccaaaagaaaagaaaaggagataaataaataaccaagtctacatgctgggggacttggacagatcttcttcttcttcctcgacctcgccatcttcttcctccatccaagtcttctcacaaagagctaaagt

SEQ ID NO: 152436 - DNA, 551 bp, Cannabis sativa
  modified_base (52)..(87): a, c, t, g, unknown or other
ttttagggatttttttttttttacatttcaaaaatgtttttttttttttttnnnnnnnnnnnnnnnnnnnnnnnnnnnnnnnnnnnnttgcaactagcgctgcaacttaaagtgcaacaaataatcgtattgaaacttctattgcaactagtacttagctaaattataacaacatataaaaataaaataaaacaagtacatgtgaataacccaatcaagattcaatatataaaaacatagcacttggctaaattataaagtaagtaacaacagatcaatcaataacatttaataaaaaataaaataagtaatcatagttaaaaaaaaaaaaataatcaaatagtaacaatgctagtactgaaactcaaatgaaatcaaaaaataattgaattttttttcttatatttttatttacaaactacatatgctatagtgaggaacactgtagtatactttattgtaccgaaatcaaaagctacaaactataatggaaattttatttcttccaaccaaactctaaattcaataagtactacaaatagtcttgttta

SEQ ID NO: 152437 - DNA, 834 bp, Cannabis sativa
cactttaaacgttggagacagaagatgttattttttctgaccatgaaaaaagttatgtttgtgcttactattttgaaaccagttgtgtctgagatgccacctcctgccgagaaaaaggatgaagtcgagaaatacgaatcgcaggttaaggaaagggactcctgggtagaaaatggttttctgtgtaagaattttattttgaatggtttgtctgatgatttgtatgattattataattctaacaaatctgtcaaggagatatggaaagcattacaaaaaaaaaaatatgataccatggaggcaagaacaaagaaatatgttgtgagccgctacctaaatttcaaatgacctatgataaatcagtcgaagcccagtctcacgagcttcacaaaaaatagctcacgaaattctttctgaaggtatgactattgatgaagaatttcaaatttgattgataaattacccccttcgtggaaatattttaaaaatactctcacgcacaaaacaaaagagtttttgttggaaagtctgatcactcgtcttcaaatttaggaggaagctcgaaaacaagaacaaaaggaagaggtgcttgttgttggaaacaacaacaacactaataaaagatccactgttattctgaaacccaatgggaaaaactttaagaatcagaatcgcaaagtgaatccaaaccacaatagtcaaccttggaccaacaacaacaatcagaattggaaccatcaaaggaaccaaaataataggcagcaagtaccccctaatagaaatgactctggtttgttcatgtgttacaattgtaacaagccaggtcatatggca

SEQ ID NO: 152438 - DNA, 896 bp, Cannabis sativa
  modified_base (68)..(75): a, c, t, g, unknown or other
caggacaacgttggattcttattttgatcgaataaaaggttggtaaaatggtatccattttagatgannnnnnnnctctattcaactaatgttatcttcgactcttgcctacagggatactgtatttcattatgttggaaaccatagaaaataattaatatgttttattttggtatttttgcaaacatatttgcgttacttgttattttctgaacttgtgtatgactttaattgaaccaataatttatttctatttattgatatttctagtgtcaaaatgtacaacccacaccccaatcctcatctagtatgtgcctttagaaatgaactccaaagtgtgaagatgactcctagttagggtatcacttcacacttgctcatgatgaacatgttcattttgttttgaacatcttatcacctgagtttaacaaatttgttgttaacaattggaactagtctgacatatacaagctggatgctgaattgcgtgcttatgaacgaatattgtcatttgcatggaggtccttctccagtaatgcaaataagggcgaaaagaaagctgaagatattgagaatgattcctccgacaatcctattacctcaggctcagttgaaaaggatagagaaagtgattccacttcctcagattatctttcacaacagattgaaccaggaataggaacaattcaagaacagttaagcagacttattattcaatgttctaattgtaaatagaagggacattttaaatcaaattgttccagacttctcaacattaagaataatggtaatgctttagtttttgaatcttgtgttttagagaaagacaaatccatctggattgttaattttggatctactaaccatgtctattgttcattacaattgcttgaaaa

SEQ ID NO: 152439 - DNA, 518 bp, Cannabis sativa
tactttccaaattaaaacataacagaaaatcatctcattcgatctctctctccctaatctctgcgatttctctccacaattctctgtgaaattcactctcataatagcacgaaaggctatagagattgaacaatacacaattgcatctgcaaatcgatctcaaacggaagcatcatgcgccgaaaatcgatctcagaaccaagaattttcatcgactgaagacagagcttcagcaacgatcatcgacctccaatcgtcttcaggtaagttcttcaattgcttttgatactcttccttatctttagaacctgaaaaatgattgctaataaaaatcaaaaacgaaatactgaaaaaacaaaccaaaactggaataataattgtcaataatacacattacaggtatataagcattactggtatataaacattacacggtattttaatgaacatatattaaaaaaaaaatcggttaaaacaataaacaaaatcaaggtcaaccgtatgaatcacatacataa

SEQ ID NO: 152440 - DNA, 631 bp, Cannabis sativa
gattgaaaatgatgttttagaaactgtaaaatatgaagagatggttgatgaatttgcttcaaaaagtgtacgaagaatggcctttttttaaatagaaggtcgatacttacttaaagtggtaatgaaataaataacaattattataataaaatagtttttttttattaggggcctaaaatttaagattggaacaaggcctccaaaatatttaagacggccctgccaattatccatctccaactcctcatatcaatgttgctgttgcatcttctactgtcctgcccgagtccaattcacctgctgacaatcgactctcctcaattttcaataaaagataacttacaatttctgggggtaatgtcaggaatgttttgaagagatgtcgcaccaaagctccacctttaacagactgcaccaacgtttcctcgcaccagaaaccagattcgtcttatgaattctcgggtaactcattgatggatgctggcaatgatgcttctttggcgaaggctgaatctcagcctcgttaatcgccatgaaaattgtttgttggaatgctcggggcttgagcaatccgagagcattccgtcaacttcgtttgctcatctctcatcattgtcctgatgttgttttt

SEQ ID NO: 152441 - DNA, 665 bp, Cannabis sativa
  modified_base (149)..(157): a, c, t, g, unknown or other
aaattataatacatgtatgaatattatatttactctaaaatatttctattatgatatagtattaatgattatttattgttattattgttacgttgatattctttggtttttaatttttttttttctaatgtaactctatttagttatannnnnnnnnttagaatataatttacttggtcttaagtatattcttggatagaaattctactctatttataagataaaatattagtgcaatcattgcatatgatcatataactaccacattcataataaaatggttcaaactaattcatgggtcaaacattataacaaaaataatcaagctgaaaaaaggaaaaaaaaaaaaagacagataaagtagaacagtctccatacctcacaatacgccaatcccattagaagtatgatccattgaccttccctagatttaaatctaagcctccatactcgtataagagtgttgatgtataaatccaattgggagcccttttatatgaaaactagagagagacactcttatatgatgcaaactaaaaccgcaccaagaaaaataatagaactaaaaccattgttactttatatttatacatatactaggtgattgttacgtgccaagtcacgtagtgttaattttatttaatattttagttttttattttaat

SEQ ID NO: 152442 - DNA, 585 bp, Cannabis sativa
aaaacactataaataccccatagatagaatggaaattgggtggatcgattaattaaagaatcgaagggagtaaagaagagagagagagagagagattcaccaagaacattctttgtaaaaattctctcaaaaaataataaagactcgtagactaaggctcattaatgccccaaccacgtaaatatcacctacattaaaccttctacagctcttctcattctactatttaattggttgccgaaaacctcggtcaacaatatttaagtcgaaaatttattaattttagattaacttaaaatagaataattttaacaatatattttattttattttaataatcatttttaacataaatttcgaaatacatgcttttaaaatatagatatttttatttttatttttaaaaattagattaaagttgaaaagtaatttaataattaattttagatcaatttaaatcaagtaattttcatcaacaatttattaaaataaatagacttaaatatattatattttaattaaaaaataaataattagtttatgaattatctagatagatactttctaggtagacttttggtattt

SEQ ID NO: 152443 - DNA, 661 bp, Cannabis sativa
tgggtatgaaaaatgttttaaaaaaaaaaaaaagtgggtaaaaatggatgaaaaatagagaaatgggggatgggaggcgagggtttcgtgaaagggctgctggttatttttttttttttttgggagaagacgaagtgagtaagacaaagagctgaatagggttatataaaccctatggcgttggttattttgtaataatcgacgccataggggatacgtgtcagccaatgcgtgcccctatagcgtcggttagtacaaaataaccaacgttgaatgtgttgttattaaaaatttaacaccatatggcgtcggttattttgtaataatcgacgctatagggtgtctttattaaaattttaattatccacactctatagcatcggttgtttattattaagttgaaaaaaaaaagtacctcttaagacttgttttgtagaccataaggtgtaaataaactacattgtagattatcatttcagtaaaattccgtgtactgataaatcatagaaatttatttaatcacacaatcttgattattttctactgtgtcgacatcacaatatcaagaatatcaatgtgatgaggatttagatgagtttataaatcaaacaaatgatcatgaaataaacatgtgaactatcacattaaacaagtaatgaaa

SEQ ID NO: 152444 - DNA, 1416 bp, Cannabis sativa
atgctattgatgtgcattggaaccataaaaccgtcaaaatcaaaggcatgcataatttcaaaagggattatgataaaaataccctctgtaatcatttaaaaaacaattttcatttaaaagaactttttaaggggcaattgttatatccaaaattcggctggtacttcagaggaggacatatgtcaacctgggagaatacgaatcaacgaatataatgacaattatattagaagatattgaaatggaataactcattaaatgcgaagctgatagagtatcttataacttgttgactgtaaagtcttaagcgagacacaggtgtacaaactattaattttcataatgacgagaaactattttgtatacgaagacacaagcataaggatgacatcagtagtgtaaagtgagtcacccacctcgctacgtatgaagagatgtagacgagatatcttaactgttaggacacttagcctgtaatatacattatacaaactaagcataacagttgaatgaatctaaacaacgaatagtgaggcgtccatctcgctataggaagacatactcatggtaccttcactaatcagcttcaaacatcttataatgagatccactcctccgttaagtcagctctcttagatagaagctgacattcaaatgatgttgactgctaaagttcaccttgtcaccaagaactgcgattgttagatggagtgttatgtcttcaatagcataaacgatgatatgtacattatcaacctcgaaaagacatggaaaagcttcagcttgctgtcagggttaatgttactgtcccagcgaggtgacccagcaagatacactctacagtgtatataaattcatgtcagcattaactcggtaaaagcagataaatcacagctgtatgagtttcaaataataaccgtatttattttacgtggaacgtaatataatcccataatttcagggaattatggttgtgggatatcaatctgattgtaattaacttgcctcctatgtaactataaattggggcaggatacactgaaaaatggacgaaaaatcctttagagaaagaaccctagttttgtaccagaaaaacctaataagatagactcatagactatgcagaattttaaaactacgtaagaaagctttgtgttatttctttttctttgactattattatttctgtgcaaatccatcacgaaataggctttaatatagttaacgaaattctgcgttaaacattaacaaaagaattatatataaagatagtggatatactggtctaaaatttgataagaaaagtttaaagtgtatagcaattttttcaaaaaaaaaaatagtccattgtttgttgtaattgcatagattgtagttatttatgattatttgtaaatttttaaaaattatgaatag

SEQ ID NO: 152445 - DNA, 506 bp, Cannabis sativa
tgcaagtgctacaatttgaagggaattcaaggtctcaacacttcagaaatttgattagaataatagattacaacagttgcggcaaattcaaagatggagtctttacctgtataaagtcaatttagttttgtaatcacttgagattcagctattaaatttcattctctgggcgtggccccatggactaggagcaactcgaaagagttactgataccacgtataaaattaatgttgtgtgtcattttattttctacatttttactttctgcggtatatttctattctgttagattctatatctaataaatagagataaattttgttcaaaaaatttactacaattccgcattaattaaattgttttataattttacttggtaattttaaaaacataatcttaatatcgaataatgttggacatgtaaactccttaaaactatttcttgtccatatcactaatttttctggacatgaaaaagggatagcaaagaggttttcttgtagtg

SEQ ID NO: 152446 - DNA, 621 bp, Cannabis sativa
attaatgagggatatgggtatttaaaccctttgattcgaatcaaaattccccattttccctcattttcttaacttccctattccatccctctcagagacttcaaaagagattttcatagtttgcctagatttctgcctttctctgtggaattttctcaacctcaagtgttatcgagagcaattgcaggaacaacttatcaaaactaaaggatagtttcaaatttcactgaatttttgttttttgtttggagaaaaaacgctattttctgggttttgacattttttagggtgtttaggaatacatgtttgtaagaaatacgtatgggactatgtttttaggtatggaactgggtaatctcaaacaaaatgacctaaaattggcataaccgtgaactttaggaataatgcttgaatagtcgccactttatattttgaatacacgcgggtattcggatgaacacttcgaatgctcgcatgtctattcatcttaggtttcacagagacttaataacttctaactgttatttagaactttaggattttgtactctgtaaattttgttgtgggaacattggttaagtctttcaaatggtgggcgtatcacagtattctaatgttcat

SEQ ID NO: 152447 - DNA, 570 bp, Cannabis sativa
gggtgcgtgcgcggggtgcgccggtggagacgaacggtggacggtgggcgcgtaggtggcatgcaggcacgcgaagctccccttggcaaacttccaggcataacacttatgactccaaatattacacttagtaatctttaggggtgattcttttagactatttattatttatattatcttttactgcataaaaaaatcaataatattttttcatatttgtttttacaattagaagcaaattacttaaagattgtgatatatccatattagttttgttataatcttttttatttgaaagttatgtcaatttttttaattttttataagttgttggtatataaattttgttgtgcattatatttctgttttgttgtatagtatactattattcttaaatgataatttttttttattttactatgtaagtggcatataattttgtaagcataatacaaatactttaatatatgtatataatttatttgcatgctaaatatatttaattattatttttatattttaattgtatgatatattatttatttcgataatatttaattagtttctatt

SEQ ID NO: 152448 - DNA, 727 bp, Cannabis sativa
tgagccaagcatttggctatccgatagatcgctcatctgaaagatagaagatcttttcagcgtggtgaatgtgcgaaaacaaagtctatttttttgggattacccaatcctacacagaaaaacatagccctatatacatttcttacaagcatgcattctcaaacccctcctcaaaatacaaaaacccagaaaaagtagttttaccttctgaacagaaaccaaaaatgcaaatgaattcaaaactaacctttagttttgaggatttgtctctgcgattgctctcgatcacttctgagattgaagaaatttaagaggaagcagtaagaatctggacaggatatggaggtttctttgaatttcaattaaagagggaaaagggagttgaggacgagagggaaaaatgagaagagttaattcgtatcaaagagtttaaatactcgtatccctcataaattgggattacgacacgtggcagcaagaatgcctaaggttgccctatctaacggccagccatggccacgcctacacgaaaaccgaggagtttcatgacgtggcaccataaatgtaataaagtgaaataattacagtcgtcatttttcgaaaccctcgatgggacaaccaagggtcacctcctcgtgacaacccttcacctgtctcccgcgtatagtttttctcggaccgcatctgtcacatcgcgaaactaggggcatgtgttatagtgagattt

SEQ ID NO: 152449 - DNA, 527 bp, Cannabis sativa
atttgtggcatgccaagcttggacatattaattataaaaatctgaaaaaaattgtcaaatgtaggtattgttcgaggtctacccaagcttcgtaaagaaagtgttggtaagtgtgaaccataaacaattaaaaatctctcacatacgtgtgtctgatatcaatacatcaaaagtattggaattgcttcacatggatcttatgggtccaattcaagttgaaagtttaaatggttacgagttgaaaaaggttgtaatattgggaaaattgtttgaattcgaagtgatcatgagttgttgagaggaagaatccaacattgcaggagatagcaagagtgatgttaaatagcaagaagttgacaaaccgattatgggcagaagctattaacacaacttgttatataataaacaaagtgtttactcatccaggtacctcaaaaacatgctatgaaatttggaaaggtaaacgtcccaatattattcattttcatgtttttggatgtgtttgttatgtttctagagatcgtgag

SEQ ID NO: 152450 - DNA, 539 bp, Cannabis sativa
agagtaagagtcgaacaagctcttttctacaaaacaaagacactatttccttaagatatgaatacaattcaaagtgtataaaagagatattaaacctagttgctataaagtgtatttataatcaatatacaccttattaagagcttacacacggtctgaaaaagaccccagcccaataaaaaattccctaaaataaatattcaatcagctcaggaatttctatttctgtacctacataatcgtagacagtaagtacaattttccttttatagaaaaggaaagtttagctccggttttctcttcaagaaatctgatttaacaaaatagaaaactcacacaagatcagaatatacgagctggttagataagaataaatcgtgtaatcaaacttatcatttttacctcaatttccataaataggaaagctaagtttatatacacaaaatatggatactagggctgtacatcggtcggtttgggcggtttatcctatatattttctaacccaatctaaagttcgggttgctaaaatttaagtg

SEQ ID NO: 152451 - DNA, 559 bp, Cannabis sativa
gcgccaggtgggtaagtcctccatccaagattttggaggcacgcctctgtactctcgaccaggacgggtacctgggcaagttggactgctacattcccgccgacgacaatcgcgccacaaatcctaagaagggaatgtgcgcctggtcgggggctcacggccagcagggggcgctgatgctcttgcataagtacttcagggatgtggcagacttcttcggcctctgcacgacccagattactccaaagggcattaagtatttgtctgctctctttgtcctctacgcttcccaaggatggggtgctccttcccctcacgaggtcgcttggttcttcgacttgaagtctacccccaagcaaggcatgtcggggtatttttgcttctctcagcccgacttcaagtggttgagcggcacggatgacaaggccatcagcaaaatagggcattttgttgatgaatacttcatagtgaagaatccgaacatcacccacactcggtttcagcaaattctgacatatcaccgacctcccctcacccttactcttagggatagagctca

SEQ ID NO: 152452 - DNA, 691 bp, Cannabis sativa
caaacggagtcccaagtcaaaagtaatgaacaaaacaagttcaacatgcaatctgtccacgcgagcgggccgcggtgcctgggttgaaaacccagaaactccattctagcagctctaaaaatgcatcaaaaatcacccaatttcaccccaaacatgcatatatctcaaaatcatttcccacacaatataactaacataacagagagctaatacacacatttaaaggtcaaaatcaaggctcgcatgcaacaaaatcagatttaaacaatatacaataggctccaaatttgagtaaaatatcaacaaattgaagctcaaacattgaatctttaaacccaaaacacaagctcaagctcaacaataaaatcagagctgtataaaagaattaaagcaccaacttaacctcaaaaattatcttaaacacaacacaaagcatcctacatcaatgtttaacacaatcaagcatagagtatcaaaattaaactaattccaacacacatgcatcgcaaggatctctacaataaaatcatgcttaaatcaacttcaatttcagcaaccaattcaaattaagacggtaagaaaactacctccaaatcctcaacaactcaagcttcaaagattcccacaaaataagcttgaatccaagcaattctctacaaattcaaagattagagtaaatgagtttagagag

SEQ ID NO: 152453 - DNA, 612 bp, Cannabis sativa
aacattggtggtgcagttcttcgtgatcgacgttcccttggatttcaatgcaatgattggctgaccggccctcaacgacctgaaggttgtgatgtctatctaccacttttgccttaaatttccaacaagccatggagtggcagtcgtgagctgagacaaatagtttttccgtcacttatctaaggccaaaaaagagaagatgctcgccaaaagtctagaagacgagcctagtaaggggtaatgaagtgtagcccaaggcggcgacacatacatagatcctggctttggggatcctacaggatgcttcagacctgtggaagagttagaagaagtggaagtcgatcacactccccaacataaagactgaacattggtaaaggttttgctccagaaatcaagtcagtcttgatagaacttctaagggcaaacctagacctgttcgcatggtcatatggagacatggtaaggattggcccttctatgataactcatgcactcaactttgatccaagcatgtggcatgttcaacaaaagaggtagttgctcgacaaggagcgtgcccaggcgctcaaagatgaattcaagagactgagttgttgggttttatgccct

SEQ ID NO: 152454 - DNA, 723 bp, Cannabis sativa
  modified_base (60)..(61): a, c, t, g, unknown or other
  modified_base (444)..(446): a, c, t, g, unknown or other
ctctcacatgtctaaatacattaaggccttagaattggttcatctcggttatggttaccnngtccaacctgattatgccttaagcacataatccttgaatatgattatatttaacatggcatggcatttacacacatatatcactagggtaataaccctaggctattcgactgttcctattaaggtaataaccctaatcccggttactaaacaatcatacatatcactttcaatataagcgccacttcgcatactctacgtgctagctactgtcttacctgctgtcccatactagcagtgattctgaatccccgggtgctcttgatcaggtgccggtaatcctagtcacacaaattcaggattttcacaactagaagtaaccctgatttcaaactcataaaatattttcatggcatttaaaattcagataatcacatagagctnnnaacgagctttccaacgatataaataattcccaaatcgaagttcagaataaacagttatgaaattacaaagttgggaatccaatctacccaagaactcacaggtgggtcgcgccatgcccaagtcatgctgcggcacctgggacaaatcccacgttccaccaacaggggcgggccgtggcatgctcaacccatgccgcagcacctgggttgaaaactcagaaaacaaccaccttcaacacgaatttcagcaacaatacacatgcaaatcctcccaaat

SEQ ID NO: 152455 - DNA, 592 bp, Cannabis sativa
aaatttattcagggcataaaatcccaacatcaacatgcgtttgtggaatgctcgcttgcaaaggctgcttggcatcgtagcatagtggacatcggggctggggctgcaacatttagcagctggttgttggaaattttcaccagggggcacgaagtttaaaattgaggaagtgacgatggtgagttgggctattttgcgtgcaccagatgactttgtttggcaaaagaagagttggcttgcttcaaatatttttacatcagctagaaacatgcttcatcaatataagtttgctcaggaaaggaagggtctttcgttctctcctttgaatgatgtgggacagaactgtgagcgttggattgtacctgtgttaaacaagattaaagttaatgttgatggggctttatttgaacaagaggggcagtttggagtgggttgtgtagctcgagatcaacatggaaccatggtagatgctttcaagaaggggaaggttgggtatgtccaactcgaaattactgagatcataggcatcaaagaagctttgagttggattgcaactcatccctgggaaaatgtagtgttagaaacggatagt

SEQ ID NO: 152456 - DNA, 651 bp, Cannabis sativa
cgagacagtgctaggtttacttcccaaactattctttaacaacttcatctcttttcttgcttcctctttttgaacaaacacttgagccctctcattgaactcgttgatgtttttcactgggcgaccctacaagtcatccctccagcagttgagagatcagtcgtgatccctgcttaaagggcagtaagttggatactgtcgttcaaatttctaacccttttagcagctgtaatgaaacgactcaagtaggccttaagtgtcttgccaagctactgctttatgttagtaagagaagacgctttaggtcgtctgtttcttgctgtctggaactgtttcttgaagtccttagacaactgttcccaagaggtgattgaacgattggtaaatttgttgaaccagctgctcgctgccccaactaatgaggtagggaataaaatacaccgtaagttattcgttacgttgttggcttgtattatcgtgttaaaattattgaggtgagcgaccggatctgtaatcccattgtatgacgagacatgggggtttgtaaattcttgagggaatttagtgctcataatgtctggatggaaaggcttgggctcttcgtccaagtcataaccaggtagtttcccatactccccatcttggtatctc

SEQ ID NO: 152457 - DNA, 599 bp, Cannabis sativa
ttcaattcacagcttctaacaatgagatcgagtacgaggccttgatagcaaggctgagattagcaaaagccatgggggcccgaagagtagaagttttcagtgagtcataactggtagtgaaccaagtatcaggggaatatcaaacgcgcggagagaaaattgccgcatacgtagcaatagtctgggagttgctccacgagttcacagattacaaagtagaaagaatccccagagaaaagaacgctcacgcagactgttttgctaagttagccttagacagcgaaattgagaaactggggttagtgctcgtggaatgcctcgcggagccaagcattaaagccaagagtaccgtagcaacagttcaacaagagctcaactggatggtccccatcatcgaatacataacaaaaggggacttgccccaagaaaaggaactatccagaagggtacaataccaagcgcaccgttatgtgatgatggacaatattatctatcaaagtggactcagcatgtcgtacctaaggtgtgtattggaccctgaagctaaaaaaaattatgctagaggtccatgagcggttctatggagatcatataggagg

SEQ ID NO: 152458 - DNA, 728 bp, Cannabis sativa
  modified_base (654)..(667): a, c, t, g, unknown or other
accatgatggttacaataaaaatgaaaccattgaaatctcttccataatagtatatatatatatatatatatatatatattagataatactatatatgcatgataacataatataagagaattgttgttgagcattattggtacctagtaatttctacaggtggcgtccttcgattagttagcgatattccctaaaacttattttcttaagttatataaaaactcgatacttaattatgccaatagcgatgtaacactgagaaaagtgctaggcacaagtgatgcatgatagcaattctcataataatatatcatataaaagtgtatacataatattatagttaagagaagaagagacaaatagaagaacaaaacaccgagtgttaagggggatcaccaataagttgaacaagatttctacaccttgtccaaactaccaagcacttatagggtttagattatatgccttcggaaataaacaagtctacttttgaattttagaaaatgtaaagtatggatgaactaaggtctctatttatagagtttttgagaattaaacttggaaaacacatcccacaagcttagtagttgttatcagccgtttaggagtgagtaatggagcagatgttgaaaatattttaccaggatcttagnnnnnnnnnnnnnnatgttgtttaacatcctaatatgaacttttaaaacgatattaaataaacacatataaagta

SEQ ID NO: 152459 - DNA, 837 bp, Cannabis sativa
gtctgagttcgggtcctgatccgggtcggggtctgggatcggtgtccggaccaagtccgggtcaaggctctgggtcctgtgtctcgggtccggggtctgggtcctggtccaagtctgagttcgggtctgggtctaggtcccgagttccgggtcccaggtcccaggtcccaggtccgggtccgagtttgggtcctgggtccgcgtccaggtcccaagggatccgagtttggagtccaagtcttgaattaagttttttttcaaataaattgaaatcgggtcggatctgatccgatccagaaaaaaattaggcggggcggagcaaatctgatccaagatccaataagtatccgaatgtttcggatcagaggtgatctttcggatcggagctccaactaaatgaatctttttgacatgcctagttgaattcatgtatatagaaaatctatattacgcataaatttttaaaagataaattattattattattttgtattgaggtgtctatatatatagatatattagattagattataactatgcacactaggtttgttctaaaatatagtgggttattaaaaaaaattatttttagactcttattttagaaaaaaaaaaatgtattatttttttaaaattaataaaaaaaatatgtaattttaaaagtagaaaaaattagcccctaaatcaagtggaccgtaacacaaatttagccaccttatgccaaagtcgggcatacacatactctctttttatcaatgagatattggcggctaaaccacctgaactttacggtttgtaacacttaaccacaaaaactgaatttttggcggctaaact

SEQ ID NO: 152460 - DNA, 528 bp, Cannabis sativa
tgtcataggaagcttaaggttccactggattttgtggtttttcaaattgacgataagatgtggttatatgattttcttactgttgggaagaacttgtcatgctcggttagtgtttcactatattttttatgttcatttgtgtttttctatgtattgtttataacattggattgttttatgtttattgcagcatattgatgtttgtttctactatttcagaaagaagttaaagtataaccagtctgtgaaaatttctggtaacactactgattgcttctttgcttctcaaatttttgaattatataatgagtttgttgcaagtggtgaaaatgttaaaccggttaagaaggattataaggcagctacatacatagctggttttatatgttatgtagtaaacattgggctaagcttgatttcgttctaatgcctgttaacgtgattgttcttgctcattggatattgtgtattcttgacattaagatgagatgcttaaaagtgttaaattctatgaggtttgggaggtac

SEQ ID NO: 152461 - DNA, 514 bp, Cannabis sativa
aaaagaagaaggggaagaccggttaaatcatatgaagcaataggtgttacccagaggagcctaaagagaaggggaagcactgctaagtatgggggccagtacagaaacatgtggaacacagacttaattgatatctctatagatttacaaaaccactttgtggtagttgacaagaaacaacagaacggacatcgctgtgtgatacaagaaattgatgatgatggaaaggcagcacattcggatggacatttgacttcggaggttttggtgggagaatcaagccaggtttttcaatttggggctgtggagacttgcccagaaacgtctccaaagttgccacgaaaatacttgcttggaactgtcgcgggctcgggaataccgcgacagtttgtcaactgatggccttaattctgttgggattttataccctaaataaaatccattacaatctaatatgatttgtcaacaataaaatattagatatcatttatgcttacatgttatattcatgttt

SEQ ID NO: 152462 - DNA, 818 bp, Cannabis sativa
aacttaacccgaagaagtgcactttcggggttaaattaggaaagtttctgggatttattatcagccagcgggggatagaggcaaacccgaaaaaaattcaagtcctcctaaacatgccttctccgaagaagcacaaagacgtacaaagcctaactggaaaggttgccgccctgagccagtttatttcccgttccacagacaagtgcattcccttcttcaacatcctgaagaaattccaaaaattttaatggaccgaagaatgcgaggaagcattcaaaaaattaaaaaagaacacatggctaaacctccaatcctgttaaaacccgttcttggagaagacttgttactatacttagccgtctctgagaatgcggtcagcgcagccctagtccgagaagaggaaaaaactcagcatcccgtgtactatgtcagcaaacgcatgataggggcgcagacacgatatcaagtgatcaaaaaactagtttttttgtctcctgatagcttcaagaaagttaagaccctactttcaggctcacccaatcaaggtgttgactaaccatctactccgacaagtcctacagaagccggaggcatccaggagactcctcaagtgggctatggaattaagccagtttgatctacactatatactgcgcacttccataaaaggacaagcgctagcggacttcataatagagtgcaatgaagtagaggctagtgaaaacgttccaacgccacaaaccccagcatggaaagtattcgtagacggagcctccaatgaaaatggatccggggctggggtagcaatgatatctccg

SEQ ID NO: 152463 - DNA, 735 bp, Cannabis sativa
atgatgaggatgctgtcaaaattatatttctacacaacaacacgttggtcgtggaggtccagatagccaacaagatggtggcaagaacgatgatagataatggagcctcttccaacatcttattcaagaccacatatgaaaagatggggcttcatctcaaagatctaacccctgtctcctgcctatatatggtttctccatccgaggagtcgcacctttagggcaaatatgcctacacctcactgttgggcaagctccgacgagcataaccataatggcacaatttctggtattggacgttccatcagcatttaacatcatgctaggccgaccaaccttgtatgacttaaaggttgttacgtcgatattccattcatgcctgaagtttccaacaaagaatggggtagggtgtctaagaggaaaccagctgattgctcgggaatgttacaaccttgctgtggccaaggctaagaaggaagtattctccagccagagcacggacaagggaaaaaacatttctaagtaggaaacttcccaaggcggggatgaagatgtggatccttgacttggggatccaaatagcaatgttggacctatggaagaactaaaagagatcgagattgatctagatatcccgaccagacagctaaaaattggaaaaggtttgttgctcgaagtaaaatccgcgttgataaactgtttgaaagcaaacttggacgtttgtgcttggtcaca

SEQ ID NO: 152464 - DNA, 1389 bp, Cannabis sativa
  modified_base (1139)..(1139): a, c, t, g, unknown or other
tctcatctttattaataagtaaatctgattatatcgaaatgggtattatttagggcataaaacccaacagtccaaccgtgcaagcatagtgggacgaactaaaaagtatgttccaaggcacgaccaatcagaggaacaatgattttgagttggaccgagcacatcgaacccctttctcccctaagatcaatatcgtggagttgccccacaagtttaagatgccaacctggaagatgtatactgggaaggaagatccattatcccacctaaagtattttgaaatgcaaatggatctctaaggagtacgaggagacgtgtgttgtaggatttttcctgctaccctctcagaaaccgcccaacaatggtatttcaagtttgtgcccggaaagttcaactcgtggaaggctttctcctcagagttccatgcacaattttcctcctctcatcatctttagttgcacttaggagatttggacaaggtaaagtaaagaccaggagatcctctctgagcctacatcagcaaattcatgatggacgcgactaaggttttgtgggtaaccgaagacgggaaattgtctgtgatactgtgggcattgaagtccttggtgagctttggaaggacataagaaagaacggcccagtagactcgatcactaatttccttgatcctgcataaggttttatcaaactcgaagaggctatccagcgggcaaaaggtgagcaaaaacctggcaagtcaaaagctccttctactgggactttcgcccagcttccccacgacccaagcaattcaagttcaaatggtaaatagtccagcaacaataataggcaagggaatggaaaaaagggaaagttcaccggtaaaatggaacaagctccccgggagaatccaaccaagtatactgcatttaccatcctgacagaggacatagaaaatgtttacatggcgacacagtcattagccccgtacaagaagcccgcacccatgaaaaaagatgtcagcaagagagacatgaccaagttttgtcgtttttatggacactacggccacgacaccaatgaatgcaacaatctgaaatgggagattaaatttttgataagaaaaaacaacccacatgtatagaagtatgtcaaggccnatcaaaatcagaggggcgataacaaccaagacttgctaccacaaatcgtagagaagcatctgcaagtcattgttgaaggcccgcacatatctgaaaattcaggcaaagctcaggagaggtatgcccgaacagtacagcacgagcaagaagaagtgatcctggccgtagaagagaggaagccgatattagtttttttgcactaaataaaactccatttcaatgtaatctattttattcaacatcaataaag

SEQ ID NO: 152465 - DNA, 533 bp, Cannabis sativa
atagcccgtttactactgcgaccgcagtgtaactaattgggcgacatcaatttttggcaccgttgtcggggaagttctgcgcttcaagaggttagtaaaataatttttttttcttcgttgatttgtttatttatttatttaattatattgaaaaaaaattaaaaaaaaaaactacgcctgtttgttttgttttaagaatatatagtgttatttcttttttgtttcgttattctaaaaaaaaaattgtagcaaaatttttctttccttttctatatatatatattatgtaattattagtatataagtagaattattttttcattagtactgttagaatgaaaaattgtacatttttttttgttatttgctattgattattaattctttagtatacttgtagacataagattagattattatttatttaggatagttgtagatttttatctaaaacaaaattgcataaaattttagttcataaaatatttttcaaaaaaaaaagaaaatctttagtgtcaagaacaattgtgtaa

SEQ ID NO: 152466 - DNA, 535 bp, Cannabis sativa
tttaaaaaatacagggtccattttgtcattaaacaaaacacagggtccaattggtaacttttgtaaaacagaggatccaaaatggtatttaccccaatgaaaataatactaactcctttgtttaattgttattaatgataatagatgataattcatacatcaatattaattgttattttttaggaacggttttcagtttcatttgtaataatgtttacattattgaaataaaatgagaaggaaaaaagtaataacaaataaaaaataaaaaaaaccacaaattagataaaatagaagattaaaaagagagaacgccacatcatctaccctaacaacagaattatatagatatatagatagattaagagaaatacaagcttttcttggtatcattttttttgagtgcttttcgagttagaacagaaaatgaaaagaaggaaaatacttagaaccctaaccctattttcatgtaacagaagaagagaagtagaaaaatcatcgaacctttagaaaatttcacccctaataataataa

SEQ ID NO: 152467 - DNA, 763 bp, Cannabis sativa
gacctacaacttgctcttagcttccagaaagatgaggccctacttccaagcacacccaataaaggtgtacaccaatcaaccactgcgacaagttttgcagaaacctaaagcttcaggccaactagtcaaatgagccatacagcttggtcagtttgagatcacatactagccaagaacagccataaagggtcaagcccttgcaaactttgagtgcaccaactcaactcttgacactgctcaagactcaggagaacagcaaaagccagagaagacgcaagagtaagagcagcagcaaaatcccgaagatctatcatggaaactccttgttgatggaagatgcactaaccaattgtccactgtaggcattacacttacaacacctggggcaacaactgcacggactaatcaaattcagctttaaagcctcaaaaaatgtggttgagtatgaggacttgatagttggcctcatgctagcgcatgaagtacgtgttgaccagctagacatattcaacgattctcaactagttatgaatgaagtcctaggtgaatacacagctcgaggtgacaaaatggtggcctacttgagcaaaatcaaagagttgttaagttagctcaaaggctacacaatcaagcaaaactccagtgaacagaatgccatagtagatggacttgcccgcctagcgagtagtaccacagttgacaaagaaaacctggtgcccatccagttcctagaagaacccagcattgttgtcctagaagaggt

SEQ ID NO: 152468 - DNA, 730 bp, Cannabis sativa
atagtcgccaatacatttaaaaccattgtcactatttcactagtaatcactactatatttacaattgttatcaccattgtatcaaaaattgaccaaatatgatcaatatcgattaaaaaaactctaaattttgggtacttataccacaaattctctaatcataatgaaaattaaaaaatgataccaaaagaaagtgtattataaaataataaaacgttaaattattaaaaattaaataatttttctaataggagaattgtcatgtatactgcattttcactaattaatttttatgactggtatttttttaagagaaaaacttatattgattcactaataaattaatttttttttgaaaggtaataaattaaaattatttacaaacaaaagaaaaatataaaatttaaaaaatcattgtatcctaccattattttttaacaaaagtacaataataaatggaaaaaataaataaataagtttggaacaacatgtcatctctcaattctcagctttatttatatatatatagagagataaactttgaattagaatactttctaactttgaattaagatatattatagagaattttttaattgtgttttcatgttaaaacattaactatttatcctctatgctgaggggctctcaagtctattgtgtagctatgaacaaagtagtttaataacgggctgtaaaattactagaggagcaccagttatttcacaca

SEQ ID NO: 152469 - DNA, 1026 bp, Cannabis sativa
  modified_base (567)..(568): a, c, t, g, unknown or other
  modified_base (807)..(818): a, c, t, g, unknown or other
tcatatagtttcaaaaatatatataagagtgttttgtttatttttttttaaaaaaaatattaagcattttttttaaaatttcaaacattttttaaggatttttttattcaatatatattaaaggctaatttattgtaattctatcctcatactttttagttttcttttcaattttttttccttatcaaaggttattgaagaaatttttttaattaatatataatatttttctttcaaaatttaattctaataattagttcttagtagtattgtaataatagtgactacaaataatgatacttgaaataatatttcaattgcccaattagtgatagtattgtaaggttatcctcatatataatattttaataataataatataaaaataataactctaatgtgtacgtttttttatttttttaaaaaaattaatataataataataaaaagaatcgtgatacttgaaataatatttcaattgtccaacacctttcataggtggtactctacgattggttagcgatattacctaaatcttaattttttaagttatatgggacatgctanntaattacactaatagtggtatgatatcaaggagggttgtcttttagcatttctcataactaaaatatcattttttttatatttttttcttttttttaattaagatatttgaaaaataataatcacttttttaaaacatcttgattaatagaacaaactaatgaattttctccaatattttaaatatttaaaattctagatgaaatttaagattaagatatagatttgggaaatacaatnnnnnnnnnnnnaagtgaactacggtaatgacaatggatgaaatacaataatgacaacgggtgagatacagtgatgaaaataaatgagatacaatgagacaacaagtaaaatataataatattataacaatagatttgaatgatggagatatgaaaataatacattatgggaaacaccataatttttttacaccaccctatttatttatttttataaaaa

SEQ ID NO: 152470 - DNA, 554 bp, Cannabis sativa
aatcattgatcagagttatgaccaaaatattatcggtcaacgcagtagaaaactcatcgccccttctaatcctaagcagaataggttttttcagcgttttttatttttatttttaatcatttttttagctataaaagaagtggactacaatagttttcagggggcaattcagtagagaaatcagaagccatcaaggaggacgaaaattagagataaaaatcaatcgcgaaggctttttcaacggggttttcagcattcttttcttctatattctcttctcttttataaaattaatatgtatgaattttctacaatgaacatgagtagctaaatagctaattagggtttagatgagtattgtttgacatttttttatggttctaatttgatttaatttttcttcaatttttatgtattttatttcattcgtacttaattatttttaattggctgaccaccaattaactatttatgattttgatgcgagatctgagaagtgagtgtcgattatgctatagtaaaatagaactgaatttcgatatagaacgagagta

SEQ ID NO: 152471 - DNA, 547 bp, Cannabis sativa
aggtgccccccaagtgaccgagcagacttatgactcttggtcacttgtttcttacgagtatattttttatatgttcggtgctttgggtttgaccaaaccttttgtacgcactagatggtaaattagaaacatgctgataatttcgactcaatttgaattttgaaaaaactatctttattcatttattgatcgaaaaatatgtttgttaccgtagtaacttacattagagctatttgatctaatatgatcttttagcttaacacaaaataaaacaaattgcagaaataggaattgtactttaaatggtggtcacctgacctgagtacttctttcctcttctcgaaacctttgggcgtagtccgcccagcaggccattcacttaagagcaaatgttcattcagtacttagcgtggtcatccaacctggtactttattggtagtattttcttacacttttcccattccaataccgtggtactagaaagagttgcattttttcatcatacttacctaatttgtatgctccgaattcgagaacttcgaccac

SEQ ID NO: 152472 - DNA, 707 bp, Cannabis sativa
  modified_base (510)..(513): a, c, t, g, unknown or other
agtatctgtccgccctcttcgttctctatgcctcccagaagtgagatatgccttctccccacgaggttagcaggcttttttatttgaagtccacccctaaacaaggcaggtgagggtacttctatttccttctatgtctctcaaccagatttcaagtggttgatagggaccggggataaggccattaggaagattggcctttttgttgatgattatttcattgtggaaggcatgggcaccacccatacttggttccagcagatccccacatatcaccgccctcccatcactcttgcttttagagatagagctcaaaggcttgatcaactgccgagggatgactgaaatatcatccagatgacctccgaggacaactttgtgaagtataggctctatccgaaggagttcattcgaaagacagtgaaggagaggaagaggaaatttggtgttggaggggctgagagagctcatcaggaggatgaacacattcaacttaagcgtgaagctaannnnaagggaggtgcaagggccaaatagtatgctcatgagcccttgaattcagaagatgaggctgagtgtgatagtcagtagtcccgtgatccgtaaggggaaataatacggggtaagcggtgcaatcccacatcacctggggaaggtcaagtgggatggttctgagactgtgtaggtatgggactgcacagttgaag

SEQ ID NO: 152473 - DNA, 1117 bp, Cannabis sativa
tactaaaaattataatcttaatatgttaaaatattaagtcacattatttaattgaattattattattatcgtaagtttgttgtataaattacatgtataattatttgttaaaatatgtgaaagattaatattgtttaaaagaaattactttaaactaaatcaaccacaaaataaataatctaaaataaaaaaaaattagagagtcagttcattatctttatagcttgcactaataaggagcattaaaaaagagaaaacacgaaacttaataagaaaaaattagcgaataagcatatctttttattattattatatttttattttaagatgtcaagtttaaaatgttacaaattaatgtaaactattcaaacattttgtttatgtttttttttttttgatattaaaaaattaatgtgttttttattctaaaatagtctattgattttatagaaaaaaaatctataataataattatgaatagtaatatataataataatgatggtgagtgttacaaaaatgaaaggacaacattgataataaataaagacagttaattacaatttaactcttaaaatttaatatttttttattaattaataaaaaaaatacacattgaaaaaatatatatctatcaaactatttattaaggatcaatgatatctttataactgtcaacactaataataataataataataataataataatgaaaactaatgtaagttgccttttcattttttttatgtttttgtaatatatagataaatatagatcgatatttatgttagttaaaaaatttaaataattaatattacacaagtaaaaatataattgattataaagttataataatatgatgttaaaattaaattataagccttttcaaaattttctataaaaaaatactaaaatataatcattaaacaaataaatttaaaaataaaaaatattagatatgttacttcatcacattaatacctaatcattctctaggctgttaatacattatatttgaatttctcaatagataaatattgagtaataactttattttttaaattatagagtacatcaccacctttaagaattaactaataatatagttaaatattcaa

SEQ ID NO: 152474 - DNA, 656 bp, Cannabis sativa
atatgaactcgccaacaaaaaccaaagaagtgcaaagcttaactagttggatcgccgcgctgagcagattcgtttcaaaatcatcacacaagtgtgttccattcttcgacatcctacaaggaaacaaaaagttcgagtggacagaggagtgtgaaaaagctttccaagggctaaaggcacaacttgcaaaacctctcgtactctcaaaacctctgaagggcgaggaactgggaatatacttagctgttacggaacatgtcgtgagtgccgtagtaatcagagaagagaatgatatacaacacccagtctattacgtaagtaaaagactcattgaggtcgagggctgatttccgttaatagaaaaactcacctactgcctcattgtagcaacaaggaagctgaggcctgatttctaagctcatcctgttcgggtgtataccgaccaaccactatgccaaatactgcaaaaaccagatgcttcgggatggctacttaagtgggcggtagagttgggccagtacgaaattacttttcgaccccgaacaacaatcgaacgcaaagccttggcagactttgtggtagaatgcacaggcaaaaaagaaagcataccagaaagcaaccccgagcctatacaaatacctcagccaagtcacaat

SEQ ID NO: 152475 - DNA, 681 bp, Cannabis sativa
  modified_base (493)..(495): a, c, t, g, unknown or other
  modified_base (543)..(552): a, c, t, g, unknown or other
ccgagaggaccccgaagccaccaaaagctgaccgtgacagtccctcaccacaaagccaaaaccaaaccggttgtcgctgtcaaaaattttgataaaattttacttctggtggagagagctgataaaattttgatgccaataaatttgggccaagaaataaagcggtgggaggactgtttggaccttcaccatatataaatgttgaatccataagtgaaccaattcttcttaagttctgtattattaaaaagaaagatatattaatattattacattatttaccacattatacataaatttattgggacatgattttgtcccatgattatactttcatgaaataaaaaattagacctcaaaataaaaaattgctacttttagtgacaattttttagtcataatataattttttcgtgactaaatgtgacttttagtcacaacaaaatattacttttgactaaaatatagtatttagttacaagttgtcactaannnagttttagtcacaataaatattttaactaaaaatacatttagtcacannnnnnnnnnatttttgtgactaatacttttaaccacggactttaaaccacaacaagaatcatgatttataattagttacaatttttttacttgtgaaaattacatgaaatatgggattttataaaaaagttacaaaaa

SEQ ID NO: 152476 - DNA, 684 bp, Cannabis sativa
tgaattttctgggacaattttgtccctgtcgtttttgactatatacttgagttggtgtagggcattcttggaatttcaccaagaaaattcctacaacactttcaatgaaatttattccttacagaaagaaataacagatttctccaaccttataccgtttacattatgcatgtatcatagtatatctcgtaacattcgtgactcacagaagaaatattttgttctttttaggactgattctatttgaaatatattccaaatgattaagaatgcattgactgaggaagatgctaccgataatgggggcgggataatacaaaataggccctccgttaaacttgatttcaaccttccatcataaaatgccaaaaagataattctacatacaaatttagtcattttaaattttcaatttgtagtttgcagaaaaaaataatacaaatgtggtccttttaataatataaagaagaatttacgtaaagaggaaaattttatttacatcccaaaaataaatttataaagacattctattttaataatttttattttatataaaatttatatctgtaattgtactaaattatttttaacttttttcttccgattcatattcttaaaaaatatacctatcaaatgaaaataaattatattttaaatatcatgacaaaaaaattaaaataaaaa

SEQ ID NO: 152477 - DNA, 502 bp, Cannabis sativa
ttcttccttcttaatcttgcagccgatacaaacttcagacttggtgaagttaattttttgacccgaaagcatggagtactcatccaaaacagctcttaatcttcttccctccatctgatttgcatccacaaatatgaaactgtcatcagcgaaaaatagatgagataacttgataccttcttttccaaacttaagtccatggatcatatcggctctctccgcttcttggatgaggcaagatagaccttccgcacaaagtaagaataagtaaggagagagagggtctccttggcggatcccacaatttggctgaatttggccacacacttccccgttgatgagtactgagaaggataccgaagtgatacaattcatgactttgtttacccactgttgttcatatcctaggcaaatcatcattgcttcaatgaaacgccaacccactctatcataggcttttgacatatccagtttgagggccatcttttttccattcccaaat

SEQ ID NO: 152478 - DNA, 1491 bp, Cannabis sativa
  modified_base (773)..(777): a, c, t, g, unknown or other
aaatgggccttcacaattggagttgttcatgtgagggagtgctgagttcagtatgtcgtacccactactaatgcccccctaactctcacacaaggctcaaataagaggaatttaatcttaatttaaacaactgttattaattgaataggctcaatactaattggacctaaataaaatctatcaaatgtgataattttatttaacaacctagtccattttaattacaaaaattaaatgggctccctatgtgcatctaagctcaaagcaaatatataggcacaagcacatactgatttggatggtaactatcatgttactaggtttatacgcagataaaagaagattgcaaaatttagctgttacaaattatttatttgacctattgacaattgaaccattggttgaaatcagatcattagatctatcaacaagttaaccatgataatttagatcaaacaataatagattttataaaaacaagttttaataataaacaatatataaaacacacacatgcaacaaactggatagttggatatagtatttatttaatttaaattaattaaataattaaattattttccaaaaatttaaataataaattattattttcgaaaataataaagttaaattaaataattaatttaaaaattaaacctataaatttgaaaaattaggtttctaacaaacctaaatatctattcaaaagatgccaactaatttttcaaaatttatgttatttttaaaagaaaataaaattaaatatctaatannnnnaaatgataaataaatatcatttatctgatttaataatttaatttaaataaaataaaaaaatttgaaaattgacaaaatatctagtttgatttttaaaattttctagattaaaataatcttattttaaatttcaaaaaaggtcattttataaaattaattaaataatataaaatataaaatataaaatatctgaccttaaattttaaaataagataaaataattaaattttaaaaaataaggtaaccaattagcaaaatatcagattttatccattttcagttcaaaatctgctaatatctaaaattaattaattttattctgataattagattcgaaatttgaaaaataaaaataaaaatacaaaattacacaaaaagttcgaaattaattccatgaaaaaatatgaaaaaattagaaaaacaaaaaaaatttgcatttggtgcggatggtatacagtgcataccatccgcgcgcgcacagtggggaggctgcctagaaatcacacacacggaccctgcacagcaggatttccaaacgcgtaggagggcttcagacacggtccgtgcgtgttccttcggacaaaagctgtccgaacacgcgtgacactcgtgtgtcacgtgctgtctgcgcgctcatggggtgtcaccacccctagatattttttcaatttttcaaaaaatcataactaattcaaataaaattgaaattaagtt

SEQ ID NO: 152479 - DNA, 847 bp, Cannabis sativa
ctcgcatcaaaatcatagacagttaattggtgatcaggtaattaaaagtaattaagtacgaatgaaatagaatacatacaaactgagagaaaataagatcatattaaaactataaaaccatgtcaacaatatccatctaaaccttaattaagtgtttatctactcatgtttatggaagcaaaatcacacatattaacttaagaaaagagaagagaatagagaagaaaagaatgctgaaaaccctctgaagaatgcctccagtattgcagttgatctctgaaattcgtactccgtattctgctgtttatttccttctgaattgccccttgaaaactattgaagtccacttatttgatagccacaaaaatgataaaaaataaaaaataaaaaaaaaaacgctgaaaaacctattctgcttaggattagaaaacctattctgcttaggattagaaggggcagtgagttttctactgcgtccaatgatagtattttggtcataactctatcgatattactcaaaattggacgattcaagatgttccggaaggataaaaaagagatatagaacttttatgttttgacatcctccaaaatattatcaaatcctagttaaatttaggcttgaagtttcagctttatttttttgcacaattttctctttttcataattcatctttttgtgagatctttttatcttttttccatcttattcctttgatattttctaatcttcttctattttaaaatctaaaaaataaaagataaaaagcataaaatttctccaaacaagagtagaactaaattaaaaacacactaaaaattaacttaaaaataatactaaaaacaa

SEQ ID NO: 152480 - DNA, 789 bp, Cannabis sativa
atgaatagaactctattggaaagagtgagatgcatgctaaaaggtgctgcacttgacaagaaattttggggagaagcattgaagactgcatgctacctgataaacaggtgcccttccacagctctaaagttcaaaacaccacaagaagtctggactggacatgttccaacagttgaccatctcaaggtgtttggttgcacaacttttgcacataccaaacaagacaaactagagccaagggctctcaagtatttgttccttagttaccctgaaggggtaaaaggatacaaactgtggtgtttagaagaaggtcacagaaaatgcattattagcagagatgtagtattcaaagaacatgaaatggctatgaaaactggtgctgcaaatcacaagcaaactgacagagaaacaacaggtttagaagttcaaagcagcagggatgatgcagatgctacagatcaggtggatactcaagaacattcacattcagagattgatgagcatgcaactgaggaagaaaacttaccatatgattcacaagaatacctactggttagagacagagaaagaagacaaatcaaaccaccagagagatttggctttgctgattgcacagcctttgctcttgcatcagcagaagagattgacactacagtccctagtacatatcaagaagccatcaactcaaggaataaaaggaaatggcttgctgcaattaatgaagaaatgagttctctacacaagaacaagacttggaaaactgtgacaagaccaccagggcagaaattg

SEQ ID NO: 152481 - DNA, 1066 bp, Cannabis sativa
aactcatattgagcgagatgtaacattccgcattagtaataaccgtctaaatgataagacaaaagagtagttgggtagttataagatttatcccaaatgtgattaagtgaaatgtggggactatccacatatcatgagcagttgtttttgaataagtcccaaaaaaagtgtaaatgtcaaacaatatttctataaatagggatagattccatggaataggagacgaaaaatttgagagataattattattatttaaattcttagattgtattttgtattcaataaatatccctaataagaaggactcatggagtatgtagattttaactacaaaactatgtaaaaatatctggagttatcttatcatttattacttatatatatttttctaagaaatttattacataaaggctattttaatttggttaacaaaaatctgcgttaacagtttggtgctttcattgagagccttggtaataaaactaaaaaaaaatccctctttacaaacttgatctaatcatattcaatggctaatgactatcaaaacgatggaaatcgccctagagaaacaactcgtcaccctagaaaagagccaatgggatcttaaagacgccagaccactgaaacatcacgttcaaggaggaacgatggtggtggtgatgaaattcctgaaagaaggaatgaagaagccaataattctgccagattcgtgcctcggagtaaggatgcttatgacccaactagatatgtaccattggtagagttagagaatagacaactttgacaatgcttagccaaatctaaccgatgaaatgctgagtttgaaagagaggctgcagcggctagggcggcacaaggaaaaaaccctcataattaacccgaccctgcaataagaagaccataagggcgacctcgagggtctagaaccaagagataagaaacaaaccaggggaatccctaaaacacctaggaagaacaacctagggatacaagggatactccaatggataattaaacaaataattaagaacaacgacgagatattcctcaaggttccacaggattt

SEQ ID NO: 152482 - DNA, 562 bp, Cannabis sativa
ataattattttaatgtgtgaaaaacatttacttttctatctccaagaaagacgactaatattaaaagaaacttttttttttttttttaaatatttttaggctatattatgttattttattgttaaagatacattgagattactttttttttttaatgtaactcatacgatattttagatactattcaatttattattaaaataagtttataaaaataagtttattttgtaatgtttaaatataaaaataaaaattttttagtaacttattaaattatttgatacattaaattttatttaaatttaaatattatttattcatttatttacaaaatataaagaaaaacaaaatacttttagtaacttatgaagttgtttgatatatactgatttaaatattgtttgcttattaattaactaaatattaatgattaactaaagattaagaaagtaaaatgtttcttttgattttggtcatcttctttgataatggtaaaaaaatatatgtttcccgcatattaaaatgatcacattaaagagtagattgcagtgatataattttt

SEQ ID NO: 152483 - DNA, 682 bp, Cannabis sativa
  modified_base (205)..(205): a, c, t, g, unknown or other
ctcaatgctggatctaaccatgtcctctactatctgagatgaaatccgaatcatactagctacctttcttggacccttcctactcagggtatcggccactacatttgccttccccggatgatagaatatttcacaatcgtaatctttgactaactccaaccaacgcttctgtctcatatttaaatctttctgagtaaagaaatanttgagacttttatggtcggtatatatttcacatttttctccataaagataatgccgccaaattttcaaagcaaacactaccgcggccaattctaggtcatgagtcaggtattgctgctcataatctttcaactgatgggagccataagcgataacctgatcggcttgcatcagcacgcatcccagcccctgtctggatgcatcacaataaaccacgaaattttcttttttagaaggcaaagctagcactggagctgtaatcaacctccccttcagctcctaaaaactagcttcacacttgtctgaccatacgaaacgctgattctttttagtaagctcggttaagggtgttgagattgtagaaaacccttctacaaaccgaggataataaccggctaaacccaagaagcttatgacttctgtcactgttttcagtcttggccaatccctaacagattttatctttcctggatccacc

SEQ ID NO: 152484 - DNA, 1081 bp, Cannabis sativa
  modified_base (202)..(206): a, c, t, g, unknown or other
aaaattataggatcaagaataagttctaataatttgctaatttgttttttatattacatccatgtctaataaaaaaaatgtgtgttatagagatattgtggcgtattgactatagtctagagttctaaatgaactacatatgtcaatagtttttatccacccctaagtgttatagagacacccctaagtgttatagagatcnnnnngagttatgaatataatctagagttcaatagatataacagatcgttgaactgcatatattacttcttaacttttccacccctatcaggtcagaagatctttttactaaacaaaaacttaataattgcttaagaattaacaattattcataaacattgaatttgaattcgaagtgtttatgtggtatgatctcttttcagagatgaatataccgttgattttttattaataataaaacacaaatacatacaaacatgataaatataagaatataattggtattggcatacacaagataaagaaaccatgaagctcaattcataaatgcaattcataactaaaagagaaaactttattaatattctcaaaaaaaattaattgtctgcataaatatgaaatagggaataaaatctcaaaataataattgaaactaaattgttcataaattgaaacaattaaatcaaaaataaaaaaaaaattcgagcttcatctttatcttgaacaatctccacccttctgtccaaccatccgactcaactcgctaggataacaatccaagtttaagcagctggagctgaaataagaagaaaacaaacatggttagtagatctagaattaataacacatggggtaataattctctaaaacacatgagtttatagcatagatagaaagaccttgtttctttgctagaaacttaggacattggggtttccagtggcccttttcattgcaatagaagcattttcctttttgctttgcctcaggatagtaacctttttctttttaactattttcacagctttaagaggcttcttgctattcttccagttcttctttttgctgggtttcaaagcagaggcaatgtttgcctcag

SEQ ID NO: 152485 - DNA, 564 bp, Cannabis sativa
agaagtgctctaattgaatatctaccagaaatgaataattaacttgttaataagttaagtcagtagaccagtttaggagatcccataagaggaacagaaagacataattatgaactattgtgggatcttatggtttttaccaagtagtaatagttggacataccgagttaatagtatatctaacagtgtagacaatttatacaataaatgaggatcaatagaatattagaaatatggtgtgaccataattgataaaagttagattaccttagaatagtcttttccacagacaaagtgtttgtctaaaagtgatgattatatgtatcattggttaggtactttaataagtgtggtatgagaaagatgttggacacatgttcactggaataacacatgtgataaaaggacaggatgaatcaaaaagttccaaggaacttataaaatcatagagtgagtttgagatatatactcgctttattaagtacacagaaaagctacgctgaattaaagcgtagggatattaaatttcaagtgggagactcagtatctctttgagtatcacct

SEQ ID NO: 152486 - DNA, 587 bp, Cannabis sativa
cactatccacaaatattttaatagtgttattgttagcattttattacaatcttttaattaattttcgtgtctaaaattatatgttaaaatattttttaaattcttttcatggcggtatttattattatgcttacaatatcattcttataaatttttgaataatttacagtaacgaaaatacgtttaaagttttttaaacacttgtgctagtttagaatataaaaaactctattttcgacaatataaactatttgaaatttttaaaaaattacaggaatgatattataactataataaataccgctataaaaaaaattgaaaaataatattcttgtatataatttcttgtgtggaaattgactaagaagttgtaatagaggatcgtaattagtattcctctatatataaatataagcatttaaaagtactagttgtgtgtatcagtctctaatgtctcaattaaatatcatgccttgtacaatttattataataatttttagttagtatcgttaggggtggaaaaacgggtttcgacacggcacacgaatacgaacacgacacgaattttacaggttagggttgagaa

SEQ ID NO: 152487 - DNA, 700 bp, Cannabis sativa
gcgccggcaaaagtaaagcctaaacggaagtgggatttcagattttgttttatctcgacaacctttaccggcgcatttgacgaactgcgccggtaaaaatgccttatcttgtagtgttcatagtcagtgcgaggggcattaaagcaaatcttgagaagatcaaggctttgatagatatgccaccaccaactaaaccaaaggaagttcaggcattaacaagaagaatgacaacacttaatagattcatttcgaagtcaactgataagtgtctacaatttttcaatgtattgcgaggcaacacaaaatgtgagtggacagaagagtgcgaggaggcctttaagagcataaggaggcatttgtcaacacctccagttctggcaaaaccaataactggagggatattactcctctacttggctgtcttagaaaatacgattagtgttgcaatagtgtgagaagaggggaagcaccagcaacctgtttactatgttagtaagaggttactaggggcaaaaccgaggtatccccctcttggaaaacctgctcctatgaagaaggacataagaggttacttccaggcacatctgattaaggtgttaaatgatcaacccctgagacaagctttatcaaaaccagatgcttctggaagattgataaaatggtcaattgaactggggcagtttgacataacttattaccc

SEQ ID NO: 152488 - DNA, 649 bp, Cannabis sativa
  modified_base (29)..(31): a, c, t, g, unknown or other
cccatttcacaattttttcaccattttannncatttttgtttctaaatcttctatttttcatacttaaaactatatacctgaaaaaattacattttttctccttttttttagggtaaaccaaaagtaaaggtattggttgtggtggttatacctctggccaccgtttttagtggagaaaacattgtatctcaacgcctattaaggtataaatatctaatttctactaattttagtaatgtagattgctttattttttattttataaatttttttacggtttttctatattattaaatatgtattatgttgtattgaatatgtattgtgtgtaaatatattgtgaatgagaaatgtgatatagaagagtatatatgtatgtattttgtgttgtattaaatatgtattgtgtatatatattgtgaatgagaaatgtaatataagagaggattttatatattgtatatgtatatattgagtattttaaactaataattttgttaaatattgtgaatgagaatgagataggaaagtattaaaataaaagtttaaaatataatttctaaaaatgagtttagaaacaaaagtttagaaattaactctattttgtatcaaacttttttttttaattttattcatgtgtttttattt

SEQ ID NO: 152489 - DNA, 578 bp, Cannabis sativa
accaacagttcctacaatgatgcaaattggtatcccgattcaggagctacgaatcattgtaccaatcaagctcaaaatcttggcagtagtgttgaatatggtggtcaagatcagctatacatgggagatggatcaggtttgcatattaaacatgttggtcattctcatattctttcacaaaattcttctacaccccttgttcttaacaacttattgcatgttcctgaaattacaaaaaacctcattagtgtctctaaatttgctcgtgacaatgatgtattttttgaatttcatgctgatatgtgttgtgttaaggacaattcgactcatactattttgatgatggggaagcacaagagtggcctgtatttgtttgattccaaccatgtcaagattgtcctcctcttcctaagcagcctgccatagaatccaacaccagtagcaccagtagcagctcttttccagcctccttagaagtcaaaacaacctacatggtcacccttaataatgccaaagtagcagtgtctaaatgtgtccaatgtaattctgaagtacaaaatgattttactctttggcac

SEQ ID NO: 152490 - DNA, 859 bp, Cannabis sativa
ctcagaatcatcacacatgaccttccccaggcagtgtgggattacacagcttacccggtgtttccccttacggatcacgggactactgactattacacagtccatgagtagaatgaggtccgctagtaactttaaccaaccggatctgcaagagcacttgaaccagaaaaaacctgatcttcgcgaacaacttggtccaaagtaagaggatcctttccaattacgaatagatgagttgaaggataagttcaaaaggtatcaagtgggggagctaggaaaacaatctggatatgacttaaacgaggaactcgagccataccatccagatatcatgaatactccttttccccaaggatttaaacaccttcacctctcgttgtatgatgggaccaccgatccggtctcgcatttgaataacttcaacaatataatgtgagctagcaatgttacaaacaatttacgttgtattttgtttcctacatcactagttggagtagtgagcagctggttcaataaatttactcatcattccattacttcttgggaacaactgtccaaggacttcaaaaagtagttccaggccgcaagggataggtgacccaaagcgtcctcactcaccaacataaagcaataacctggcgagacgtacttaggtcattttagcatggctactgcaagaataagaaatttggagtacacaacttactgcccttcaggcggggatcactactgatctctccatcgctgggggaaaattgtgggatgacttacagggtcgtccagtgaagaacatcactgagttcaacgagagggctcaggtgtttgttcgaaaggaagaagctcgaaaagagatgaactt

SEQ ID NO: 152491 - DNA, 556 bp, Cannabis sativa
tttgagtccaaaattgctcttccactttatcgctcatttcacaagttttgatccacttttgatccatttgttcttgctatgacaagacaattctcataagtgtaactctcatagttcatttttcttatctcataaaatgagatattaatcactttaaattctcaaataatgtaacttctcacaagttacaatttcttttctcaaaattactattgaaaaaagaatttcaaattctctttattcacaatatatatgataataatcttcacatcaatagtaataaacactattatattactatcaatattattatcatatatattatataatttgtatattaatgtacaaaattaatatataactctcatacatgaattataactctcaaataataatttcatgccaattaatataatatgtatgtaatatacataatattaattatataaacatatatgttatatatctcatatacatataactatatacacatgtaaatatcatatatcatatacacataatatggaagaggtttcaatggttacatttttattgt

SEQ ID NO: 152492 - DNA, 698 bp, Cannabis sativa
tgaaataacaccgacgagaatgtccggggtacgtcattccaaaagttgctgaaacggctttccttcgccgtgttattcaaatggaactcctctaaccgagacttgatttttgcaaaagttatggtgcctctgtaagtaatgcggccagtaaaatactcggatgctagaattatgagtctcggagacatctgaaaaaataaataacaaagtaatatcactgccaaaaaattataaaatggtcgacatcacgtcgacatcatgtcgatattctgtcgacattttaaaacagtaagcaacaacataagttgttcgacaacatatcgacataccatcgatatgctgtcgacattccaataaaatccacacaacacatcatcacacaacattatcgacattgtgtggacatcatgtccacatgaggtcgatacatcacacagagtataactgcataacgtgtcgacaacatatcgacatacaatcgacatgctgtcgacaacgaaatcaaatcaataaatttacattgtgtcgacaacatatcgacatgtggttgacaaataaatttaaacactaaattcagatcaaaattttttccactcaaaatatgtcgacattctatcgatacaccatcgacatcctatcgatacactttatcacacagacatttctaatggtcattttgtcgatattatatcgatatc

SEQ ID NO: 152493 - DNA, 537 bp, Cannabis sativa
atatatatatatatattctaaagtgtgtctatgtaacagaattttcggtttaacaatacttttttagtttctacgttaactttaacagaatatcatattactcaacgaaatattctttaacaattttataatattattatatatatttaaagataaaaattatatagatattttatataagtaaatttttattttaatttaaaatgcttaaaatattatagatattttatataagaaaattttaattataaatattttatattattcttctggtcatacttagtgtgcttatattattgttttttctttcttttcgatcaatacatgtcacataatttttaaaggcacatgatcttaaaatataatttatattaattattttctaatatcaaaatcaaaaatattttaagttaaactatatttgtaaggtaaatcaaacttattatataaagtactaattattaatataggaggcatatatacactaatgttacctcaatagttaaaaaaattctcaaaaattataatctcaaattt

SEQ ID NO: 152494 - DNA, 765 bp, Cannabis sativa
tttgttgaatttcataattttgtgtttgctctttgttaggggattgatggtgttgaaataagaggatctcaaaagtcattatcagcttgtaaattatcagttagaaaaagttcatctattaaggtattgaatcattctttcttaatatattttagagtgaaatttttttgttctttttccaaattagataataaatattgaaattgtcaaatatatatcttttcatgcacatggtgtgtctgagatatgtcatgttggtcaggatactagtagtggattagatgttttggaactttgtaatttgaaggagaagaaggaggttggaccttttaaagttaatgtttcactagttgatgtcgagatggataagataatctcgtatttgtttgagaagagcttaaaatcaaggtatatattgcctgtactacattttttttttcatattataataaaagaaacagtagttattttgctatttaaaagtgtgtgaagaagtgagatgtcaaatatgtcaattctagtgttgatattttatttagataatgatgttttttattattttaatgtagagacatcttagttgacactgaatttcatcagttggagtgtcatatttgtcaaacacttgctctttctcagaacattaagggagaggttggtgaataagtatgtatattatttcaagtatatttaatttattttgttaacacaacgtttggtttattttgatatacaacatttagattataaacattgtatcggaga

SEQ ID NO: 152495 - DNA, 638 bp, Cannabis sativa
  modified_base (63)..(66): a, c, t, g, unknown or other
  modified_base (368)..(369): a, c, t, g, unknown or other
acattaaatgttatttatgatctatattaataagtaagtctgattatattgaaatgagttttnnnnagggcataaaacccaacaaccagcccgttttaaaagttgtgaaccatcatccacttcttaataccatgacgagagcactttctgattaaatccttgaacctctcccaagactcatggagagactcattctcttgttgacagaaattgttgatctctcctcgcagcttagcagactttgctgggggaaagaacttagacagaaatttagtagccaagtgattccatgtagctatagaatttggtggcaaggagattaaccaactcttggctctttctctgagtgagaatggaaacagtctcanncggatggcgtcatcactaactccattgactttgaaagtctaacataactccatgaagtttgatagatgcagattggggtcttcagaagggagtccaccaaactggactgaagactgcaccatttgaagtatgacatgcttaatttaaaagttgttagcatccagtgttggtggtctgatgcatgactgaacccccgtaagggtcgggagaatataatctctcaagctgcggcaattagcttgatcttcaacggcaccgccattattacc

SEQ ID NO: 152496 - DNA, 724 bp, Cannabis sativa
  modified_base (535)..(567): a, c, t, g, unknown or other
  modified_base (665)..(675): a, c, t, g, unknown or other
agttcctggtaaaataacttccaacatcattatctatgcccttctagctcttacacttagttagtataatgtatattatacgctaagcgttttaacaaccaactcgcctcatcagtgtctctttacatattgcaaagtagatgtctcaatatgtattatcaacatcttccttggtattatgccttcagacatgaaatggtttctcgttaatacttaagtcaatagtttgtacatccttgtcttgctagggactgtgcattctgtgagttataagtataccctattgacttctgcatttaatgagttatttcatttaattatttaataacataattgtcgttatatttgacggttcatattccctgatattgacacgtgccatcatttgaagtacgagccgaatttcgggtataataacttagctacctataaatgatgttttagtaaactaatataattactcaaaggaggcctcaatcatttatttttattcagccaaagtcgaatgaaattttttcacttctaaatacttatnnnnnnnnnnnnnnnnnnnnnnnnnnnnnnnnntcccactcaattgaactatcatgttcttaagatgtaaatatccgccagttgcatttgttagcatccatgaacacctctaagaacataaataatacaannnnnnnnnnnctaaccatatcaggattaagatccttagacctaagatcaactagtgata

SEQ ID NO: 152497 - DNA, 567 bp, Cannabis sativa
  modified_base (498)..(529): a, c, t, g, unknown or other
tatttaaaaataacatccaatctgatccgatcacaattggatatccaatgtttggtggtcgattgtaattggatcggtgagttcccattggattggatcgatttatgcacacccctacactaacttatgttagtgaaatgtacacgtgtactgctttgattattctaatttttcatttgcacctaatctaagataaatcttatttgataaaatgaattacaacatattaaattttcttcttaaacatataaataaagaaaacaataaaataatttttttagaaaagttaaaaactaaaaagtcactcagggtgaattgatagttaaaaaacgaatgtcttgccagctggcatgtgtgagagttttctctcaactttcatacgtctgtttctgcatttaactggttcttacgattgagttttcacgttccgatcactgcgttttcactggtggagcatgatgtcgaatgtgtaggttcttcctgttgggttttatgccnnnnnnnnnnnnnnnnnnnnnnnnnnnnnnnntcaatttagaagtgaagtatgtttacatgtatgttaca

SEQ ID NO: 152498 - DNA, 1019 bp, Cannabis sativa
aaaccccaaacctaaaaacccaaatcccagccaattctcattcccattcccttccccattcccattcccattccacgacccatgtccattatcatttgcattcacattcctattctcattcccattccccagcccattgctattcctattgccattcccattcccattaccattcctatcccattcccattctcattcccattcccatccccattcccattcccattctcattcacattccaattcccattctctgagccatttcaattctcattcccactctcattcccattcccattctctcgccccttacaattcccattcccattcccattcccattccctgagccattccaattcccattctctcacacattcccattcctattcccaaccccattcccattccctttccccagcccattcccattccccatcccattcccattcccattccgcagcccatttcaattcccaatccccatgcccattcccattcctcgtcccatgcccatttgtattcttattccattcccagtctgttcccattcccattctccaaaccctaaaaccccaaatgccaaaatcacaagaccctaatggcattaattgcgtgtttactatacagtattaagacaaagaataaattcatggagaaatgtaacgaaataaataaaaaataatcggaatcaatatttgtaatatgttgtttactaattttttttggaaatagaatagtagtgatttatcttgtttactttattaggaaatttaatcggaattcttaaattgactaaattgcccttttgagctaaactatattatatgatagttattttgtcagatatattttaaaagacaaaattatcattatatattatatattaaaatataatataaaaataattaaaatatattacccttaatggcgttccttacaaaattagtggggaaagttttccctttcttttctcccttatttaatcaagttctccattttctaattttaatgatgtaag

SEQ ID NO: 152499 - DNA, 591 bp, Cannabis sativa
catcaaaaaactatcgataaagaaccaagaacacggagataatatgtaaagaatggttacgaacacaaaattattcgtcattcgataaataattgagaacctactgaaaactattgaggaaggtcttcactgaccttgggacatttacgtctagaatccattgagaacatatcaaaagagcatcgagaaaaataagaacacacaaaatactccaaaaaactagatctcacgatttcaacgaagcatatatcaaaaccaaacaaatacaaagaagaatattaggtgtatttttatgtatttttagagtccattttagtatgtggttttagtatttttatgctttattgttcaggtttacgcttgttttattcttattttagattttagtggtaaaatatatcttatggattgaaatgagagaaacatactaaataagatgaattttagggatttagcatgaatgttagagttgtaagatacaatgggtaaaaaattccaagttttggacgctgagtttgtgattaaaaaaaagtctaaagcttcaagcaaatttttggctatgattcgttcatttccaaaaaaaaaaaaaaa

SEQ ID NO: 152500 - DNA, 693 bp, Cannabis sativa
cttccattcagatctctagctcttaattcctttctgtcgcagagcattatcaagatctaaacatagatcttctctccttcagtttggttaactactgttttctgcactatgattgggtacttgacttgctatgagtggacatggtactttatcactaaaggcttgaagattgatgaagaacaataataataaggattcgaaatcattatgaaaggaatctctcatctactagttgtttaacagagttagaaaactaggtttaaataggttgaagggttggatgaaaatgagagcatcatgttccttttatagtattttaactagggtttaagatttaattatatggattaaaaaagatataataatgggcaaaaatacactaagtggccggccacacatgtgggcctcactagttacatttttgcaactttatttcaaccatcactactacaaaaactagattttgcgttagttttgacatcggtaataaaaccgacgctattaaagaactcgtgaattttgcgtcaattatgtactgacccaatattagcgtcgattataagactatttgtatcggttctgcactgacgctaaccttgagtcggttaacaactgacgcaaaaactcctgcgtaaaaaaattaaatcaaccgatgggcaaagcccatttcacaaaccctaaatatatataacc

SEQ ID NO: 152501 - DNA, 1014 bp, Cannabis sativa
  modified_base (204)..(205): a, c, t, g, unknown or other
  modified_base (740)..(741): a, c, t, g, unknown or other
  modified_base (958)..(963): a, c, t, g, unknown or other
gacttaggtctagttacagtgaagtgttcttagaatagtccaagtggatcctggtcacggaatgtaaaactcatattccatacattaacatagagtttgtatccattgacagaaattggatattaataacttgtgaaagtcatactatattgtccaatgtattctaggaaactgaaatttaaaatttttatttggaatctaaannttaaagtcaaagacttaaagttatactaaatatacaatgagttttattcttgcaggaccaccactactaatctaactctaagtctaagttgcctatagtaaacatatacaagttggagatttctaagatcaaggatttatatcattttgggataaaatgtcggtaatatagtcatttgcgccattcaatttcataagagaaattagaatgacatcataagcacataatttataaaccattcatccaatgatatactatttaagcaaattataaatgaaaaagctaagaggaaaaactaaaggataattttgattaaaataagaatttaacgatgtcccggtaggcgagagtcaaagtaatcttattttatgaacttcttcattgtttcatattgtaaacactaatctaagttgtcatctttggatgtacaaatagatgttgcatttacaaatacttatctattgagatctaacactattatgtttgtctaacggatgacaatcctttgggatttgttccattaaaacaacaaatnnagttagaccaacaatgaagactcaaaatttataactacaacattaataacagaaaataacatgatttaatataaattcatatacattcagaaattatcatacatttagcaagtaagaaagacatgtaaaaatacaaaataagtacatcttaaataattgccaaggtttcaaacaaactgatatagtgtcccaataggcgagagtcaaagatatcatnnnnnnaatagagtagtcagctcatctaaaatggacactattctagcaaccttttat

SEQ ID NO: 152502 - DNA, 520 bp, Cannabis sativa
catttttagtggcggactgacatcccgccgctattaaatattattaccagcggattattaggggcggaccccgctagtactaaactcgtcaaactgtctatctgacacattaataccggcggaccccaatgctatttatccgccagtattaattttttaataaaaaaatatttaataatattaattgagaagaaaataataataatatataagattatatttatataaaaaataacagaatttttaaaaataattaatatttattcaacacattgtgcatcaattaatagaacaatacaccttaaaaaattgtcttagttaaaatgcaatacattgtcattgttgctaaaaagaaaaatacattatcattgtttaaatgagaatattcatttaaaaaatctgtaattttgaagtcaatagtcttaaatcttcactatagtggcgtcgaccgtgaaatgtaacaagatagtagagactgctacgaagataataacttgctttaaaattgttgtctcctcat

SEQ ID NO: 152503 - DNA, 1158 bp, Cannabis sativa
ttcacaattaggaatttaatacaatctttacaacaattagtaatgtattaccaacaacaaccaagattcttggttgtatgcacaagatttcctatgcagcaactaagttcttctttaacacttttcttcaatctgaaatctctttagatctgatgacgaagatgacactaaactcccttttgttgaactcagcaacaccaggctttgatctttctgctatggatatccatcatcaagctatgcaatcagacctgaaaaacagcaacgaacaatacaagataccacacacaataccacacgatatatctgaactaaccaagattatgaattagctagctaactcgtttaaaaaaatgaaactagctatttatagacaatagttcaaccgacctaagaacaatttataccaacagttaaaacataacaaacacacgaggactttaacaaaaaactggtatgcagttataacaaattaaaaccacaaataagactgaactcactattaatataatctgtcaaaataataaaccttacaattaccatcaaaaagatatagtagtttgaactttatatttttttaaatatctatataagttatatgataatgtaaatatatataataaaatatatatataacaccctcttaattgggttgatcgggttagttcgggttgattggacaggttggtattatttttaacccgcccaatataaagattaggcaggttatattttcgtctggttattcggtttgcattatttgtcgggttatgtcaatttgatttgggtagattattcggtttgggcgatttacaaaaacttatgtacaaccttagtaaaagaggcaataagtatggtttagagagttagctcccggacaagtgcaaaaggcacaccttcttctcccgtagttaagatatagtaaggcacctctgggacaagaaagacctattcatttaatgcagcatggggaaaatgtctggaaaggcccataagaggacatatcagatatcgtaagcctgatttagggtgattacacgataatcaaagggactactgacgggtccattatgaagaatcacatcaatcaaggaaggaggaaggctaatctcacctaacctctatgatacctactatgtaggtaatgcatgccctatt

SEQ ID NO: 152504 - DNA, 536 bp, Cannabis sativa
  modified_base (472)..(472): a, c, t, g, unknown or other
catttgttattgattcttagttcacaatgaacttcttagtaatgaatcttgttttatatctttatgtttcaccatgttgcctaatgaatatttattggtaaaaaacctaaacttaatgaatgttctccaccctattagacaactctactaaactagatttcattgtactttaggatattaatttattcattcatggcatactgtaccaccatttaaattctgtgcattctatagtttaatttgtgtctcaaattaatattgtagttgaactcttattgtacaaaatgtaatcactagaaacattgatcttattgttctaataagtcatcttaaggatgaaccaaaatactcttgaaagagcaaattgttcaacatgcatgttgtttagaaattgtaagtaattactaaataacatgaattattataattttatcaatgatttgtggattattaatgattagttatggattcncaataaccattaaaattaaaggttgttgtgaatcataattaatctaatacttgaggtgtaagtt

SEQ ID NO: 152505 - DNA, 695 bp, Cannabis sativa
aatagagctagacacacctgacaacactactacaaaaagtggtattttcgtcggttttcaagtgactaataaagattttgcgtcggtttagaaaaccgacgtataaaccctagacgcaaattctaatttatttgcgtcagttataaaatgacacaaaaaactattttcgtcattttataaccgacgcaaaaaatttcaaaaaaaattaaaagtattttgcatcagttttgaagggacacaacaagctatgcgtcaatcttaaaccgacgcaacaagtaatttttgcgtcagttctaaattgacaattatgtgtaacacaatattttccacagaaaactttccacatattaaaaaaaccacaaataaactaataatgttttgtccatatataaaaataagttaatattatatatccatataaaaacatgtacattattaattgatagttcactattaaaaaataataatataaagttagaattaataaaagataaattttaattaagacaattacataagtaatattacataaagtgtctatataacaaatattttaacaatactttcaatatacaagcccaaccttcataacttagtaaaaatttacatttacaatacacaagcctatcctccatatgtgtgattagaaaagattctcctactcctaactttcataactcttgatattattcgaa

SEQ ID NO: 152506 - DNA, 573 bp, Cannabis sativa
  modified_base (527)..(528): a, c, t, g, unknown or other
tatattagttccttgcctaagaccttacagtctacatgttacaaatatactctgatactcacgtaattattgagttattccatattgcatcaatccatattccccttatcgtgacacgtgtcctccactaagatgacagccgaatttcgggtataacacaaccgtatccaatttgcttagttagcatatcttttcattcatcggttggacttcatgaagcaacccaagtgtgtaattcattgtaaactccctaataaagggaaagggaaactaagtgtaattctcaaaatactataaatacacaatgaatcctacggaaatggtgaattctcttgcaatacatgctcaggcaaacttgagaacttacattcattgtattcccaaaggcttttcttactttttctcttttaattgtttatttcttcagttctgattatttaaaattagttttctaaaagtcttaataaatattttagtgctttcattgacagctaaaggaatcagtgattgttgggttttatgccctnnataaaactcattttaatataatcatatttacttattaatatagat

SEQ ID NO: 152507 - DNA, 814 bp, Cannabis sativa
ttaaacaagtttagactccctctaaaactttgccgcaatcctttgtaattcacttcatgaatctgatttttgaaccaccattaaacattcaactccattggtctttgatgtgtgagtgcttacttcctccggaagtaaggcttgaacaagtcttctaccgaagacctttctcttgttcaatcaagttgtttagaccgaccataagaccagtataagaacaaatacataagcactaaaacctagttgaacaactgggttctcacaaaaagaactctctcttcataaaagaaaaatatgcaaaaattgaaagctaaaagagttgaatcaattggctactctctaggttttatttatagaacatagcaaccctagagacagccacaaaatcaattccacaacagtacatactttcctaaaaaaatcctgatttgcagcaatagagtcgagtttctacaacaacaaatcagaccagaaaggaaacttgccaaataggtgtccgatcacgaacatggacttcatacctgccaaaaatagtgtgcttgatctaatgttatcaagacacacttgaaaatattaaagagaaagagcaaggtcaaaatttccaaataaaaccaactttcattaagagaattccttctcttataagaagtttccaaaacaagaaaatggacaactaaaaacgaattctttcatttgatagaaaagaggaataaagacacaaaatcaaagtaaataaaacaatttaattacacacgaaaatcacatattaaataaaaaatattttgacacctaaatttgcaaaaaaaaaaaaaaa

SEQ ID NO: 152508 - DNA, 615 bp, Cannabis sativa
  modified_base (423)..(423): a, c, t, g, unknown or other
ttttttttttttttttccatttgtttgaaaaatccatccacatttttcttcttttatgtttaattgtatttgagccctctctctcatgttcttctttttcttttgtgggtatttttttgtgtttcaaagtccatggttattattttttttgtttttttttttcaccgtcttcttcctcaagttctttctctccattaacatataagttttttttggaagagattttaatggttacattaaatatgtaaccatcatggttatatttttttttagtcattagattatcattaaatagttgtgattaaattgaaaattaaataaaaataaataataattaatttataacgtaatagtcacctaataatttatttctttataaaactttaatgaagattaattatatttaaaattaaattaattatnattattaattaatttttcataatttattattaaataaagatcttttaacaatttttcccctgaaattattaaaatttttctagcaaaattcttaataatttaaaattatacacatataatttcataattaaaattttattatacttataactttaatttaaaattattacacttaattattaagtttttttt

SEQ ID NO: 152509 - DNA, 909 bp, Cannabis sativa
tttttttataattagaagcaaattacttaatgattatagtatatctatattagttttgttaaaatattttttatttgaaacttatgtcgattttttaatttttgatgagctgttgtgggttgttggtatatggattttgttgtacaatatatttctgttttattgtatagtatattatcattcttagatgatatatattttttattttgctatatataatcgtagtatataattttattagcataatacaaatattttaatgtatgtatataattttattactatagtatatatatgtaattattatttttatatattttaattgtatgatatatgtttattttaaataatatttagttagtttctattttactatatacaatggtggtatataatcttattgtcatagtatatatattttaattgtggtatataatttggtcagtatagtatacacatatatatatatattattattattattgttagtatatatattttgatgaatagtttatatattttttgttatacggcatatcattttttttaaataatatttatattttattttttattgtatttttgttgacatgatatatatttttattagcatcttatatattttattttaatttgtgttatcaattatatatacatttcaattgtaaggtatatattttttgttatatgatatttaaattttattatatagtatattattttattttagatcgtgcatgtttaatttctattttattatatataaatgggatatataattttacaagcatggtatgattattttatggtggtatataatttttttaatataatatatacaatttttttcaataatattatatttttctttttattgtaggtatatatatatattttattgtatagtat

SEQ ID NO: 152510 - DNA, 617 bp, Cannabis sativa
  modified_base (50)..(59): a, c, t, g, unknown or other
ttcaagaaatatggatttaaaacggtgtatgtgtgatttggatgtgattnnnnnnnnnntatgtgtttattgatgattgatttgtttgcgaaatttttacataaaataattggatttcgttctagaattattttgattggatagtatggaaaaaattaagcaattcacttttttatagagcttaatttcgattttatttgaattagtaatgaatttttgaattcggaaaaaatcaagaggtgtgacacctccttgcgcatgcggatccttggtttcttaggtgcacgcagcttcggacaagccttatgtctgaattttctcgatcagttggtcagtttttgtctgaatcacccccatccgtgtgcggcatttcacgccgagcacacctctcctgcgcacgtggatggtatgcagtccgcaccaaatgcaatttttttttcatttttgaatgctttttcatggaattaattttgaattttttgtgtaattttgtattttgatttttatttttgaaatttcaaatctaattatcatactaaaattaattaattttttaattaattttagatataagtagattttgacctgaaaaaggataaaatctaatattttgctta

SEQ ID NO: 152511 - DNA, 512 bp, Cannabis sativa
gaaaagaaaagaaaaaaaaagttttgtagtatttcatttttcatttgttttggctcctagaataaatgtaaaagattgtcagtttcgttcaaaaatccccaaaaaaaaggtggtttgcggtaccctttacggtagtttgtccaaataatttataacatatcttcgtttcaatgtttactcaaatatttgtcctaaattgatctatccatttcgagtgctcacttttcaatttccaactctatgagtgaaataccttacccaagaataaatatcttcaaaacccagtgaggctaatggagtggagactttcacttggtatatttttcgaaagcatttatgtgctatggtttgcggtaagaaggtttaggtttggtgcacacactcacgactctagatctattcaaggtaattttgtatagttcttattggcttattactaacattttgcttaaatatttgtgccatttttaatttcttgacctgaaaaatatcgttgtaaagcccgcttagtt

SEQ ID NO: 152512 - DNA, 533 bp, Cannabis sativa
agtattcgcttaactgcatgtagacaagggcttttgcataaactgacagaccttgtttacactaaacgagagttcaggtcttgtaatggtcaggtattggagagcaccaacaactgacctatacaactgaacatcttccaatggttccccctggtatgcagataatcgaataccactagtcatgggtgttggagagggtttggcattgttcatttgagctttgagaaggagatccttagcatattttgcctgtgacaagtgaataccagctgctgtttgggtcacttcgatcccaagaaaatatgcaagaggaccaaggtctttaagggcaaactggctgttaagagctgcaacaattgactcaatagtagcattgtcactccctgaaatcaagatatcatctacatacactagaataagtgtaataaaagtagatgtatgttgaataaagagggaataatcagatttggatgatgtgaagccaagagacaaaaggcaatgctgaagcttttcaaaccaagctcgaggagctt

SEQ ID NO: 152513 - DNA, 944 bp, Cannabis sativa
aaaaaaaaaaaaaatctaaaattcagacgaccgtttaaaccaactaaactgagatttattttttttaaaaaaaaaaaattaagtctttaaatttgctataattatttgaaaactaaaaaaaattagagtattgtattaaatatcatataatttaagaacaaaaactttcttagttaaataaatgatataaaataatttttttttttgaatttgctcaaattattagtactactaatatggtaatgagttatattaaaaaactcgtattattttataaatgtatgtatataatacgtaaatacatcaaattataataaaataaaacaatgaataataagacaaaaaataaaaaagataagaagtaaaactagtttaataaaattgtacattaaatatgtacaaaaataattatattatatatgtatagtgtataatatatatgttcggtcggttctcagtttaatcggtcggtttgccattgacgctaaaaccgaccgtgcaaaggcagttttttcaattttcgattttttcgatgtttggacggtcggtgtactcagtttggtcgatttcttgaattttttgctcaaccctactttttatgggaagcatcctacgattggttagcgatattccctaaaatatattttcttaagttatatttgacttgatatttaattataccaataccagtatgacacctaggcactagtgccttttttaaaaaaaatattattttttgttttatttataattttacgtcttccaatttttgtttacaaaaatatttttttaaaattttaaaattacaaagatacaaaattttcagcaaaaagtaaaaaaacaactacaaaactataagaaatcaatctcacaacaactataaataaattataaaatagggtaaataccattttggaccttctgttttgcaaaagttaccaatt

SEQ ID NO: 152514 - DNA, 589 bp, Cannabis sativa
  modified_base (290)..(301): a, c, t, g, unknown or other
  modified_base (543)..(545): a, c, t, g, unknown or other
tcgattattagtttgggatttttactccatgtttttctcataatgttgcaaaacaatttttctttaattttataattttcttttacaaataaattgcaatttatgagattgagcttcatctactttgtcttaaataaaaattaccaattatatttttatgtttgtatgtgtaagtgtttttattattggtacaaattctacgatattttaaactcttcatagagttattactacacaaacactagaaattatttctgtgtttataaataattgttaattctaatacaatnnnnnnnnnnnngtttaataaaaagatcttttgatcagttaggggtggagaaaaagttaagaataatatgcagttcaaagatcttttatatctaatgaactctggattatattcaaactccacataatctctataacactaagagaatcatgatctttataacctttaggggtggatcataatctctatatacctaggggtggactttatccatagtactccctgtaaaatatattttctttaaacatggaagnnntataataaattagctattatcagtataaatccttgatcttgatt

SEQ ID NO: 152515 - DNA, 524 bp, Cannabis sativa
tgcgtattttgcctagtagcaaaatatacacgttcttgggcgtccgtcaactccgtgtattgagtatactgaggagtatacccccttttgtgccgcttatcctccgtccggttgctgcctttggaggacctcttgctccgagagccttgagaaggaccggctaaacttgcggtcggagcgaagtgcgacggggcctgtccattaatccccgatggatttccaaagtgggaagatgcgggggccaagggtgggccttaactgtatcagggagtagcagaaaattgtatgctgctcatctgcggagcggctgcaggcaaagtgcctgggagctgagctccgggcacatatcctgctattccggtgggatagtatcctccgtaggccactatttggacctcttccaggttgataaattttctggactctcttgtggaaatcttgaaggttggaagccccttcttgttgtaactcgttctagaaaggagtccctgtacggatgcctgcttggagaagagcaagctgtt

SEQ ID NO: 152516 - DNA, 1174 bp, Cannabis sativa
tatatatatatatactagtaaaagaaaggccccatgggccgatattgggccaagtaaacaaataaagcaattctaatataccacacaaggaaatgtatgttattttaaaatttagagatatttgcagcataaatacttttatatactaattaaatacgagatttttacaccatatactaaaattttcaattttttttttactgttgggcggaatttttttcaaaaatactgtgtatttttatactgtgttctgtgttaagtttttactgttgttctatggttgttttttagttgtttaactgttgttttaattattttgttttgttttttaccgttattttataaaaagacaatatttttattaagaaattccgtatgacagtaaaattgtaaacttttacccaaaattcaatatttttgtaaaaactccattaaatgccttatattatatttgaggggcgactacttaatggttacatttttattgtaaccatgatggttacatttttattgtaaccatgatggttacatttttattgatctataatagcaggttaccaacatgtaaaaattcttttttaagaattaaattaactattaataacaattttcttaaaataattaatctttaatttaaatttttaataaggccctttttagaaattaatattaataattttatttttatatttaagtctccattataattttttttaattataatatttataataaaactctattattttataaaaattaaactttcacccttcttgctaagtttatcaataacacatgtttaagatccataaccaataacaattaataactttcaaatttttaacatatatattcaagatcaataactaataaaattatcaactttcaaacttttttaataatacgtattcaagatcaataactgataacattaataactttcaataatctatatttaagatcaataacaaataacgattaataatttttaaacttttacaattttttttgtgattttactctgatcaattgatacatatacgatatatttagaactgcaaagaatgaagaaaaaaacagcttcttctctctgagaaaatataactatatgacagagaatggaatgaagtacacatgtgtcgagtgtggcaaaaaaattatctttatttttata

SEQ ID NO: 152517 - DNA, 778 bp, Cannabis sativa
tattttcaaaaaaaaaaaaaagtagtatttttgtaaaaaaattcttgtggcagtaaaattataaatttttgtcaaaaatttaatatttttataaaaaccccttaaaaatgaccaatctcaacatactaatcttgatggttctttatgtttgggaaatttacatggtatactgatttttactattttttacatttttactgtgtatttttataagtttcatactgaagtatactgtgtttatttttagattttttgtttgttttagtgttgttttacggttatttttcataatttatttttttaacgttgatttcaccgttcttgctccatcttgctggaattaatgattgttttctgggtgttctcgtggtgctgtggtggttctatctgtgggtgtggaagatggaggctataaaatacatttcttcttccttctctatggttatttttgtggtttgttttttttaatctggttctcttataaatacatttcacaagctcactaaaaaaaagttttgaggtgtgtggttcttttatgtttttctaagtagttatatttgctatttattttacatttatttttgtgttgttttagtagtttttttattctcatttttttagattgggcttgcaaatatagatgctattgcatttagtattgaggatgtgcaaaatattgttagtttttttaatcccttttcctttcttttgtttgatttgtttaagtgatgttttgtagttgttttgccatgattatttatttgatgtcgatttcact

SEQ ID NO: 152518 - DNA, 725 bp, Cannabis sativa
  modified_base (66)..(70): a, c, t, g, unknown or other
  modified_base (226)..(228): a, c, t, g, unknown or other
gattatattaatttttctaacactttctttactcttacactcgttagtgttctgttaaaatctcannnnncacatctcaaaaattgtgaaaatttatgaggatgaagccaagaattttgtgcatctattttctaatggacacgtctcgagataaagtagttttcatccactaacaagaattttaatcgaaacagtgaaaattacacatttctgatagtggtacccnnntgtgaaatgtggcccggacccatagtagaatatttttttccactagtcacaagaatttttactactaagacatgaatatgaagattggattcaagttaatttttgttaaaatggccccctaattaaaaaattgaaaaaattcttctttgcaaggtatattttaaaacgttttttccatcaacttacactcgttagtgttctactaaaatctaaccctacacatctcgaaaaatcgtgaaacttttcaaggacgaaacaaaaactgtcgtgcatcacttttctattagacacattgagatataatctagttttcatgcactaacaatcattttaatcgaaaatagtgaaaatctcacatttttgatagtagtatccctttgtgaaatatggccaaaccgcatctcgaaatatttttctccactagtcacaatgaattcttacttctaagacgtgaatttgaaaattgaattagcattaaattttgttaaaatggcccc

SEQ ID NO: 152519 - DNA, 558 bp, Cannabis sativa
actagctatcttaacataataacccatcaaactgcaccatatattatatattacaaaagtatttttttttataatatgatttattttatatgaatagatattacgaaataatggatactattcaaaacataaatttatatgcttaattttttttatttattaaaaaaatctgttatttttacagagacagttacatcagttgaaagagaatcaaaattaaatttgagttagatatttttaatatagtgtaaaaaaatatattttttgatgcctttcttaattaagtaactaagtataaaaactcaaatttctcattgttgtttgatcaaaatttaatagtttaatattctaaagttgatattcatagttattttttttaataaccaccaaaatttaatacccattgaaaagtgttatatatggaacacttttaattctatatatgaaatacttatcaatgggtattatcccttggtggttactacaaaaataactctaaatatcaattttaaaaatattaaattactagattttgatacaataatgaaagaaaatttt

SEQ ID NO: 152520 - DNA, 520 bp, Cannabis sativa
tgtttaaacaacatacttgtgagcagatctaaggtcctggtaaaataaatatccaacaacggtattctcaagtctttttttatgttgtatccttagttgatcttgaaatactcacaccgtagtcttctgaatcttccaccacacacaaggacttgtgtgggctagtaggataaagtctatacaaagttcttgtcgaattctcaacacatgagcaagaactattctctagtgatgcagagaaaagattaatcagataattaatctttttttaggcttaccaaaaaataatacgtatccatttttagtttatacagtttatttaataaaaatcaataaagatttattttattaattatttaaattcaaatcatttattaaactatatttaatcatttgaataaataatataaccgagttttgttatagatatttatttcctataaccgattaaaggaatctctcaaccacttgaggaaatctctcaactaccttgagagaatatctcagccatcagaattat

SEQ ID NO: 152521 - DNA, 602 bp, Cannabis sativa
cctatatggtgccttgtgcacactcttgccgggaaactcgtatgtcttgagtttgagggcggatgttagctcgcataatgttggaaaaaataataaattttaactgcagcgaaataataaagaaatttactcggttgggtaaaattactaaactcacaaaacgaaatatattcacttatgacttcaaaatttcatacactcactatctaaatctctccctccctaatctcaatacaactttttcttcttactcactttctcacactcacttcttttttcataacttactctttttctcacacacacctctcacaaacataaaaaaataaataattatagagtcccaaaacttaggcaccaagacactctaaaacttggtcaccaagactctctaaacttgtacaccaactcattttctcacaattaataattacccaaaaataaattgtaacttaacaattatagataaataaattaatttgagtcaaacttcaacatctccaccttgactcaaattctctaaactcacaactcaaaccatcaataaagtatatatgcatcgagttcatactctcattacttcacttgagcacttgtcttca

SEQ ID NO: 152522 - DNA, 568 bp, Cannabis sativa
aagatgactgttgagtagtttttgatcagagaatatttttttttttgaataaggatgagattgaaagaatgtaagaaatcctaaaattaattagtaaatgagaaattttaaaattagataagggcaattgaatcaagtgaaaaattcattaaatcaaaattgtagctaaaattccaaaattaaggtgggctaacttttcctaaaagttataaatttcacttaaatttttgaaaaaactattttttaaattttaccaaacacatactaattcataatttttttcaaaaataattttaactttttaaaaagttccccaaagggccataagtattatttatttataaatataatttatatatttttatcttaaaaactaaatttaattatctatttataattaaaaattaaatttaaagatttttacagtaaattactcaaaatataaatatatattcccggttggggtacccgagagagacctaccgtttggttggtggtaggaagcacagcggaacatatctccaacaaaagagcagaggtggcccccatataaaattgtctttgcgga

SEQ ID NO: 152523 - DNA, 1065 bp, Cannabis sativa
ataaacaaaatcaaacccacataaagtcgtatatttcaacataccactactacaaaatgggtatttagcttcccttttttcaactcattttataaaaagggaagctaaagggtgtaaaaatactcgattattgaaaattaacctttagacgcatttttttttataaaaactgtaggtatagaattgcattaattataccattttgagtcggttatatgaaattacattatataaacgacattgggttatatgaaataacccaatggcgtcggtcaaccgacgccatagggttatataaaaaaccctatcgcgtctgatatcatcatcttcttcctcacgatcgaacccacaacccagggaacccaaaaccctcaccaaccaccacctccgccaccccctttttctcctatttctcaaccatttgagccaattttttttaaatcttccattttcgatacttaatcccatacacccaaaaagttttaattttttaccctctttaagtgtcatccgaacccaatagaaaatagtgggtatatataactccggtcaccattgtttgttgagaaaatattgaatctcaacctcttttaaggtataaatatagtttctattcattgttataatgtacattattttaatttttagtttttcaaaattatttttgggttattttcatattagtaatattattgtgttgtatgtgcatagtgcccagattttttgcagaattgcttgtcagatttcgcttataacgtataaatttaaacctcaatgtataaatatttttctatattttatttaatatgtgtttatatattgtgtgtatatttttttatgtaaatacaatttgtaattgtattgtatatattcaaagtaatatatattaattgtgaatgcgaatgacatttgtgtaacgcccgtatttttataaaaatattaattttatttagaagtgtaaaatgcgaaaaaaatcataatgtcgcatttttatttaatacttgaaaatattcacaactggccagttttcgtacaaaagacataataaataataactaaaataat

SEQ ID NO: 152524 - DNA, 553 bp, Cannabis sativa
taaaccgcatttttttttgcagtggtgcgggcggtttgagtagtttgatgaacacccctaaaataaattatatgcattacatgaacatgtagttaaaatattatgccaatttgatgctagaggttattgcgctaaaaaattatccatttagaccgtatagattttcacaaagtttccccaacaaattcatgcaatgttgaagaggtaatttaattactctttatgtagtaaattgtttaattaactaagttatatgtatatatatatacatatgttaataagttgaaatgttaattaattttcaaaacagtacataccaaaatttaggggatcaaatgtgtttaaatatgagacatatctaggaatatcactagcaaattgtccaaaataacttggtttttatgtattgaaatatatgagtgacatcgtcccacgtgtaaattctaactgttatttaacagataaaaaaattgtaagttttaattattaattatcttatttattatattaacaaacaatctaatatatttatactaatataaatatttaactc

SEQ ID NO: 152525 - DNA, 523 bp, Cannabis sativa
gaagaaaagaggttttggggtctgttatacccaaaattagactcaaaggaggacacgtgtcaaactaaagagaatatggatcaatgcatggaacggtaattatatttgaaaatggagtaactcattaaatgtggaacccacagagtatatttacaacttgctgactataaggtctacgcgagataaagatatacaaactgttgccttgtgtattaacaagaaactatacagcattggatgtgaaaagcgagacctcaacctcgttacgtatgagtagacgtaagcgagatataatgattgtgaaaataattagcgtataatatataatatacaaactaagtataacagttgggtgaacccaagcaactaatagcgaggcgcctatctcgctataggaagacacgctcttggtactttctgttaagctttgtgtcctatataaaactctatttcaatgtaatcttttctattcaattaccaataaagaaacaaatttattttcattacttatttagtatgttat

SEQ ID NO: 152526 - DNA, 621 bp, Cannabis sativa
tttcaaatgggcttacaatggcttcaacaaagcccataacccaagctacccacatctttattcaaatattggcctaaaacaagttgggttcagggctgctactttttacattggaaaacttacaaaaatactgaaatttaagttaaattttataaaaatactgtcacacgaaaaattactgtatttttatagtaaaacacaaaacataacaactcaaaacaacagtagaacaactaaaaaataccagtagaataccaatgaaaatttaacacagtatactgctgtatgaaatttataaaaaaacacagtaaaaaagtaaaaaataccgactgacagtatttttgtaaaaaatgagaaaatttaatataccatataaatttcccaataaaaaactggcattattttttgtaaaataattataattttatagtgattttttttttttttacattgttacaattttttatagaaataacacaaaaatcacaagaaaactacataaaagtaacataaaaataatatcttaataatattaaaaaatagcatgcaaaaaaacaaaaaaatcaacagcaaattaataagagtacaacataaaaagattgtattttctgtaaataaaat

SEQ ID NO: 152527 - DNA, 609 bp, Cannabis sativa
ctgcccacggagacattgaagaatttcataaagaggttcaaggaagaagcctcaaaaactaagaaagtcgatgacggacaacaaggacaacaagaagcccagagagtggcctatgggggatactatcctactgggatagcgggatatgtacccgaagcccagctcccgggaaccttaccaacaggcgccccaccaatgagcggcatacaattctctgctactcctggatatagtcaaggccaggccagcccctgcatcttctaactttggaaatccctcagggatgaatggacaagccccgtcacactccgctccggccacaagcttagccggtccttctcaaggctctcggagcaagaggtcctcaaaaggcagcaaccggacggaggacaagcggcagaaaagggggtacactccccagtacacccagtacacagagctaatggactcacaagagcgtgtgtatttcgctaccaggcaaaatacgcactactggagaccgcctcctctgtacaagaacaactctcagagggatcccaataaaagatgcgagtaccacaacgacattgggcacaacaccaatgaatgcaaaaacctcaaggacgagat

SEQ ID NO: 152528 - DNA, 541 bp, Cannabis sativa
aataggattgttgaggtgtgtgatgttatgcattctgttctctgttttttttccttgttttttgtttttattgttgtttttgtagtgttttatgtgtgttctagcagtgttttttattgttctgtttttaggattgggaatgcaagtacacccgatctcaattctaccattctagagtggtcacatctcgttattactctgtaattggagacatcaaaagaattctaactgaaagccaactagaaattttttcaaaaactgtgtttggatattttcttcggatttcagagtacattatccattaccaactgcttcattgtttgttgttgagggaggttcaacagcctaatgagttggattttgggtttgtgtccaagggaaatatcttaggtttagtatcgaagagttttcgttagttatcggcgtagattgttaggttgattctgatttttatcagtttaagcaagatgataatgcattggttaaacattgttttaagggttacaaaaaaattacgaagggtgctattcagactgccttt

SEQ ID NO: 152529 - DNA, 806 bp, Cannabis sativa
ggatgagatcggctccagaacctataagctaaaaaggatggacagaaccattgtgccaagggcttggaacgccgatcatctccggaagtattaccaagtccaaatatgtaaacttaggcgttgtttaaagaatttgtacggtcaaagtgtatgcaacctctaaattctaaataaaactgagtgcctaagaacaaagttttcatgccactcagggggggtactaaggcataccacacggacagatgtaaaacaggccgaaagtaaaaacaaagtaaagaaaaaaatatatgtatcaaagtgatcatgtatttgaaataaaatatcctgacccaaagggcaggtccaaaaaggaaaaaatacaaagggcctggggatgggccataataactgtctccccttagaaaaaaaaaagcagctaaattaaaattgtcttaaaggaaagaaaaatggctgtaaataaaaaacaaaaaaaaaagaagaagagagatatgattataatgggttggactccacggcctagtcaatgcgaagaggaagacgagggccccgacgtgcttcaagcaaagcatcaagccttttcttcttctcctaaaatttagcaagagcctcttcaggcttgggatagaagtcaagcttaatactttggccatttgactgccaagccatgtatacgccgtcgtcaaagcgcttggcacaatgcttacaggagacgggggtcaagagctcctctcttttagccttcttcaaggcctggtctctgaagtccctcagctccttcaactccacggtcaggttggcattagact

SEQ ID NO: 152530 - DNA, 992 bp, Cannabis sativa
  modified_base (922)..(922): a, c, t, g, unknown or other
caacgctaagctatatcattagattttattgtgctctattgagatttttgaattttttttttattatttatttactattatataaaattattttaaaattttataatgcagttggaaaaaattgcataaaaaattgtaattttcccttacttatttttctgcttcattttataaccgacacaataggtgaaaaaaaaagtgtttcagcaatttatgtgtcattttataaacgacggtataattttttagtgacggttttgaaatgctacaaataattttgcgttattttcaaaccgacacagaagatataaaagaagaatatgtatattttgtgacggatttcaaatgaagataattattttttgcgtcatctgaaaaacgacactaataaaaaactttttgcgattatggaatatatgtcaattttttaaaccgattgatgcaaattctataaatgacaattagaaaccgactagaattgtactttttgtacgtagtagtgtaaggttacatttgacaaatgcataaaaatagtctttccaatatcatttttgtttgtttttcaaataaggccattgttctaaaactttatttaaagttctaaatgtaaaagtgtgactaaattttttatcccactttttattttttttcaaatataaaaactgggataaaaagtctcgtttgttgtagtgctatcatcattttgttttcaaccttttagttaatttttgtattcaaaaacacatcttgaaatatattttttttttaatttttattttttaacaatattcgttatagttataatattaagtttgtaaattttaaaaaaaattatgaataagacgttttcttagaaagagatgctaataaagtttttctgtaatgatttaggctctctcactacaaaaaaactgctactttnagtgacaactttttagtcacaactcaatttttttttgactaaatatgacttttagggctcgtttggaacg

SEQ ID NO: 152531 - DNA, 588 bp, Cannabis sativa
  modified_base (174)..(180): a, c, t, g, unknown or other
tgttccttgatgatcctctctttggacttcttcctcttgcaagataggcttattatttcttagtctccttctcgagttgcaattcaaagtcttttgactttaatgcaacacgaacaccctccaacgagatcatatccctgccatacttgattgctgctttaacttcttgatatnnnnnnngcaatgatctgagcaatatgattgcttgacttttttcgtctatcttatgatcaatgttagttaaaccaataattatttcattaatatttatcaatattatcatctaaggaaagagaagagttcattcttaccccgtataatcttcaagaatattaatcttgctcgatattgatgatgccatgtacagctgctctagtttgttccacaatacttttgcgatcttttcttggattagctttcttctaactccattggatagatacatgatgatggtgtagtatgccatctcctccacctttgcaattttctttggcttcttctcagccagcaaattttcatctccgagtacctttgccaccttttggtgcacaagtataccctttaaattctctcgccatagtgcgaaat

SEQ ID NO: 152532 - DNA, 599 bp, Cannabis sativa
ctagcactggcatgttagcagacccactaacgaaaggcttacccatatgtgtatttttggagcatgttgctcgaatgggattgttaagagcctagcttgttgagctcagtagaagttttattattatgtatcgaacatgctaatatcttgtatggaatgcttataacttgtattttgaacatgcataatgatattttagtcttctagttattgttgtcatatgtatgcatgtatgtgttgtttactgaagtgacatgtacaaaaagagatgaatgcgcatagtctcaattttgttgtacctcatgcatgtttggtttttttttttgaacaactcatgcatgtttggtttgattgttaatggataaatgtcttcaaggtcaattcatacataatatatgtatcatgtcgatatgacattatgcatgtctgaattggttaccttatgtgtgatagacaatgttatggtagttgattatattgtccaagttgaagaatgttataattaatattgtggactaatataattataagcttaataccataaacacaatcattaattatgtgcccaatatttgttcactaccataatgggatggtta

SEQ ID NO: 152533 - DNA, 788 bp, Cannabis sativa
cagacaatgcagaagattttttttgaccaagtttggctttttttttgttttttttttcttattttcttgagtttaactttagtttttatctaaacaaatcctatgtggccatgcaagccacaattttttgttgcttgtggactcgatcgatgccacgaccctatgcacacatgggcacgtgcagaccatgcagaagatttttttgacaaagtttggctttgttttgttttattgttttattgagtttaacttttagttttcatccaaacaaatcctatgtggtcatacaagccacagttgcttgtggactcggtggataccatgtcctatgcacacataagcaccagcagtccatgcaaatgatttttgttgaccaagtttggctttgttttgttttgttttcttgttttattgagtttaacatttggttttcatccaaacaattcctatgtggccatgcaagccctaattttctgttgcatgtagacttggtggatgccacgaccatatgcacacatgggcgcctactaggggtgttcgcagtgcgggtggtgcgatttttgactattttttcaaaccaacccgcacatgcagtttttctaattttctaaaccgcacctgcaccgcgaaactaaaaaactgcagaaatcacaccacaaaaaatagtgtggtgcggtgtagtttttgcagtttctgaggttcgaactatcaccaaataattaagactaattaggatttttttttcccccagattttgacatataccaaatcacgccccctgaactttt

SEQ ID NO: 152534 - DNA, 667 bp, Cannabis sativa
cattataagaacaaattttattctcagctctcctctttttcatgatagaatgaaaatagcttgtgttttcatctcccatttttaaccagcaaactttagagttctggtgcaggcaactaatgtactgatttcgggcttcttggaacttagcatgagtcaacttttcttttctagctgctgtaggacaaagcgagtttgtggccaaggcttcttgagcttcaatatacatctcacgggcttctttataagtaccagtaacattctcatgtttatttacatagcgactttttaggatatgtttgatcctaaaaagttgctggtgtaaacttttcaaataactaatattgtgctttttccaagcagtaagaacattctctttgtaatcctctttaagcatccagtaattgcaaaatcggaaagctttagtgccacggttactaaccttgatatgctttacaagacgaaaactgtgatctgaaagagctccccatctgaaactagcttctgtgctcgggaaacaatttcaccaactttcgttagtgaacactttatccaacttcaaatagactcgactcccctcttcatggttgttggaccaagtaaagaaagagcctgaggtcttcaactcttctacctgaccctgagcaagccagttttgactatcctg

SEQ ID NO: 152535 - DNA, 585 bp, Cannabis sativa
gtaattaatgtttaatctagacgaactaaactaaaaacttctattgtttctcctttagccttcatttgtgacttttcaaccaatatgtgacagttccagtattggagtctttgacctgttacaaaatccacaactttcccgtacgcacctataaatttctcaatatttggccttgtgacattctttcaaatgtcacgatcggtcctgtaatctcttaaagatcgttcgttatacccatactttctaggtctacacgtggagagagtttattagagttattctcacattgttaatgcgtggaaataaaataacatatataagatgaatgggctactcctcctattgccaattaattttgagatggaacctcattcaccttaatcacaccttaatctcaaattctaagactagttactgctagctagttattgggttttgtggcctaactaaaactctatttcaacgtaatcttgaatgtttatttatcaataaagaaacatatttattttattacttgtttaatgttgtggttcacatatttatttcatgatcatttgtttgatttataaatttatctaaatcctt

SEQ ID NO: 152536 - DNA, 562 bp, Cannabis sativa
agacaaaagagacgacccttggattctgagagacaaggggcactcaagcaagaagtgtataagttgttagttaacgacattatacgtgaggcgttttatccctcgtgaatatccaaccctgttctcatcccaaaactaaatggaacttggagaacttgtatcgatttctcagacttaaataaggcgtgtccaaaggattgctttccactacccaggatcgaccagttagtggatgcagctgctggacacgagcttatgtcattcatggatgcatattctggatataaccagataaaaatgcatgtccctgatcaagaacatacgagattcgtaaccaacatgggactttattgttataaagtcatgtcatttggtttgaaaaatgttggggcaacatattagcgactagtgaatgaaatgtttgcgaaacagataggaagaaacatggaattctacgtcgatgatatgttggtaaagccaataaaaagtggagatcacacaacagacctcgcggagtgctttgaaatattaagaaagtacaatatgaagcttaacccgaaaa

SEQ ID NO: 152537 - DNA, 597 bp, Cannabis sativa
  modified_base (38)..(53): a, c, t, g, unknown or other
agttcatatttaaggtgttaaacaacatacttgtgagnnnnnnnnnnnnnnnngtaaaataaattccaacacatagctctaacctcgctttctctcccacacaataaaaagtttgatttctctgtgttacttgacatcacgagcatgcttggttttgttcgtgtcaattttctgaggtaattcatttctcacaatgttttaaattgaatctcttactgatgttgcttctataaagaatctcgtaccgatttttttttttgtgggtttgtacatattgtcataagaagaaaaatgaggaaaagggtcttagagctaaattgtgtatatatagagatgaatcattacttgaagtataatcgtttttttatttcaatatatgacatgtttagagtctttctaccaaaaaagtttaaatagatttgccttaggtacatctaaatgtgaagcgaattaaaaaatatagctctgttgtttatggtacagccctcttgttgtttatgttatatattcaaaagtactatactaccatttgataggtggtaatggtattcaagcaggtactatgtgaaaatctcaatcatattatagatgcaattt

SEQ ID NO: 152538 - DNA, 624 bp, Cannabis sativa
atacatcagatactagcatactttgccaattttctggaaagaacataacacttatccaaggtgtaaataagctttatcgcttgctatcacatcagtgtaaatccagtgttctaatgaatcaagggacatagtcttttgaagcatataataacagttaccttccactatgttgacatcactgtaattgtgaataaccatatgttgcagacttaacagaaattgtatacattgaaccataaacatgaaaactatatgtaaacataaatgacttctaatcttctattgctaacaaatcagattatattgtaatgggttttatttagggcataaaatctgtaatacccagaattaaggaatggattagcaaaaccctaactagataattatgtataacagaggaattgtattattatatggttcaatatatgtgattttatatgaattttaaatatgttaaagaccccgttggtgagccaggggcattttggcaattatgacccgagaagggtaaattgatgaaattaatgtaaaaacttgcttaatagaactatattattatatagtatgcaggtgttgtgtttttcatgtgtgctctgagaggttagcgcggtatagtcacaaccg

SEQ ID NO: 152539 - DNA, 812 bp, Cannabis sativa
  modified_base (53)..(58): a, c, t, g, unknown or other
gttctggttcacgtcccaggtcccatttctgagtttggattcgggatcgagannnnnntgcggttctaggtcctgacccttgttctgtgtccctagtgttgttttatgttagggactgagttcatgttcgggttcgggtcccgagtccaggtttgggttgggatggtccggctcccaattcgggtttaggtctaatttagagtccgagtccttgtccggttcgtgttgtggagctaggtccaatttcagttatgattccaagtcgaagtccttattccattcccagtcaacttctgattttggttccaattttgggtcataagttacgggttcgggtccaccttttggtttgggactgggttcaggtccgtgtgtgggtttgggtccttgtcaaggtttgggttcagggctgggtccaagccctgggtctagataaggattccaatctcgtgtcccagtctggttcaatttcttgtgcctggtcacgagctgggtcctaggttcaagttcgggtctttgtcgggtactaggtattgtgtccgagtctgtgtccgggattgtgtccaggtctggaccctgatctgggtctaggttcggctccaggtccatgttcgggtcccgagtgcttgtccaattttgggtctgggtcaggatcctcgtccagatgtaggtccaacatttcgatcccagtttgggtcatggtccgagtcaaggttcgtatctgtatccctatatatgtccaagtaattgtttgggaacgggtcccagatttaggtgcgggtccggttctcaattccggtctgggtacacga

SEQ ID NO: 152540 - DNA, 611 bp, Cannabis sativa
caagtggtagtattcctagtcttttatgttgatgatattttgattattggcaacaatatcaagataatgactgacatcaaggaatggcttgacactcaattcgaaatgaaatatttaagtgaagcagcttatgttcttggtctctctcaaatagcttacattgataaggtgctagagagactcttaatgacaaataccaaaggggcagtgatgccttctgaacctggtatccgtctatctaaggaacagtctcccattgattctcaagagatagagaacataagaagggtttcttatgcttcaatagttggaagtctaatgtatgcaatgttatgcactaaacctgacatttgctatgcagtaggaattgtgagcaggtattagacaaatccaggagaggaacattggacgccagttaagcatattctgagtacttgaaaagtacaaggcattatgtgttagtctacaaggatggtgctttaaatcccataggctatatcgactcagatttttaggcttgtctattagacaggaagtctatgtctaggatggtatttactgttgggggtggagcagttgtttggagaagtgctaagcaaaccgcaacatca

SEQ ID NO: 152541 - DNA, 641 bp, Cannabis sativa
aatctttttaattaatgcatcaaaattagcactttgtaaaataaggcaaaatattggggcgttacagtttttttcgtccctcctctcatcttgcttgccactatttataataatatagtgagcagttaattacaaagttcactgtaatctttacaacaattattccctcaaatcatgagatttgattacaaatcacgctaagtaaatgcggtttttatttagaattcacatagctgtgaatatcccgcttttattgggccgagatgaatgcatattaaagatatactttaagccttatctcatggggatgcctcgctgggaatggagccaagttaactttgatggcgagctggggcttgtcatataacttcccgaggttaatattgttttaattctaataactacagtttatggtgtcgagatgatctttttacatgcatgccatcttacagcgagatagacaccttgctatctgtcacctcgatccactcctctgtttatacttagtttgtatactgtgtcatatacattaagtatttttattgtgattatatctcctccacgcgacgaggttaatgcctcgtcatgcacacttgcatttacatggtttctcattgagacacaagtcaatagttagtaca

SEQ ID NO: 152542 - DNA, 740 bp, Cannabis sativa
gcccctgaatcaattcctcatgttctatttggatgcgagtttgctcattcctgctggaatatttcagcagttactgctggtggtgtaactgaaagtgaatttttcacttggttctgtgatattctgcagcaaagcagtaaacatatagcagaggaaactgctatggttttgtggcaaatatggttggcacgcaatgatatgctgtggagtaagaagtcgactacagtttcagaagttgtccgttcggctaggactaatcttgacacatggaaaaatgctcaaacaaaggtttttacaccactgttgaatgttaatttcagcaatggaagagagcattgggtgaaaccagttttaactaagttcaagatcaatgttgacggggctcttttcgaatctgaaaatcgatttggaattggttgcataattcgaaatggagaagccaaaatggttgaagctttttcgaaaagcagagtaggaagggtctctccagagatcgctgaggtgattggtgtaaaggaggctttgagctggataaagaagaaggatttatctgatgtggaaattgaaattgattctctagtagttgttcaggctattaatggttcagttcaaatgtcatcttcagtttggcttacttattcaagattgccaaagctttctttcagaattaactaatgtttttgtttcttttgtcaaacgatctgcaaatagggcggctcactgcattgcgagacggtctt

SEQ ID NO: 152543 - DNA, 530 bp, Cannabis sativa
tggcatttttatttaatacttgaagatgttcacaactggctagttttcgtacaaaagacataataaataataactaaaataattgcgacataaatttaatagcgtaaataaataaataaagcgtcgtagaccgcccgcagttatatgaccctcaacgagttcacacacacaagtgtctaaagttccactcgccaccggctttctagactttcagctaccttggtctgcacatggtaatttgataagggtgagctactaaactcagtaaggaaatgtgtgtcagatagttacataaataaaaataaaacacaactaaaacgtacatgcacatatttagacaagtagcaatacataaacttaattttatcactagcaactaataactagattcaaagctaaatcacataataatgattactgttgtagagcaaaattcgcaacaccaaaaatgaataataatactaataataagaagaaattatatgaagaacaaatgcgagtattcgacctaaaacagcgagtactcgaac

SEQ ID NO: 152544 - DNA, 584 bp, Cannabis sativa
attattattattattattcataacctaaaaataaagaagtcagtatattatttaccctagaattagtatcgttcttttgatctcctcaacctaaagaaacttcagtcatcttcaaccttaccacttcacttttggctaaatctatagtactcagtgtgctcttattcgataaacctcatctcatgtctcttagtctaaacatctagatgtattggaagtatgaaacaatttatttgtccattaatattagaagttgaactaggattcgaacttattatatttttttcgttttcagagaaacatgttttagtaaaattatgatatctctctcgatattgatctgtttctagcgatttttatatcgttggaaagcttatttgatgatctacaatttttatgaagaaacaattcaccaattcggtgttattctatgtcgaaaattgtcatctttctgctattattgtaattcatttttattcatatttccagaaaagtattttcacttaaaatacaataactctctcaattctcatccatttttaatgatctatatgtgattttaaagcttattcaattttccataa

SEQ ID NO: 152545 - DNA, 807 bp, Cannabis sativa
  modified_base (452)..(461): a, c, t, g, unknown or other
  modified_base (652)..(654): a, c, t, g, unknown or other
agataagatttgaaaacagtttttgataacagattaatcaaagtttagggaaaaaaaatcataattagctcataatttaaggttgagatgtaaaatgactctaaatttaaaaactaaattagtaaatatccttttttaaaaaaaaaatatgaaaatagccatataataaagtagttaataaaaattataaaatacatatactacgtattatttttttaaaatatatataataattaaattaaattttataatttttttagtattgcatattattatattttaacaaaaataaataaatatattaaatcattaaatatatacaataatatttgatatatcgtattactaaaaattaatataccgtagtaataaaattatataccacaaaaaattataacaatactaaattaatgctaaaaatatatatatcacgctaacaaaattatatatannnnnnnnnnaatatgtatacataccaaaaaatatatatgatgaaatagaaattgtatatcatcttaaataaatgatatattatagacaaaaaaatcatataccatacaacaaaatatatatacatacaatataaaaaataatataatattattaaaaaaaaaattgtatataccatattaacaaaattatatacaactannnaataattataccatacttacaaaattatatatcaccttctttaaaaaaaaaaaattgtatatcacctttatataataaataaaaactaaacatgtatgatctaaaataaaataatatactatacaataaaataaaatttatatatcatataac

SEQ ID NO: 152546 - DNA, 754 bp, Cannabis sativa
tgagctgaccgcgtggctaatctcctccacaaaatgagtgggtcacccaaagtggctggatgagattgaaggtggctgatgaccgaattgtctgaggatatatatctgtacggcgatcaagctttcagctgggccccactcctcgaatatgatttggtacttttttgagagtttatggaaaagtcatcatttcacaaaattttcttttcttttcttttttttttgaataaataaaaaaatcagattcaataggaagaaaagggacaaacccaacaaataaaggccaataaatttcacaaggagaagatcaaataatggtttcaaaagacaatgatcaaaagaaaccacaaacatctagacaaaatgaaagtaaagactatatgttaaaatttgagataagaggaatgagattttatctcaaaaccaattaacaatgagaggagtagttcatatatgacaatttatttccacacattagtaacgtgagactaactctaatacactattttcacgtttggacctggaagaacgacctttaagagaccacaaagccgaacgtgacatttgaaagaatcccacaaggctaaaaaaatttgtgaatttttggaccggtggtaatttgagatcacaacgaatcacaagtgactctgataccatgtctaaattattaatatgtaataaaagatattagttattatactattacttcaaacaaaggaaagttctagcggtgcttctactttctaatcataaa

SEQ ID NO: 152547 - DNA, 689 bp, Cannabis sativa
aaataattgttcaacaaaaaaaatattgaaaacaacttaaaaatagtaaaacaactcaaaataacataaaaaatatagtaaaacaaatacacacatatacaacaaaaatattgtttggaataaactaaaaatatacacaattaaaaatacaaataaactaaaaaacaagtgtaccaaaaaaacataaaaataacataatatcaactatagaacacataaacaacaacataaaaataacaaaaagatggctataaatcagcagaaacaagaaatcaattcttgttaaaatatgcaaattattcataaattaactctgaataaactacaaaacatccaaaaaaaaaatatgctacttttattaatcatgtaaaagatagaaaaatatatgaggaatgctcttaattttttttttttgtaagagagataaagagtgtcaaaaatatgagaaaaatgataaaagtaaaaaaatcatatttttataaacgttaaaagaaattaattaaatatttttataaaatgtgattaattaaagtgttgtgtgttggcaaaatatcaaaatacctaaactacccctacaatacataatcgaattaaccaactgtcagttatgactgtcggtgatcgagtcacacactagctcctgcactactattttttaaggctcagttggttcgataaatggtggttgc

SEQ ID NO: 152548 - DNA, 671 bp, Cannabis sativa
aggagggctcaacctgaggatggccccagtgctcggaccacacgtccccggagaacttaacccgacgttggtcctagtacgcagacaacgcgctcgaggaacgaacgctcaaaatcaacctgaacctggagtgagaagaccacgaagcagaccttgtggctcacgaactaggagacaggaaaaggcctgggaagaacaacctagggaaaatgagacaccccttgagaatcaggatgaacagctagaagggagacaaccagaaactgatgaacgagaaatcccttatgaaaatgacgaggatcttggaactcaatcgggagaatggagatcacctgctaggaatcaccaacgttcttcccaaactcatagagagaggactcgtaagtaccctgatgggggaaatacgacaaattgctcccgggaggaaagaacagagcgtgaagaagcaagtgtgacttcgaggcaatccagaacccataggtgatcaacttgaagaggagaaagtactcagcgagctaatgatcaagaaagtatgggaacaagtaaatccgccagccagttaaagacaaagtctttgagtaggacgcagactatgagtaagacaagatctgccagcaattactcccaaccggatctgcgagagcacttgaatcggaagaaacttaaccttc

SEQ ID NO: 152549 - DNA, 630 bp, Cannabis sativa
ttttaaattgattaattatgatatgatacatttttcatattttgagtaattgtaaattaattactattatgatgaaacttttaacaaaattaaattaatttgtatttcacatttcacattctttctttacaaataatttatgataacatattaatgacaagttaggcttttagttaattaattgactattcaacatactaattaaaatattattaactatgcctcattgattaatataatgtaattattaattaaattatataatcataaaaatagtaacttaataaaaatttgaattatctatttaaatttttatatttaatttcttattaagttaaagataaaattaaaattaatttatcatttatttttaatttttctacaacaatttggacgacataacaactataattggatattcctaaaaattgtaaatagagaaaaagcaatcataacacaatctacaagaataacaataaaatcaaaataatatttcacaatatatataatttttacacatccgaccgcagtacatgtattcacagaatctacttcactacgaatcaatatttaagatattcaaactcatctaacatgcatatttataccattcaccatatctatattaat

SEQ ID NO: 152550 - DNA, 708 bp, Cannabis sativa
  modified_base (334)..(338): a, c, t, g, unknown or other
gtttgggttcgggtccgggtcctatcccgggtacgagtacgggtctcaggtcctgggtctgagtcctagtcccggctctgggtcctagtcccgggtctcgagtcctaggttccaagtttcgagtcccaattggtaggactgggcatgaaatctaaaaaatcgaaaaaaactgttcaaaccaacctaccgaacaccgctagaatcaaaaccagtagaaccgaaaactaaaaaaactactaacggttaaaaccgccattgaatggtcagtttttttgggtaataaaccgaccaaaaaaaccgaaactaattgttatacatatacatatatatatannnnntaatttattaagttttttttttattttatgtattgtagtgactaatgatatataataataatatatttttattttattaatattaaagttaaaagaataaggcaattagtttttgaacaattaatttgtatggttgtagttgtagaatgtagaataatgtgcttatagaataaaatggatcatattttaaagaaaaaaaagaagttcgatttggacagtttaaactgaccaaactgaggttcaaaacaatcagtttgaagacaagttctggattggtcagtcagttttagaattgcaccaatccaaaccaaaaattgaattctggatttttatatagaaaaaaactgaccaaaccgaccgatgctcaacc

SEQ ID NO: 152551 - DNA, 810 bp, Cannabis sativa
aatccagagaagattcaagccctcttggatatgaagtcgccaacaagaaccaaggaagtgcaaagtttgactggtcggatcgccgcaataagcaaatttgtttcaaaatctacatacaaatgtgttccattcctcaaaatcctgcgaggaaataagcaattcgagtggacagaggaatgtgaaaaagcttttctggagctaaaaatgcaactcgcaaagcctcccgtactttcgaaacctctggacggagaagagcttgggatatacttatctgtcacggagcacactatgagtgtcgtgctgatcagagaagaaaacaacatacaacacccggtctattacatcattaagagactcgttgaggccaaaggccggtatccattgatagcgaaactcgcttactgcctgattctagaaacaagaaagctaaggccctatttccaagctcatcctatttgggtgtacactgataaaccattacgccaaatattgcaaaagccggacgcttctggacggttactcaagtgggcattggagctgggtcagtatgaaattaccttccaaccccgaatagcaatcaaaggccaggccctaacagactttgtggtagaatgcacaggcaaagaaaaaatcatatcagaaggcaaccccgagccagtactaacacctcagctaagtaacagtgaagacaagccggctttaaactacatgcagacgggtcgactacagatcaactatccagtgcaggaatcgcccttgtcaggcctgggaggcaacacctgcatgctgcagttatgtttggattcaagg

SEQ ID NO: 152552 - DNA, 658 bp, Cannabis sativa
caaattaccccttagtacccttttatgttatttttgtgtggaggggcaaaatggtcatttttgccccataagcttttgtcctttagtggatttagtgttatgtaatgttgtgattgatttgatattttttggctgaaataaaggttagaattatgctttttatcatttattcataaattagaaaattgggagaaatcaaagaaaaaggcaaaattctattttctctctagccctctctcttttggccctccttgagcagaagaaatcttggtgttttctttggtatttcaagctattttctcaaagtttagtgattccttgttgttggtaagcttctaccaacctttcttttagtttcttgaagattaagcaagtagaaaatggttgcatgctatgttatttggttatagttgctgctgtgtttttttgtgttgttttctgaagttttaatgtgttcaattgagtggattacagtaggttttgatgcatgttagttggttttatcaaaatatggaattttaactcaaaactatggttttcaaggtaatatgatgatttttcgttgctttagttgttgttattgttgagtggtgttttctgtggttaaattatgttgaaataggttgaattatgcatgatttagtggctggttgggggg

SEQ ID NO: 152553 - DNA, 546 bp, Cannabis sativa
agagagagagagagagaggaacaacatcttctctacaaaacaaaacaaagactctcttttctaaaaatatgaatacaattcaaagtgtataaaagagatacacaacctagttgctttaaggtgcaatttataatcaatatacaccttataaaaaactcatacatggtctaaacaagaccaaaactcacttggaaactttcctaaaataattcttcaatcatctcatatatttcctgaatagtacccacagaatcgtgaacactaagtgcgatttcccttttatataaaagaaagtcttgcttcagttttcttcacaagaaatatgataaaatatcttagaaaactcacaaaggatgagatatacacaactggatagataaaaattagatgagtcattaaacttaccctttatgtcttacatttcataaataaaaaagttagtcatattttcttccttatataattcaatcaatagaaaatgaaaaccaaataaacacctcagctaaaattaatattcaaattccaattcaccgatgttattgaccg

SEQ ID NO: 152554 - DNA, 670 bp, Cannabis sativa
  modified_base (43)..(58): a, c, t, g, unknown or other
ttgcaaatgctacattacgagtagataataagcaaacatgtgnnnnnnnnnnnnnnnnatctatcaataccataaaatatctgaatggtccacatggtggagaaataggatcacattgtcgccgtgaattcgttcaaaaatctaggggattcaattccaacttttactggtgatgacttagtgattaactttccttgagaacaagcaacacatgataacacactggataatataatcttttggttcttcaatggttggccatgtgagttctctattattctacgcatcatgattgaattggaatggcctaaccgatcatgctaaataacaaatgaatttttctaatttgtgaacttctcgttcacaataacatgagtttctattgtacttctatgtgtaacgtagaaacctgaagacaagtcaggtaatttttctaatatgtactttttttcttgaaacaatagacgtaatgcaaaaatactcaaaattattttcatctcaatatgatatccattacgacatatatctttaaaactcaatagattcttttttttttttgatttggtgtataataaggcatcatttataataatttttgttcctttaggcatcaatataatggctcttccggatccttcaattaaatttgtagtgcctgatattgtattaa

SEQ ID NO: 152555 - DNA, 947 bp, Cannabis sativa
ggactactgactgtcacaaataatttatagttagtcacaatttaatattttatttttagtcacaagttttgttgtgactaaaagtaaaatttttagtattgtaagtgtataaaaatgtacccataacaaattttgatgatccgcactatattaattattaaaataattttgtagggtgcaattttaggagaacacgaacaagtataagagtaagaaaaaaaatttgttaaaatatatcttgaaaagaagaacatttttaatatttgaattaggggccattttaacaaaatttaatgtgaaatcaatttttatattcttgttttagtagtacgaattcattgtgacaagtgcaaaaagaatattctgaggtaggtctgcgccacatttcacaaagcaataccactttcaaaaaagtgagattttcattatttcgattaaaatgattgttagtgcttgaaaataaattttctctcaacgtgaccatagaaaagtgatggttgacgatcttgacttcctcactgtaaaatttcacgattttttgagatgtctacgatgagattttaagtgaacactaacgtgtgtaagagtaaggaaaaaacttattaaaatttacactgaaaaaaacatttttaatttttgaattagggagccattttaatcaaatttaacgtgaaaccaatcgtcatattcatgctttagtagtatgaattcattgtcaatagtgtgaattttttcttcgagatgggtccaggccacatttcacaaaggggtatcactatcagaaaattaaaattttcaatatttcgattaaaatgattattaatgcttaaaaattacattttctctccattatgtgaccaatagaaaagtgatggagaatggtcttggcttcctccctgtgaaattttataatttttcgagatgtgttgggtgagattttaagagaa

SEQ ID NO: 152556 - DNA, 526 bp, Cannabis sativa
tcttccattaaatatcaaatatgacaacatattttcctcgtgggaaattttccatctctttgttagtaaattatactaataatttttatctctttctactaaattttactcttcttggcgtggtattcaagcatattatatttacgtacttctcacagaaaaaaaaaacatattatatttactaatatttttcttcttcattttaatttctaggcaagtggtgtgttattgactttttgagtatattttatttttgttaagataattcattgttccttaataaatatctaataaaatatccttagaaaaaaaaatctaataaaataaataagacttttgtgactgaacataaaatctaaaaaatcgaaaaaaatcgttcaaaccgacctaccgaacattgttggaatcgaaactgacggaacggaaaaccaaaaaaaccactaacggttaaaaccgtcattgaacggtcggttttttttggtaataaaccgatcgaaaaaatcaaaaccgaccgttatacatatat

SEQ ID NO: 152557 - DNA, 635 bp, Cannabis sativa
ccttgactgttccttggaactccttttgcagcgtgtcccatgctttttttgtcgttaatgcacccataattcttggaaaaagattgtctgccatagcttgctgcaagcagtataatgcacgagaatcattttgttgattatcctctagtgccttcttttgatcttccgaaagagatgtaatatctttcggaatagtgattccttcttcaacaattttttatagattttgtgattacaaataggttcttatttttatggaccaaaaatcatagttttctccatggaaaattgaagaggtagagaaaagcagttagactccaaactaatgttgatgagcgaaaaagattatgtccagtgatgatcgtacttggctctgatacactggtagtttgagaataaatttgtattggtttagtttaaagtaggtggatatgtaggattgtgtttagtggttgttgtgataatgtagtgaagtaatgatattgataagtagttgttggtttaaaagataaaggtaagtttggcttagaagagagaattgtatgtaggaagtagtaaacttgtacttatagtttgtagttttagtttggatgtttggagaatagttgatagttgataatgttgggttttatgcc

SEQ ID NO: 152558 - DNA, 572 bp, Cannabis sativa
gaggtcgcacaccgacacttcctcgacgtcctccattggttccacaattttttcggatcccctcctcttccgccatttttggctcaacaatttctcggaccatcaagacgggtaggtgggcagcaacgttataacactgcctggcctccccttggtttcctcttacgatccctatcctagcttcttgggtggggaatttcaggcataagtgtcgtattgacgtgactgcaccaaaatctaccagggccggtcggccaaggattgcattataagttgtcgggcagtccaccaccacaaatgtgcagtacttgaaagtgctttggggtgtgtctgggcacaaggtgactgggagcctcacttttcccatcaggataagtgttgttccgttaaaccctgtgagttgggaaccacttggtgaaagatctcagtctgttaggcctattgcagtgaaggcctatttgaataacagattcatagaactcctgttgtcgatcaacactctggccacgatcttattggcaatgggagtttctatgaccaaggggtcacactgtcctagcatcttcttctgt

SEQ ID NO: 152559 - DNA, 577 bp, Cannabis sativa
caactctatgtacacttcactgatgccctgatatgctaatttgatggctattgattttcctattctaacgacaactaacatgtacgataaacatgtataaacatatgcaactattatactaatcttacctcgtttcagaatttaggtgtgccagccgctcgatgaattacaggcccctaaatcacattattcataaaactagtgagtgacacactaaatcacttttcagagacttaaacttgaaactaaaagtttccctatcgatgaatataacatggcaataccctaaatatcgcaaaataaggaaaaattagggttcccaacattgccccaaccggtagaccggttccccaactgaaatttgggttctgtggggtttcctagggaccatccggtcgaccggttcctacaggtccccttgaaccggaattccggctcagtgcaagaaaatctttaaaaattcactactctgtcaaatcaactccaaactcaaccaaaccatccagacctgttcaatataccccaaagaacataaacaaggcaataaaacaacctaacatgctcagaatcacaaaac

SEQ ID NO: 152560 - DNA, 534 bp, Cannabis sativa
  modified_base (111)..(111): a, c, t, g, unknown or other
  modified_base (490)..(495): a, c, t, g, unknown or other
aataattaagttgattttattcaagatacttaattatttctattttaatgaatttaattaaattagaaaattaaatttaagttagcaatttttcaatttcagatcaacttnaattagaataattttcagagtatattttattttaataataattttcccacataattttgaattgcatttatttattttaaatgcagatattttgaaatttttgaattttgaaaattagattaaagttgaaaattcatttaattaattttagatcaacttaaatcaagtaattttcattaataatttattaaaataaatagactaaaatatattttaattagaaaattagaaattagtttatgaattatctagatagatattttctaggtagacgttttggtattttttagatatatttaattaaatgagaaaataaatatttaagttgattatgttctagaaacttaaatatttagagatttaattaaataggaaaatnnnnnntatgttgaaaattaatttattttattttatatgaatttc

SEQ ID NO: 152561 - DNA, 1484 bp, Cannabis sativa
taaccctggcatccacctctgcctgggttccctcaaaaccttttgttctatcccaaaccactagatattaggaaagtctttctcttttgaccaggaatggaatcaccaccatccctaccatatcaagaagttggaagagtggtggtcccactaacacttggagtctctcggggctcctaaagaaattttactgctttgttggctcaaagagccttctgaaccatctcagcataagttgttgtgtcactcgtagtaattaccagatcatgttaatattgtcatttaaacccgccatatacttttctttcttactaaagtccgtgggtactatacccgaagccaacttggctagacagtcaaacttcattgtatattctgttaccgacatgccttctccctgaactagatcagtaaattctttccgctttgtaatgcggactccttcattataatacttggcataaaataattcatgaaaatcttcccagatcatggtggtgacgtctcgggtgagggacactaactcccacctcaaaaatacgtcttcctggaactggaaagtagcgcaagtcactcggtcattcctgacaactcccttaaaattcaagattctctcaatgatagtgagccactactcggccttcataacatccggacctcccaaaaaaactataagcgcctggttacaaaacatctcatacagtgatttcattcggttgctagcagtaggttggtctgttggcactactggaaccataatggctgacacttactggggtggcagtgcaggaagaccctactgcctcagccttttaatttctttgttttgttgaagaatttaggcttacatctctacaaacccttgctcccaattcaaaggagcttggggtgcattcttatgcctaccacccagaaaccttccacgacctatgccgcgtcaacagggattcaagggattttgacctccccgatcgcctctggtctcaaccatgtcaccctaactcctcatattttgttgggcgtccatttaataggacttagcctgtgaacccataagtcaagtaggtcagacagcgatcacataaactctatataccacactttatggattttaaggcaatgtatttaaataaataattataaactattatgctcccaaacatacttttccaatcacataaattactatacatgtaagggcttactgaaccgtgacttcagcttttctcttacggtgattgtacatgtctcaacgatcttaggtagataaacttggaggctctaataccaaaattataacgccctaatacttaggcgcgctacaatgatttttaattattgtgccacctttgctaatcaaacagttttccttaaaaatcgtgccaaaataaatttttgatttaaactattaaattttataaacatatatatatttacataaaccgagatcccgtgtttaaacttttacaatcataatcaaaata

SEQ ID NO: 152562 - DNA, 902 bp, Cannabis sativa
agccaaacaaccctaataacccaaataaccagagaatgtaacctccctctattgagggcgaggatatcctggtcattttgggaggaccgcaccttgctggaaatagtaataatgcccaaatgaggtatatcaattcaataaaaaatggacaatcgacatttgctccagaatcgctaaaaaggcaaagttaaatgaacctctgattatcttctcggaggaagatacaaaacacgtacagtacccacatgttgatcccctcggcgtaacaatccagctcgccaataagagggtgaaaagggtattggtggacaacaggagttcagtcaacatccttttagaggatgaaaagttgaagccttgcatggtgagcctatgtggatttataggtgatagtgtcgccagcctaggcatcttcgaacttccaatgactgtaggagagccacccttatcaataacactgatgcaggagttcttagttgttgatcttccatcagtataaaatgtattgatgggtcgcccaacactagttggactaggggcagtaagctcaatcaagcacttgtccctaaagtttccaacacaggcaggagtaggagttgtcagaggcgaccaattattggctcgagagtgttatcgaatagaactttagaacaggagagccaatcatcaattgatggtaatcttaactgaagaaggcgagatggaagaagaagatctggatcctagaatccaagacgaaagtaagcagctcaaacctattgaggagctagaagaagttattttagatccaaataatcccacaaaatgtgtatacactggaaaaatttggaagaaaaactaaaatagcaattaattgattttttaaaggctaaccaggatcaatttgcctggagccactcaga

SEQ ID NO: 152563 - DNA, 669 bp, Cannabis sativa
  modified_base (512)..(518): a, c, t, g, unknown or other
gcggtcttgggcaaaaaggaagctatggaggccagggcagaaactagagctgttcggttggagttgggcaaggccaacaagaagctgttcgatgtcgagaagaagatctccgtgctgaaaaaggatctcgatgctgcttatcgttttgaggagaccatctagatcttatcttctctgcgagcagttcttcttcggatgaaggaagagaagaacgccaaggtaggggagcttacaaccgaggtggacaggttgaaggagaaggtcaatgccttggagacagccggtctcgagctcttctttgatttttggaaggctaatccccgggccaactttcactacttgggcgaggctaaggatatgtaccttgagtactacgcggcccaagtagcttatggtgggaacgaggtgactgcttcaacctctggccaagctacttcaacctcttgtcagcctgctgatgcttctcctgctcaaacaacagatcctcctgctccagttggcctagaagaacnnnnnnnagagcctgggactccagctgcttaaacatttcctttatcttttttgtttatatatatatcttattcagccttcgggccttttctaagacatctcgaccagccaagcggtctttaaactttgaattaattttaattttttggacaacgggct

SEQ ID NO: 152564 - DNA, 695 bp, Cannabis sativa
ttgggtctgattgtattaggggataaggcgggtgttcagtgggaagtgtctgacgtcatccacttctattttctgatggaaaaagagccggggcgttatcatcttcgtcctacgagaagtcgctccttgttgactgacttagagacttcccataaaaggtggaaggagaagttctttttcgcccagggtcctattgagtttgttttcgacgatcctatggccccatttattaaccggagctggggggctcccagtaatctccttatctctattactattttgtgtttgtttgttgttttttttttattttacctttttcttccattctcttcgtttattctttggttattcggtcatactactttttattgtcgtatgcatatttttgtgtattttctctcttcccttatttcttttacctaacgacgtatttggtgttgactccaatgggaatgttttggtgcagccgttgctgataacgaggagactgtcattggcgatatttttactgagaaggttcggaaggtcacagccttagatcccaagtttcgatcaatcaagttccttctatcccgtgaggccttaatcgaatcctttgcctggtctcgcgaactcagaatccccctaggtatccccactccttatcctccttactttatttggcctgattttttaaaatgtgctttaagacactt

SEQ ID NO: 152565 - DNA, 583 bp, Cannabis sativa
  modified_base (531)..(531): a, c, t, g, unknown or other
tttataactttccgtttattattttaacaattatcttctttcaataattatttttttctttttgaaatacatatattaatttaagatagtgcgacttgtcatactttattaatttttttaattcttcgtctttctacttataaatatatgtacagatatagtatacataatgaacaataatattataattatataatctttcttataaaaaaaatgaagtatatctgtatagcgggctttgtaatttctttttgttgttatttttgtgtttttgtgaaattatctcttaaaatataaagcggttcttttttattttacattttaaagcaactgttttatatttttacaaaaattcatgtagtaattcatataataatttacggagtaacttatatcgcaattgaaatctacatatcaacccacataaaaaccactgaagcaacccaaactaaaaattaaaaaaaaaaaatagtatataaagtagtttctcaaatatttatggaacacttcttaatgggtattacccatgantggttactaaacaaatttaactataatattaattttaaaaatatcaaaccat

SEQ ID NO: 152566 - DNA, 586 bp, Cannabis sativa
gagaaagaagaagatcataactctttatatgtattggatgaatgtgttgcatgtagtgcaatggttttttaaattatgggaaaaaattattgaacatagtattgaatcaagctctgtaaaaagacaattatacatacttgatatttttgtcaataggcaaattgtgcaccaaatagcttatgagagtgatgttatttttttttatcaacttaggatgaataggaaagcatttagcactttatgcataatgcttgaaactaggggtaggttaaaagcatataaatatttacaagtagatgaacaagtggctatgtttttacatgtaattgctcatcatgtgaaaaatagagtcgttagattttgatttatgagatcgggtgagagaattagcaaatattttcataatgtgttacattcaatcattcggctacatggagagttattaaaaagacctgaacctgtacttgaaaattcaacagatgataggtggaaatggttcaaggtataatatatatttcttgaatttcttgaattaaaatggtttaggtggaaatggtttgtttgtttgaaatacaaataaaaaaaa

SEQ ID NO: 152567 - DNA, 825 bp, Cannabis sativa
  modified_base (791)..(793): a, c, t, g, unknown or other
ctgctcgggtgtttgctattactcaagttgatgctgcagccagtccttctgtggtgataggtcagtttcttgtcaacaagttgtattttactgtgttatttgactcaggagctacacactcatatgtggcaacatgtgtaattcatctattgggtaggtcttgtgattttattgaaaaagggtttggaaccctattgcctaccgtggaattgattatctccaatgggcgaattaggtctatgccagttaggatcaaagataaggagttcagtgctgacctagtagagctagatttagcagaatttgatattatacttggaatggatttcttgtccaagtattcggccaacattgattgtaagcggaaaatggtaacttttcagccggaggtgaacatccttttgtctatgttggatctattcaggggtctcgaatcccgattattttagtcttaagagctagagatctactacaaagtggatgtgtaggatttttagtagttgttattgactccagcagacctgaaacatttgggcctaaagtagtcagtgttgttaaaaaatttctcgacgtatttcccgaggagttgctaggattaccgccacaatgagaaatagattttgtgattgacttggcacctagaattgagcctgtttcgaaagcaccagataggatggctccaatggaacttaaggagctaaaaatacaactttaggggatgcttaatttatccgatccagtgtatctgtaatatcccagaaaataaataatatttaaatggacatattttnnnaaatatgtaattacttggaaaatgaagtagga

SEQ ID NO: 152568 - DNA, 1221 bp, Cannabis sativa
  modified_base (237)..(244): a, c, t, g, unknown or other
  modified_base (432)..(433): a, c, t, g, unknown or other
cggagatcaatctttgaaaagaccttcttccgctgaagttgatcaaaaagatcatcgatcctaggtaaaggatatttattcttgattattagcttattcaattcgcgatagtcggtgcacattcgtaatgacccatctttcttcttgacaaataatactggagctccccagggtgacacactaggccgagaaaaccctatgtcaagcaacctctggagttgaattttcaattctttnnnnnnnnctggagccattctataaggggctttagaaaccggttctgctccaggtgccaaatcaattacaaatcaatttttcgttgaggtggcaaacctggaagttcatcaggataaacatctaaaaattcccgaaccaccttgatgtcttctcgccgaacagagtcaggacgtgtggtatccaataccacggccnnaaaccctagacatccatcacacaaaaattctttggctgttaaaactgaaattatcgggatccgcgatccctgaaccgaaccgacaaaaacaaacggttcttcaccttctggttagaagattaccatcttccggttacagtcaatactggctgaatacttggacaagaaatcctttcccagtataatatcaaaatctgctaaactcatttctattaggtcagcacttaactccctaccgtcaatcctgatcggcatagacctaatccaccttttggagataacttactctctgccaggtaatagggttccaaactcagattcataactatcatgcggtctatccaacttactaaaaattctggctgccacataagaatgagtggcccaagagtcaaatagcacagagaaataagagttgttggccgagagctgacctgttaccactgaaggattggcttctgcatcagcctgacatatggcgaacatccttgctggagtggatttccctagagtcttcggtgcctcagttctaagttggggacaatccctcttgtaatgccctggcatgccacactaaaaccacccctgccctttatactcccctagatggtgccttttacagttgggacactctgggtaagtgtatcgagtttctgtgccactctggcgattgcctcgaccctgatcccccgaaacctcttgttctgactcgagctattggttgcattggatgcctttctttttaggtccatggccgaaccactacctcccctgctaaaacctgatgc

SEQ ID NO: 152569 - DNA, 738 bp, Cannabis sativa
  modified_base (330)..(338): a, c, t, g, unknown or other
aagaagaaaagaggtgttgatggaaaagtcgaaacttttaaagctaggctggtcgctaagggttatacccaaagaccaggtgtggactatgaggaaacttttagtctggttgccatgctccaatccattagaattcttttctccatagatgccgctttcgattatgaaatttggaaaatagatgtcaagacatctttccttaacggaattctcgaacaaaccatctatatggagcaaccagaaggctatgttcctccaggcaggaaaagaaattttgcaaactcaataggtccatttacggactgaagcaagcttctcgctcttggaatnnnnnnnnngatgaaataatcaagacctacggctttcaccaaaatgatgatgaaccttgtgtttaccaactcaaggataatcaagtggtagtattcccggtcctttatgttcatgacattttgattattggtaataatgtcaaggaatggcttgacactcaattcaaaatgaaagatttaggtgaagctgcttatgttcttggtattctgaatgtgtcaaatgagatagtggagctctccttttataggcaacgaggtccattaaaatattaataaaataataccaaaaaaatgtaaaaaaaaataactctgggctaatcttgaccattgatgatgatataatggctaaaatgttgaaaatattttaccaggatctagatttactaaccagtatgtttcattaacatcc

SEQ ID NO: 152570 - DNA, 619 bp, Cannabis sativa
catgtcaatttgctaaacatcatcatcttagttcaagtcctagaatccataaacgtgctagtgttccttttgaattagtccattctgatgtttggggtccttttcccatcttgtctaaaccttgttttcgttattttgttccttttgttgatgattattctcatgtcactaggttgtttttaatgaagaatcgttctgaattgttctatattttttgtgccttgtttgttgaaattcaaaatcagcttaatgtgtttattcgtactttgagaagtgataatgcgaaagagtacaaatctggtgtatttcaatcttatatggctcaaaattgcacgcttcatgaaacttcttgtgttgatactccatctcaaaatggtgtagccgaacggaaaaatagacatctccttgaaacaactagagctctcttatttcaaatgaatgttcctaaaccattttgggccgatgccatttctactgcatgttttttgcttaatcgcatggcatcttctgttcttcatcgtgaaatcccttacaaaattctttttcctaataagccattatttcctattgagccaagaatttttggtagcacttgctttgttcgtgatgttcgtccaca

SEQ ID NO: 152571 - DNA, 518 bp, Cannabis sativa
ttcgatttcatcaagtgattctgcaagaagtatgtgattggtaccttgatcgtaagtcagtcttctgtgggaaggtggctcgagttcgacgagcagcataggttcataagacttcaggaagctcttctggccagttgcctttggcatcttcaagttttttctttagtgtatccttgaaggttttgttgactgccttaacttgaccgttttcctgaggatgcgccactgcggagaaatttttgatgataccatggtttgcacagaaatcagtaaaggattggttgtcgaactgcttgccattgaccagcatattaggtccttcacaataaagtcttgaactttctttgatgtgatggttgcgagtggttcgggctcagtccacttagtaaagtcatcaaccactaccactacgtactgcactccacctttacctttaggtaattgtccaatcaggttaatcccccaaatggcaaagggccacggactttgcatcactgttaactcgttaggtggagctc

SEQ ID NO: 152572 - DNA, 843 bp, Cannabis sativa
tccatcactcttggatctatgaacttctagaccaagtatcttctttacttgtcccaattctttcatgtcaaattccgccttaagtttgtctttaattcctttgattactgccttgtctttgcccattattaacatatcatctacatagagtagaagatacacaactgttgactcttctaggtacttgaaaaataaacagtgatcaaacttggaccttgtgaaaccaatctcttgaacatagctgtcaaatcatttgttccattgtcgtggtgattgcttaaggtcgtataaggacttttccaacttacaaaccatctcttttccatcttgttctacctgaaatccaggtggttgctccatgtatatctcttcttctagataaccatttagaaacacagtttaaacatcaagctgctccacttctaaaccttgttgagttaccattgacaacataagtctaatggtcttatacttcactacaggtgagaacaccttggtgtaatctatcccttccacctaagtgaaacttttggcaactaatcttgccttaaaccttactggctcatcctctgtcacaccttttttaatctttagaatccatttgcatgagatcaccttcttgtcctcaggtcttggaaccaatacatatgtcttgttctttctaagtgagcttaattcatcatccacagcccgagaccactccttcttgtactttccatttaaagcctcttatatactcaatggtttttgtatgtcacatgaatgatctattgacaaagcataggcaatcagatcagcttctacaaaccttgttggtatatgaatttctcttctggttctatc

SEQ ID NO: 152573 - DNA, 585 bp, Cannabis sativa
aaaattgagagaattaaggagagaagagaaaaataattttggagtgattttttataaaaaaaagttttgaaaatattaaaataagttcaagtagaaagtacggtatatatcacaggtataacattgaaagaaaaaaaaaataatagtcaattatatatatagatatgctgctatgttttaattagatcacaaaaaaatagtaattaatcatactaaatccaaatatatattctatttaatttacacataatgtaatttttttaaccacatatttgatagtcaaactatttttttttattttttttaatattttaataaatttattattaataataaagatctcttaatcttatttctttataaatttttcaatttttaatcttttcttccctataaagttttaacactatctcttattaatcttacttttatggatatgatatgacattgtagtatttaatttttttgttttaacttttaatcttttcatctatattagcacttcattatattatttatttgtattattatgtattgattaaatctattagtgataacaatggtgacgactataagtggaatacg

SEQ ID NO: 152574 - DNA, 512 bp, Cannabis sativa
  modified_base (53)..(54): a, c, t, g, unknown or other
tgtttataattgtacaaagattttgaactaattttttattaaaataaaacttnntaataatttgatctagagatgttacgataaaattggttacatttttagtatctattcatgttagaagtgttcacagattggtttgatccgaattttcataatttttggactaaaccagcataatagttttgtgaatattagaaaccaaactagaccaataaatttgttaaatcaaaccaaaccattaagaacgatttggtttggttcaaaactactatttaagtagaatttataattattcatatattttttttttaagtaaatatactatttttactaattttttaattttatttttcaaaatatatatttaacataacaagtaatagatatatagcatataaataacgatataaaaatattctcaaaagttatacataacataaaaaatttaaaatttatacaataaaaaacttgaaaaattcaaaattatacatatagtcatatataaaatatat

SEQ ID NO: 152575 - DNA, 629 bp, Cannabis sativa
  modified_base (572)..(578): a, c, t, g, unknown or other
gataaattgagttatgtagctgctcttagtatttggttttgttttcagaagtttatttatgtttagatatgttgattcaagcatgttttgatggctgttggtagatttaaccaagtgctgagttttagaactcaaacttggagctttaatggtgattttagattctgagcttgggtaatggttttattgcttggaaaatgtttattggggtatattatgcaggtttggaaagtttggttaagtttggaatcgatttggttaggctttgaatttttttgggttttctgggtaaatttggctaaccggttatacaatgcctccaaaaccgattacttggattttgcagcagggtttcccaaaaaattcatgtggtcgactcgttccagtttcagagccttggttggttaattccctgatagtttagggtatagccatattaagttacagtagatggcgttttggtttaaaacctaagtccacggttgtgatttagcgtgtcacttatccatgttgttatcgatgtgagttaagagcctgtaattcgtcaagttgttgttccactcaggttgacnnnnnnncctgaattcggaattgaggtaagattagtataatgtcatgcatatgttatt

SEQ ID NO: 152576 - DNA, 671 bp, Cannabis sativa
  modified_base (191)..(199): a, c, t, g, unknown or other
  modified_base (498)..(501): a, c, t, g, unknown or other
gtatgcctggtaatttacttactctagtgtaagaaccttactttagtaagtttttggagcatttttctaatggcaatctatagaagcctctctacttcttgacgtagattttatttatctaaggaacaatttcaactattccagaatagataaaggccaagaaaagatttccttaggatcaacagtgagannnnnnnnntatgctttgctatgcattagaccagacacatgttgttgagcgagagtaatgagtaggtatcattttaatccaggaatggaacattagaagacaatcaagtgaaatttaagattaagaagaggaactatatgttagttgataagggtcgtattttaatactcatagagtacaacaaataaggttctagacttgccttagtgctacaaagtttactgatgagatggtgattactatgggggttgagtagtgattttggaaaagtgtaaaaacaaatctgaaatctctaactctaccagtgnnnntgaatgttaaagttgcaagaaagatacttattcagcctatggaatattatatatagtttttggcattataccaacaatttattaactactaatgttacttcctgactaacacagaagtagttgccaaaaagcaaagaatccagtacgcctagaggagtagacatatagag

SEQ ID NO: 152577 - DNA, 638 bp, Cannabis sativa
tccatccggacagctccaagttccaccctggcgtcatcagcattcttcctagccgagtccacctccgccctcatggggttggacatggaaacatttttggaggcagtagatttagctcgggaataggtgtaagccaactttagaccagcctacacagagaaaaaactttatagtctgaaccaagtaaagtaggattaaaggaaactgtcaacaaagacttaccctggtgaattctctcaagactcctcccatcaacagctccagggaagactcgttgtcagcaccggccaactgctctttgtctttcttggcctctagaagcactagcaaaggtggagtaggagcccgcatctgctcaaatctgctcttggccagctcggatccaccctttgattgctcaggcctacccgagcttcctcctcaagaatctttggacttagcaacttttggagtagaaggatccgcaatagctagctcctcaaaaaggtcaataacctccccggccggtgcctttccttagaaggggtcgcctcatcgcccctagatttcttggccggaggagatgagcttaagcttcctccaactctcttcttcagagcatcgagcatcttctgagacatgtctacacgaaacaaaaa

SEQ ID NO: 152578 - DNA, 887 bp, Cannabis sativa
ccattaacgttcggactaagcttttaaaagttccaaactcgatttctaactcaaaatcacctcaaattcaacaagtaaacatataaactagtcctatagttagcagacaacaattctacgaagtcagaatctccataacctttttaaatcataaagtccctatataaaactaattgtttttagcttaaaacgtaattaaaccataccttaagctttttctcttcaaggatttgctatcctgatactaccggagcttaaatcgctaagtttcaagttaaaaatcaaagaaaatgaatatagagggagaagattttgtggaaggaggaagaacgagagtttcgttcttcgttcttctctgttatatcttaaaacttaatatatatatatatatagagtaaatctaccgtgggtcctcttgttttgtcctcatgctatgaggaaagaaaataggccaattacaagttaaataaatgtgtgtgtagatgtattttgttagataatggtagctgattattcacatattatagctagtggaaagggtatgtgcaaattagcgttctacataaactttttaatactgtcgaatataaattatctacctaaactaaatcgagataatttgataaaaaatacaaactgaaaaatccgatgaaaatataacccacccaatttttatttgggcgggttgaaaataatacagaccagcctaatcaatctgaactaactctacctacccgattaaaagggttttttttttatataaatttttatatttttatgatttacatttatatatcatataatttatatgactattaaaaaatatcaagttgaaactaatatgtttattttcatggtagttgatttgaattttaaattcaatttat

SEQ ID NO: 152579 - DNA, 575 bp, Cannabis sativa
gtacctcccacacttcaccaatttaacttactctcactgttcacaccttaaaacacttccacctcaaatactatcatttattctcacccactctcaccacttcccataattcaaatggtactaacgctaaaagtgtaggttctggtaatacaggttctcaaagcacatgttcaacaggtgttatcagatcaattgatcatgcaccatctcccactgctcaacattcctaaacttcagcccctgttcctatacaaaaaccaacaccaagttcaattacatgtcaacaatcactctatgatcactagagccaaagcatgtatcaccaagccaaaagcctttcttaccagtactattcctcacaatgtttaagttgctcttcaatatcctatgtggaataatgctatgagtactgaggtagtgactcttaaaagaaaaagaacatggactctagttcttttatttcctaaaaaaaaggctattacctataaatgggtctacaaaaagaaggaaaacctagctgttatgatattttgcacacgcaagtgcatgtatcgttacaagtagtaaactcacca

SEQ ID NO: 152580 - DNA, 631 bp, Cannabis sativa
aaatataaatatataatagagagtcttcttttatttttaaaatattataattcaaattttatatctcttatatattgtactattttttataaaaaaaaattacatttttacatttttttttttatttttacagttttttatagacatatcacgaaaactacatataaataacatgaaaataacatcaatataacaacaaaatacagataaaaaaatcaataacaaattagcaatagtacaacataaaaataccgtattttctgtaaataaaattcaaaaaatcgtaaaaatatttaaaattccgtgaaatattttttttttaatttttttgttatttttgtgcatttgtgaaataatctctctatatattcaaactcaattcaagtataacagaaagtattgtttttttttttttttaatattgcaattcaagtttaaacttattgcacatatctaaaaaaaatctatcgttctattatcattattttataaaaaaaatatttttctattattatttaaaaaaaatgaaaaagtattataacgttaaagtattccagttaaactaaaattataattaacactttttattatatttttttatataaataacacttaaattaagtattttttt

SEQ ID NO: 152581 - DNA, 678 bp, Cannabis sativa
atgaaatgatgatgcaactgtaaatcaacttgaaaaaacatggaacttgactccaattaacatatttgttgcttgattttattttgaaatcataagaaaacaattatgcaacttaatataacttatatgtattggttatacctgatttggattgattgggagctcctgatcttttcattatttcaagtcagttgttactaattgtgaaccctatgcttttcatcagttttatttgaatcagatcattttccaactattagaaaagtaatatgcaactatttgcataaaacttaccatgtataattgttatttgttggtacccgtcaactgaaaatcctgcataatatataaaccatcataaaacgataatgcaactataagacaaccaaaacaaataataaataggcctatacgtaacatgttgtcccttaattcaaatttgctatgcttattatgtttttaaaaaaatgaattccacattgtaaactagcaattaaccaaaatgcaactgtatataaagtagatatattattaatgagattttttaaaaaaaattcacatcatatctattatattattttataatataataaagtatagattaaaatgtgataaatatatgtgaataatatatattaggtgtatggtaaatatatgtgtaacctatgattttataac

SEQ ID NO: 152582 - DNA, 802 bp, Cannabis sativa
attattaacgaccttaaaagttcagggagcatgatttggtacatgtcaaagttgagggaacaaaattctaattagcctttattttatattattattgatataattaattaagtgttgaattatttgtaaaaaatatattttagcacatttaataaaaattattattctaatagtattttaaaaaaatgtactaaatttgatacatactaaaaattatatcaaatttgacctataataaatattgcttttttatttattataataccacactaattatgatgattcattaacttttactaaattttacattctatatatactatattagtattatttaaataataaataaataataatttttgtatattcataataaaatattaaataactatcaatataattaattatttatttacttattttacattttgtatattgaagcacattataaacagtgagctaaatataatacaaattcatttttgtgccaaatttaatacaaattttacatagtattaaagatgaactaagacaaaaaaatttaggaaatattactaattaattataaggtattacttgttcaaaaaaaaaaaattataaggtattacttatggaaggggctatgctatgcactatttgtgtccaacacctaagagcatctctaatggaaggttctatagttgccaaaagtaacacatcatctcaaaatatgttttttttttattctctctcatccacatcagatttgatatttttttttgcaaaaaaaaaatactttaataattgacaattcaaaaagttg

SEQ ID NO: 152583 - DNA, 658 bp, Cannabis sativa
cacttaacagctaaatttggacggaaatggtaaattgctaacaaagtagtagttttgggagtttacccgtagaaatttgggttgtgggggtttagcgaaactaaaactaaagtattggagattttgccgccatttacccttactaataaatgtatcgtattggtgttaagttaagtactaacgactcaaatatgtatgtgtttttttttattatttattgttgtatattacttgaaaataagtaagaaatgaacccttcgaatcgaaatgaacatatatattttatcaaattgagtagcatttttcaaagtaattaaattgtaagtgttagtttcttggaaagataatatgattgtagggaaaatattatagtaataacaagagtacaaggcaattttataatattactaaaattttggttataagaggattactaacattattatttttatactaaaaactaagcaactaccactttcttcttgactcaccaaagctaacatttaaatacttttgcatgaaaaaatttatatataaatatctaacattctagtacaacattttatatagaggggtgctaaggagactctcttttatactctcttttacactctcgctataaattagtgataaatgtcatcctttgagattagtgtat

SEQ ID NO: 152584 - DNA, 560 bp, Cannabis sativa
taatcctcaagaaggaatcaatcatcgtcctgaaaaagaaccattgagtcctctgggatctattgagtcatcgcatgaacagactgcaagccccaagaaaatccagtattggggcccctagcttgacgaaccttggataaataataattggccacttcctaactaggttgatgaggatggcacctacgacccaactagatacataccaattgtggaattagaaaatctccatcttaggcatcgattggaggaagcaaaccagtgtaatgccaagttagagcatgaaatagccgcagtaaaggtagcgcaggagaatagtacccaaaattaacctgacattgggagaagagattcacgaggcaaacctcgcggctcacaaaccaagggacaggggacaactctgagatatactcagaactctcaggagatgcaacatgaggaaagtgaggaaaatttggagacataacctgagatacgtggaacatcgaacgaaagtcgccaaccctctttttaggctcatcagaaagaaattcgctcaaacccttatagggagaataagg

SEQ ID NO: 152585 - DNA, 644 bp, Cannabis sativa
aatcttgaaactaaaagtttccctatcaataaataacatggcaataccctaaataacagaaaaatgggaaaaaatagggttctcaaatttccccaaccggaattcttgttctgggaaaaaattcctggaagccaactggaattccggttcctactggcctccctgaaccggaattctggttcattgcaggaattttttaaaatttcataactcatgcaatttaacctcaaatcaaaccaaactctccaaacctgctaattagaccataatgaacatttctaaagcaacaaaacaaccacccaaccacaaaatccaaattttccattaaagctccaagtttgagttcaaaactcaaacttagttaaatctaactaacaatcaacaaaacctggttgaatccacataactaaacatatttgagcttcagataacagcactaaacaataacagtagctacagcaagcaattcctcaaaatatgcaaaatttcatttccgtaaaacccaagaaacaaaagagaaagctataataaattacctagagcttaagaacttcaaatccttgaagaatcttgctggaaatggagaaaaatccccccaaaccttagctgttctaagggtggccgaaatagagagagagagagag

SEQ ID NO: 152586 - DNA, 738 bp, Cannabis sativa
agaagtagaaaaacatttaaaaaatatatagtgagcgtataaaataaattttaactcaaatagacataatctctacttaaagtatgttcattagttcatagttcatacacatacatacacattttttttaattacatatgtataaactataattctatttgtttcatattctaatttcaacatcttaaattatacaaaaattcctttaaaaaaaagagagagatggtacaaaatcacctaaactacattataaaagattattaaaaagaaaaaaaaaatccatcatatccctgtattacttacatagattttattttatttatttaatttttttacaaatctatataaataaattgagaaaattgtattgtacaccaatacatttttatctgttcagtatacactaaaaaaattcaaacaatatattaggtgcatgattcatttattttgtaagtattttttatatggtaaattgttttaatttttttttaaaattttaaaagtatctcaagaaacatgttccatctcaaaactgtcaatttttttttaggtatgacttaatatttttacatttaatcattaatttggtggtacaatattctctgttctccttatagattgttattaaaaccaatcactccataatttttcgatattgcggttgtgtgttcgttacacgagacgagagagcaacccgtataagaacacacatcgcacgtgtaatatatacatcaaaag

SEQ ID NO: 152587 - DNA, 525 bp, Cannabis sativa
ccaggataaatattttactatagtattgatgtaatgttttttggattatacttgagttggattgtttgggaactccagttcaactttttaagatctgcatttcacggatatgaaaactgaagtcaggacattagttttatgcgaattaaactggatttctagttgaatttttgttttgtagtagttttatggatttttttttcatgaattcaaaacagcccatgatttaattgattctggtcgtcttctaggtgaagtcgccaaaattaatgttagttctctttttggttagattttcgtttcggttgcgttgggttgctgcgtggttgtccaaaggttgtccaagaagcatgcatcctggattgaaggtgtgtgtaagaagcatttgtgtaaattttgtatttatgctgtatatttatttattgggttatttgcagcataacctccttaagtggtcaggtttttgcaactaacccccaattctaaaatttttgcggtaaaactccctaaactcaagttctgtta

SEQ ID NO: 152588 - DNA, 518 bp, Cannabis sativa
ttgactcgagaagggtaaaactgtgaatttaatttatttatgtgcttatgaactatattattatatagtatatctggtgtgtcctttttcaggtgttctgacaagttggcgctatatagtcacgaccgggtatttcgggccgaaccgggtttggggccgaaatattattttgggataaattattggcattttatttatgtgtgaataatctgaaatttttttgagtttatttgtgatatgaatgaccattttgtccttgaatgcttttaagtgtgttatatgaccctaggggcaatatggtaatttggcctacatgtattatttgtagtaaatggaattatttgtaaaaaaaaaaaaagatagtattttctggtttttcacacccaaccaacttctctttctctctccttaaacttctgttccaagttttgatttttgttgagaaagagcttgaatttttgctaacttttggagcttggaatttggaggtgttggggattgttcttgctataatttga

SEQ ID NO: 152589 - DNA, 526 bp, Cannabis sativa
  modified_base (207)..(210): a, c, t, g, unknown or other
ttgaaagaaaggaaaacaatggaatggtgatggctgtcatgtgttgagttaggtaaagaaactatggtcttaaatttttttatttcagaatgttactttaaatgtgatgtgctttgtaatctgttgggtagtgagtgattgttgtactttaattacaagttttagtttagattttcctattgttataaatttgttttgaaaaatttnnnngtttagacataagattcatgagttaataagatacactattaataaaaactatggcagttttgattgtttgtgtaaatcaattatcggagaagttattgaaattggttatgacagttagtagttaagcattattttgttaattctaatattatgttttgcaacttgttttgtactctgttcattataaattggttatgattgtatcactattaagattgaacagaaacagtatgtttcggtgtaagtgtaaggttgtgttgaaaatagtattctttcaggcaattcattgagttttttgtttttttgttttttgttt

SEQ ID NO: 152590 - DNA, 502 bp, Cannabis sativa
atttgtttatattaaatcataaagagacatgtagataaagttacgtacgtggaaacattgttcagatttttaatgtttcacatgacaattgtattacagttgcataaacattttgctaacagttattttgtctgattgaaaccttcgtctaatgtaaccttcgaccaaccacccaacaaccacccaaaaattttcgtctgatgcaaccttcggctaaccacctagtaaccaccctataaccatcgtctgattgaaaccttcgtctgatgcaactaccgcgtaaccacgcagcaaccaccctgcaatcatcgtctgattgtgtaagtgataatagtgtaagtggtattatggtaattaaaatcgggaattttgattttatatacttcaaaaattgaaaaaatttattattaaacaaaaactctaaaccctaaaaatctatgccattttttttcaaaaccccaaaaatcccccctcacaatcacccattctctctctgcatcat

SEQ ID NO: 152591 - DNA, 507 bp, Cannabis sativa
  modified_base (46)..(46): a, c, t, g, unknown or other
  modified_base (126)..(134): a, c, t, g, unknown or other
  modified_base (184)..(187): a, c, t, g, unknown or other
ttaatttttgtaattaaaatggactaggttgctaaataaaatgtcncaccatgatagattttatttaggctcaattagtatttgggactattcgattaataacagtggttcattttaaggttaaannnnnnnnntttgggcgttgtgtgagagttagggggccatagcagtgggtacgacatannnnacccagccctccctcacatgaataaccccaactgtgaaggcccatttgcctaatttgaataattgtaccaagttaattaaactattttaacctaataaacatttattagcaacataattaattttaaaatatatgaaattaatttttcatttaaattttttgaaattaatttaaaaaagcacacttagtttaacgaattaattcaagataaactatatgtgtttttcttgtacttaattaaatgtagaattattactaattagattcttttgaagcttaattttaatatttcatttaatattcctatttaagttgtaaat

SEQ ID NO: 152592 - DNA, 585 bp, Cannabis sativa
tttttttttcacgatgatgttgatgaaactggtttttctttttttttttgcttctgcaggttttaatgaaataattactttttaacaaaaaaacaatgaaaaaacaaacaaacagtagtttaaataaaaaataagttcaatttctataaaaaaaagaacatctacagttgagattattttttatttattttagtgttttattttttaagaaaagaaaaaaaactaaaaagaaacacaaatttgaagttttttatggcattcctcatgactttttcccatatttgtaagttttttttttttaaaaaatgccatatttaggcatatatatcaaaacatatcttcaatttcccatatttttctaaatagcaaatttccccttttcattttagcaacctaatccatttaaatatctagaaataaatgggcttcttatatgcatctaagtccaaaagcaaatatataggctcacacaggtcaaattgatttggatgggccctatcatgttactatgattacactgatgaaagaaattacaaaatttacatgttacaaattatttataggctctattaacaattggactat

SEQ ID NO: 152593 - DNA, 822 bp, Cannabis sativa
gtggataaataagcataatttgttaattacggagatttatttgaaatacttgaatataaaatgtgttatttgtgaaatacaaatattttcaagttcgtcgaccttggagacccaattggaggccaaaaatgtcacaatagttttagtcagaaatattgatgggattattatgataagttgattttagaaatattggggtattttgggatactcaaagttagccaaataccctagaagtagaaatttcttagtgactaagaaataataagatagctatttgttgcccctgattttgcccaaaatacgtggacccgtataaagacgacacgtggagctgagatggccaactcttaaagaaatcgaccaagttttaggcaacagaggagcgtctctgagaagatgactcccgaaaaagatatgagaaggatctttatgctcccggaggccagggccatactaaggctgctccgggaggtactggactctattgaacaatcacctcgcatttaatgccgcatggggaaagatgtattgaaaataccataaacgatatgactaatagcgtaacccctcttttgcagctattacgctgtgattaataaggctagtgacggtataagtcatgtatttcctattttgtatctgctaggaatatgtgcccctattgaacctgcacagaaagacaagtgattcagttctaggggtcccccttagaaaacactataaataccccacaaacatactgagaaaggggtcgagaattctgggttcataggaatatgttacgaaattttatggtttttacgcaagtgtacgcaatca

SEQ ID NO: 152594 - DNA, 502 bp, Cannabis sativa
ataaataatattttattattttacccataaatttctcataaaccaagaattttagttatataggcacactttatatagaatagatatataataaaacgagaacagttctcccctgatctttgcagactatatatacagggtggaggatttttatgatagtgatttatttggtttgttattgcattttatttaaatatacatgcttatatataatagtttataatgttttatacttatgatcatgagtctaaaaggcgcatatagtcgtacacattacaattgtcacccaatacatttcttcattaatgtagttcttagttcttaactcatcatataaaaaaaggtttattggtcttttataagaccattaatgggacactaaaatactaaatatagtataattttacactatatatatatatgggtaactattcaatggttacatttttattgtacccatatggttacatttttctctaacctgtaatagcaggttactaat

SEQ ID NO: 152595 - DNA, 622 bp, Cannabis sativa
ttttttccctatttaagtgtcatccgaacccatacaaaaatagtgggtataactccggccaccatcatttgttgagaaaacattgaatctcaacacgctttaaggtataaatatagtttctattcatttttataatgtatattgttttatttttagtttttgtaaattattttttgggttttttaattttagtaatattgttgtgttgtatgtgcatagtgcccgaatttttggcagaattgctcgtcggattacggttataaggtaaaaatttaaacctcaatatatagtgtatatatgtatttttatattttagtgaatatgtgtgtgtgtatataatgtatgtatatatattgtgtgtatattaatttttatgtaaatacaatttgtatattgtattgtatatattctatgtaatatatatatatatatatatttattgtgaatgctaatgacatggatttaattagtttagaaataaaatttttaaaattgaattagggagagatataattgattatacatatatgtatgtataatttagtaactaagtagcttgttactattttttataactagttataagtaatgaaataattatttttgcaatttcgttgtattt

SEQ ID NO: 152596 - DNA, 661 bp, Cannabis sativa
ttattattattattattgagaaatcaaaatcattgatttgcataaactcaaatttacaacttaacaacaccattacggcctttataatctatacagcttgtagaatttgtaaaattaattgtgttgtaaatttataattgctcaaactattccaagtctttttatttcatttttttaggcaaaattgataaaattctaattttcacctcatctcgaatgcagagcattaacatgggtaacgataggggtgttcacagattggtttggtctcgatttttatagtttttgaactaaaccagtataacagttttttgaatattaaaaaccaaactagaccaataaatttctcaaaccaaaattattaagaacggtttggtttggttcgaaaccacggtttaagtagaatatataattattcatattttttaagtaattatactatttttattaagttttaattttgtttttgaaaatatattgagtaatttgcggcaaaaccccccaactatcaatttacttgcaaaaaccattcaaaaaattttaaagttggatagttttttggaagtaaattgatagttggggggttttgcagcaaattactttttaagtttttatttttattttaattactcattttaatttttattttgtaatatatggc

SEQ ID NO: 152597 - DNA, 510 bp, Cannabis sativa
aaacaatgataaattgtttcatcagtcactttgcacaacaggcaaatagcatcgatggccacatgtcttgacctgagcctagtcttcgtaggcaaacaattagtgacagcaagccataacaaatccttcacctttggaggaacactcagcttccaaagagtattccaaaaagtggaattatcatcttgtgcatccagctctttactcaactgcaagaatctatacactgatttaactgaaaaatgacatgagttctcccaactccaaaaccaaacatcatgtatacgacttgaagacaaagaaatggtaagaatcaaattaacttaaaatataccacaaaattatatttagtttaatttttgtatttgttctctaaagcacaaagtacaaattagttataaaagtcaataataccgttaatactcattgaaaatatacaaacaattaactttatttatattattttaataacttataaatataaaaatattttttattaatgaatagtat

SEQ ID NO: 152598 - DNA, 657 bp, Cannabis sativa
atatatataactttcaatttcttacagttactaatgattttgttgtggtgtggtgatcttattgcaggtgcaaggcagaaaatggagttgttgcaataggctggaaagcaggatatgtctgaagcagcaggtcccaggagttatagcatttcctcagtattttgaaatagagatgcataaaagaatgaattgctgaagcaatactacaacaactgggagtattgggttcaaaaaaaatatatctataaactgggagtatgaaaggaaaagagacatgtgggtgaagcgtgcgctgcagaccaacgtgcgcaaagttatcctgggatacccaaattttctagatcagattctttcgccttggcattagattgatggtgaagagaggggctctgtcggtgaagagtctgattcttgagggagttttcttctttccttaaccaatttgattactgtaaatatgtgtgatagttcaggttgttttgttaaatgttattagttatgtgttgttgttgttgttgttatgtgtgtttttgtttaaattggttatctttattgctgtctttagttgtttgtgtagcaacattttgtagttaaggtcatgttagtaatattatatgatcatgtttgtgttatgttgtgttagtgtgtaactgagaa

SEQ ID NO: 152599 - DNA, 540 bp, Cannabis sativa
aaggagcagagccatttggctagcccatggagatcgcaacacaagatatttccaccgaaaagcaacatctcggcgtaagaagaactgaattaatggtctctttgataaaaacctaatctggaggatttctaaggaggacatagaaagcaccatttgtgaccatttccaagatcttttctcagcaactgattgtggtcacgctacagcagaacaccttcaacgatttgtaccgttacgtctcagcagactccaaaatgaccgcctgctctcagaatttacagctgctgatgttcacctcgcattgtctcatattaacgctatgaaagccccgggaatagatgggatgcctcggctattttatgagaatcattgggaagttataggcaaggatattactaaggtttgcttggacatcctcaacaaccacaatgactgcatgcagctcaataagactctcctttgtctcattccgaaaaccaaacatccgaaacaagttggggattaccgcgccataagtctttgcaatgtgagttacaagat

SEQ ID NO: 152600 - DNA, 691 bp, Cannabis sativa
  modified_base (443)..(447): a, c, t, g, unknown or other
cgaggctctttactattggcaatttcacgggtgttgttacaaagtaacaccaatagttttttgcatatttggaataacaccaagctgtgtgaagaactttctcagccagaccagttccttagcagcctcaacaatagctatgtacgcggcctccatggtagagtcagaaattatatattgcttgacacttctccaaacaactacttcacccccaagagtgaataccatcccagatgtagactttttgtcataaagggaagcttgcaaatttgagtcaatatagcctaaaggattcaaagcacaactcttgtagactaacgcatagttcctagtcccctttaaatatttcagaatatgcttaactgtcgtccaatgttcctttcctgggttggactaataccttctcataattcccactgcatagcaaatgtctggtctagtgnnnnncatatcatacattagacttccaactattgaagcataaggaatttttctcatatcttctaggggtgttcatcaaatcgttcaaaccgctcaaactgcccgcaccgcaaaaaaaaatgcgatttgaaattctttgtggtgcggttgtagtttgaatttttcctaagccgcgcggtgcggtgcattttacagttttgaattgttaatatgcggttcaaaccgcaccgcactacatattataaaaata

SEQ ID NO: 152601 - DNA, 815 bp, Cannabis sativa
aaaacgaactgagtcgcaaatcaccaacgcaacataccagcaccgagttacaagatacttcaacaaaaaagtcaagaaaagactatgcagtgttagagacttggtgctaagacgagtctttgcaaatacgagagatgcatctgcaggagtcatctgcaggagtgttcaacccgaattgggagggtccatatgtcatcgaagtagtagttggagtcagagtttataaattggctcgctaataaagaactaatggaacatagaatatttgtgaccctactaccaataaataaatgatataactcgcattactgatgtaaacttcaaacttcagttatgattaaagagtattatttacaataagtaattacaaagtttgttctttagaaattacttaaggggcatttatgtacgattaaccgaaaattatctggaaatacattgtataatgcaaacctatcaattcaatttttttttatattcaaaggttctcgactaaacctctttgacgaaagtggagtcgaaccgttataaatccttgaccaaacctttttgacgagagaggggtcgaattgttataacaccttgatcaaaccctttttgacgaagaagggatcaaacaactataatttttgatttaaaacctatctgacgaaaaaggaaaatcaaaatttataactcgcgtataaaactgaatactattggttcttacgagctaggaaagtacaaaacgaggcatcacgatgccttgataaaagtacttgaacctagaaaaatgatagataatataactattcatacaagcaaattaagaatat

SEQ ID NO: 152602 - DNA, 998 bp, Cannabis sativa
aatgagttttatttagggcataaaacccaacagaaaataccatccaacacaaagtcaagaggcatgaagcctttacacacaaacaaaacaaaaaaaataaaacaagagtaatgatgcaaaaaaaaaaatatgcaagagaactagtttggtggatggccaaaacgatccatgtatgccctccattgtaccatctcattttgatcattttcaaacccatggaccatgtcactcctcatggtgttgatatcattgttgagattagtgaattgagagttgatatcattcctcaaggttctaaatagattgtcaaacgatgtgtgaagacgagtaaaagcctcctcaaggttgaattggggaaagtgaggcatgggaggagcttgaggatgcatttctacttcttcttcactctcacttgcgggcaagttaatgtcctcatcttggtcttcatcatcactttccaagtcaattggcattctttggcctctctttggtgtgaaaacccattcattgttagtaaatgtgtaacccatagccttgaaagttttggatcctaaaatgtcactagaggtgggatcatctttcttttcatgtaaggtggggattcctaagcgagggaaaagatagctaagaagaaaaccaaagggaagggccttgaccatattgggtttattcacatcaatgatgaattttaaaatgagatagcctaggttaatgtgtgtagtttctgctaagatgagatgcatgagtaattggtcaatggaattaatctcatcttggtgtccactcctaggtgcaaggttagccacaatgaatttgcggagaattttggcctctaaagtaagttgatgtcttataatagggccatcaccacaaagatttttagaacactcatcaaagttaaagattccattattcttaagagagagtttgggttcaagcaaaatgctactattgggtgctcctaacaattcattgagagattctacattaagttcaaa

SEQ ID NO: 152603 - DNA, 697 bp, Cannabis sativa
ttttaaaaaataattataaatattgaaaaaaaattaaaaaattagaaaaaatatattttaaaaaataattataaatacattttataatttatttgcattttaataattttttttttatatattttgagcaatacttccccaatctgggtctcaccgatttacactccctcacaaccttagtaccaaaatttggccctcaattcatcgaattctgatgaatttatcccaaactttggaattggatcaagtttggcataaaccttcgtccctggctgagcaatactaaccccagtgggagttcgaattctaaacccactactaatcgaaccaccaccactacccccaatttcattcctgtaaaacttgctcatactcttcatattcgacccatatttcaatccctcataaagttgttgatctggatcttcctcttcattctcgtgatcttcgtcttcaccagggctatctgagtttttcgggcttcgccgtcggacctttctccatcgaatttttacgaaacagagggaaaggaaaacgaagaactctatgtaatttccattgattacaacgcaaaatacaagaacagctttatatacaaactggtataaaccagtaacaccatgccactgaacaacagactctaactaactaatacagctggcaaaaccacttgctaacaaactcaaagacactaaac

SEQ ID NO: 152604 - DNA, 577 bp, Cannabis sativa
aagaattttatcctgtaccaaatggatgtaagaagtgcattcttaaatggatacattatggaagaggtttatgtctctcaaccactcggttttcaaaaccataaatatactgaccttttatatggtttaaagcaagctcctagagcttggtatgaaaaattaagtacatttcttgtctcaaatagttttttaatgggtaaagcggataatacactttttataaaaagaaaatcgaaagatattattaaagtacaaatttatgttgatgatattatctttggtgctactaatgatgctatttgtgaataattttctaagtgtatgcatagtgagtttgagatgagcatgatgggagaactcaactttttccttggacttcaaatcaagcaacaaaaagatggcatattcataagtcaaaccaagtacatcaaatatcttctttaaaagtttgacttggcaaatgtaaagtccacggaaacccccataagcacatctataaagatggacaaatatgaaagtggtaagaatgtggacattaccaagtatcgaggtatgattggctctttattatatttaa

SEQ ID NO: 152605 - DNA, 1814 bp, Cannabis sativa
tttactcatcattccataacttcctgggaacagctatccaaggacttcaaaaaacagttccaggctgtaagggataggcgacccgaggtgtcctcactaactaatataaagcaataaccaggcgaaacacttaaggcatatttaagtcattttaacacggctactgcaagagttagaaatctggatgatagtacacaacttactgccctccaggcggggatcactactgatctatccaccgctgggggcgaattgtgggacgacttacagggtcgtccggtgaagaacatcattgagttcaacgagagggctcaggtgtttgtccgaaaagaggaagctcgaaaagagatgaacttgttaaaaactggctcaggaggcaaacccaacaatgtttcaacaattactgtctcaactagagttgataactcaggggcctctcactcaaagagaaaagacgattctaaggagtcgtcaaaggacaagaagaaacaaaagaagcacgataagtatgtgccagtttatactatttataccgagcttaatgaaacttgggaaaatatttacctcgtgcatgagcacaaggttgccttcagcaatctcgagcccatgaggcatgtgaggcataaaagagatcctaccagatattgcaaataacataaggacattgggcacacaacagacgagtgtcgttagttgaaagatgagatagaaagtctcatcgctcggggccacttcaagcagtatgtgaagagacaggacaatggacataaccagcccaattcgcccaacaacccaaaaaccagggattacaacctcttcctgttgaaggagaggacatcctggttatttcgggagggccgcatattgcaagagagagcaacaacgcccaaaagaggtatgtgaaagaaataaaaaatgagtagtcggtatttgctccagaaccttccaagaaggtaaaaattgaagaacctccaatcatattcttagaggaagatgaaaagaacgtcaggtttcctcacgtcgatccattggtgattactatctagctcgccaataaaaggataaagagggcgttgatagataacgggagttcagtgaacatcctttacaaggaaacgctgaagaagatgggactcgaaaaggccaaattgaggccttgcatggtaaatctgtgcggcttcactggcgacagtatcgccagtcaatgcataatcgagctcgcattgaccttgggagaggcacccttatctgccacaattatgcaagactttttagttgtcgacctgccatcggcttacaatatattattgggtcgctcagcattgatcgaactaggagcagttagttcgatcaagcatctatccctaaagttccaaacaccagaaggtgtgggagtggtgcgaggcgattagatgctagcttgcaattgctatcgcatagagctacaacataaaaaagtcggtcactaattaatggcagtcttggcagaagaaagcaaaaagaaggatgaagatcttgatcctcgaatttaagatgaaagaaacttattaaaaccaattgaagaattagaagttgttcttgacccaagaaatcccacaaagtgtgtgtacattgggaagaacatggacgagcagttgaaatagcagctaataagtttctttagggcaaaccacgatcagttcgcctggaaccataaagatatgatagggattgaccttaattttatctcccatcatttaaatgtcgatccaaactacccagcaaagaggtagaaaaggagacccttggattccgagaggcaaggggcgctaaaa

SEQ ID NO: 152606 - DNA, 584 bp, Cannabis sativa
  modified_base (135)..(136): a, c, t, g, unknown or other
gctccagtcattcgggaggagaagaagggtggtcaaggctctccaaaatcagtcagctgggaagaggaggtcgagaaattagattttcaggctagtatattataaacaaatgtacatgtgatatatatatatatnnatatatatatttaattttgttttgctcaaaatgtttatacgtaggttagggtaatgttaaattaatagacatgattgggtgggactgataatagatagatagatatttgtttggagtgtttgtattaatggggcaatcgatttaattaaaaatgcctatttgggtgatattaattgttagttgaagattatattttatttaagaattgttagtggaagtttaaaatatgattatgatcaactacaattacgtttattgggtgctttgttttgatatttgtttgggtagtaataattgttgggttttcgtttttatttggctgttcgttccgttacttattgatgccttgcactcagccagaccaccaatataattgatgcggaaataataataataataataataatgttgacttcgcttttagccaacgacaatgagtctttttgat

SEQ ID NO: 152607 - DNA, 566 bp, Cannabis sativa
ttttttttttttttttgttgatatagtgtttctgtttaaacgtagagattttttttttgtattaagtttttttcaatgtgtgtttgttcaattgttgctggaaatttgtttttatatacattgtgattgttttcatacaattttgttgtttttttgttcaattatatgttttttgattgttttttgtttttttagatttttctgtttttattttgtacattcgttgttcatttgatgttacaggttcattatatatttgtataattctctaaggaccctgaagtatgcggctgcttctttgcttgctttggaaccttattctgtcatgttgccattgtttttctctctgttgggtgtttatgatgagcttccttataccttaccagcatctgtgaatcctgttgcgttttttcctattgtcaatgctgaagtacttcctgaataagtggataactatgaatgttaattgtttctggtctgttttatttttgttgtttttatgtttgtttaacatctcttacattgattctttgtttttttttttgtttctagtgattgtggtgtgt

SEQ ID NO: 152608 - DNA, 934 bp, Cannabis sativa
accctaaggtgagtagctcggtctaatgaatcccagattcagtaactcttataattgtatcttcaattccttcaattccgctggagccattcaatatggtgcttttgatactggattcggtcccggaaccaactcaattacaaattcaatatcccgggtaggtggcaatcccgataaatcttctggaaagatgtcaaggaactcgcacactaatcttatattctcaggtcctgatgtcacaggttggctggtatccactgtagtgactatgaatcccaaacaacctctgctcatcaggtccttaacttttaacagtgttattcttggtatgcgtgtcccctgaaccttacccacaaacaccgttgggttagcactatcaggctcaaacaccaccatctttcgcttacagtcgatcgttgccccatacttagacagaaaatccattcctaggattatgtcaaaaccaaacagttgcaattcaattagattggcggtcaattcacaaccgtcaatccagaaggacaaagaccgaatccaccaagtggatattataaggtctcccgagggtaacagggtaccaaaccctaaatttagcataaatatcacatggcttatggaaactttctataactgacatgtcactactgacggactagcatcagcgtcagcctgagtcatagtaaaaagtcgccccgggttctaagtagcattcttcttgggttcctctttcttggcctgaggacaatctctaataaagtggcccaccaagccacactgaaaacatgtcttcgcccgacactcacccggatggtgtttcttgcatttgggacactcgagatatgatcaaaatgaagacccgcgaccctgacggccacctctgcttccctggaactttctattaccccttgatgctccggaagccttagccttccgt

SEQ ID NO: 152609 - DNA, 834 bp, Cannabis sativa
taaaattatcatatttaatttgttcaggaaattttgtcatgtgttttaacttcaaattaatttattgtgtgttgtaattccagcggaaataacattaaggattcaatcttaaaacttgcaataaactcacaatttggacaccaataatgaacataaactaattaacaacacaatgaatcaaaaccagaaattaaacaaagaacaacacaaagaatttatcctggttccggtcctagagatcaatatgatccctgaccatactccagctgagaaacatcaccaattcttcattaacatgtgaataagagagtatcaatataattacaagaatcagagcaaccacagccctgttggtactcgaaacactccagagaaaacagtcacagatttctctctaccaaaccgagtacaccccttgttcttgaccctcttcaagaacagatttctcagcttagaaccctaagcaactctctccaatcctctctcttattctcctcttcaacctctctcttaaagtgaaaaaactagacatatttataggcccaactcaaacaaggatagcaccaactaactaactaactaacataacagaaagttagttaagttagttggtttaagtgagttggaaaaagagttggtttaaaggatcaacttccacattgtgattaattggctactatatagatttaccattttcaaataaattatgaaaattaataaatcattgtaacacgtttagataagagtattgttattagatactagtggtgcttaatattttctagacgtgttgtcttgcgattgctagcgatacttcttaaaaattattacttt

SEQ ID NO: 152610 - DNA, 612 bp, Cannabis sativa
aaaattaaaaaatatttaaaatataatctttttcttttttctctttcgtcttctacctccagcagtccacccccaccacccctatatcattttcttcctctaaacacaccaccgtaacttcgtcttcttcctccagccacatctggaccccgaaccacccctatctccagccacactctagtccccgagctaatcacagttccatcgcacacagtgaccttctactgtcgaaggtgaagcttgcagaaactattgacgagatctaaaagatctttacgaatagaatacgtttttgaaagtcgttttactcaatggatctcgaatatgactagatcagacccaaaaaattttactctgacgagcttttgacgccgactgaatgtcgaagggagctacaagaaccttggagctcgtggtttgaaactcgactaaggccatggtggccttgcctccagagaatgacgtcaaggcccgtaatggcctccattttttatggcgagacttcatcggtggtaaaagacatcgagcccctagagagagagagagagagagcgcgagagagagagagagagagtttaatgaatgttgatactagttttaaaagtttgtatt

SEQ ID NO: 152611 - DNA, 519 bp, Cannabis sativa
taattccaaccaggttaatagtgtcggtcagcacattagccaaaccaaccaatcactgagatagtcaggcgcttctgtatttgataggttggggacgactcatgatctcagaaacgatctaaataggagaagaggagtagacgatcagcttgacacgccaatcgtgcagcccgaaacccatgctcaaagtcctgctcagaaagatactaacataactcagatcggtcaaaatgccaaacaggttagtcaagctgtgcaggcacaactgaacgaataaagaatatgttccaaggcattgtcggacagagaaacaatgatctcgagttggacggagcacgtagaacccctttctcccctcagatcaatctcctggcgttgccccacaagtttaaaatgccaaccttgaagatgtacactgaaagagaagatggatctgcaaggggtacaggagacgtatgttgtagaattttcctgccaccctctcggaagccgcccagctcagagccatggtaattgatt

SEQ ID NO: 152612 - DNA, 625 bp, Cannabis sativa
gtatgatatttttatgcttttctttctgagtctgtcgactcacatattttttttttttttttttgcatgtgtaggtaagggaaaggcttaggttaagtaggcgtgggagcgagtagatggagattgtacttgtcagggcggttaggcctggagcgtacaattctcaggacagcagggcctattttgtattgtcgctaggtgacaagcttttgaaacatgtacaatgaaacatttgtatatattttgtaaaataggatcccggttaaatacaagtatattattttggtatttataattagttaaataaagtcttaattattcatgatttttaataaactcgttgattagcaacaagctgcaaggttaagttaaaagtcacgttaacaagcctaaactagtaaggtgttacaaatatgcagttcaaagatcatttaattaaacttggaatcgaatcgcaatatactgcccctagcactccaaagtaaaatggagttgcagaaagaagaatcacacacttttagaaatggcaaggtctatgctgagctattcaaccctgtctacgtccttctaggcatatgctattcaaatggccaatgacattctaaatgttgttccatctaaagca

SEQ ID NO: 152613 - DNA, 536 bp, Cannabis sativa
accaaaggattacaaatatgaacagctcgtatagattctactctctttattggaatccgatccaacaacaacaaccatgcaaatccaataccaagtaaaagaaggaataccttcgataaaaatattcaacgatccgagccttttttttacttgcaactgaagatcgaagaaaataatttcaccacatatccattaagtgtcaacacgcagaacaataacacaaaaatcgctgcaatacctatgatcacatcaaaaataacacaagaacaaggaaattttgaaatgcttcagaacaacgcaccaacaacagaatcaaacacattgcaacaaccattagagaagaaagaaggaactgaaacaaaagaagcagacaacaaccaataattttcttgctgatgttatgaactacttggtgggccaataattttcattattagaagtttatactttcaattaattatattttattatattctcgagaataattgaattgaaaacatgtagttcatattttgttgtaattattgtcttttaag

SEQ ID NO: 152614 - DNA, 793 bp, Cannabis sativa
gggtgtggaagtattgcaagggccgttatattcttataactcacgatagtggtcaagagttgatgatcgagatggttcaaattgggataggcattgaatgcttcagtttctacgtgtgtgtgtcaagagggaggcacatggagaccaaggggcagatgctgcaattgtcaaaggatgattgtacttagaggtgtttgaatgtaacttttatttgatccataggggaagcacatagatagttgagtgagatgtgcacttggtgctgcattgggtgcagttggcttgcgagcctcgtccaaaagggacgcatcaaattttatcatgtgataagagtgtcttgctcgattgccatcaggaggatggtgcgccatggagttggcgtgtgaagtttctagagggacttgtccagagggacttggctttagtggaagcgtgttatgtaggtgctattgggtacggttagtttgcgaacctcaccccaaggggtgcaccatacttagtccttgctaaaagaagtatgcattcgacaatcggcgagtgagctactattagaggatgtgttagctttagcatcagtgttgtaagggctacttggttaactggaggggcattgtattagactcagacaagttcatgttggaggaagtatttaagtgcagaggcactactccatgggtgattctaaatagcgaaagtggcataggttcattgatcaagtccaagagtggacaaggcagatcgtcaccaagtgggtggttctacatagatagaggtgttggattttatgccctaa

SEQ ID NO: 152615 - DNA, 510 bp, Cannabis sativa
gtaaagactgcttaactttaatttggaaattagcagataattaaggtttatttatggaactagaataataattatgaattgtcattttatggagattttgaattcagaatgaattttatatgccatgtatggaattttatatttttgcatgttttgtgcccagcaacatcggaacgcggcgtttggccattagaatcacattttagtatttttagtatagcggggcagtatagttagacattgggaatatcaagaatagtcaagattttagaattgaacaaattacccctaggtggttgagtgactttttggttaagtggagggcaaaatggtcttttgccctaattagagttttgtcctttagtgaattttataaacataataatctgattatttttcaattatttagaagctttatgaacatattccttttattctaagttagaaaaatcaaaagaaaataaaaacacacaatctctctctccaaattctctctctttctctctctct

SEQ ID NO: 152616 - DNA, 625 bp, Cannabis sativa
caattatgaagggctgataatgcacgtaagaaacgacacgtcgttttccccaagagaaaaaacgacacgtcgtttaacatcctgaagggctgcccacaacgacgaaaaacaatatgtcgttttccacatgagaaaaacgacacgtcgtttgggcaaacaacaacagccaaatttacttgaaaaacgacatgtcgttttccacattgggtcgtcttcctcagccaaactgggtcgttttgacccgtttttctgcaactcgggtccttcggacccgacccaaactcgatcttaaatttcttttccgatgaccaaaagaccccaaatcaattccaaatgaatctaaatgcaaaaattaaggcatccatatagatttcatgcatcgaaaacacgtaaaacaaagactttaaaaataccaaaaaattttgggtccgaacggtgtttttcagattttttttttttttgacatttctttattttccaaaataggttttcatgcttaccaatactatatgaatgcagtgatgcataggaattgaaataaataccgaaaacgaaaattaaaatcggaataaacacggactgaaaaaactaaaatttccacgtgtttatatatatacgtatataa

SEQ ID NO: 152617 - DNA, 581 bp, Cannabis sativa
tggaaatgggaagatattgctatggacttcgtggtaggtttgcctaaaaccacgggacagtttgactctgtgtaggtcatagtggacaggtttacaaggttagcgcacttctaacctgttcagacgaacttctccattgatcagtatgctgagttatatgtcagaaaaattgtccgtcttcatggtgtcccaaagtccattgtttcagttagagatctgaagtttacatcgagattctgcgagagtttacatcgagctatgggtactcagttaaagttcaacacatcatttcatcctcagacggatgggcaatccaagaggactatacaaattttagaagacatgctacgagcatgtgtgcttgactttgaaggatcatgggtaaagtaccttcccctgatcgagtcctcttataataacaactattagacaacaatcgggatggccccttacgagcttttatatggaaggaaatgcaaatcacctattcactgggatgaagtaggaaaaaaaaagttcttgggtcccgaggctatttagtgaacaagtgaggcagttgaaaagattagagcgcgaatgct

SEQ ID NO: 152618 - DNA, 824 bp, Cannabis sativa
tagattttgtggggatatgttgtttcctttttccatttaaggtaaccttgaccaatttttgaaaaatctttttggtttccttttttctctcaccacgttgtgtctaaggtaaggaagttactttcctttttttatttttctgatttttgggtaattaaatttgaaatgctatatatgttcaacttcccacttacccacgatcaccaccattcattcctctctcatttttctcaaaagtctaatctttttcaagtgtgagagtgtgtttgcttttctagggtttcaaagaaaaatggcaaaaacaaaaatgctcaaccgtccaagaggccctttcgtggctctgctgctgcatctgcttccacttctgctcctatagaaatggctgaattcaacttgcatttgggaagaatggagacaagtcaagctttgcttctcaggaaaatggacagcatcatgaaatacttccgatccaatgatgatgaataagtggtccaatctctttttctcttgtttttgctttatgtatgcttaaacttatgattttgttcatgtattttgttatctttggctccttgatagaaaaaaagggggagtagtattattttttttggattatgtgttacaagtttggacctttgttttagggagagttgtcttgtttgtggtttgttcacttttccgtttaagaagttgctttgttttcggtttgtaacctttttcgtccataaaaagttctatgttttatgtgttagagtgctttcatgcagggggagtattttctatactcttttatctttaaaaagctatttgctttggtttctaac

SEQ ID NO: 152619 - DNA, 1074 bp, Cannabis sativa
taaaaatgtaaaaaaaaatatttagaagtgtaaaaataaaaaatactttttttttttataatcgtatattgtaactatttaaaactacttgtaaattttttaaaaaatttgaataatttacaataccaaaaataaaatttaaaccattactaactatgcattttaaaaaaaccaatcagacttatttagaatttttttaaaatttataattcagtggtctcaaataataactaaataaaaaataaaaaattagactaattttttttcaagtatcagaaataaagaggttacttaaaggaataattacataaggcaccattttatgtaaaataattacatttttacgttcaaagaatatttttttacatctttacggtttttcaaaaataacacgaaaacaacataaaatcaataagaaaactacataaaattaacatcaaaataacaacaaaaaataacattcatataacaaaaaatcaacaacaaattaacaagattacaacataaaaagatcatattttctataaataaaattaaaaaaaatcgtaaaaatatttaaaattctgtgaaaccgtatataatgttttttttttttttgttgttggtatgtttttgtgaaataatctcttatttaaatgcttgaaaatatgggtccacaacaccacacgtcggaggccgttattggagtgtaattctcgcgccacaattccgagtgttgttaattctgttctctgccctttcagcttcagacttcgaaaatgatcgcaccacctccctttcccattgcttttgctgctacaaataaaaccccattcagaatctccgagtggagttgggcatggtggtgcggttctatcaccgaatcgattttaagggctcaaatctaatattctcaaaattttctttattcgattctgaattttccagctttcatctttgccacaaaacttttgttcctttatttatagtccaatttgagttaaagaagaattcacgctgatcgctacctttggtacgcttcttcttcttctgagttagggtttttttttttatttattttttttttttggtatt

SEQ ID NO: 152620 - DNA, 541 bp, Cannabis sativa
agaaccagctattgcaagagaatccgcaatggattgaactttttcgacgaagtcagagatcgacaagccgccttttcgaatggtggagaattgactcttcagctagagaagtcgtgccttagattggctggaaaacttgtgttcaagatctttccaaaccgtgacagaggtttggaagttagcaacagaggcaagaattccttcggtcaaggacgaacgaagcgatgagaggagtaattgatcttttcatttccattgagcaaagacaagatttggtgcacccgtaaccaaatttgcaggaggaggagtaccattgaagagaatatcatctagttcatgatcaattacagtaggaataacctacgatttccaagaaagaaaattagttcgatcaagtttaattgtcaaagtttattgcagagagtgagagaagggattccagttgagttcgtctggacgagaggatcattggttagagtatgaccagtagaagcttgagtagcaggatcagcagtagtggatgccattgaaggagaggatc

SEQ ID NO: 152621 - DNA, 591 bp, Cannabis sativa
aaatgatatttaagtttaaatgtaataaaaataatattttattttaattttggggtttgaaaattggaaaaatcgaattttggggaaaatcccacaaaattcagaaattgtgggttggctggcagcaaggctgctcgtgcagcctcagaggctgcaaattgcccaagaagcgcgcgggagagggagtgacgccgagaaatctcggcgcctgcagggtcatcctcggtggacagcagggtcctgggcgtgtctgaacgagggacgcgtgcgcctcagatagggaatttgtccctgtcacgcgcggggatgtcgtcttgtccgaagggtctggtgcgcgcagcacccaatctcgacatcccttcaacccgattttccaaaattcataacttttgtaatttttatcggaatcgagttccgtaaaaaccaaaattgcttaatttttcacaaagaatccaaataaaatattttcagaaatagaaaaaatattttcgtagaaatttttttgtacaacacatacattcatcaaataagcgcataaaccacatgaagccatccaaatcaacacacatcatcgttttaattcatatttca

SEQ ID NO: 152622 - DNA, 624 bp, Cannabis sativa
aatgaatgttatattgcttgtgaagttgatcacttttcttgtaatctcagtggcctagggatgtaagaatacatgattataatgatacatgattagagtgctttataaagcactgaaattgagtcgatatgctaaagtgtgaactggagtgctttatgaagcattgaaagtaagtgtttacaatactatatgattagggtgtcttatgaaacactgaagttgttgattaagtataactataaatactcttaattttgtaacaagtttgctcgtatagacgttgaattgtatatgtacgttgaaagagaatgatctcttggtatgtataatctgtggtattataatctgctatcatttttcaatgattttccttatctagtagcttttcttgctgagtaactgtgactcacgagtgcttcatggtgcaggtaagatgattagcagttctgttcggccatgggtcagaggtctcccaacagtgtacatatcaaccgtgttgtcttggctttcgtgaaataggatcaacccttgtatatgatcagatgtataatctattgttgtactaatggatttgtaattagtaataaaagaattttattggcaggagatccccatattacgaca

SEQ ID NO: 152623 - DNA, 511 bp, Cannabis sativa
gatgttgaggaggatttgcacatgtgtttttacattggtcgaaaggagctcagatttggagtggttgagtttccgctcattataggcctgaacttctcctcggggccaacagaagtgtagaaggctgcgcaggttgcccgctcgtggtcaaatcgattgatcaataaatatttcaactagtctaatagtgtgaagatagaagcactccaagataggttcacaaactgttagaactcgaaagacttgtacaagcttggcttgtgcttgtttgttgaggtagtgctactgggtcacgaggctaacgcgttgattacagttgacatacttagatatgttgaagatcttgagttcttctttcggattccttaggggaaacactcattcgccaaacttatgcactcactttaaaaggacatgtttaaatagaaggccaactacgagaagaagctgagtttggaagttcagcattagtgcaaatacataacttatggcttcgcacctgcagtacaat

SEQ ID NO: 152624 - DNA, 526 bp, Cannabis sativa
aaatatatgttacttgtcaattgtcatatttactattaaatactttattttattttgttaccaaaaacattattattttttgaactaggttagaattttaataatttgaattaaaaagaattttcttcgatctcacgcaatttccatggatttgacaataaatattttttagtttttagtacaattcataaatatatttttttttagtttttattttattattttttaatgtatatttaggcttaattgttatttttttttaaaaaaaaaagaaacaagtatttttttttagggttagaagaacaataaataatagtatgaagggacatgagaattttttaagtaaaattaataagtattttttaagtaaaattaataagtaaaaaaaaaaatctgaatcaaaagtgaaaatagttttttttttccttagtatttttttataaaaataaaggtgaaaaattacgcaaagtaatataatttttttttgttaaaaaataaaataaaaaaaatattattaaaaaattga

SEQ ID NO: 152625 - DNA, 527 bp, Cannabis sativa
gcctctccacttcagatctctactacccggcctctaacttatacttctcaaccttagctctaagttcctcctcttgggtcttcttctcttcttccaacctttggtatacagcccgaagaaccaacctctcctcttgaaggctggtcacttctttggacaaggaggcaatggcagtttcaagctaatcggaggtttgtagatctttggtcagttcggctaccttcttctcagtagcaagaagtttcttattaacctcccccagctctatccggacagccccaagctaaaccccggcgtccttggcgtcctccctgaccaagtccactttcgcccgaatagtgttggaaatggcgacattcttagaggcagctgatttagctcgagaataggcgtaagatatcttcagactagtctgtaccgagaaagaatgttaaaatttgaactaagtgaagaaggacaaaaggaaactgtcaggaaagacttacccttgcaaactccttcagagctcctcccatcaccaactccag

SEQ ID NO: 152626 - DNA, 720 bp, Cannabis sativa
cggcatcgacaaacccacagacttaataaggtagcacgtcctgccttagataacaattttgctttccatccctgcaatttggaggtgagattatccagaataaaattgaaatctgcatccttctgtctggatctgaataggggcagacccagatagtttatagccccttccggggattggatacccaacgcttccttaatccctcttctcataccttcaggggtgttattgctgaaaaagatcgaagttttgagtttatttactctctgaccagaccaagagcaaaactcctccaagcaactccagaccctattagcttctaagatattggccctacccactagaataaggtcgtctgcaaatagaaggtgggttaaggtcggcccacctctagaaagcttaattccatggataatgcctttacccagagcttcatccagcagtctcgagataacctcagcagcacaaataaacagatatggagagagagggtcaccttggcggaggccacacaaaggcgtaatcttccctacttgacccccattgagacaaatattgagagtagatgtggagagacattggaaaatccaagagcgcaccttcgaacggaaaccaaggcagtccagaacatggtcaataaacctccagctaagtttgtcataagctttcacaagatcaattttgattgcaaacaagccctccctacctttcttccgtttg

SEQ ID NO: 152627 - DNA, 662 bp, Cannabis sativa
ggtttggtcagagagaaagtgtgaggaaaagggttttgattttggaaccctattctctttttgactttattatttttttaaattgattttattgcctttttaataaatcagacttttaaaattttgaaatcaatccctgtaaaaaaataaaaaaaaaataaaaaagtaacgaattaataaaataatggagccaactatatttaaacaaaataaaaaataaaaataattaaatttatgatatagtgacgcgccatgcgagtagggacacgtttacccattcacgccaagagtgtcactaaaggtcagtgtttttttataaaaaataaaaataaaaattatggaaataactctttagtgacacttcatatttttagtgactctgattctaagacactaacactgcatttttagagtctttttgtgagtgtcactaaagctcttctctaattctttagtgtcccataaaaaaatgcgagtcactaaaatgtgtcactaaaaggtaagtttgtagtagtgacttagctacctataaatgatgttccagtgaacgtatataatcattgaaatgagtactcaactatttatctctattaagccaagctcgaagtaaatcattatttgacttctttatccggatagaaagctatagattctatatctat

SEQ ID NO: 152628 - DNA, 732 bp, Cannabis sativa
attagtgcaaaagtgggagttagttgtgtatattctcttttgcctctatcacttctaattgtcttgaagtaacgaccgctttgtttttcaacacgggttttaaattctttgaaaatattgaaaacgtgcaatttttgttcgaaaaaataagctcatgtcatcctagtaaactcatcaatgaagagaatgaagtacctattttgatcatttgatggagtgtgaatttccctgcaaacatttgtatgaaccaactccaacatccttttggctctccaagctttgcctgacaaaaaaggttgatgatgttattttctgagcatgcatcattcgtagattatgttgatatccttaagtgctggaaggtctcgcatcatattgttttgctttaggatccttagcccatggaagttaaagtgactgaaccttctatgccatagccacgactcatctgcttgtgcttacatcactacactacttgcatatttctattgtatagaaaatcatttgttttctctcatttttacctttgcaatttgaaagaatcttgctgcacaaatctccttcaatatgcaaaagagtatcctttttcaatcattttgcctacatgcactaagtattgggtaccaaaagtacatcattgatgtatctcttgccttttttagtgtcaatggcaatggtgcctttgccgactgcttccatgaagtcactattaccgattttgactttagtctt

SEQ ID NO: 152629 - DNA, 782 bp, Cannabis sativa
actctaacagaaatggctagagtaatgttgaatagcaagaagcttacaaggcgtctttggcccgagacaatcaacactgcttgctatacaatcaacagagtgttcttacgtctaggtactcacaaaacaccatatgaaatctagaaaggtgagaaaccaaatgtaagtcatttttatgtgtttggttgtgtttgttatattttaaaagattgtgattacactggaaaatttgatggaaaaagtgatgaaggtgtttccttaggatattccatcaatagtagggtacatcgtgtgtataacatgagaacccaaattgttatggaatcagctaatgttgttgttgattatctaaaagatttgtttgagttttcaacataagaacagaattaagatttacttgaaaagcctgctaccgtggaaaaggaatctgacggagctacagaagttgctgccgaggctacattgcaggactttgtcgctacagatacaatttttttgtcgctacagatacaattttttaagaaacttcaacaacaaaagattttgagcattcttcaaatataatcactaatccaattcagagggaaccatccaatatggttaaaatgaatcatccttcagatctcatccttggaaacttggatgagagtgtggttataagaagaaaatatgctaatataattagattcttatgttttgtttcttatttagaaccaaaatcagcgaaagaagccttgatggatgaagattggttcctagcaatgcaggatgagctacatcag

SEQ ID NO: 152630 - DNA, 502 bp, Cannabis sativa
  modified_base (453)..(466): a, c, t, g, unknown or other
ttgatttgggttcggggcgaggtttaggtccgtgtttcggtctcggttagggtttgaggttgggtccggttttgggtgccgatccgggtggaaggcccagtctctttctaagatcgtagtccagttctagttcaagtttcaattttggttcccgagtgtgggtttgggtttgggtatgtgtccaggtcttggtttgagttcgagtttgggttcaggttctggtctgattcacaaatccaaacactgattatgggtcaggtccaagcatcgagtcccggatcccatgtcccgaggtgggtcctaggtcatgatttgggtctcgctcgggtcccggatcctgatccaagtttcgaggcccaagtttttgtcccagtttggggtcccaattttggggtttgggtcccccatctatgtccatgtcctaggtgtcgatccgggtccaagtttgtgttnnnnnnnnnnnnnnggtcttgagtcctggtctgagtccaggtcttggttt

SEQ ID NO: 152631 - DNA, 647 bp, Cannabis sativa
  modified_base (46)..(50): a, c, t, g, unknown or other
ttgttttagagaattcatattaagatgttaaacaacatacatggtnnnnnatctagatcccggtaaaataattccaacatgcaagacaaaataaagtgttactattattaaaaatgcggatgaaaaaagaaagggggagtacaattttccacctaagggatttaccaaagccactagaaggcgagttatcactagaataggggtagaaggaccgtaatatccactaaaatcccttcagcttgtaatcttgaatatatcaaagggctcaattggttctaaatcccagctcgcatctatatgacttgccctatctatcatggtgccatattgctcagctataccataatatgactcgtgacaattaatatggacgtggaatctagggtaccagctgtcaaacctatgagcaactcggtctacgagaagggaattccaaatataaaaattaaggtgggtgtcttggaaggtgactaatgtgttatgttcagccctaagtactatgggagaccaaccacatttattacctcgggatgctccttcaccggcttcttgagggacaatgttttgaaggtgtaatacccgaaattaagaaaaaggattagcaaaaccctaattagataattatgagttaattgaggaattatatt

SEQ ID NO: 152632 - DNA, 639 bp, Cannabis sativa
ttttttttctttttttttcaaaataattctaagaaaaattggatagcacctccccttaaatttctacttcccaaaaattcaaaatcactctagaacagttcaaataataccactaacaactcaataccacaatataatttcaacaaacccaatatcaacaacaattttttttttcaaaacattcaatgttatcaccaaaataccctaaatatttaatcaacttctcaaatatgatagaaagttatacttacaaacccaaagaagctactactccacctccattattgaatgctcttgaaaacttgaggttgaagatgaagcacaatgttattttcagattttgggtaatattggtgatttttggggtgatttttgatggaaagtgaggattgatgagtgaaagtgggttttgggatggattgggattgagaaattgaagagaagatgagaaaattgaagaatggtgatgcaaaaggttggttttggctgagaaaaggtgagagtcggctgaggagggtttgaaaaaatttgaaattggtttagggttgaatggggggaaaattgggtttttatagaaattctgcgagctggtcgcgacgagcccatgggctggtcgcgactagcttgaattcaaaaaat

SEQ ID NO: 152633 - DNA, 661 bp, Cannabis sativa
tatatacaactgacatttgcaaaaacacggtttttcatcttcaattgttgattgtgggctgaccaagtggacagggtcaacacctactggggtctagttgacgaaataattgggcccaacaattgataactcagtgttaaataggatctttatttacccacattcaaattaagctcacaagatccaaaactaagtacaacccccaaattatttgtctgaaccaaaatagatgcatccaatgattgtatcataaacaacatttcaatcacatccactcactcattttttttttaaaaaaaaaatcccaattccttcgatcatcccagtaccaaaactccttttgctgccaaataacgttgctaagccattgctatagcaattgggtgtaacttttccaccccaaacttaatttctttgcccaattttaaatttttttcactttcacagccttcttcacttgatttcctggacaaagaaaggaaacaatttctcaatttcaccatgacatttatttaaactaattatataatatatatttttttcttgcttttctttcttagggtgcctttattgaattttttttccttcttttttttttctttcttttcattctttttttttttcttttggcatccccaaattacaaacatcaagcatcctt

SEQ ID NO: 152634 - DNA, 935 bp, Cannabis sativa
  modified_base (313)..(329): a, c, t, g, unknown or other
gtctaaggagagttccatacatttttggcattgtttcaacatttattaactactagtgttatttcttgattaacgcagaagtagttgccagaaagtaaagaatctggcatccctagaggagtagacatatagagaggaatttcacaatatcaaagattttgtgattaaggatatgtaatggtggaggaaaggttgtattgattacaacccgttagatcctattacagagagtatactacatactacacttgatctggatatcaaggtgttgagattaactgaaatgcatttttagttttatattagtgcaagnnnnnnnnnnnnnnnnnttgtgccctaaataaaatctattaaatataatcagatttactaattaataaagatcagaaattgcattttatgttgcatggttcacatgatttttttcataattatgtttaatgtataaattctattaagtctagagcatacataaatatgtatatatttattcatgattatagtgttgtcatcacagtggaatataatcatgattacatgttcaaaagtataattcccatgatttgtcagttcacaggatttagactgacattacaatcggcgataaggtatacttgccccttggataagtattatgtcctttctagggcattagcaaagtttaccagtatcagatgtatggagtatacattggaggggactgatattcatcttggataagatatcatatataaacttaccgttacatctttcaaagtcaatatcgaatggttgatcttaggtctatggatcttaatcatgatatggttaggttcaacatagttgtattatttatgttcttcaagttgttcgtggatgctagctaatggttttgatggatatttacatcttgggaacatggcagttcaattaagtgggagcgctaatcataaata

SEQ ID NO: 152635 - DNA, 704 bp, Cannabis sativa
caacccgtgaggctagatcgcaccacccaaaactcgacaccacccacggttaaccaccgcacccagccaccgcacccacccagaccgcccccaccccctctctgctcctatctctcaccgtgagcgtcaacccaccgaaaaccccatttttttcccacggtcacggcgcacggagttgaggccttcgacccacccaatcgacgacaagcccacggtgacggcgcacggactttacaccgaacaatgtctaaatcgaaggtatgttttgattattttattttttttttatgttttttttaagaaattggttaagattattgtttggaattgttttgattattgtgtttggaattgtttgtgtgattattgtttggaattgtttgtgtttggaattgagatttgggtgtttcggatctgtgaaaggagaagggattggggtcctcggttgtggggaagaagaatgtccgatggtcatttggttaagtccgatggtatgggtgtttgggtccgatggtatgggtgtggggaataggggggtcggactgtgtttgagtctgatggtccgatgttggtagtagggtcggactgctttgagtccgatggtccgattgtctggggatttcatggggtccgatggtccgattattggtgggtccgatggtccgattattggtgggtccgatggtgccacaaattggtggtgt

SEQ ID NO: 152636 - DNA, 1175 bp, Cannabis sativa
  modified_base (838)..(844): a, c, t, g, unknown or other
aaaccccaaatcctaaaccctaaaacaccgaacctccaaaccccaaacacaaaaaccccaaacccaaaatcccaaaccccaaatcccaaatcccaaatcctaaaccccaaactctaaaacccaaaaaccccaaacccaaaaacccaaacaccaaaccccaaacttaaaacctcaaaccctacacactaggtccaagatcctaaactctagaccctagtcacaaaacccaaaaccctaaacctacaacccaaaaccccaaaagcaaaagaccctaaacacaaaaccctaaaaccctatttgcaaaccccaaacctcaaaccctaaaaccctaaatcccaaaccccaaaccctaaaacccaaaacccaaactcaaaacccaaaacacaaaccccaaacacctaatgaaaaaccactaaaccctaaaccccaaaaccccaaaaccccaaaccctaaaccccaaatcccaaaccccaaatcctaaacccaaaatctgcaaacctcaaaccccaaacaccaaaccccaaacccaaaaccccaaacagtagatcccaatagaaaagtgatagccaacggtcttggcttcgtccctatgaaatttcacaatttttcgagatgcgtagggtgagattttcaaagaacactaacaagtgtaagagtaagaaaaaaacttgttaaaatttatcataaatagaagaacatttcaatttttgaaataggagtcattttaaccaaatttaatttgaaaccaatcttcatattcacatgttagtagtacgaattcattgtgactagttgggaaaatattttgatatgtgtctgggccacatttcacaaaggnnnnnnnctatcagaaatgtgagatttttcttatttaaattaaaataattattactgcttaaagagtgctttttctctcaatgtgtctaatagaaaagtgatgcacaatggtcttggattcgtccctgtaaaatttcatgattttttgagatgtttagggtgagattttaagagaaaactaacgagtgtaagagttaggaaaaactttaaaaagaaagatattttcaagttttgaataagggggtgtaatatccagattaaaatagtatttaatttttttctctccttgggatattaattgtgtgaggataattatcttatatatttgtgttgttagt

SEQ ID NO: 152637 - DNA, 514 bp, Cannabis sativa
atatatatttggacataatatataaaatgtattttgaaagtgattaattctctaatcaaacttaaattttgttaaatattttctaatataatccttttatatagagagattaatataaaatacataattattcattctttttatatatatataatcatatttaaagagcacactaatttagccgtaatagttaaaaaaaagtttatcaaagatcaaaatctcaaaccttattttaaaattaaaaaaaaataaaaatacattactaaattaaaaaaaattaaatatatatgtattacatttaatatcacttagttaaacttaattatacgtaacatcaatctagtatatatatattaatgtgtgatttatatgagaaagtttgtaattagaatgtgtaatgatttaaaataaattattaattaatcttaaaaatgtattatatcaaaggattattaatcaaggagatgtagaagccaatttttgaaaagccaaaaatttggtttttttttttttt

SEQ ID NO: 152638 - DNA, 922 bp, Cannabis sativa
  modified_base (768)..(771): a, c, t, g, unknown or other
atgggaatgtgaagggaatgggaacgggaatggggatgggaatgggaatgggaatgggaatatgaatgggaatgggaatttgaatgggaaaggaaatgggaatgtgaataggaatgacaatgggaatgggaatgggtatagaaatgggaatgggctaggtaatgggaatgggaataggaatgcgaatgcaaatgggaatgggaataggaatgggaatgggccagggaataggaatggaaataggagtgggccggggaatgggaatgggaatgcgaagggaatgggaatgggaatgaggatgggaatgggaatgggaatggcaaagggaatgggaatgggaataagaattggaatttgaatgggaatgggaatgggaatgggaattggggtttagggtttaggtttagggtttacggtttacggttgctgttgggtttgaggtttaggggttagaggttagcgtttggggtagcgttggggttagcggtaggggtaagggttttggatcaggggttcaggggtcagggttcaaagttcatggttcagggtttagggtttaggggaatgggaatgagaattgaataaaataaaattaaaatgcataaaaaatttgataaaaatcattaaatttttcctctagttacatgataattgtcgttccttcaatttggaaatagaatattcattccaccaaaatggttgaaagggcattctattaaaatgacattttaataccttaaaaagaaactaaacaaaagaatggaatgnnnnttatttcttttccattccatttcattacctctaaccaaatgccacctaggggtccgtgttcaggggttagggttcagggtgttgggtgttcgggtttgggttctagcgtttaggatttagggtttagtgttttacggtttaagggtttgag

SEQ ID NO: 152639 - DNA, 519 bp, Cannabis sativa
  modified_base (365)..(373): a, c, t, g, unknown or other
aatttcaaaatagtagagagaaaagaagaagaagaaatctcaaaacactagttgtctggcagaatagaaactaggtatagaagcatattagttggataataaggccagtcttttctttttatactaattcacttagggttatgattgatttatttagaataaaaaatgataaaataatagcatagtggcttgccacatattgggcccaacactagttacatttttgccatttttcttaaccatttatttattattttacaaatgccatattttacaattctaatcctataaatactaaaactatttatttagtaattaaaataaattatcaaataaaatcgtcatttatattatttattaattannnnnnnnnaagtctcttaattaacaaatacaccctaaaatcctatttcttcacaatcaagtcatgtcttagtgaaaattcagaaacaggatatagtctaattttataattataattgattaattaaaatcaattaatcgagtcttacaagcagt

SEQ ID NO: 152640 - DNA, 646 bp, Cannabis sativa
tgggcctcctcattgacaaaccgggttctatcgaaacccgtagttggtgggtttgatgacgaaccttcctcaacatgcctagttctcttaggtaccattttttttctttcttcttagaaataataaaatatttttttcttttctatttttttcctcttttttttcttcttttttttttttttttttggatttttcttttttttctgatttttttgtttgtttttttttttctttttttttttctttttcttttcaaaatacttcgaagaaaaatcgggtagcacctccccttaattttctatatcccaaaaattcaaaagtaaccaaaataatccagacaaatacattcatagtccaaaatcacactataaacctaataattcctataccaaccaatgattccaagacaaccaatgattccaagaataatcactattttcacaaaaatactcaaaatcctcatgcaattttcttaaatgtaataaataataatacttacaaacccgaagacgccactactcaacctccattgttgaatatctttgaatgtttgaggttgaagatgaagaactattgtatttttcagatttggggtgaaattgatgagtatttgggtggtttttttatggaaagtgtagattgatga

SEQ ID NO: 152641 - DNA, 520 bp, Cannabis sativa
  modified_base (78)..(90): a, c, t, g, unknown or other
  modified_base (333)..(334): a, c, t, g, unknown or other
acatgaaataaaacaaattgcagacataagaatctgtactttaaagtggtttggccgacctgagtactttgtttctgnnnnnnnnnnnnntagtccgcccagaaggccattcacttagaagtgaatgttcatttagtactttaaaatggtcaagccgacctgagtactttggagtggtcaagcggacctgagtactttgaagtggtcatgtggacctgagtactttgaagtggtcatgcggacctgagtactttgaagtggtcatgcggacctgatactttattggtagtatttctttaaattttctccattctagtaccgtggtactagaannagttgcatttttttgtcatacttacctaatttgtatgctccggagtcgagaacttcgaccacttggtatgatccttcccagttcggtcctagtacacgcgacatgctgtctttggtgtttaggaataccctttttaggaccatatctcccacgaagaagttctgagctttcacttgtttgttgaaa

SEQ ID NO: 152642 - DNA, 935 bp, Cannabis sativa
aaatatacaaaataataataataataataaattaacattaaaaatttaaacagaataaaaaaaaaaatcaaaacaaacctaaaactgaaaatcgttctcctctctctcttctcacaaacctctccgtgagacaacaacccactcaaccaacccaggtttcttctccgcgcacctccgcccgacctccgtgagccattccaccacagccgatggacgagattccgaccacccccaggatcgcaagcgtcagaccacaccgatcgaagcttgttctccctctcgatctcgcttgagttctctccactctctcagtccctctctttctcgatccaatctctcattccctctccttctcgatttctctctgctcaaagtcggacggagacaagggtgagatatggacgattttttttacctttttatttttttttttcaagatattatagatgaggatttttgtgggttaaatttactgggttttttttttcagttttgggagaagacgatttgaggttatgggttttgttcttttctgtaattatagcttgatttatacatgatagtaagatatggtatgtgaaatagggttgttgttggtgaggaggaagaagatgatgacgattggggggtgttctctggtttgcacttctggttctcagaagaaggtgagggagaagaagttgaccccctaaatcgcagaagagaagggggagaagaacaggattttagtgttatcagattttctaggtttggaatttaattttgtatttgatttaatttaagtgtttatgtttagttattttgtaagaattagattgttatatgatttttattattaatcggttttgtaggaattagattttaagttttatgtgtttgttaattttgtaatttttttaatttaaaaaaataagttttatttaatttttaaatat

SEQ ID NO: 152643 - DNA, 871 bp, Cannabis sativa
  modified_base (238)..(242): a, c, t, g, unknown or other
ttaatattttaatgttggctaagtgaaagtggtgggctttagtttggctggcaaggaaaacccaatgaaaatgtggttttcactttccaatgctattggtaaacagaaacttttgcattttaaaattgttttttttaatatatgaatagtaatatatataaaaatatttaaaatatgaagtattttccttattttttttattaattttatttcataaaatatattattaatttgtatnnnnntttgctctttataattatttattattgttaatttttttttataaaattatatgaaaaataataaataaaaattattttgaacacttaaaaagaaaaaaaaaatattgaattaatagtattttataaaaaaaaaaattattgtaaaaacaattgtcacattccattctaatgtcaaccaagcaatgttaaatttactcccatgaaatgaaacctgcataccaaacagcccgtaaggtttctgtattctctccttcctcatcatagaaaatattttcaaaagatagtgtattcttggaagatcataactttttgtgcaatctccaataatggcttcaggtttctataatatagtacttttaggaatatatttaaatttgtggtatatatatttattgagtgttttataaatcttaacacatataccacatttaagcatataatatcaaatttttatcctaataaccttatgtgtcatcaattcttctaaaaaataaaataaaaatattttattttcttctttgagttttttacatttattgttaaagtatattatagttttgaaagggaaatttgaatttccatacttaaaataccctataatttttgccctaaatgcatagttattaaaa

SEQ ID NO: 152644 - DNA, 598 bp, Cannabis sativa
aaaattctaactcatttggctgttgaacctccctcaacagcaaaccatgaatgagttggaaatggatactatagtctaggatacgtaaaaaatgaccaaacacagtttttgaaaacatatttaattgggtttcggtaaatttttttaatatcttcaataacagagtaataactagaggttataactctggaatggtaatattccgatcaggtgtacttggattcccaatcctataaaaaaaacaaaagaaaacattactaaaacaacacaaaaaataacaaaataacaaaatcaagcgtaaaaaaacattagaagtaatgaaatcacacacctcaacaaccctttttccaatcatctcctcaaacagatcagttgattgaacattcttcagtaaggatttatctttcccctaagagttaacaaaacaaaaccaaaacaacaacaagacacacagtcaaacaaacagaaagctacaaaataggaggactaacaaacagaattttgcaaaacaaaaaaacaaaataaataaataacatacagagaaatgtgtaatataatcaacctgtaaaaaaacccctaaaacaatacgaaatcaata

SEQ ID NO: 152645 - DNA, 706 bp, Cannabis sativa
ttaatagcttctgcccataatcgctttgtcaacttcttgttatttaacatcactcttgccatctcctgtaaggttcaattcttcctttcaacaactctattttttttttgaggaatttcgggagcagagaattcatgagttttagatgtagacttacaaaagtcatcataaactgagttctcaaactccttaccatgatcactccgaattcgaataattttcccaatattacatcctttttcaactcttaatcccaaataaagagttttaaaggcatcaaaagtgtcagactcttctcttaaaaaatctacccaagtgaaacgagagaaatcatcaacacacacaaaaatatattgcttaccatttagactttcaactttaattggacccataagatccatgtgaagcaactccaatacatttgaggtattgatatcagacacacgattgtgagtgatttttaattgtttaccaagttgacagatttcacacttaccaacactttctttaccaaacttgggtagaccttgaacaatacatgcatttgacaattttttcagatttttataattaatatgtccaagtttagcatgccaaaaatccgtagtgttgtttatggctgaatgataagtgaacacaagggttagggtataacaattatcagtggatcgaaatccttgcaaaatacattgattatcatcattaa

SEQ ID NO: 152646 - DNA, 593 bp, Cannabis sativa
acaacttagtcaacagaattttaatagtcaacagaattttaaaacaatcaacagaattttaaaacaagagcaacagaattttaaaacaagaggagaccgcagtcaacactgaaggagagcaaaaatttgtatttctcatcaaagtggctcaatttagaccaaagtttagtttatcacgttttctaaggcaattggcagccttccttttttaatttgtttcctttattttgtctttgttttatttggaaagttgtctttcttttagtttccttttttcttggttgtaagttggctatataaagccttgtaaggactttgaaaaatcagaatattttggaataaaattttgagaggttttcttcttgagttcttgagagaattattcgaacttatcaaggagtattccttgtggcgttcaacctgacttatcaaacggattttcaccaccgtttgtggtgtcttccttcatgattaactaagcattgggtcgccgttccacatccaaattttgagaattcttagagtcttccatatttggtgtcagttttcatcacaactgttggtgtggtttgtatcatttggtatcagagctt

SEQ ID NO: 152647 - DNA, 523 bp, Cannabis sativa
catatcatatataaaaaaaaacaataaaaatacattacatattaatatgtgagtatatatgtgagaacaaaggactttttagtaatttacttagttaaagctcaaagtattgtcacttttattatagtaatagattatatacgcgggtatgtatgtacgtcgttggtgcatgccaagttctctcattctacaaaattttataacataatgtatatatatacatacataataaataaataaatatatatatgtatggagaatgtaccaattaacaaggatgcttattgtatgcatcaatcctcggagtaggggtgagcagaaaatccaagaaaccgactaaaccgagtaaaccgaccgtccgaacactgaaaaaatcgacattgaaaaaattgaaaaattgaaaaaaccgtcttcgattaaaaccgccttaacatggtcggttttagtgtcaatcgcaaatcgaccgattaaatcgagaaccgaccaaacatatatattgtgtaatatatattatttttgtaca

SEQ ID NO: 152648 - DNA, 917 bp, Cannabis sativa
  modified_base (31)..(31): a, c, t, g, unknown or other
agcttcgtattctccggatacatgatttacnaccagctgtgaatcactgcagatctcaatgtgttcggctttcattttctgggctagctttagcccggaaattagagcttcgtactcagcttcgttgttagatgctttgaatccgaacttgactgcagtgtgcaagtgttgccccctaggcgtgacaagggcaacacctgcgccagatagttgatctgtagctgacccatctacatgtagtttctaggtcgacttatcctcattgttacttggctgaggtgtttgtaccagctcgggattgctttgtggtatgctttctttcttgcctgtgcattctaccatgaagtttactaaggcttggcttttaattgttgttcagggttggaaagtgatttcatactgacccaactttactgcccacttgagcagtcgtccagaagcatctggcttttgcagtatttggcgtagtggttggtcggtgtatacccgaacaagataagcttggaaatagtgcctcaacttccttgttgctagaataaggcagtaggggagtttctctattaatgggtatcaaccctcggcctcaatgagtattttactgatgtaatagactaggtgttgtacgcttttctcttctctgattagtacggcacttaaggcatgttccgtgagagctgactatattcccagttcttctctgtccagaggttttgagagtacgggaggttttgaaagttgtgcttttagctcttggaaagctttttcacactcctccatccactcgaactgcttgtttcctctcaggatgttgaagaatgggacactctgatctgttgattttgaaacaaatatgttgagtgtagcgattcgaccagttaggctttgcacttctttggtttttgttggcgagttcatat

SEQ ID NO: 152649 - DNA, 540 bp, Cannabis sativa
aaaaaaaaaacaattaaaaataatacaaaatttggtaataaaaatagaagaaaaaaaaaacatttaagaaattaattaatattaataaataataaagatgatgtgactggatatagttttcatcatgataatgctaatattagaagatttgaatagagatattaatctttttctctcacccaattttggcacagtgtaaatattatttcaaaaatgaaccaataataaataaatgaagccaagtttatatatgcaaagatgggaaaggtcatacgatctaattttaagctttgtagaagcactttaatggaaagtacatttatataataggtatatccagtctatatatatagatatatgtatcatatagctctctaggtctttataaaaaaattattgtttaaccagatctcctcttatgcttctatacatctaatttaaacaaaagaagaaaaaccccaaaaacaaaaatatgattaaagaaagccaacaaagacaaaaagagtaaaatatgccaaaaagaaaaataaattataataa

SEQ ID NO: 152650 - DNA, 594 bp, Cannabis sativa
tgagccactggatgcagttggtgccgttctttcctaattagttgttgagccactacaacccctactataaccaatggtaggaggagtaggagccccaacaacgacctgagtccctcgagactcctgagtgcactccactacaccctcagctcgtagtgcctttcctaccatatcagcataggtggtgttatcattagtggtaatcataagatcatgtcttatctttgaatttaatccatctaggtatttctctttcttacaaaaattagttggcactattctcgaggccaatcttgccaatcgatcaaactgagttgtgtattcagtaccactcctattttctttctgagtcagctgagtaaattcctttctttttacacttctgactgattcattatagtacttcacattaaacagctcctggaacttttctcaggtcataatggtaacatcacaagttagagacaccatgtcccactaaaaaaatcttcttgaaacaggaatgtggcataggccactctatcattgtcactgacgcgcatgaattcaaaattcttgtaataacagttgtaacatccccgcttcaagcctcca

SEQ ID NO: 152651 - DNA, 606 bp, Cannabis sativa
  modified_base (410)..(413): a, c, t, g, unknown or other
tatgagagcaatattaatgttcgctttccatttgacaaagttagctccagagagcttgttgtcagtcaacagtgacaccatggggttgttcatagtcatattgggtactacaatatcaataatagaaatcaaataaggttcaatacaaaatcatacacattcagaaattattaactacttagcaagtaggaatgacaagttaaaataccaaaacaaataatcttaaataatttccaaggtttccaacaatctgatacagtgcttcgtattgtgcgagagtcaaagatatcattcattgaatagaggagtcagctcaacaaaaatggacacaattctagtaaccttttactcgatcaaaaagagaattcaacgttgcttcgttttagtcgagagtcaaggtcattcttatnnnntgagcttctaccattgtttcataccttgtaagtcctactcttagtagccactattcggatggacgttactaagaacgaaacacttacaataatacttatctttcgagattctacaacgttaaattgctaatgaacgtccatctattggggatgaatctcactaaaataagaactatgtagcaccaacaatgga

SEQ ID NO: 152652 - DNA, 514 bp, Cannabis sativa
aaaagcttaaaaaaaaaaaaaaaacttgcctataatgtcaatgtatgttcttccatttgtgtatctaccacttggtgaaccgaaatcaattccattcggaacataattagcctttgataaggaaataatatagttgttgtttccaacatcaactagagaatcaccaaaaataaaattagcaggaaaattttttcccaagcagattccaaataatgctaaacttatatatgtgtggagtgtcaaggttacaaagtttactctttttgagtaaatatccattaagacaatcaagatttaaaagatagaccttagaattttgtagtaattttaaagctgtatagaatttggaggtttttaatgaccaaacatactacaaaatagagtacaactattttttttagttatttattactattatttgaaagcaaagaaagtacaacttaagaaaacacaagaaaaacgagaaaataagaatatgaaactttttgcatatgaaaacccttcaaaaactttc

SEQ ID NO: 152653 - DNA, 803 bp, Cannabis sativa
cgagccactacctcccctaataaagcctgatgtaggaggagtaagagccccaccaacaacatgagtccctcgagactctaaggtgccctccactgcgccctctgctcgcaatggcttacccactatatcagcataggtggtgttgtcattagtagtgatcattaagtcgtatctgatcttcgcattcaacccatccaggtatttctctttcttgctaaaatcggttggcacgattcctgtagccaatcttgccaagcgatcaaactaagtcgtgtatttagtaaccctcatgttttctttctgagtcagctgagtgaattcttttcttttagcacttctgactgcctcgttataatacttggcattgaatagttcctgcaacttttcctaggtcattgtagttacatcttgagtcaaggacaccatgtgccaccaaactagagtgtcttcttgaaattggaaagtggcacaggccaccctatcattgccggtgacgcccataaagttcaagattctggtgatcactgttagccattgctcggctttcatgacatcgggacctcccagaaaaactggaggtgcctgctttcagaacctttcatacaaggattccatctagttcactgcaagtacaggttcggtctgcacagcaggggcatgagctactggtatttctggagcagggatttcagaagcaccatgctgtctcaactaccgaatctcttcatcttgttcgttaattctggcttgcatttctgcaaacctgttttcccaatcttgggcagcttgggcagcctgtggcg

SEQ ID NO: 152654 - DNA, 1096 bp, Cannabis sativa
atgctatgtcaatgatctcactcccacacattctctacttgcttcataaaatgcaagtattcattgtgttcatcatctttggggatttcttggtgcaacaaagcttctcttttacaagtaagtgttttctcttcactaaagtatggtgatttaagagtaattcattatggattgtgtgatattggaaaattattgtttgtggagaatggatattggttatttctattggtagaaattattgggagtgagtttttacttcaaaacttagtttggggaaagaggaaaatataggggaggtgctgcccaatttctttacacaaaaaaaaaggtataagaattctgactagttgattggtatggcaactaaaagaaccaaaacccaagccaaccgcaacatgcaagattcatcatcacatactcctaatccccaataagatcaatctcaacagctcactaggtttgtgaatcacctagctgcgaaacgatacgagaaattaataaagaggagtgtaattcgaaagaggagttttgaatttcaagatgcaccttttgagcgggaccaggggtatgaactcatcaattgtccgaaggaaatggcagagattatgtgttgcagagctagtgggagatgccaatcagaatatagtgtgtgaattatttgcaaattacccatacagaggggacaacaacacagtctatgttcggggagtgaatgtgtcagtcactgtgaaagctataaataactcctttagccttcctacactgagagaggatcaagatgaaagaaagatagcactaaatagggagatcctcactgatgacgccattgcacaagagttggggcaagagggaactcgattccaggttgaaggaaaccaaaaccaaaagtttctctactggtggcagcttaacccggaaaccagagcctggacatattttgtcaacgccagaataatgctgacgtcacacacttcatccttagactatgagcactgcgtcatagtttatgctatcatggccagaatgacattcgacattggctgggtcatcttgcgaaacatcaaccatttctctgagatgaagacaacagcgggtc

SEQ ID NO: 152655 - DNA, 504 bp, Cannabis sativa
ttaggaaaaagtacaaaaaatatataaaactaaaaatagcaaaaatctaacataatcgacaacctatcgacatcccatcgataagaagtgtcatgatttcaaatagtgggataaatcgacaaagtgttgaaattctatcgatataatgtcttgatattgaggcagtagagacattcgacaaaactgtcaacatatcatcgatatcataccgataaagagtgacctcaatttaagtctatttcatttttggtgcctatcgataaattatcgatgacgtattgacatattatcgataaatgcatattgcatgacatacacgtgtacaactagacatttaatgctaattaatttttctcacctttccaacaactattctactcagtgaaagaaaatttctacttcataagttacatatctttctcattctttaactctagagtgttcttctcttttaagttgtaaatgtctagtaaagagagcaaacgagaacgtagtgaagaatat

SEQ ID NO: 152656 - DNA, 858 bp, Cannabis sativa
  modified_base (154)..(157): a, c, t, g, unknown or other
taaatccagtgtactgaaaaatcacgggacttaaatttttgagcatataatcataattatattctactatgctgacaacactataatcatgaataaatatataatatggacttaataaaatttttacattaaacatatataatcatgaaataannnntgtgaaccatgcaacaaaaaatgatttctgatcttttattaaatagtaaatctaattatattgaaatgattattatttagggtacaaaacccaacaataaccgcatcacctaatcaggtgagcccgtgccaaaactttgcaccaacatatcgcatcgcctaattagacgaacctgtgccatagcctggcactcaaatgtcaccgccacccgtgcctaatcaggcatcgccaacaggaagaaacctaacaacaatttcaatatatgccatagcctggcactcacatatcactgtcaccgtgcctaattaggcgtcgttgataggaagaaacctaacaacagttttagtctatagccatgactttataacagttgcctcacaggcacaacttgaatacctctctcggtatccatatatcacatcacctaattaggaaaatttttcattatataacaagaataactgtatcttaatctaaataccaatcaattctaaacaatattaattacattgcaacataacatgctatgcagtataatatacttgtcttacttttaatccagattcatgcacgtcagccatccaaatggagaaacctccccgatgaactcgactttatgtcacaacaacgataaaccaaaagtgtttatcctaaaacactgcttaatatttgcaaaggataacctaagggttcctactcaa

SEQ ID NO: 152657 - DNA, 613 bp, Cannabis sativa
tctctctctctctctctccatgggaaggagaaagaaggaacatctgaagcttgagattaggactattagtttcgtggagctagagcataagtcaccatagtaggagcccccttcgatccaaccaactgtggatgtgtcgagcttctcaaaggattttcctgatacacatttagaattaggcatcaatttgggatcgtagattgatacggaaatgattaactatgaattgaatcttgggttgaggaggcatgttgaatttcaagctactgctaaggaaacattgagtaaattcaaggtaaatcaggttaggaccccctcaaccaaatttgaattcactaaaccattgaaacaaggtgatcaattaattgctagaattgatatgaaagaggttgaatatgaagcttctttctggaaaagttcaaagttcagttgtgtgtctagttctcaaggctaatcctccatttcttctttttaaaggttttattaagggtaaatggcggcaaaattccgtaaactttcatttttgtttcacttaaaccccaaaactcaaatttgggcagtaaaaccctcaatactcctattctgttagcaatttaatatttctgtctatttt

SEQ ID NO: 152658 - DNA, 664 bp, Cannabis sativa
  modified_base (26)..(31): a, c, t, g, unknown or other
tcttaagtcaatacaaataacgaggnnnnnnctattaccgaactgctcggggctgcacccctataatgttcttgtgtcttattatcgcttttatcatatattcattacgacatatcatttatcgcttgtaaaaagactcattgtcgttggctgaaagcaaagttagcagtagtgatgttcttttgttagtttgagtgtgatttcttgatatgattgtggattatatggttgtgttcttggctgagttttcagggaattttctaagttgaaagtacatgtttattgttgtttttgttgttggaaaatatggggaatgttgagttgaagctacagttcttgagcttgagttttcttggtttaatgcatgatttagaattgattgtgtaatctgaattttgagagttgttgttgatgttgtttgctctctgttgtgatgatttttatctataagaagctaattttgggtatggtttgattaaggttcgaatatatggaaaagtgagcatttttagaccttaaattcttgttttctgggtttttcgaaaccagtggccgcggtcagatttattgtcgccgcggccaaaaacccagcagagagccatcccttttcttgattttattttggccataacttttgactcgagactccgttttggacgttctt

SEQ ID NO: 152659 - DNA, 743 bp, Cannabis sativa
agggcacaaaacccaacagtcaagattgaaacaaacctaacggagatcttgagtgagataaaaattatatacatccaaaataatatgattagaattatcattattattattgttatttatattttaaaatttaaattcaaatataataaaattaaagatttgattagatatttaatttattattttttttttgtttaatctaatttatgattaataaatatatataatttaaatttgagttcaaatatttttatttataatttttaacagtaaatcaaatttaattatgtattgattaaatttatctaatttaataatttattttttcaattcaaattcaattttagttcaatgatacttgcaatataattttttattaatttttttttacgaatttgtcatttgtatatgaaagtgagatgtatatatatacaagtacaaaatggaatcgagttaatttctcaatcaatatttataatcaatcaaatattttattgttggaaaattgttgtgctccaatagaaatattaaaccaacaagattacaactcaatgacaaataatacaaaggacaaaatcacggattaaataatgttacaacactaaacaaaatatacacataaaaatagagaatagagatgaagatagagattacaactcaaagcaataagctacacatgaacacacaatatataaatagcatatatataaaagagataggatcatgtgagagcaatctcaaca

SEQ ID NO: 152660 - DNA, 759 bp, Cannabis sativa
aatggaaataagaagacattgccatggactttgtgtttggattgcctaagactacgggacagtacaactttgtgtgggtcattattgacagatttacgaagtcagcgcactttttacctgttcaaacgaatttctccattgatcagtatgcagaactgtatgctagagaaatagttcatgtccacggtgtcccaaagtccattatttctgatatggattcgaagttcacatcaagattctggaagagcctacatcgagccatgggtactcaattgaaattcagcacagcatgtcatcctcagatggatggatagtccaagaggaccattcagattttagaagacatgcttcaggcatgtgtcttaaactttgaaggatcatgggtagagtaccttcccctgatcgagttctcgcacaataacagctatcaggcaacaatcgggatggctccttatgaactgttatatggaagaaaatttagatcacctattcactgggatgaagtaggttaaaggaagttcttaggtcccgaagctgttcagagaacaagtgaggtagttgaaaaaatcagagcacgaatgctcgcggctcagagcagacagaagagctatgcagattcaaagcatttggatattgatgttcagattggagatatggtatttctccaagtatcgcctatgaaaggcattaaacattttggtaagaaaggaaaacctagcccgaggttcattggaccttttgaaatccttgagaggatag

SEQ ID NO: 152661 - DNA, 1175 bp, Cannabis sativa
  modified_base (28)..(35): a, c, t, g, unknown or other
aaaccaactttccataagagaattgctnnnnnnnnaagaagtttccatacaagaaaagttcagctgtaaaaatgcatctttcctaacatagaaaagagcaattgaaaccatataaacaaggtaagaaaattgggtatgaatgcaaatcgatcttaccataaaagaaaaatattttgtcatctaacttgccaaaaaagaaaaaactttacaatctccccctttggcacttcagatgaacaaaatattttttaacacataagtacctgcaaattaaagttagcaagaacaaataacaactccccctgagtaacacaatcaaaaatcaaaaacaacaaaataacatgctaacttttaatccaaaaagttcacaagtaccaacacaactctccatggaaaaaaaagggtccaaagttgagacaacaaacagtttaaaacaaaatattactccccttttttgtttatctaagggctaaagataaaaaacatgaaaatatagaaatatagaaatatgtccaacaaaatcataaaaagaaagaaaactaaaaccccataaagcttgatgaatgaggacagctgcttgaacatctcttgctagacctcctccatggcagcaagtcgattgttcaccagttgaacctcattcttgacctcctggacgtctgcagaagcagaactcgagcttgcactaacagcaccagctttaggacgctttggaaaagctccatcaaaatactccgagggttggaaaatggttccagtcagggaggctcaagtgtttcatgagattgagccacatttttctgagcagacaaaattttatagattaaattaggaaacacaagcttaaaagtttgcttttttacctctctgaaatgaaacaatctggtctaagattgaagaaaccagatcaatagatgcccccgaggtgattcgaaaaagaaaggatgccaaatcttgagacatcacggttgccaattgctaagagaaaatctcatgagtgatgcatgagcatatgtgagatttggaattcgaagactctccccagatttccattcaacctgtgcacccataagttcagtgagcatcaaatggcaatccatagtcatgatagcattaggcacaccttcgggtaattgcaaagccatgcaatatccttgacagtaaaagaaaaccaa

SEQ ID NO: 152662 - DNA, 643 bp, Cannabis sativa
attagaccggaagcgaaaaggaaagatggtggaggctgaggttgctaagaagcccaagagggtagacactccaacacctagttctaattcagggatcctgtccgaggtggacgagtatacagtccctccgggcatcgtcttgacccctattcctgctgacgaggagagaacccaactccagatcaccaagcataactataccacaacagagtacataaaggggaacatcgaggtgtaggccttgaaaaagaatctaagggatgcccaggacagttttactcgaagtgagtacgccgggaacatttgggatttaaatctggatcctttgaccgactggttcaaccgcttcattggacctaatctggctccttttgcctcagaactaatgagccattttgctgtcgacctagttcaacttcccatgaagagatacgcagcttgtgcttccaccaacccaatctaccagatccaggatgtgagcgcggccatgaccgcggtaagttcctatctgttagaggtattttcaggcttcttgtctttttggtgcctgacatcatgtattccttacacatacattttttttgtttgtcagattgatgcgaagactggtcgtctttcaaagactcttatcgaccatgggtac

SEQ ID NO: 152663 - DNA, 1226 bp, Cannabis sativa
aacaacaactcactttttctgctgagatggaagaccagcaatctccacaactcttagaggagctttagggtcagaacttaaatcaggaacataggacctattcttccaaagtccaagcagatcaaaaaacaaagggagtaaaacagaataagccttcattgcattcctagtagcagaattcatgttggcagtcctcaaggaattataaagaaataaaatcccctcattcaaatcaagacaaccaaaaacccaatgactttccttcctaagatttatgatgaataggacatgatcggcttcatacaaaggcttagaacacgaaatttgcaaacctcgtatataatgcgatattgggtgagtagcatgtatgtgcagcatctttgttttcattgccttggctttgttgaacttgtggtataacgcttgaatggaatcatcgaaaaggcaatcagttgttgcgaaattcagtgtaacagtagaagaatatttaccttttttcctaaggtaatagaaagaatatagtgttcatatgctgaaacaagacaacaaagaaacacaaaaaagaaagttaaaaaatatttaaaaaaaacttaattacagtaactaaactaaaaaacaataataaaacaactgtaaaacaactattaaattttttaaaagaaaacagaaactttactgagtcattgataaacatgtcataggtagccaaatgataaaaccaggttttattttcaacataatcaacacctaatctaaacccaggggaaaatttcttcacaccatccacataacaattgtaatgcctaaaacaacaaacaaacaacaaaaaaacaatattgaaattaaataattgcaaaaataaaaagaaaattcaaacaaaaaacaaactacaaaatagaaagaataaaaaagtcacctaggatgttttagtaaaccttcaccaacccaagcatcaaactttgcctcaatttcagtagagacgggatcagcaaatgaatcgttaagagcgtaaaggcccttgacgtaagtaattaaaatccctctcatctcctcctgattgagagcctaatgattacacctccattggagtgctcctcacatcagccgatccaaaatcaacataaggcaatttcaataccggcgcacgctttctcttatccaaaagaggtgtatcagaaacagtgtcatcagcttcttcatcagaaggaatggcagctgtcttttca

SEQ ID NO: 152664 - DNA, 643 bp, Cannabis sativa
  modified_base (574)..(582): a, c, t, g, unknown or other
agagagagagagagagaaagaactcgcactttaaatctttgacacgagatgtagccaagtgacatctcgaagaagcaaaactgaaaaagctctgggtcaaaactttggtgcttggatttgatggaaagagcttcaaaagataaggaggtggctgatgaagaacaaaacatagtcaaataaaatgttagggttagataacatattgtatgtgtacagtgacttgtcaaatttttttgccatgtaggctttatggcattattaattataaaaaaaaataaaaattaatgtagaacctataaaaatttggtgggaaatttggctccaaaaattttaattaaattttgttccctatttttggaggtaaagctatttacatagaaatttatcagtaggaatcataaataactcaatgcaataataattcccaatataatttacctacaaattgttagaatcctaaaatattcgtatgtaaagtatatatttacttacaaataaatatttgtagaggaaaaatgtgtaggtaaagaatagatttcttgtagtaccaccgtcttactcactatgattgagnnnnnnnnntgctatgtgtgggcatggcactcactcactataggccaaagtaagaagaacaatgaaggag

SEQ ID NO: 152665 - DNA, 673 bp, Cannabis sativa
aaaaaaaaaaaaaaaaaaaaaagggggggggggggggggggtaaaatcgaaaaggtgaggtttactctaagctctaaagtggtcattacaggaaatgaggatggtgcctcagcaaaaacgtagtgaaaacaagtaatctaaacgcaaaaaagcaagagtttaacacgtcattcagaaactcaaacaaaactagtcccagaagttcaccatccaacccagaaaccgaaaagcatgttatataaacaaacagtaagcaagtgtacgaaatatgaagaacttacatgaagtttgaaggttgggggttggtgttggtcgcctgtaaaacgtaggctagcagcgtcgaaggaataagagcaggaaatcaatggtatttaaagtttcttttctctctgaaaaacccttgagaaattttggtgaaatgctgaaagtaaccaaatgaagttagaaggttggcttttataggccagaacaggtgtgagacagctgtgatcagccaccatcgtacggtcaggatggcaatcgattcgaattctaaagatccaacggttggattaaacgctcatcagggcggtagaaaacccgtctgacacccatttaatgcgccgtatcaataaatggacaagaaacgaatcgacgcctgcaaaaagcaaataactgcaataatgatggtcat

SEQ ID NO: 152666 - DNA, 520 bp, Cannabis sativa
agcatttaaaagaattttttagttgtgttcgttatatttatttaagatatcctataaaattttgagatattcacaataatttacaatatagaaagtagtgctcaaccgtttatttcatatgcgtataaaataaaataatcacgagtgcaacacactgtttgaatcttattttcaacgtagtatatttttctgaatttcttaaaattttgcaagatgtctttaaatgactatactgtgcatgaccatgaaaaaaattgacaaaaaaaattattttggatactaaaatagatagaggtgcatcgatgcatcccttttaaatgggtgcattatagaattttctaaatctcgatatatatatatttatataataggaaaattctacaatacaccccttaaaaaaagagtattgatgcactcttatcgatttcggtatctaaaaatctacttagttcaatttttttatggtcgtatacattatagttatttaagacatttgacaaaattttgagaaattcgaaaa

SEQ ID NO: 152667 - DNA, 754 bp, Cannabis sativa
  modified_base (188)..(190): a, c, t, g, unknown or other
caaaactcacctgggttcatctataaaagacaacacacaagatgagtgtttggtcggaatatcgaacgttaaaacaagcaaagatgccaaccaggcgtactcaacagattcaagaataagaatattcaacgaaaagtcaaaactgaggaagtttgaaattttctcgagttagggcaaaaaatttcatnnngcttagaataagcaagatgaaatacaagcattatgttgttcagaaagcaaacattatggactatgaaatcgcatgaacccatgacgaaggagaatcgttgaatttctaaacttagggtttcctacatatcttctgcaacaaagtcgaaggtgcatttaaaaaataaacatgcaaaataaacataaaggaaatcgagaacttactcaaggatcagatgtctagattcaggtaacgccaagccaaacgagcagttttgatgaaggcactttagcaaacttgaagccaaaaacctctcttttcgctctgaacttacttagcaaagaaggttggtgaaaatgagtttgtgtacaaatatatagtggtatttataggcaaacaacgaaaagggataatcatttcaaaggaacctcagacgcctcggttcccccttaaaagagaatatgggaaacaaaaaataatcaagtacaaccgtcaaccgttgtgagagaaaatcagatttcaaaatattaattgtcagaacatttattagccaaaaaccgaaggaatgcccagtcagcctcacat

SEQ ID NO: 152668 - DNA, 1440 bp, Cannabis sativa
tctactaaccatatttattttcttttattttcagctccaactgcttaaacttagattgctatcctaacgagttgagtcggatggttggacagaagggtggagattgtacaagtgaagatgaagctcatatcttctttatttttgaattaattgttttagtttatgaacagtttagacaattcaattattagtttatgattttattccctatgcagacaattcattatgatatttttgagattattaataaaattttctctttaagaaattttcattatgaattgcttttatgaaattaagcttcgtatttactttaacttgtatgctaatactaattatatttatatgtttatcatgttttgtatgtgtttatgttttattattgatataaatctatggtatattattctctgcaaagagataataccacataaacactagaatttaaattcaatgtttatgaataattgtcatttcttaagcaattattaagattttgtttaataaaagattttttgatctgataggggtggaaaaagttaagaagtaatatatgcagttcaacgatcttttatatttattgaactctagattatattcacagcttcaaagtatctcgataacacttaggggtggaaaagtgattgatatatgtagttcaaatactttaactttgaactttagactatactcaatacaccacagtatctctataacacacatattttgattagacatagatataatataataaatgaactagcaaaccaatagcactaattcttgatcatataattgttccaattaacatgttattgtagtaatataaaattataccaatgaaattcttggacatagtatcacggtaccttatctgagtgggagaattttaaaattctagcccatctttatttggatgacactattgatagcatactatggaactttaaataaaactgagaaagtaaatctaaccgttcatatggatagaaataacttattagaattatgaggataagatagaatattttgcaatgtctattcaaatgacttaggcaaaatccctagtccttatgaaaaattttatggtatctttaatgattacttaatcttaagcaagtattttacattaatgttaatactagattgctatgttaatgacttagtctagaagaaacttgttgtttcagactaagataataagtcacaacaagaggtccctaagaaccaatagtaagatattaaatgtactcctatgtacgagttcaaccaaactcctactattgagtgagagtcatctaaaatgtaatcaaacaaggaatattaggagacaatcaagaaagaattatgaaagtgacctatatgttagatgataggggtgtatattataatccttttttctacaccaactcataacctattcgagatggtggttactct

SEQ ID NO: 152669 - DNA, 594 bp, Cannabis sativa
ttgcaggcatcagatcaaatggtatggaaagttttggaatcacgaagtttgtaaaatctagtgttccaacgaatcttcctgattctgcaaatgtgaagtctgacgcaacagattcaaaacctgtcattggagaggctgttgttgctagcgcaaaatctccaggaatgtaaaaagagtaagatctaagttaaaaagatttgttcctacttgtcatttttgtagtagaaaaggacatgtcagacctaaatgtttcacattgcaaaacatgtttaaaacaaattattttggtaatttggaaaaatatcaaaagaaacataaaggtttgaaacaaaaatggattaagaaaaagtgtcagctgatttttctgataaaagtgctgcatctcaagtgtggaattttgatagtggttgctctagaaatatgacaggtgacaaggactttttgattaacattcgacctatgcagtgtggggaagtcacttttggcaatggctcaactggaaaagtcgttggtgtgggaactctcaattttgaagggttacccagattgaaaaatgtgatgttagttgaagggctaagggctaatttacttagc

SEQ ID NO: 152670 - DNA, 635 bp, Cannabis sativa
ctggtaaaataattccaataacatttcgtaaacctgagcccatgaggcatgcgagacataagcgagatgcaacaaaatattgccaatttcacaaagacatagggcatgctactgaagaatgtcgacaactaaaagacgagatagaaagtctgatctcgcgagaatattttaggcagtatgtaagatattaaggaaacaaacctaaccagccaaacaaccctaataacccaaataactagagaatgcaacctcctcctgttgaaggcgaggattcttggtcatttcgggagggtcgtacctcgctagaaatagtaataatgcccaaaagaggtatatcaatgaaataaaaaatggacaattggcatttgctcgagaaccactaaaaaagacaaagtcaaatgaacttctaattatcttcttagaggaagatacaaaacacgtatagtacccacatgttgatgccctcgtcgtgatagtccagctcgccaataagagggtaaaaagagtattggtagactacggaagttcagtcaacatcctttacaaggatacattgaaaaaatggggattagagaatgcaaagttgaagccgtgcatggtgagcctatgtagatttacaggcgacagtgtcgcca

SEQ ID NO: 152671 - DNA, 621 bp, Cannabis sativa
gtatccaattctttaacgaacatttcacccggttgccaaagagatgccatcaaatgttgcataacatcaaaatcaatggatctttctttcaaaaaccttccaacaatgcaccaccagtcatcataatcattccccgtagtattactagcatcataggacaataccacctcttcttcatcgtcaatagtgacaatcgccatattctccgctgcctccatttgctgataactactcgatgtcatggacagccgaacaaactcaaaactaagaaccaagaaataacgccagaaaccaataaaacaaaccaattaaagaaaactatcaaaccatgtcaacacacaagacatttatactagtataatactaatactaatactaatactagtataataccaatactaatactagtataaaactatactaaactacaaagacggaaaaaaatcctaattctattaaaatacttagttaaaaatcatcattataattctaatactagtctaatgcaactactagtaaaaacctaatactaatagtagtcctaatcaggaccgaaaacaagcacgggagaacaaaatacattcaaaatcaatactctaatactctaagtttccaatatta

SEQ ID NO: 152672 - DNA, 649 bp, Cannabis sativa
  modified_base (35)..(42): a, c, t, g, unknown or other
tatattaaagcataaacatgaaaaatacatgttannnnnnnncacttcaaatctcttaaattgatatctaatcagattgtaatgggttttatttagggcacaaaactcaacaaaaacacaatatgaaaaaatggggctccaactcaaagatttaaccccttgtcttcagcccgtatatggtttcaccggccagagtgttgcacctctagggcaaattcgcctacccttcattgttgggcaagatccgaagagcataactgtagtggcgcaattttttggtattggatgttccatcaacctttaatgtcatgttaggtcgaccatccttatatgacctaaaggttgttacgtcgatgtttcatttgtgccttaagtttccaacgaagaatggggtcgggtgcctgagaggaaatcaacaagttgcacaggaatgttataaccttgccctgactaaggctaaacaggaagtatcctctagttagagtttgggaaagggaaaagacattacaatatagggaatcgcccaagacggggatgaagacgtggatccccgacttaggggaccaaatacaaatgttggtcctgtggaagaactagaagaaatcggaatcgacccaaatgttctgactaggaaactcaaaattggaaa

SEQ ID NO: 152673 - DNA, 502 bp, Cannabis sativa
acctggacccggatcccaacccaaacttggactcgaaccaaaactcagacccaaacatggaatcggaatcaggataacaaactggggccgggacctaaaactgcaccccagtcttgatctcaaatccaaactcggacttgggacccaagacttgaacaagaacaagaccgggacccgtgatagggatctagatcttaactcaagatctgggaaatggggcttccagtagacccctagtcggtgtttggatctaggacttaaactagcacccgaacccagaccaggatccaaacccaaacccagacccagacctagacccaggacttgaaattggaacctgaacaagaactactggaccaggaccatagaacaacgctaggactgtgaccaggttccggacctagacctataaccgaactcgaatcttgccctagacccaaactgagacaagatgtcaggcccagacccggacctaaatctgggacccgatcccaaacacaaa

SEQ ID NO: 152674 - DNA, 603 bp, Cannabis sativa
gagagtgtctgtcaacctaagtcaaaggggggattaggcttcaaggatattcggctctttaatcaagctatggttgctaaacaagtttggcgtctgctccaatcgccagattccttggccgcccgggtgctgaagcagaaatattttcccactctatccattctggaggctaaggatcgccctggctcgtctcatttgtggtcgagtttagtgtgggggctggagttgttgcaatcgggcatgaggaaaggtgtgggggatggtcagagtgtacatgcgtttcgggatccttggcttcccaggccgagatcgtttcgtcctatttcgcctgcgcctagtgataatgtcatggtttctgacttgattggtgccaatggggtgtgggatattactttgttatccaattatttcttgaggatggatatggatgtcattctaggtatcccattggggggtgggcggtgtgcagattggtggtgttggcattattctccgaatggctgttatactgtgaagagtggttatgctcttgctcttgatttggtgagggataggaatggtggctcttcggtcgatcaggctcattggtggaatggtatgtgg

SEQ ID NO: 152675 - DNA, 626 bp, Cannabis sativa
  modified_base (587)..(587): a, c, t, g, unknown or other
ctgctggaaccgggttgagatgggacaaccagttcttgatccactcatagacgtggcccaaccggatcaaattttcgatctcatctttcaagtttttgcactcattggtgctgtgtccaatgtcgcggtggtactcgcatcttttgttcggatctcttcgggaactatctccgtacaggggaggcagtctccagtagtgcgtattttgccttgtggcgaaatacacgcgctcttgtgagtccgtcagctctgtgtactgggtgtattggggagtatacccccctttttggccgttgtcctctgttcggttgctgcctttcgaggacctcttgctctaagagcctgaggaggtccagttaggcttgcagcaggagcggagtgagacgggacttgtccgcttacccccaaggggttcccgtagtgcgaagatgcgggagccaaggcttggctctgattatatcctggagtagcggagaattgtataccgctcatttgtggagtaaccgaaggtagggttcccgagatttgaactctgagtacatatcctgccactccggtcgggtagttgttggaaatattttaccagnatctagatttactactatgtatgtttcattaacatccta

SEQ ID NO: 152676 - DNA, 641 bp, Cannabis sativa
ctaatacaggtaaccttcacttcaaccttaactcttctctttttgtcccatccgattactcctctctagcattatcatcacacctgcatttctcttacttcattaaacacccccatttacttctccctttagcattagacaataccaaattaggaaactcgataccctctgcacctccttggacaatcatttgccctaccaaattaggtgtcccctacttcatgattagaacccctagattcgttttaggagccactgccatttctatttgcatcattgcctctcctgacatgaagcatttatttccttatttagtttttccctgggagaaatttttccctgtatgttttttctatataaagcactctgtatatattcacaaggtacagcttataaagtttccccatcagtttattccttcctttgtcccaatttgtaacctgcatattcccctgacttctgaatatccccctgaccctacatccgctcgacctttttcaacaatggaagaactcaccaacaccttgtctgccaatctgaacttgactgagattgagacaaaaattcattcctttgctgaaccatctgaactgcctgaagatgaaaacagggaagagccttctgccttccttgctgtcaaa

SEQ ID NO: 152677 - DNA, 535 bp, Cannabis sativa
ataaatattgagtaataactttattttttaaattataaagtacatcaccacctttaagaattaactaataatatagttaaatattcaatataaaaaaaataaaaaaatgtgtcgttaaataataaatatgaaattttaaaaatatgtatttataattttttttaaaggtaaattctatgtgcatcattatcaaaaatagttatgaataatgttaatatatataatgatatattacatcatgcaattcaacacaattttttataagtgaataaggaatatttttttttaataaaaatgaataaaaataaaaaaaaaaaaaaatggtgcttacctttaatatccaatctagatgataaaagatatcatcaaattgatacaaaataataaaagctctcttcaatttttaatagaaatatatataagtataaaattagttatatacattataattgtgtctgattattatatattaaaacaaaaaaaaatatgatgcttatttctaatgtcaaacctagataaataataataataataa

SEQ ID NO: 152678 - DNA, 576 bp, Cannabis sativa
ctctctctctctaaattttgaagcactatagtgatagagtaccttgcccactcatatcaagtcagtactcaatcacagtgtggaagattgtgaagatcaattctaacactaaaggagatccaagttcagatcttgttattactctacgatagaaaagaacaaaggttaaagatctgaacaaaatgagccataatattctgctgctactaatgtaaggttttctataactttatatgtgtataatttattattttaggaaattcatgtttagagtgttagattatagaatataatcaacatacacgttagtaaataaatcattgtaaaataacttccaatagagagaatgaatctaattttcataactctagtttgacaaaatttaatggtagataattctcttctcttatttcttctaattaaaaattcaatttactaaactctttctcaatattgttctaaggtattttgagtatcagcccacactatttaggttgatattcagacctttgtggaagactgtcatgaacacagtcaaaggagagaagatctaggttcaatttttggtaatactct

SEQ ID NO: 152679 - DNA, 600 bp, Cannabis sativa
gtagtattttcttaaatattccccattccaataccgtggtactagaacaagttgcattttttcatcatacttacccaactcgaatgctcctgatttgagaagttcgaccatctgatatggtccttcccaattaggtctgagtacacctgttgtgctatctttcctgtttagaaatactcttcttaggacatgtctcccacaaagaatttctgagccttcacttgtttattgaaataccgagctactttttgttgatgggctatcaactttatgtttgttgtggttcgcttctcttcgatttcatcaagtgattcggcaagagtacgtggtttgcttcttggttgtatgtcaatcttctatgggatggtggctaagctctatgggcagcatagcttcacatccatatgccatggcaaatggagtctgtctggttgccatttttacagttgtttggtatgaccatagaactttgggaagctcctctggccagttttctttagcatcctcaagtcttttctttagtgtatccttcagggtcttgttgactgcttcaacttgaccattcgcctgaggatctgccactgcggagaaacttttgat

SEQ ID NO: 152680 - DNA, 673 bp, Cannabis sativa
gtacaacaacttataccacacatacactgcgtacctcactgtacaagtgttggtagggtttatttcgtaccctgagtaccaccgaattatataccacacacaccctgtactttcccgtacttgtgctggtatcaccgtaatgtactccttaagaatatacacgataccaatgcactttgtaccataactgtacaagtgttggtaatgtaactaacacataagcatgcatatacacttaacatatacatacactcgcacattcatattacacattatacacagttcttacctcctttcaagattcaagtgagttggccaacctgaatggaaagtctcatgctggatggatgccctaatcacatattaaaaccgggcaaatcacatgtccgaaaccttaatccgggaaacctgaatttataactcaaggctctgttatattcactagggattacattaacataggaaatagggaaacacccaactaagacactaaaatggactagaattgagaaaattggttgtttggggaacctgccaaaatcgattatcggtttttaaagtactggtaaataggttaaccggtttataccaatctttcccaaaaatcctccaatttgctcaaaacttgtccaatttccaccaaactttccagagtacctaaacagggtataca

SEQ ID NO: 152681 - DNA, 578 bp, Cannabis sativa
acatattcctcaatgtcaatgctccatcgaccaatacttacacacgctatttctatttaaataaacttttcttgtttcacataatgaatatcaaacaaatgagcagtaatatatgaataagtatctgttcttcaaacattattatcaacaatcactattaaatttaggatataagttcaatcaagaatatcatatcaagcttagtattagcatatgggtgagagtgacagaataatcatactcatagatcaaagcaaataagtatcaggaaagtgaaatcttgaaggttttttaataaaagtttcattaaaaaaataaaaaaaaaacgtgaatttgcacaaaattacaatcagtgggtcctaattaagctcccacaatggtaaaatcagtatcgaatacacaatcaatcaagccattactctctctcaatccacccaaagactacgactttaggtacgatcttatccctacttcacaaaatacccagtttaaattccctcagatctcactactcagctatacccactttcaaacacgtcaagcatatgaactgaaacacaaaaacactttctaacccc

SEQ ID NO: 152682 - DNA, 506 bp, Cannabis sativa
  modified_base (116)..(117): a, c, t, g, unknown or other
  modified_base (372)..(372): a, c, t, g, unknown or other
  modified_base (472)..(481): a, c, t, g, unknown or other
gtaaaataaatttccaacacttagctctctatacatatgtgagttgaaatactaagaaagaaagctaaacaacaaaagactccccaccccaatgaggtgcttggtgcaagacttgnntgatgatcaagcaccaaggcatgcccatgttacaaaatggccccattgtgggtgtgccatggggcagcacgccacattctcccccacttaattgttcggcgtcctcgacaaacctgctgcatgatattcggtcttctgcataaattgctacaagtcctccgccttctcccagctaatctcgtcatcagcaaggcccttccatttggccaagtagtcttttctcttctttctcttcacatgaacagttctttcggnaaggatttcttctggttctctgctgctgcgtcgttgaatgctgatttcttccctggtagactggttgcgtgctggtgttgaatatattttaccaggatcnnnnnnnnnnaccaagtatgttttattaacatcct

SEQ ID NO: 152683 - DNA, 1473 bp, Cannabis sativa
atttctttagttagtatttgttgtgtgtgcatgcaaaaaaataaataatctatcttagacgttactcacttgattcgtcatacctcccatggtattattatccaccatagttagtttcaacgactttagttttcttgcctagttgatttgtcaactatggtttagaaaattttaaagaaacagcgtctaaagattaatgccttatgaacaaaataagtttcattaatctgaagacaagatactattattgatcattccatgaaaccatgagaaaagatccaccaaaatatagcataaattcttagataatgaaactttgttttgtcacttgatttctttatgtttgtttgttacctcttcacaaaatctaaaatttattaaatcaatgggtcaagaattttattaaaaataagtctttctattctccttttgggagatataatcttaatacgtataccaaagtataatagaatcctcatgattcaatttatattttatactagaagagaaattataaggtttctttatatgaggtaaatttcaataaatttataaattaaagaactagtagaactaatattgaaatattggaaaaaaaaaactaatttttcaaattctaaatgaacaagaatgatctaattattcaaaatagaattcaaaaccaaaactcatctaggtgatgatactgtataggtcttttctaaatccaaaataactagtctttaatcatagttgaatatccttatagcctcatatgtaggtatttcacttttgcccctaaagatgaatctttcatcatcacttggctttctgtttcatagataaccttccatagttatacttacgtaccaaatttcataaaaatttacttattaagtatagttaggtacaataaattaaaccatagtgagaaatttattttcattagatatgcctaatgacatacttggaacactttaaccttattttaattccttttgtaaaagtcatagataattctatatctaatattttttgtacattctttaacagtgttccatatgcaacatactaaattttatctttatccttatcctttatttaaaaaagatagctaaagaagcacgtttgtctcttttctttagttaaaaatcatttagcatgagaattaactttatgttggtagatataactaaaacatgagctaaaacgagaacaaaataaaaaatgttcacaaaagaatccacataacaaaataagttcaaataatggcaaatttcatctcaagataccaaacacactattaatatcaagtgtttggacagtaatattaactgtaagcggtactcttattgtagcaatcaaatattgacaataaatagtgtcaaacaatttgttaatctttggactgtacatattgttcacatggaaaccttataattatcacacatttatcaccacaggtatatgtgcactcaaaataagtataacctt

SEQ ID NO: 152684 - DNA, 803 bp, Cannabis sativa
gagctgggttggtgtgggtgacactctattatttttacagaaaaattattcaataaaataattattttttatttttaatttaattaagaaatgtgtttaattggaattgattacttcgtatgagttaatgggacacgttcaagcaactcactccacgattcagaaaagaaaacgttcttctccccgttataattttttaatccattcgtctatataatgtgattgaactgatgggaagaatacatctttttcatatcgaaaatacaattttcttaaaaattaaaattccatctgcgatatcaaaaatctttgggtgtattcgacggtactctacagtgcagtggggttccgatacagtacgattgggctgttgaccgacaaattccaactgcttgcacactccttggcagtgccgcgaacgtcttaaagagaacgacctggtccacgactcaacctaaatttttttcattcggtaattgtgcagaaaacagaaatataaataaattatgcagaaatagaaataaattgtgcagaaaacttgacacaagaaaattgtactcagtgttctttcaaacactactagtccacggggtcacaccgagagaatgaaatcaattagtaaagtctcaaacaattacaaaatacaattgacttaaacaagtttagactcactctaaaactttgctgcaatcctttgtattttactttgtcaactgatttctgaataccaccaaacagcgaactcccttcgtcttgatgtgtgagtgcttacttccttctaaagtgtcacaccacaccaaccc

SEQ ID NO: 152685 - DNA, 559 bp, Cannabis sativa
ttaacattaaatttttactctttttttcttggattggatggattcaatccaatccaatacatactggacctaaaatattagatggatccaattcgatcaaaaaaaaataccaggtgtaaaatattaaataaatctaaattaaaccaataaatatatatgaaatacatccaacggatagaaccgatctaatccaacatccaatagatattggatcgataggatggctgaaattaattgtatcggatgataaaatctaatatccaatatataattagatcagatctggataggcctaaaaatattagatgtagtccaattaacactcctacttttgactacttacaaaaaaaaaaaagttgatgactaaaaacgttatgtgattttaattaaacttatactggtactgaaaaaaagcctaaacatatctatatcgattttcttattcttaattaattgatcagaggatcaaaagagatatatctatttctatataaagtgtgcctatataacaaaattcttggtttatgagaaatttatgggagactttttatttatatta

SEQ ID NO: 152686 - DNA, 776 bp, Cannabis sativa
gacagaatttaagacaagacttggtgagattgttatagttccaattccaacaattcttaaacacgaaccatctgttatgcgaacagtactttcatgagagtactttaaaaagaaaatagtgatatatcacctgtcatatggtcaaaagtaccagaatccacaatccgaggatcatgaggagtagggatacacatttcccccagggggatggggccccgcgaggacccgcctctaatggggcggggattccccgtcttaatgggaaacggggggaacagggattactttttgtccccgaatgttaaacggggcggggacggggatcacactccccatcccgacgaggacccgtttagtattttatcttatatttctagtaatattttataatttataatttacgtttgtattttttttagtatattagtatctttttttatgaattttatgttgtgttttgaataataattagtttattgaataataattaatgtgtaatattttaattcttatgtatttaaatatttttgtatattgaaaattttattataaattttatttttctagtaggagattccccgccccgttcctgcccccattaggagattccccacccccatccctaatggggaaataagtagggatggggattaaaatccttaatggagatggggacggggggagcactccccgccaattccccgccccatatgcatccctaatgaggattttgaataacttgaagtgcatgagtattgcattgtcttgcgactaaa

SEQ ID NO: 152687 - DNA, 538 bp, Cannabis sativa
agtggttcccaactcacagggtttaacggaacgacacttatcccaatggggaaagtgagacttcccgtcaccttgtgcccaaacacctcccagagcacgttcaagtattgcacttccgtggtggtagactgcccgaccgcatacaatgccatcctcgaccgaccggccttggtagatttcgacgcagtcacctctatacggcacttatgcttaaagttcccaacccaggaagctgggatagggacggtgagaggaaatcgggggaggcaaggcagtgttacaacgttgcgacccacctgcccgtactaatggtctgagaaaccattgacacaaaaatagctgaagaagacgagttggatccccgcgtgggatccgaaaaaattatagaaccaatggaggacgtcgaggagatatcagtgtgtgacctcgactccaccaaggtactcgggctaggaaaaggcctagaaccggaagaaaaagaaaaaataataaagacactgaagggcgccatcgacatttttgcatggcgccaagagga

SEQ ID NO: 152688 - DNA, 653 bp, Cannabis sativa
ctggcgagaaatgagctaagagaaagaaaatgagagaggagaggcggagcaaaccacgaaccagtagccactatttatggtggctagaaatgacatgggtaggagcacttggatgggaagaaaggtagcagagagaaagaaaattataaaattatggttgaggcagaacaaaaaggtaaattattgtattagaaacatagaataaaaaaaatatagtaactaaataacataaaagatgaaatagatgcccaaatccataaaaaatgggaaaacataacactgccacatatcgtaaaaaacatataaaaagctcttattatgtgtaatttcctcttatttttgtgtattgattttattatttcaatataaatttttaaagtattagagatttttattaaattttgaaatacatatatatttatgaaaagagaataattttcttgatgactaagttttgccaaaggcaccttatttccgtgaggagggatagaacaaacttagtagagcaccatatgatattggaggtggttgcccctgctcatcataacgtccacgacctaagacccgcttgtgtgactcttcctattgcattataggcaagtctcgatcaaccccaatggagctcaatagaaactcaaatagatacaagcctg

SEQ ID NO: 152689 - DNA, 575 bp, Cannabis sativa
  modified_base (524)..(528): a, c, t, g, unknown or other
gttgatcatcttcaagatgagaggatttctctgcggcaagtccttcttcggctgaaggaagataaggacgctcaggcgaccgaggcggaccgtttgaaggaaaaggtcaatgatttggagattatcggcctcgagctcttctttgatttttgaaaggctaatcttcaggccaacttcgactacctgggcgacgccaaggacatgtacctcaagtagtacgcgacccaagttgcctatggtgggaaagaggtggctgcttcgacctccgaccaagcttctgaccaggctgctgatgcttctcttgctcgaacaacagatcctcctgctccagtcggctcagaagaaccaaacccagagccttggactccagccgtttgaacattgatctctctcctgtttatatatatatattatatatggccttaaggcctttaagacatcatgaccggccaaacggtttttaaacttggaattattttttattttttggccaagcggtactatatgctcttgttatccttaannnnnttcattctctgtttataattgcaatgcaattgtgattgttttatgtt

SEQ ID NO: 152690 - DNA, 566 bp, Cannabis sativa
tgagtttgtcgcaaagaagcaagtcgcaacaagtttagtctggtaaaggtagtgaggtcggatttggtaaccctcgaaaccaactctttgcacgagaagggctcgttcagttgagtgtcatccaccgaatcagtcccactcccttctgcctcttcttcttcctcgcctgactctcgagttggggccgcccaatcgtcatccatctcctcgacctcaacgtcaggggcatgcctggaatggataagataatcgtgggttgacaccgtagactcgctgtctctaatctcaatggcccttggttcagcgaactcctacaccattctctcgatgtctgcggaagacatcggacctaattctatacctacagtaggtgcgatctcctcctctgagatcgaagttgggataaagctatcttccctctggtcctcatcaccgtcaaacgcattgcctcatgagccaagcaactgactaaccgacaggtcgctcatctgaaagataaaagatcttttcagcgtggtgaatgtgtgaaaacaaagtaagtgatctcacccgcataaactataaag

SEQ ID NO: 152691 - DNA, 628 bp, Cannabis sativa
gcttaccagcggcgaaccgcaagatacttcaattccaaggtcaaggcaaaagtcctgcgaacaggagacttggtccttcgaagagtaatgccaaatatcaagaacccatcgcatggggtcttcggggatagttgggaaggaccatatctcatcgcagaaaagattggtgacgctacatatcgactcgcagcactcgatggtactacgattccacgagcttggaatggcgaaagcttaaaactctattatcaatagtactcgcattgtctaatttgtattcaccttgtacttatacttagtcattttttataaaaaaaaaatcctaagtatagggggtatataccattatgtactattgattatataaaaaaattcttggaaattcttcaaggcgttcttcaagtctaaatttcaaagtttaaaatttttcaattcttatgaatttttctacttattacactaggttgtaattaaagtcgaaatattatagatattaaagcgcgagtacccgtgtactgcaaaaatactaaaattagatatccccgcaaggatataaagttgttcaaaataaaatacaaattggtctaagtacagagtgcgagtacccctgtactgcataaaaaaaaaa

SEQ ID NO: 152692 - DNA, 695 bp, Cannabis sativa
  modified_base (654)..(660): a, c, t, g, unknown or other
ctacactttggcagaagcatctacctgagcaagacatgatggggcatcgtcattcgatgagtcttcttgctcctccagacggctttcccctttcccaccataggggtggatggccaagcaggtagaatgggctccctgatctgaatcgtatgttcaatgggcctgtacccggccagaagtttcttcttcctcttgagcgatctttcctgctcttcctcagcctcatcctcctgctcagaatattcttagcctcacgcttcagttgaatgagttcattctcttgatgagctccctcagcctggccagcactggacttcctcttcttctccttcacaggctgagaaacaaaatctgttgggtaaagtccgtactccacatagtttgcctccgaggtcaacaaagtgatattccgagcatcatccgacagttgaacaatcctttgacctctatccctaagagctagcatgaggagtggacggtaatatatggggatatgctaaaaccgagtataagtgggacccatgcctaccacaatgtaatagtcgtcagcgaaattcccaattttgctcacggccttgtccacggtgcctgtcaacaacctgaagtcaggctgagagaagtagaagttggaattattttacgaggatctagatnnnnnnncaagtatgttattaacatcctaagcatgaacttct

SEQ ID NO: 152693 - DNA, 775 bp, Cannabis sativa
caactttttcatatttaaattgaaaccacacattctcctcatcgcctacgttgatgaagcaacttgagaaaagaggcttctcaatgtcaatctccaccaacactcttagccatttcgcccacgatgcggggttttcctcgtccaaatccacaaccactacgttgcccacccgagctcccagtttattaccattggtgacagagaaaaattccacagggagtttatgaatctggacttaaaggcgggtatgggtgaacagtgaaccattctgcacactcggttcccaggatttgagtaaaagaagcttaccacggatgttccacgggctcctaagaagagcccagttcctatcatccaccttttcaaaaatcagttcaaagcagttgttattgatggtggttgcaagaactgggaccacacgagcagggcgcttccacacgtttttcacaaggtcaataatgaagctttccttcacgtgcacatgggatagcactttaccaaagagacacagattagttaagcttttgacagtggaatcacagggagttaatgacaaagtagcctcatcatgggacatatttttaccaaccactgaaccagagttacccaccaactccataccaaacaataaatgagaaccacacaggatttaccacaccacagaaaagggaaaaaaaccaaaatcccacaaacagaggaaagaaaacacagtgatattggaggaaacaaaggaacaaaaaagggggggggggggggaaaaaaataaaaaaaactc

SEQ ID NO: 152694 - DNA, 755 bp, Cannabis sativa
gcacaaaaacaggaagttgacaagttgttagtcatcgattttataactgaggtattttctccctagtggatagccaatcctattcttgtcccgaaacataacagaacttggagaacttgtattgacttctccgatctgaataaggcatgcccaaaagactattttctacttcccaagatcgaccagttagtggatgcaactgctgggcatgagcttatgtttttttacggatgcatattctggatataaccagataaaattgtatgtcccagatcaagaacatacaagctttgtaacaaatgtgggactttattgttataaagtcatgccgtttgcattcatgaacgctggggcaacgtatcagcaactagtaaacgaaatgtttacaaatcagatagggaaaaacatggacatttgcgtggacgatatgttggtcaaatcgataaagagtaaggatcatacctcagacctcacagaatgctttaaaatattaaaaaaagtataagatgaagctaaacccaaaagaaaatgttccttaggagtcttgtggggaaagtttttgggattcataattaacgcgaggggtattgaggccaatctcgataaatcaaggcattaatagacatgccatccccaacaaagcccaaggaagtacaagcgctaacaggaagaatggcggcacttaacagattcatttcgatgtgaactgataagtgtgtaccgttcttcaacatattgcgaggcaacaaaaagtt

SEQ ID NO: 152695 - DNA, 509 bp, Cannabis sativa
  modified_base (43)..(45): a, c, t, g, unknown or other
gttccaaaatacagagctgaaactttagagagagagagagagnnngagagagagagagagagagtctgatgagtggagtggcaaatcgaatgaattaaaaaaatgtgtgggacccacttcctttattttattttattttttattttctcaattttgatcgagtcttcacattctttcttccttaaaaaaatgttgtcccaaaattttaaactacaacctcaacttgaaaattaaataagtgaagaaacttcatataagcacgacacatgacaagtccgaaaagcacatcacaatatattaaaaaaatcttataataataataataatagtaataataataataatatatggatatatcaattataaataagttaaaataatgataaaactttaatataatattgaatattataattctataattaaaattattaaaacatgaaaaattaagattatatagtaatttatttagagtgacataaaaatttgagtatttataattaaatatt

SEQ ID NO: 152696 - DNA, 618 bp, Cannabis sativa
gcaattagcacttatttcttttatttttataattatttatgaaatcaattatttgtggaccccattattattagtgagtaaaaaagtcataatttctcaattccagagattttattaaattctaggggtattatttgtcctatatgtgaattatgcaatttttgtaatttttgctcggcgacaacagaaaatacgatggatagctagtttgatcacatgggtaaatttagaaccttatttctttgtggaaactattttagagaaaataaaatgtcaaggttaagcggggttatggaatttgaccattttacccatagctttagaaataccctaagtttaagtcaaaggacaatttagactttttgcaaagtaaaggttaggtggctgccttattatttgacacctagcaaagtaatttcaggaagggaaattgattttccctaaccttcatttcatttagtgaaattgaaagaaaatacaaaaaatcaagagaagctttctctttctttctctctctctctctctcttcgaaaccagcaagaataagggggggactgctggtgatttgtggtggtttcagcaaggaaatcttgggagaatcaagctaaggtaagccct

SEQ ID NO: 152697 - DNA, 951 bp, Cannabis sativa
aaagagagagtgcaaaagagaatgggatagagggtctccttaacactccttaattactaattagtaggttttttttttaaatgccacttgtaataaaatatataataataaattgtatatctttcataataaataataataaaaaatattacatatcaaaaacctcaaaattactttagatgccaattaaaatcaaattatatatacaaactataccaataaatatcataatataatacaacctaatcaaatataaaaaagatatatattattaaacaatattttgaatagtttaattatatattcctatatggcataaagaatacttctaattatgaaaaaatttaaaatttaaaatttgtttgtttaataattattttagaaatataagtaaataagtaataaaaaaaggaaatagacagtatttaatatacacaaaaaaacgtattcaattaaaatagcatgggtactagtaagatagagagtaaccacttgaggctagctcaagtggccataagtgggtgtgtgagtgttggaggtcctgggttcgagtcccagataaaacatgttgtaatatataaacgcttaaataaaaaaaaaatagagaataaattattaatatgtgttatttatgtaatttattacaaaaatttaggtatattgaaccttttatgacaaataagtaattaatttttatcttatgtctgtagatgtaaataaacaaaaataaaaattacatggtatactggattttgctattttttacaaaaataccgctacacggcagaatttacttttttactgtgtatttttataagttttatttgcagtatactgtatttaattttgtttttttttatttgtttgaatgttgttttccataatttatttttttttaacttgtgtggttcttttatgtttttctaagtgaaaatataatatatatatata

SEQ ID NO: 152698 - DNA, 618 bp, Cannabis sativa
cacggttgaagcagcaggaggagcattcgagggggttgcatcggtttcaaccatctttttgggatgccctagattctttgttctaaccatggtgatctgaatgaaagaatgaacagcaaacaaacaagagagacaaagaaatagaatcaggtaggtggtaagaataaatgacaaaaaattggtttaaataaacatgggagagttgagcaaaaaggaaaccaatttcaaaaatttgagtaaccaccaggccacgatcacaaaaggaaactgcccactcttgcaaaaaaaatattccccttttcttttttcaaaaaaataaaaggaaactagaataaccaacaatatttccaataataattcaatctttcaagattaaaaacacattaccatataagagaccaaactttaaaaggtaacatatcaaaataaatcaaggaagaataaatattgatacttaccaattaagtacaaatttccttagcccatgaatcaagtcaccaacgccactctctttgattattattattatttttatttatttatttctaaagaaccgaaaatatgtacaataaatataagaaattctaaaccaagtaatttaatcaaaaatcattacaa

SEQ ID NO: 152699 - DNA, 652 bp, Cannabis sativa
  modified_base (31)..(64): a, c, t, g, unknown or other
  modified_base (140)..(159): a, c, t, g, unknown or other
  modified_base (403)..(405): a, c, t, g, unknown or other
attttctctaaaatattttccactaagaaannnnnnnnnnnnnnnnnnnnnnnnnnnnnnnnnnccatccatcgcattttccgttgtaaccgagcaaaaattactaaaataagatatttcacatataagtcaaataatannnnnnnnnnnnnnnnnnnnctccagaattgagaaattataactctaatcttcatttctaaatattggggtccacaaataaattaattcataaataattataaaattaacagaaattaccgctaattgcttttactaattcaaattatgaaagcggtcattacatcgtcaatgaaagtgacgaaatactcataaccacttcgagctttgacattcagcagtctgtatacatctgaatgaactaacccaaggggttgtttggcannntctccctttgcagagaaagaacgctttgtcatctttccttctaggcaagacttgcatataggtaattcacctaagacgacattttccaatggaccgtctttggttaacatattgagtctatcatagcctatgtgacctcaacgtaaatgtcataaacaagtttgatcatcattatcaatctcttttcttttaaggtttttaggtctagcaacattgaaaagttcattgtttagtgcgatttgtatat

SEQ ID NO: 152700 - DNA, 503 bp, Cannabis sativa
attaataaaattaaaaaagaaattaaaatcttaaaactaattaaatgtttttaaaaattaattatttttattaaaaaatctattaatatatataaaaaaattatattaaaaattcttgtaaaaactaaattttacgagaataagtttgagtcatttttttcactaaaaatctagatttatttaagtaaatatatattttttttagtttactttaaatttcttaaataatttaagatatgagtttgtaaatataaataagactattcacaaaatcttagtttatttatattatttattgaattttcaataattttgatttgatttcttgatatatatgtttataaataaaatataacttgaaaatatttttttaaaaataatttaaatttctaagtaaatttaatattagcgaaaatcgggataaaaagccttaaaaaccgggataaaaggcctttccttgtagtagtgaataagtgagatccggtataaaatttcaccaataa

SEQ ID NO: 152701 - DNA, 608 bp, Cannabis sativa
tttattaagtgtttatttttttttcatatttttctatttttgcaaaaaaaaaaatgaataaaaggtttgttttatttattactatcagctgaaaaatcatttaaaaatctgattattaacccaaaacaatgtccacttaaggacaaaatacaaatgggctaaaagaccattttgcccctccactctaaaagtcataaaaggtcacttaggggtatttttgtcaactctaaattcttgactattcccgacatttccaatgtctaactatactgcctcgctatactaagaatactaggatgtgattctaatagccaaacaccgcgttccaattttgtcgggcacaaaacatgcaaaattatgaaactccgtaaatgacatataaaatacattctgaattcaaataaattatcataattaaataattcaagaccaataaacaagtttcataattaaaccctaattatctactaatttccaaattagagctaagcggtctttacaattatcccgcgttaaaaggattcgtcctttaaatctaacttgaacaactctggataatgagctctcatgtcagattctaactcccaggtggcttcctccaccttgct

SEQ ID NO: 152702 - DNA, 871 bp, Cannabis sativa
  modified_base (437)..(442): a, c, t, g, unknown or other
tgaggtaagctggtttttttatttgaagtccacccttaagcaaggcagatcggggtacttctatttctctcaaccagacttcaagtgtttgacgggcaccagggataaggtcgttaccaaaattgggcgttttgttgacgagtacttcatggtggaaggcatgggcaccacccatactctgttcaagcagatccccatataccaccgccctcccttcactcttgctcttagagatagagctcaaaagcttgctcaactgtcgagggatgaccaaaatattattcagttgacctctaaggacaattttgtgaagtacgggctctattagaaggatttcaatcctaagccagtgaaggagaggaagaggaaatctggtgctggacgggctgagagagctcatcaggaggatgaaatcattcaacttaagcgtgaagctnnnnnnaagggaggtgcaagggccaaacagtatgctcatgagcccctggatcctgaagatgaggctgaggaagagcaggtgactccgctcaaaaggaggtagaaacttccggcccaacccaagcccattgaacatgccattcaaattagggagcccagttcacttgcttggccatcttctcccgtactaggaaaagggaaagctatcatggtggagataagggacttatcaggtgatgatggactcttgagtcttgctcggacaatcgtttcgcaggatatttcgtcttgtttttaaactttttgactaacatgctttatgcttccgatgcctttttcctctaaccatgttgtttttgtttcgtgtagacatgtctcagaagatgctcgatgctctgaagaagagagttggaggaagcttaagctcatctcctcc

SEQ ID NO: 152703 - DNA, 1110 bp, Cannabis sativa
agatcctggtaaaatatttccgacattaatcccctgtacccaacttgtatatggtttctctggccaaagcattgcacctctaaggcaaatctgtctacccctcattgttggataaggtttgaggagcataactgtgatggcacaattcttgacaattgatgtcccgtcagctttcaatgtcatgttaggccgaccagccctatatgacttaaaagttatcacatcagtttttcattgtgcatcaagttcccaacaaagaatggggtagggtgcctcaaagggaattaaagaatagtatgggaatgctataacttgccctaactaaggtcaaaaaggaaaatacccctggccagagttcaggcaagggaaaaagtattgcccaatagggagtcgcccaaggcggggacgaagatgtggatccccaacttggggaaccaaatacaaatgtagggccggtggaagaactggaagaagtagaaatagaccgaaatatcctgaccaggaaactcaaaattggcaaaggtttgttgctcgaaataaaattagctttgataaaatttctaagagcgaacctagacatttttgcctggtcacacgaggatatggttggtattgatccttctgtaatatctcacgccctaaacattgatccaaactttcgcctcgttcaacaaaaaagaagactattggacaaagaacgggcgcaagcattgaacgaagaggtagagaaactacgtaataacaagttcatcattgatgctttctacccagcttgggtggctagcctcgtactggtacccaagcccaataaaaaatggcaaatatgtattgcttttgccgatcacaacatggcgtgccccaaggactattttccactaccaagaatagatctgctcgtggatgcaacagctgggcacgagatcctgagcttcatggatgcctattcagggtataatcaaatcataatgcatccaccagaccaagaacatacaagtttctgaatagatatgggtttttactattataaagtcatgtcgttcggtctagagaatggtggagctacctaccagaggctggtgaataaaatgtttaaagaccagatcagacgaa

SEQ ID NO: 152704 - DNA, 510 bp, Cannabis sativa
aagagatataattagttccttaataactttagcattttaaatgaaaaattaacagagatagaaaaagaaagttactgagcgagagagacgaagggagcagtgttggagttggagaaaatatatatgtatacataaattatttttatacgtaaactattttttaatttattaatattaatataataataatataacttatatatatacataaacttaacttaaatagtatacatatataaatttatttatattttttataaattcggtcggtttcggttttttcggtcggtttgctaccgaaacaaaaaccgaccatttaaaggcggttttaaccgttaacgattttttcagttttcggtttaaacggttttggttttaacggtgttcggtaggtcggtttgaacggtttgaacggttttctgaattttttgctcagccctaggcctcacttggaattttgcagttttcacaatttttatttatagtttcttaaaaacgccaattttccaa

SEQ ID NO: 152705 - DNA, 712 bp, Cannabis sativa
cctagactcgacttaaatttctctgactgttttcaatcgttgcttattctactcagtattcacgatgcttgtataagtgacagttttatagatcgacattaattctttacctgaaggtgttaataaactgtcaggaattttagattttttagtagtgaattgctttgtgttttagggaattagagcactcacaataagtgtcctataattactaaaagctaaatagaaaaaagctaaaagcttaaaattgagatccaacaaatgctttaaacccctagcaatttagcccatttcaaactccgagaaattattctctacatagctcaatagctcaatgattaaaaacaaaaaaaaaaaaaactaattaaaaaagtattacgtactaaatacatatttattaattaccaaaatattattgatagttgttataattttatcctcacggaaaattttgaaggcgaaaatatattttataatagctgattttattattttaaaattatttgagtagcccaaaaattttttatataccaaagaaatccaaacttaagccatatcaatctttcatatattctcaaataaacaaaataaaatagaaattgtagaaattatgcctaagagcacctccaaggaggcagcaaaaattgaaaaatggagtaattaatgctccaaggaggcagcatctattactgcaaaatgatgatttgtctac

SEQ ID NO: 152706 - DNA, 690 bp, Cannabis sativa
tgcttcagcagttgggagtctaatgtatgcaatgttatgcactagacttgacatatgctatgcagtaggaattgtgagcaggtatcagacaaacccaggtgatgaacttttgactgcagttaaacatattctgaaatatttgaaaaatactaggcattatgtgttagtttacaagggtggtgctttaaatcccataggctataccgacgcagattttcagacttgtcttgatgacagaaagtctacatctgggattgtttttactcttgggggtggagtagttgtttggagaagcgctaagagaactgcaataccagactctaacatggaggccgagtacatggttgtcgctgaggctgttaaggaacttgtttggctaagaaagttcttctcaggacttggtgttgttcctagaatggaaaaaccgctggttttactttgtgacaatactggtgctatagtccatagtaaagagcctcaaagccacaagagaagcaacacacatagagaggaaataccacatcatcacagaatatgtggtaagatgggacgtactggtggagaaagtggacattgaagataacctagctgatccactcaccgaagtattgactacaactacatttgaaaagcacagattgaatttaggattaattaaaatgtacttatagttttatgttagtgcaagtg

SEQ ID NO: 152707 - DNA, 691 bp, Cannabis sativa
  modified_base (72)..(82): a, c, t, g, unknown or other
tatatacatatattttataaatatatttatgtagaattaataattttattctaaattgtaatacatgtatannnnnnnnnnntactcaaaaataattctattatgatttaatagtaattattatttattgttattgttgttacattgatatttttgggtagtttgatttttttttctagtgtaattctatttagtaataacctctcaattagaatataatttattagtcccaagtgtattgttggatagaggttctacactatataaaggaaaagtatgaggtgttgacatgacgctttaaaattattcaaaataactctatttattctctttttaattctctcatttaaattaataaaataacactctaaaatcacttaaaatagttttatttaatttttatttttttataaatattcattgattaattaactaaaaaattattattgttattattaataataacaataaaaaaatatctaataatagataatttttcaaactaataaaaaaaagataggtagcaattaaaaaaatattttttttattattattattaaaaataatatatatgtgtatagtaaaaaaaattgtatttggaagcactagaaaaatacatctaactaattaagtaataaatgttataaatattaatttttatgtggatgtccaaatcttttatttattacca

SEQ ID NO: 152708 - DNA, 893 bp, Cannabis sativa
  modified_base (291)..(298): a, c, t, g, unknown or other
aacttgacgctgcaatctgatctattaaaacgaattaaagccactcaattaactgatccagagttagtaaaaataagagatgaggtatcagctggtcaagcccagcattttacagtgtcagatagtgggatgctggtattcaaaaccattgtttgtgttcctaataaagtagaactcagaaatgaaattctcaaagaagctcataccactccatattcctatatcccagcaccaccaagatgtatcaagatcttaaaccttacttctagtggagcggaatgaagaagaatnnnnnnnnattcgtatcgagatgcttaacctgagtggaagtgggaagacatcacgatggactttgtgtttgggttaccttgaaccacaggtttttttgattctatttgggttgtggtagatcgattcacgaactctacacattttctactagttaaaacaaccttttcagtggatatgtacgcagatttgtacgtcaaagaaatagtaaggctgtatggtgtaccaaagttcatagtttcgaatagagatccgaactttacctctaagttttcgcagagtttgcaacatgctatgggtactaaactgaaattcagtacaactttccatccttagactgatggatagtccgaaaggacaattcagatactgaaagatatgttgcgagcttgtgttatggatttcgagggcgccctgagtaagtacctaccgttgatagagttctcgtacaataacagttatcaaagtacgatacggatggctccctatgaatttttatatgtccgaaagtgtagatctcccatcaactgggatgagacagggcaaaagaaatacctaggtccagaatcagtacagcagattaatgaggcaattgagaagattaa

SEQ ID NO: 152709 - DNA, 546 bp, Cannabis sativa
aaccatgcaacattaaatgttgtttctgatctatattaataagtaaatttgattatattgaaatgagttttatatagggcataaaacccaataggggaccccaactcaaaattagagtcagaatcgggaccatggactgggatttggacccaagacctgaccccgatctcgatcccaaacccgaacccagacatggacacggggcttgacccacgactcggggcttggacccaacccgtggtcggtgtgtagatcttggaatcgtaccaagacccgaacctggaaccatttcctgaccaggacccaaacaaaaactcagacctgagacagaaattggaacaagaaccgaaatcaggaccttggaataggaatttgacttggaaccaaaactggatctagacgcgaaaccgaacacggacccaaacccagaccgtgattgaaactcgaacccagacccgaacccagacccagacttttgacagtacctgcgacccaggacccatgacccgaaaccttgaccagaacccaaactcgtaccagaacccg

SEQ ID NO: 152710 - DNA, 699 bp, Cannabis sativa
acttgttagtaaatctagatcctggtaaaatatatccaacagaagatcactcaaggaaattagttcgaagagtatattccatcactctcaatcaagatcaaagtccagagagaaggaatcaaggaagtgttatttctatggaaggtctagacacttgcaaagattttgtaagaagtacaaggagcaacaaagcttcaacaaatctcacaatggagataagaaggacttccagcaccatcacccagggaagggctctgctgcaatcgcaaaagatagtgatgactgctccacagatggagagttgttctctatttcagagtcatctatgaacatggagtggattcttgattctggatacacttatcacatgtgtccaagtcgatagtcattttttaattatagattagttgatggaggtagagttctaatgggaaatgatcattcttgcagggtcattagaaccgagaaggttaccatcaatgatggcataatcaaggtgctaacgaacgtaaggcacatcctagagcttatatgaaacctcatatccctggttgcgcttaaggatgaaggatacggatacaagtccatgcacgaaagcttgaggatcaccaagggttctttcgtagttatgaaaggtgaaaagataaatagtttatatgttctccaaggagaaactgtcccagctagagaggcaagtat

SEQ ID NO: 152711 - DNA, 602 bp, Cannabis sativa
agagagaaagagagagagagagtgtctgacacttagatagtttgatatttttaggttagaggaggcttaggcaacttaggttttcagctagaggttaaggcctttatataggaggcctataccctaggtttacaattcaaatcccttgaaataaggtagttagctagatatttacaaaagaccaaaatgcccttagattctagatagtattcatcttgtctgttgggcttttggggcccaattcgcagcccacttatgatgcatacgtgtaggagtgtcctatgggacctactgagtaatacttggccggccatgatgtttttcctagcctggccagccatggggccagccaccgtcacttgatccctgtttgagtgtcagggtcttaatgggtcggatgcttacttggccttcctcttagtgagttgtattaccacatggcacatgttctatccacgtatgcatgccatgtcttgaggactgataactctatgaaaatagagttatttatatctttttgggcattaaattagttttgttctcaagaatttttagtttattttagtgacttttatttggttttctttaattttgcataaata

SEQ ID NO: 152712 - DNA, 504 bp, Cannabis sativa
ctcatgtgaaatttccttccattaactaaactagattttcaattctaaaaactctaacaattaattaggatgctcatcttattgacttaagagcacggaatgcaatgattcctttcttagagctcttacaatgatatctctgagtatatactcttagataagtttttcgaccttttgcccagtgagaatagatcactatttatagggttataagctttgagggaaaagtttcccttctgtttacaatgtctataattggtaagattacacattaaatactgcactgatcaagggattcagacaacttgccatatctctgtgatatgatcccagaattatagggatcgcctctgtgactcacgatgcaagtgtgccaatcgctaagtgttggcacgctattcggacagtccactgcccggctaagaaggcttcgtccgtgcagatatatgcaatgctttgtttggcatatctctttcgagcagatatgtgaagtcgattccacgt

SEQ ID NO: 152713 - DNA, 666 bp, Cannabis sativa
tgatgttcttttagcagagcaatggttgaaagtgattgaaaggatataaaattcatgggagttaccagaaatgacagggtggcatgtgccacgtttcagttctaagaagacgccctggtgtggtgggagatggtgtccctcacaaaggatgtcatcagaatgacatgggaagaattttgagacttgtttaatgctaaatattataatgaggcggtccgcagtgcaaagcggaaagagtttgttaaactggtacatggtgagaatatgtcattgactgagtatacgaccaagtttgatcgcttggccaagctagcctcagggattgtgccgacggactttagtaaaaaggaaaaatacttgtcagggttgaatgccaagatcaagcacgatctagttatcaccaccgacaacaccacgcctatgctgaaatggttgacaaggctgttcgagctgaaggagcagtaaaatttctgcatgaaattagagagactcttggtgctggtggaaccactactctccctatttctggttttggcaaggagaatgataattccactattgagtagaagaagagaactttcccacctacagggagttcaggtcaaagcaagaggtttcgtggaagccagggtaaagggggacgtcaaacatattcctatcctgagt

SEQ ID NO: 152714 - DNA, 814 bp, Cannabis sativa
gaagaaagagcatcagcaaaggagattcagcatctaggattcagagattacccgattccctgtcatcccgcttgactgtccttcggagactcccactgtcgtttctccttcagtactcaagctagaactaccacctttcgccaccaggccttgcttgagccactttgcgcctattgtatgctgtcttattcttgcaacagcctttaactccaagttatatggcttcgaaatcaagtgtaaaggtgtgtcaaaaatcttcagacagaatttctccgagtggccaagtatgccacaaatgaaacaaaacgtcgataattttcatacttgaaattacaatagcatacctccccccctctctgttccagcttcattataaaataaaaggaaattatcaattaatgttattaaagaggaaaaaaattcaaacaattcaaatgaaaactaatgacatttttcaatcacaataattttagtaattaagaaaattgccacaataaaatatgaatgtagttaatattaataattaatactataaaaataattgactaaaaactaattaaaacaatatttaatactaagattttcttaaacttttaatatcgaaagaaataaaagctaattaactaaaaaaaaattaaatatattgtacactcatcaaatttacaaaattatataaaaatgatatagataattaaaattcaaaataaattcaaataagaaaacattaacttataaaagaattaaattataaaatgagacaattaaagtttttaagaaaatatgtttgaacaaagggattttttcataaatatac

SEQ ID NO: 152715 - DNA, 1556 bp, Cannabis sativa
  modified_base (775)..(777): a, c, t, g, unknown or other
aaaataatttccaacattttggtgggtcatggagaaagtatttgcctctgattgaattctcctacaataatagttatcaaagtaccataggaatggctccttatgagctactttatggtagaaagtgtcgatcaccaatccattgggatgaaacaggagaacgaacatacttgggccctgagttggtccagaaaacaagtgaagcaatagacaagattaaagctcgaatgcttgcttcccagagtaggcagaagagctatgcagatcctaagcgtcgggatattacattccaacctggagaccatgtctttcttcgagtgtccccaatgaaaggaatcaggcgctttgggaagaaaggcaagttaagtcctagatttattggaccttttgaaatacttgaaagggttgggcaggttgcttatcgattagccttacctccatcattgtcagctgtacataatgtatttcatgtttccatgctgaggaagtatgtagccaatgcaatgcatatcctaagttttgaggcactggagttacaaccggacctatcttatgatgagcaaccagtgcaaattctggatagaaaagaaaaaatccttcaaagtaaaatcatagctttgtttaaggtgctctggaggaatagcaaagtggaggaagccacttgggagttagagtctgatatgaggactcagcatcctgagttgttcaggtgtgatttcgggggcgaaatcctgttaacggggggataattgtaaagaccgcctaaggttaatannntggattattaaataattaggatttatgcttgagatttaattaatatttataaaatgtacattgtggaaatatatttaagtttatatatgttcattatgttatttaagtaatatccctatttctgtgatggtgttcggaagctgtggaaagcgacgtcgggccttcagagagtcacattttatatgtttagaatattattatcggggtatcattgttagatattagaggtgttagaatttttggggtttagtaaatgaccaatttacccttgggattttgtattatttgattagcttgaggggcaagaaggtcttttgccaaagacttcttttgtcttatttgaattaaattaaggctgattataagttttataatttagaaaaaaaaataagcttttatttgaagttagagagaaattaagagaaaacctagaaacttctcactatcctccaattctcattctctttctttcgaaccaataatccagcaaggaaggtggtgtattctttgctaaatttttggattttgatagggtggtcgtgctttcaatcaaggtatgaacccttagttattctattttaagttttaattaattttaagatgtgtattgcatgatttttgggtgtttaagttgctataggttttggggtggtttgatttcgtgtcttgggattagattaggttcatattgcttgatttaagttgttttgataagttttgataagttttggctaaggtttgaatttatgaactcaattgttgttggaaatattttacca

SEQ ID NO: 152716 - DNA, 675 bp, Cannabis sativa
  modified_base (636)..(636): a, c, t, g, unknown or other
tatctaacttgaaacttgaataaactaggagaaaagggtgaaaaacttaccttcaagcttgtaccaaccctagaacttattaattctgccaagaaattgaagaaacaattatgaaaatcccttgagtgcagctggtctcctaggctcgtgcaagagagtagaagagaaggaacttgtgttgactttttttcttaagttttctaagttgtgtcatcatttatcaacgcataagacttaaataaaatataaaattattattagtaatatctcagcctcaaaaaggcactaaaagacaaaagattcactttactaaaagactattctaccccttcccttaacacttaaactttagaaaattctaggggtattttagtgattccctaattaatctaccaaatcgataacataaaaaaattctaaactagacctgtataaaattcaattcaattcatcttttattgtcgtgacatttctgacctcccgtgaagttccacagttgtcagccccaaaaatattttattcaagttatggtatctacgatacccacatattccaatataatcttcgtaattaataaattacgctttatttatttttatctccctaatcgactcataattagtttaagtaggattnaatcctactctaatgcccacttaatcacatatttaataa

SEQ ID NO: 152717 - DNA, 511 bp, Cannabis sativa
aaactaagcggtctttacatggagaatacagaaagaggatggagggatctcagatttcacgagatacgagcggtttttggttttggactttgagagcattagcttatatgatttgaaacttgtaaaatttgttaactttgatttattttctattaatgaagcataaaattgcatctctagaattggataatattggtcttgtgatgttgtgtactgtcgataatttagatattgatctttagggtgttcttcaaaatctaaaattcataattgaacttgtgtcttcgataaggttaaggccaacctggccaagggcaatgtgttaaatttgtcccatttgagtaaagctaattagtacttattatgcctttcttgtatttctacttcatttttttgtttgtttttatttttactactgaattgtgattatcagagttgtgtgttaaaaaataatataatttagtatttttgccaaaagattccagaaaaaaaaaaagataacaattataga

SEQ ID NO: 152718 - DNA, 800 bp, Cannabis sativa
  modified_base (336)..(346): a, c, t, g, unknown or other
aaaggcaatttagtcaatttaagcattccgattacgtttcctaataaagtaaataagataaatcactactatttcatctccaaaaaaaaattagtaaactacatattacaaatattgattccgattatttttcaaaatagttttaaccgtttatatattaaggggtaagtacgtacagtattattcctttggtttagtaccttatttttttaaaataagataatatgtattcaatggttacagtaataattaaattttcttatagtctattaaagtatttcactaattagaatttttttttttatttttaaacttaaattaattatatacttaaannnnnnnnnnntttaattaaaatatttaataaaatcttttcaaaaattaatattaatatgtttttttttattattttaagaaactaaataaaatgaggctagtattaggttacaagtaatttattaattatttttaataaattttttaaattaatcacaacccttttgttgtccttaattttgcctaaaacacgtggacctagataagggtgacacgtggagccaaaaggatcagcgcttatggaaattaactaagtcttagacaaaagaggagtgtctcagggaaggtatctcccggaggagatataaagagtatctttatactcccggaggccgaagatatgccaaggcagttccgagaggtaccgaaacctattgaacaatcacctcgcatttaatgccgcatgggggaagacgtattgaagtctctataaacgacatgacagatggtgtaacccccctttt

SEQ ID NO: 152719 - DNA, 537 bp, Cannabis sativa
cctccgccactgctgcagataacaatacagcaattcctgctgttcgcgatctcaccgaagatcactcaagcccgttctttctaagcacgggcgatcatcctggtttggtccttgtttcgactgtcctcaatggaactaattaccaagcatggaaaagagggataacgatggctttgattgccaagaacaagatcgccttcatcaatggcagtcttcctcgacctgaaactggtaattcttcccttaattcttggcttcgttgtaacaacatggttatgtcctggttagtgaattctgtttctcctgaaatagctcaatcgaatccatgtattttgatctagccactgacatgtggaatgatctggccgatcgttttaatgagggaaatggtcctcgcattttccaactccaaacccaattaacccgattacaacagggtgatctttctgtttcatcatacttcacaaaacttaagtccatttgggatgagttgaaagaatttcaacccattacctcttgcacttgtggagccatgaa

SEQ ID NO: 152720 - DNA, 577 bp, Cannabis sativa
ttaatgcacaggtacattattttcatcgtgttaaatttttttttctgaattttttaaaattttacaggatatcttaaataattataatatacacgattacaaaaaaaaaaaaaaaggctaaaaaagtctatcgggcgtcgaaacaaatagaaatatatcagtacatcatttttagaaagatgcattgtaaaattttcaaaaattaaattcttaatttcataaatacatctaataaaataaatatatataaacattaattaaaaaaaaaaagactaataccgtctctactgtaatattaatttcaaaatagtgtgcaaaatggtgtgtctttggagaagaaatctacgacatatataaaattactgtctccttggagttggcctaagagcatctctaatggagatgaaaatacaaaatataacttattttgttaaaaattaaaaatttactctaatagtgtgccaaattattatgcaaacagggtcggccttgaattgaaatgggccatagacaatttttttttgagcccttactataaagataaatggaatttttaaaaattattaaaaaattatgt

SEQ ID NO: 152721 - DNA, 523 bp, Cannabis sativa
ttactgatttgactatttattttgttaaatgataaaaatgatattttatttttttaaaaataatataaataggactataaacacaatttttcgattatttttttgataactaactggaagataatttttggcacaaaaagatgtagaagatgtaattagctttgtcataacacatctacataggattattattaaattttattctaataaaaaatcagtttagactactatttagtactattttagaatgtaaagagtccattttgtcattttaccaaatagaggatctgattggtaaattttatgggatattggcggtaaaactacctaaactttatgatttgtaacacttaaccccataaactcatttttttgatggcaaaacctactgaacctcgattctgtttttgtatttacatttccatccaaaaagtttaagttaagtgacacgatgggctacctatgtgtacacaattctacacataataaatttttagtggtccatgtaatattaattattaaa

SEQ ID NO: 152722 - DNA, 627 bp, Cannabis sativa
gggggggggggggtggtttcttgaatgcaatttcaaagtcttctgaatttttgtaaaattctttgaaatgcacaaatctaatgttctttctcgtcttatatttttcgccatttcagctaacaaaatagctagtacttttggatgtctaccaatttggtaatagtactgcatttgacaaaaaaaaaatattgtgataacatactaatagttttcatttattgatttagatatatatttcaaaaactttacccgaattttggttaaaatgagttgttcgtactctccaaccctacaattctattggagacattgtgaaattctaatggcaacgacatccaagctttttttcttctatcttccaagttagccaaaacattcctcccgcggccttttctagattcaccagacgtcttgcaagaggcatgaatactgttaggatctaacaaatcatccccatcgccatctccaccatgataattagcaacatctgctgacattttatgctaaaaagaataacgaaatcatctaagcccttactttaagagaatcaaaacaactaatcaacttagattaaacaataatagtacaattagtcatttctcaaaacaaaataacattagaaaaact

SEQ ID NO: 152723 - DNA, 928 bp, Cannabis sativa
gttatcttttgacaatttttgaatccaccgtgattcactttgatttgagtttaaaattactcttccaattatgacttattttagaagtttagatccactttgatctatttactctttcgcaagataaacccaaaaaagagtaaccctcatagttcactttctcatctcataaaatgagataaaatccactaatggaaaattaattctaaaactctttattctcaaaaaaatgatgaactatttttttcatcatcatcactattgttattatcatataccaataatatatataactctatgcataaaattatgctcattaatatattatgagtgtatgttacatatctcgtataacataataacatatactcatcacaatatatataatctccacataatgtatattatatatgtatcccatacataaatattctcatcatatgttcagcatatatataatatatatataactcatatacatatcaacatgtaacatactcaaatatcatattatatatcactataataatatgacatatataactcatatatatatatatagatatatcaatccatatctcaacataagaaatatgttaatatatattttactagtataaacaataataaattacaaaatatcacaattcttacccttgtatgatcacatgttgatttcttaccttccattgaagcaatataggaaaagaataaacttttaattgttagaaattgttgtgctccaatagaagtatcaaacaacaagattacaactctgtgataaataatacaaaggacaaaatcatggattaaataatgttagaacactaaacaaaatataaacataaaatagagaatataaagacgaagaggagaattacaactcaaaacaataagctacacatgaaacacaatatataaatagcat

SEQ ID NO: 152724 - DNA, 596 bp, Cannabis sativa
aattattcatgtacagagagtgaacaatttttacttactaaaactctgctgaaattcctagagattttcttcttaaagagaaacaaaaggaatatagagattaccactgtaaacacttgtaatactcatacatttgccaaagaaggctaatactattgactcgtggacagatcattaatgtctgaatcacataaaaaaatttgtttatctattatttaatattttgcattcccttaagctcttattaatctgttttctaaaatctcggtaaacaagaaataaatatatttttgatttgatttgtgtttcagctaaaagtataagtcttgaagttaggaaggttgttcaatgtagaattttaagtatcggtccttataaactatgtaagaaaggcttgtatttacttaatgaagttaagggttggtaattgggttggggagttgctggtttcgtttgcattagtttgttgttgttttgtgctgtagcgtgctacttcagcttactttgtatttgctcagttttgaataaaaattcttctcttgttcaaaaaaaataactaataagataaaatgatgtaatatcttaatttaaaaatt

SEQ ID NO: 152725 - DNA, 583 bp, Cannabis sativa
catcaccaagatctaaacctggatgtaacgccttgaccctcagagacgccacgtgtgtgcttttataaactaattattactaatctataaattttggaaaagtgtggtttaattaaaacctttaattaaattcaacataaagactttccattttaaatactgtcgtaatatggggatcccttgctaataaaattcttttataactaattacaaatccattagtacaagaataagttatacatccaatcatagaaaagggttgatcatgcttcatgaaagtcaagacaacacagttgatatgtacactgctgagatacctctgacccatggtcgaacagaactgctaatcttcttacctgcaccatgaagcacccgtgagttacagggacttagcaagaaaagctactagataaagaaaataatgaaaaataatagcaaattatagtaccacagattatacataccaagagatcatgctctttcaacgtctatacgagcaaacttgttacaaaattaagagtattgatagttatacataatcaataacctcagtgtttcgtaaaataccctaatcatatagtat

SEQ ID NO: 152726 - DNA, 817 bp, Cannabis sativa
  modified_base (64)..(66): a, c, t, g, unknown or other
aacagttccttccttggtgtcatgtgaaatgaacacccagagtcaagaatccattcacaaccannntcttgacttgtcacaaccaaagcttctgcagactcgtaaccataaataacaatgcctgcaacacctctttcttgtcccttttctctctctaattttgccttgagtgccctacattcatctctaaaatgtccttccttcttgcagtagtaacactgctttccttgcttggattttgctttggatttgaatcctgaattgtgtcccttgttctggtcgttcttgtgattagttttattgtgtccacccctgaaatctcttgaattgcttctggttttcacaaacagactatctgctatgccatcagtcctttcaatattctttttctggatttccttcgaattgagtgcagccttgacctctgtcatggtcaaggtttctttgccatatagaattgtatccacaaagtgttcataggtctttggtagtgagctgagcaacaagatcccctgatcttcatcttctattttcactccaatgttgctgagatcaaggataattcgattgaactcatcaaagtgttttctgagttctttcgagtcttccatcttgagtgtatcggtttctttttcaggtatagtttgttggcaagtgatttcttcagataaattgaggccagcttcttccataatcccagagctgtttcttcatttgatacttctctgaacacttcatctcccaaacttaacaagattgcactatgagcctttgtttcaatttctttgatcttcttcttgtcatctcccaattcctt

SEQ ID NO: 152727 - DNA, 676 bp, Cannabis sativa
  modified_base (409)..(409): a, c, t, g, unknown or other
atgatgattccgagttacacaacctatgcctaaagacaagactcgaaccagaaaaaactaagaggaaatctatttacaatcctagcaacatagataaaataatgatagatttatataaaaaaaaaaaaaaaattgaatgaataataaagcaacacacatgtaacaatattggatagttgattataggatttatttaatttaaaataaattaattaatttattaatttcaaaaatctttaaattaaaaaatatttaatttcaaaatttagattaaaaatgaatttaaaattaaacctataatttaaaaattatggttctaacaaccctaaatatctttttaaaattatcaactaacttttcaaatttatgttatttataaaataaaaaattaaatatctaataaaataanatgataaataaatatcattttttttaattttttaatttaattttaaataaaaaataacaaacttttgaaagttgataaatatctcgttagtttttttttaagaaaaaaatatctagattactttacttaaaatgtatcatgttttaagctcaatgtcgacgcagctacttttgatcgagattctaagcacggttacgggtgtgtggtgaggaactcgcagggggtcttgatctctgttttcgctggctgctacaatggcaaagttac

SEQ ID NO: 152728 - DNA, 883 bp, Cannabis sativa
ttgaaatggagttttatttagggcctaaaacccaacaattttgatggttgtatttttacttgtattcccataacatgtaattttactgcccataacgtggctaagtgggatttacccacaaccggtttggtttttttgcccaaatcttacctatcggaatacttattttgtaatgaccacgaattttaacttctattaatagacgatctttttttaaaaaacgaagtgaaaattatgacgattataccataaattactctaaatattattgagttatagatagataaaagaaattttaaacaaaataaaaaaaaataataaaaacattaactcactacaagaaaatgttaagaatactgtaaatctgtatataaccctaattaatttatgagaatcaaacaataagattaaggaatagcggaagcgtaccgaagtccatagaatcgattttgaatggtatgatcttccaattttttgcatcaaagttttttctctggaacctgagttttcttgatgatggggattcaagaatacgatatgtgaagcgatgcaaaaaatgggaaccaatacatgtttattaataactgaataaacagtaaattaatcctttttgactatttccaatttggcccctcatcaaattagaaattgtctattggtatccacatattaaaatcatgacaatcatgcccttaagtcataaactttattccaaaatagaccacataaatttgacttatttatttgatgacccaacacaattttatatatataattttgaccccaataaatttctaacaatctcccactgggtcacatatgtatacatataaatgtgttaaccttattgagctcataactttgtcatcataactgtaggcat

SEQ ID NO: 152729 - DNA, 512 bp, Cannabis sativa
gttttagtattttcacttgacattcctacttgctaagtgctaataatttctaaatgtgattttgtgttgaactttacttgatttctatttattgttatttgtagtatccaatatgactatgaacaatcccatggtgtcactgttgactgacaacaagctcaatggagataactttgtcaaatggagagagaatattaatattgctctcattggtgaaaattccctgtttgtgttgactaaagaggctcctgccaggtgagaatgcaaccaaggcagttaaggaaaagttcgagctttggcagaatgccaacaacagagctcgatattttatgctgtcaagtatggtcgacaccttaaaaacaaggtttgcgaatactctcacgactgcagacatcatgaacaagtttactgaactattcgggattgcatcaattcaagctcgctttgaggcgacaaagaatttcatcaatgcacggatgagacctcattagagcgtgcgtgatcaccttctc

SEQ ID NO: 152730 - DNA, 539 bp, Cannabis sativa
  modified_base (103)..(106): a, c, t, g, unknown or other
aacagtatctctgaatgtataattcttagataatatattagggtatagtctcagctaaactttttttcgacctcttggccagtgaacatgcatcactatttannnngctagtaagcttggagaggaagagtttcccctcttgtcacaatgcgtttaaatagaaagatcgtgggattaatgctgaatacaaagattgtggtattaatgttggatacactgatagtgggatcgtgtgtatgccatatccctgtaatctaatccctgagttatagggatttcgttaatgactcacaatgtgaaaattgaattcgcaaagtgtcagtttctctacgcggattgctgattgctttactctgggcatgccagcgaggcatcatgctcggactatgcctcccgagcagatgctccgagtaaattccacgtgtcaccaatcatgcaatgccacgtcatagtgcaaaaattgggataaaatttgccccccaagtctgtacgggacttctgaagttgcgtgtagacttcatccgagctgcttctgcctt

SEQ ID NO: 152731 - DNA, 912 bp, Cannabis sativa
catttttgtatactcccaatcagaagaggagtacgagcatcgtctttgaatgatatttcagcgacgtagggatcataagttgtatgcaaagttcaaaaagtgtgaattctggctgtctgaggtatcttttctgggacatattgtcggaaataatggaattacggttgatctaagcaagattgagtcagtgaagaattggccgaggcaaaaattagtgacagaagtttgaagttttctcaatttagcagggtattattgatgttttgtcaagggattctctaagatctctatgccactgaccgagttaactaagaaaaattagcgattcgtgtggtcagacaaatgtgaatcaagttttcaagagttgaagcaacgtttgataacagctcctgtgttagctttgccatcagatcaagaaaaatttattgtttactgtgatgcgtccagatagagtctgggatgtgttctgacgcaagctgacaaagttatagcttacgcctcccgtcaactgaaggactatgaaaatctctacccaacacatgacctagagcttgttgctatggtttttgctctaaagatatggcgacattatctttatggtgaaaatgtgagatttataatgatcataaaagtctcaagtactttttcactcagaaagatttaaacatgaggcagagaaggtggctagaattggttaaagactatgactatgagattctgtatcatcctgggaaagccaatgttgtggttgccgatgcactgagtagaagaggtctcgggcacgttttcaccactcttttgatagctcctcaactggtttcagagatggtcaatgcgggaattgagttggtagttggaaagttgcacaacttgacactccagtctgatttactagaaagaattagaaaggca

SEQ ID NO: 152732 - DNA, 542 bp, Cannabis sativa
agattgcttctatatctttcaacaacttctttggcaaaatcagaatttgagcccaataagtatggatagccaacagaacagattttcaagggctttccataatgcagcagccgtggcacaacccgatacccctcagttgctataccttccgtcattgagctgtacaaccagcccattagcaactgatcactaactatccaattttcatactctgggttaacagtaagaccaaaaccagtttcgccctcggttgttagagcagtaatgaactcagctggacatggacgagtaccattgacaaaaccatcaagacgatgtcccctaatcatagtggagaccatagttttccaaagaacatagttcttacgatcgagttttaaaggaaagggttggtttagggtattgaatggctgagtgtagtttggctgagtgttgggtatttgggagcttgcagcacctgctgcagctgtggttgttccatggggagtctgagattgagcagacattggcacgggccgaaggtgctctgataccaagttaaa

SEQ ID NO: 152733 - DNA, 610 bp, Cannabis sativa
gttgagtggtccaagatctttgagagaaaagatcttgttcagtttggtgatgaacaagtttagctccctggaattgttccttgtgatgattatatcatcaacatagattaacaacatgataacatattgtggtttcttcagaatgaagaagaatgtgtcagcctttgaattctcgaattgccattgtagcagggtatttttgaatcgatcgaaccaagcccttggggcttgtttaaggccatagattgccttgtttaacttgcacacatgagtaggatgttggggagactcaaaaccaggaggttgcatcatgtagacatcctcctcaagtgtgccattgagaaaggcattgtttatgtcaagttgtctgatttcccagtccttagtaaccgcaagagtaagaacaactctcactgttggggctttgacaaccggggtaaaggtctcactgaaatcaacacctggcctttggtgaaaacctttagcaaccagccttgattttattctttgaagtgacccatcaacatttagtttaatcttgtgaacccatttgcaccccataatattgtagaaaggtgaataaggcactagaacccatgtcttgtttttc

SEQ ID NO: 152734 - DNA, 674 bp, Cannabis sativa
tattcaaaaaatattggtgaagtaaagcctacaacaattttgttacaattggcggatcgatcattcacttatccaaggggaataatagaagatgttctaattaaagtgaataagttagtatttccagatgattttgtggtactagacatggaagaagacaaggatatgtcattgatccttgggcgccctttcttagcaactagtggtgcgcttatagatgttcgaagagaccacttaaccttgagtgctaatgatgaagaaatcaagtttgacatttataagtcttctactcaagccaatactgagaaaacatgcaatacggttgagtcttgtaactccaatgaagataatcgagagactaatcataaagaaaaaacaaagaagccttgagctaaaaagaaaccaaaggatgagttttttatagggcaacaagtgttggtgattcattcaaaattcaaaaccttgacaagtaacgttatctcgagatggaaaaatccttttaaagtcaaagagttacttccttgtggccttgtaagtattaaaagtgagaaatgtgagattctaaaggctcacaagcgaaggcatgcgccgatgatagtggagtgttgactaaacaacttcgtaatgaagaaacttgaagcaacaactgttggaattattttatcaggatctta

SEQ ID NO: 152735 - DNA, 737 bp, Cannabis sativa
cttctttgatagtctgatcgactcgcaagaactttattcatagcttgaaattgcttgtatttgctagaagatccatcgcttgaatcattttctgttccggtcatgctagcaacctcttcaagcattttctcctgatcaaataaaatattagaaacacaataataccaccatgcattcatcttaaaaatattattaaaaaaattgaaacttacatgtagttctctgcatgtctcgctaatccaagtgtcttccgttccttttctaaggtggccttttttccaagtatgaattgcatagtcttcatggatgtcctgttcaaaaatagggttagtttgtgttattagtaaaagaaattgctaatagaaagttaataattttacttacaaattcattacgagacgctgccatcgactttgtgccttgcgtggacaaatacttcatttctcctctatttttcttattttgatttaatcgcgcaataaactttgggctcaaaaatatgtcaatgatttgcttccagctctctgtagtgcagtgatcaggtacagcttcaatgacacttgccaaatcatttggatccccagaataatgttcctgtgtgcctgatattctttctctcaaaatatcttctctttatctcatgataaagagtttgcatcactctttcaggctcaagatggccatcaataccgtacaaatactacaaacaaatagtatttgttaaagaattatgtatt

SEQ ID NO: 152736 - DNA, 599 bp, Cannabis sativa
aaaaagctgtttttgactgtttgccaaacacatttttttcacagcttttccaaaaagcagcttttagctttttcaaaaactgtaccaaacggaccgtaagaaattaaaacgcaactcatatcactagctcaacattactaaaaaataaaaaacaacaaaattactaagaataactagccaaatgtatttggctagtaacaatatactaacacccaaatataaattgttgaaaatcaaaatcaaaaaattatatataaaattaaagttatgagtaaattccctgttattgtaggccctctataaaataacctgtaaaataacaaaaaataaactctattaccacacaatataatgaaaaaagataatgtgaaagaacaatgataaatcaatccatattaaatataaggacataaaaatacttatctgtttaaagtgaaaaggtcgttgaattagaaattatgagtacaaaagaaattattctttttccaattgagcataccacaaaactaccctaaacaaatagggacaagccataagaaatggtacaaaagccataaaaggcacataagaaaaacgtaatgtaaattcatatgaaataa

SEQ ID NO: 152737 - DNA, 550 bp, Cannabis sativa
ttgctcgtggaactttaggctttcgttcttccacggccaggatgacttcttcttgctcatgctgtgctgtcagggcatacctctcctgagctttgcccaaatctctatcaatgtacgggcctccaataattacttgtaagtgtccatctactggtggaggtagaaaatcttgcttgttctgaccttggttggtcttgacatacttctacaagtgaggattgtttttctttattagaaattcaatttcccgcttcagattataacattcgttagtgtcgtggccatagtctccgtggaaccaacaaaacttcgtcatgtcccttttgttggtatgtttcttcatgggcccgggcttcttatacgagatcaacgactgagttgccatatttagactctctatatcttcagtcagaatagtgaatgcagtgtatttggcatgatactccggggtagtctgtccagatttatcggtgaactttcctttcttcccgtttccttgcttgtggttgttgcttgaacgcttgccacttgagcttgaattattggaata

SEQ ID NO: 152738 - DNA, 873 bp, Cannabis sativa
  modified_base (221)..(221): a, c, t, g, unknown or other
atttttgtaattatgacccgagaagggtaaaatgatgaaattaatttattaacgtgcttatgggactatattattatatagcatccaggtgttgtctttttcaggtgtgttttgacaggttggcgcggtatagtcacaaccgggtatttcgggccgaacggggttcgggcccgaaatgtaattgctatttaattattggcattttaattattagtgagaanaatctgaaatttattagagtttaaatgagcatgaaatgacttaaattcccttgtgtgtgtacgcaagctttattaaccctaggggcaaaacggtcttgttggacctttgatttatgtttaataaaatgaattttaagggaaatgaattaaaaatttctgttgtttatccctctcttacccaatccatctccctctctctagccctctttgatttctcttgaaatttgttggttcaattgcttaagattggattgaagtgaagcttggttttggggaaatcattatttttgcctttggtgtaattttgaggtagtttcttcaactttaatctattttattcaagctaaattatcttggataaatatggaataagtgatgttattcttgagcttgcgtgttttgtgaattggggttgattttgataattttaagtgtgagattgctagtcgttgtatggattatgttgttatgtgttaagatgaatttccaaggtatttttctagttgaaaatacatgtttattggtgttcttgttgctgaatatttgagattttgatgttcatggttatggacttgatttctaggttgaattttgctcatgtgaggagcttgatgttggttgttgttttaatcttagtttagatgcatttgag

SEQ ID NO: 152739 - DNA, 545 bp, Cannabis sativa
  modified_base (381)..(382): a, c, t, g, unknown or other
taactataatatacacaatcatgataaaaattaaactaaaaaattctcatgtatgccaaaatagataaggggtctaccgaaatattttttcggggtaaattataaatacctaattttataaatgacaaaattatttcaaaattattacaccactaacttaattaaataatattgtaagagattttagctttacaagaattattatgaaattttttgaatctttttaataggggtgtgtttacggattgattttgtctgattttggaaattttcgaaccaaatgagtattaaggtttattaaaaatttaaaaccaaaccaatccacccaaacacaaatttatttgattcaaaattatggtttgtatttcatagttgttctannttttttgtacaaaattgtttattttttttggtatttctttttatttttatactgcataagtgtgtttggaaagccacaatgtaattggatttgtgtgtaattagaggtaattacacaatttgacatgtttgtctgaccatgtaattacactgttactgtgtaa

SEQ ID NO: 152740 - DNA, 813 bp, Cannabis sativa
tagaattaccttcgaaatctaccacaacaggaggagaccatcgtgatagaaccatcctccaagctttctcctcttgagactagatgaaagacctcattctaactttcaaataaggataattagaatcattgtgcaatggtggtcgagaaatggaactttcttctgcaaaaatgacatattgcacaaaaacaaacaaaaatgtgacaagacaacactaagagtttagtgtccctctttgatccaattgaaaaactgagtttttgctaatgtacatattttaattacagaaaaatagtaaaaatttaactgtaacagtctgcagtagcagaatgtaatagtgttactacagagtacagttttgcataaataaacttgaaccagagcaataaattaagtagaaataaaaataacagcagaaaataaaattacttgacacaagagatttgtacgtggtatctgtgttctttcggacactcctagtccacatggccatgcccagagaaagaaatcaattagtaaagtttcaaaaaattacaaagacaattgacttataaaagtttaaactccctctaaatctttgccgcaatcctttgtaacacacttcacgaatctgatttctgaaccaccatcaaacagggtcccttcatctttgaggtgtgagtacttacttcctcccgaagtaaggcttgaacaagtcttttcccgaagatctttctctcgttcaatcaagttgttcaaaccgaccctaatacatgtataagaacaaatatacaaatactaaaatctagatgaacaactaagttttcacaaaaa

SEQ ID NO: 152741 - DNA, 714 bp, Cannabis sativa
tcgaatactcgcatttgtcatctctcaaataattctctctttttccagttaaattgtactttttggtgttgcgaaatatcagtaacaacacatattaaatataaggactttaaaagacttgaaatacttatctattaaaactgaaaaaagtcgttgaagtagaaattatgagcccaaaatggattacttctctagtctattgaccataccacaaaactatcctaaacaaataaggagaagccatacaaaatggcacaaataccataaaaggcacaaaagatcataaaaaaaagtgcaaaaaaaacaattaaggtcttattagcatatatactttagacatataataatactatttgaatagctagaataagaaataaatcaaacattcatatataaataaatacgtatataaataataaatacgaataataaaaatattaaaaaatattttatcatatttgtataataaaagttaaaaattaaaattaaaaatagtgagtataattaaaaatcgttattaattaagaaataaattaattaaattaaaagtaaataataaaacgaataatataaaagtgtgaaagatttatgccaaaagtaaataaaattataataaatgcacttgacactaagggggcgtttggtatgaggtgttcaaaataatttgattataggaaatattatgaaggagaatatgattatagagaaatgtgt

SEQ ID NO: 152742 - DNA, 903 bp, Cannabis sativa
ttttgtataacgaggtgattcatcaattttgtgtattacgagcagctataagatctttgttgcgagatattgaatatttatggaaataacattcgacagtgctgaaatacctcacttcatgaaccttgcgattcttatttagatgagatcacctcataggttgagtcttgagtttttttgacctgtcccacaatgtatttattgtgagaatttattatttatgacacatggcattcaattcgattttttcattaaatagtcccaaaaaatgggtataacaaattccccataagtcaattttttgtggtttacacaaagctgacttattatacgttgtcttcccattctttttggcaccactccaagcagctcgtttgtgtttctcatgatccctacatggcgaagtaggtgctacgacctagagcatgtgagtatgtattacaaccagatgcatgagagtgtatactacaaccaaatgtatgagagtgtgtactgcgaccagatgcatatgagtgtgtacagcgaccggatgcataggagtgtgtactacgaccatatgcatgggagtgtgtactacgaccagatgcattcgaagtatgtactacgaccaaaagcgtggggagtatgcagtacaaccagatgcatggggagtatgtactgcgactagatgcatgagagtatgtactacgaccagatgcatgagagtatgcacttcgaccagatgcattgggagtatgtacacaaagctaacttatcaaagctcaacttcatcatgatatggcttttccatatctataataaaattcaaaattatcttatttttgtggttgcgaccagcttagaagttttcttctttaatccatgtctataataaaatttaaagttatcttctttttctaattg

SEQ ID NO: 152743 - DNA, 552 bp, Cannabis sativa
ttgactatataatctccaccaatattctttctttcacatctttccattatttgttgttctaaagtttgtaaaacttgagtgtttgatgtaaaaataatgtggtacggtggacactttattttttattgtcaatatattacaagcaatttatatataactttttggaaatttggttgaaaaattatttatcttttaatgattattttatcaccaagtttcatatgttgtagaaaatatttattttggttgactatatgtgtaattacttacccaaaggtagtagttatatatattagttcacattccatgaagtgagttaatattaaatgtgtatattttaattatttgtccaaaggtaataatttcaatatatatttattattattttttgcttaaattaatatatattatttaagaaatttatttgcccaaaagtaataaattcttacttgatatgtatttttttttttattgttaacttcatgaaggtagatcatgtgtgttatattctcaccctaaaggggagtttataatgaccagttgactctacaa

SEQ ID NO: 152744 - DNA, 1451 bp, Cannabis sativa
ttttttttttttttgtaataatgaagtagaaaggataaaatgacatcgtcatggctagaagataaattctatatgcgaccaaggcactcccaagtgtcaatggtcacataggcacaacgcaaaacgggtgttgtgcgagtagggcaagagatttggccaattcttatacgatatttgaaggaagctaagtcaactatgcaaccaaggcctaaccgttagtcattggtagcatattccaagagaaaacaaagccacatgtgatcatgactctttctaaaaacaatggttgcatatgataagagaaatagagatatcatgcaactaatgactcctccaaatggttgcataagacataagagaagccccttggaagatgtttttttttttttgggagggggaagtaagtttgtgtgagcactcactaatagtagtgtcaatgatcgtgtgattcaactaagggaggtctcctttgtcattttggaagcttaaaactctaaaagtgtaaggcaacttccaagacattccaaaggcaactctaaggggaagtgcaagatgtagtacatgaccagtggcacgttctagtgtcagtggtcgcatattatgttgtttccacataattggatttcattcagcatgttcctagagattgaagcatctaaaagactttcaaaggaataaccaactccaaaagtcaagaaggatgtttatttttatgtaatgtatttattttcattgaattgtaaatgttcagtcgtaaggaatatctataactattctttcaacatttagaggagtgactagtctaattttaagcatataaaaagttataatctagatctaaataggggatgaatcaatctttttcacatccaccattttgatatcagatcccatcctcttgagaatcgatctatctcttagtcttctgagaaaccctagccatcactcagtttgaacatttcagttgtacagtcgactatctcttgagagcacatacaaagagagaaacctaaagagatctccataaagaggtttcaccgttacaatcactcaaataaattctttaagaacataatcctagtttgtttcagcatcgatataataacaagtggacttaccatggacttaccattactatcaaatcaaggggtgaactataaaaactatgcatgtgatcctttaatttagttaaaccgatatgcaattattagaatatttctaattaaggaataaaataaagaattgattttgtgataaatgaatattttatattggacaaaattaattacgtaatattgtatatatggtcagatttcagtattcattaccttatttgatttcctaaattaattgtcaaaatattctgacaatataatgtgtcgcatatactgatggagtatctcacctataaatatagggtctcggtccccgagctcctcactcatttttga

SEQ ID NO: 152745 - DNA, 551 bp, Cannabis sativa
cctccacatgtctatatttatgataagttaacggaagtggtagtaacggtgtaagagaattgtaacattaggtatttttgcctctaaaaataaacattaagtacttaagtgtataaaatctgtaacattaagtatttatgccgcaattcactctttttttaattatctctttgccacttattaatagtattcattgactttgaataagatatatttataaagtattaaaataatataaatgaaattaattattttgaatatattgaatgagcattaatggtaatattgacttttatagttaatttgtactttgtgcattggagcacaaatacaaaaaaattagctaaatataattttatgatatatttttagccaaatttaatccaaaatatataccattcattgaaaatggtctaagaaaaacaaaaaattagctgtagaaacatattttgatgagtgaataaggatagattcttactatataaaaagatatgaagacttgtatatattaatttttctcagctacaaaaaggaaagttgagctaacctag

SEQ ID NO: 152746 - DNA, 681 bp, Cannabis sativa
aattttcttttcgttctgaaaataatttattggattccttgtgaaaaattaagcaattttggtttttacggaactcgatttcgataaaaattgacaaagctatgaaggttttaaatttgggtgcacaaggttcaatcgcaagcaccaggtgcactcggacaaggtgactgatgtgcgcgcgtgtctgaacgcacgcagatgccgcacatgcttggtcacgcatgcctcctgcgcgtgcagatgaggctgcatgcaatctcctcgtgggcagcagcacctatttccgatttttgtgggatttttttattttttttttgaattttccaaatttcaaacccaaaaattgaaaataaaatattatttttaatatattttaacttaaatctcaattttaaattaataatatttaatttttaatagattagtattaatttttgaaattttgaggtttaaatttaaaaattgatttttttttaaaaattattgtcagattttaaaaatttgttaatttgttaatatttatatattatttaattttaagattagatattttaatattggctatatttttcattaaaagatacccttgtcttttaatttaaaatattatattaaaattatcttattagatgaattaaataattaagaagttttaaattaacctagatatttttatagata

SEQ ID NO: 152747 - DNA, 785 bp, Cannabis sativa
gaagatgatattagggtcaatccctatcatatctccatggctccaggcgaactgatccgggttcgcccttaaaaaacttagtagctgctatttcaattattcgtccaggttcttcccaatgtaaacacactttgtgggatttcttgggtccagaacaacttcttccaattcttcaattggttttaataagtttctttcatcatgaatccgaggatcaagatcttaatccttcttctcgccttcttctgtcaagactgccattagctggtgaccggcttttctgtgatgtagctctatgcgatagcattcacgagctagcatctgatcaccttgcactactcccacacccactagtgtctgaaacttcaaggataagtacttgattgaactaactacacctagtcttattaatcctagacgacccaacagtatattgtaagccgatggcaggttgctaaccaaaaagtgttgcataattgtggtggacaaaggtgcttcgcccaaggtcaatgcaagctcaattattccttgactagcaacactatcgccactaaatccgaaaagatttaccatgtaaggtatcaatttagctttttcgagccccatcttcttcagagtttccatgtaaaggaagtttactgaactcccgttgtctaccaacaccctttatatcctcttattggggatatgaacggtgatcaccaatggatcgacgtgagggtacctcatgttcttttcatcttcctccaaaaatataataggaggctctttagtttttattttct

SEQ ID NO: 152748 - DNA, 639 bp, Cannabis sativa
gatgaatgtcttttaacacttatctaatcaaaagtgtcaacaagtcaagtactattattttcaaataatttattaattgttatgttttctttttctataaagaaagttccatactttaatattaaaaaagaagaaaagtgtgatttatgtctcacacccacattcaaccgtttattacatcttttattctaacctaaacatgtgtgactgtgtttttaattttaattttttttaatatataaaaggcttaagtggtctcatctttgtttgattttaagattagattcactttataattatttaataatatttaataaaatacacttaaaaataaatcttcagacactaattaacctatattctattggaatgattgtcgtttaatatatttatatgtacatgatgtttacagagatgatcagacatttttgaacagtgctctaaatataagttcagctttttgacacggtacgagtctatgaggtgcaagcacaactaaatacgaaaaaaatatagggtttaagcacagcgcgacataacgctataaattagcacgacacgaataatatgtacttgagtatgacacgagacgaaaaatatgtggttaagcacgacacgacatgacaagcccaaaagaca

SEQ ID NO: 152749 - DNA, 545 bp, Cannabis sativa
aaatgcatattacattggaaaacaaatgtatatatttatattctatatacaacaatatataaattaataagattcaaattaacaataaattattctagcagatttggtaagttgtcctaagtgacatgagttaaatcattgtaaccttcatttgatgattttatgccacttaattttcttctattttattttatttcatttttttaagatttttatctccactttatcattcgagtgttcatccaatctatttcgcactgagtgcagatttcatatttttggattcaatgtataagaaatattattgatgtcttatcacacgtcttattttagtctatacaacaattaaatctataagaattgtcccataataacaagtttaattaatatactatttatgaaaataaccagcaagtaggaaacataataacagttctagtttctagtcattactttttctggttgtcccatgtggatcaaaccaagtaccacaagcttggttactcctagttatcacaagtttggttactcctagttgctaatat

SEQ ID NO: 152750 - DNA, 657 bp, Cannabis sativa
  modified_base (323)..(326): a, c, t, g, unknown or other
ggtcctagtcctagttcggtttgggtcagggtgcgggacccggtctgggtccacgtcctggtcttggtttaggtcccagttttttggtctaggtctgggtcagggtccaggacccagtctgggtccaggtcctggtcttggtttaggtcccaagtcacaatattggttctggtctgaattcgagtttaggtccgagtcttgatctagcgtcgggtcccgtgtctcgagtctagggttcagtttttgatctcggtcccagttctaggcccaattttttgtcaaaggggcccccatctaggtcccgatccttggtccaggtcttnnnnaaggttcaggtttggggcccaagtcccctatctaggtccggatcctaggttccgacctaggtccatgttcaggttcggttttggatcccgagtttgggtctaagtctaggtcccagtacgtgttcaggtttcagtttgggccaaggtcccggtctgagtccaagtccctgttcgggtcagggtcggggtcccgatctgtgtcccagtcaaggtctaggtgtcggacaacattgtggtctgggtttgggtctgggttcaggtcttgagtttgtgtctaggttcaggactagatctgggtctgggtctgggtcttgggttccgatctcggtat

SEQ ID NO: 152751 - DNA, 685 bp, Cannabis sativa
tataagtgttagacactagtagtacctaatagcaatgctcatgaattaatgccccaaattttccatttaaataaaagtaaccttgtaaagtgaagatttaaaagcagtagtagtggtcaccatctattcaaagaaatgttaaacgaacttatactaactaatatttttgtgagatataatattattattagtataatttaatatcggatcctatttattttacttttaataaagattataaaacctaactgttgaccgaggttttcggcaaccaattaaatagtagaatgagaaaagttgtaggaaagtttaatgcaggtgatttttacgtggttgaggcattaatgagccttagtccacatatctttgttattaatgagagtatttttacaaagaatgttcttggtgaatctctctcttctttactcctttcgattccttaattaatcaatccgccccttttccattatgtctatggggtatttatagtgtttttcggggggatccctagagaaagatcacttgtctttttatgttagcctcttaggggcataaatttctagcagatacaaaataggaaatacatgacctataccgtaggtatcttaggggttaggtggatataatcttttatcctctcttgtttgatgtgattgctcataatgtagccgtcactagactcgtc

SEQ ID NO: 152752 - DNA, 612 bp, Cannabis sativa
taagtatatcgggtctcagaactaccgtgacgactgcctcgcccctggttcccctggaacctcttgttctgtcccgagttaccggttgcagtggatgccttccttttctcatccatgctgaaccactacctcccctgcaaaagcctgatgcaagaggggtaggagccccgccaaccactgaagtcttagcagactcagtcatgcacccaactgcgccctcagctcgcagtgtcttttccaccatttcagcataggtggtcttgtcatcggtagtaatcattaggtcatgtctaatcttcacattcaatccatccagatacttttcctttttactaaaatgggttggcacaatacccgaggccaacctcgccaactgatcaaactgcgttgtgtactcagtaacgctcatattttctttctgggtcaggtgggtaaattcttttctcttggaacttctgacggcctcattgtagtacttggcattgaaaagtttctcgaacttttcccacgtcatcattgtgacattgtgtatcatggacaccatgtcccaccacactaacgcatcttcttggaactgaaaagtggcacagaccaccctatcattcccggtga

SEQ ID NO: 152753 - DNA, 902 bp, Cannabis sativa
  modified_base (568)..(572): a, c, t, g, unknown or other
ccaaatctaaaattatcaccactttaatcacttttagcttcttatttttagtttatttagtttaaaatattatttctcaagtttagaattaaggttaagaatttttctgttgaattaatttgttactttgtgttatttttatttaaaattcttggaattggtcttagttgattttgcattatttagtaaaaagtccatgtggagacgaactttgattacttgtcatggtattacttgtttgtgattgtgtacacgtgcgcaattataaatcaatataattttcaatcactgccctcccctcactcttgctcttagggatagagcttgaaagcttgctcgacggcggggggaagactggaacatcatccggttgacatccgaggataattttgtgaagtaccagctctacccaaaggatttcattcctaagccagtgagggagaggaagaggaaatctggtgctggacgggctgaacgagctcatcaggagaatgaactcattcaactcaagcgcgaagctaagttgaagggaggtgcaagggcaaagcagtatgctcaggagcccttnnnnnctgaagatgaagctgaggaagagtgactccgctcaaaaggaggaaaaagcttctggcccagcccaggccaatcgaacatgaaattcgcatcagggagcccatttctcctgctcgaccaactcctcccgtactcgaaaaagggaaagccatcatgtccgaaataagaggcatgtcaggtgatgatggacttttgaggcttgttcagacaatcactttgcacactactgcatcttgtttttaagcttcttgattattatgcctcatgtttctgatgtttgttttctctaaccatgttactttttgttccatgcagacatgtctcagaagatg

SEQ ID NO: 152754 - DNA, 524 bp, Cannabis sativa
atatattgtagtaataaaattatatattacaaaaaaaattaatatattaatacttaaaaggtatatataatactaacaaaattatatataacacattaaaatatttacaataaaaaatatatgcccataacaattgaaaataaaataatgttatgaaatattagttatgaatgttcaaatcattaaattaattatcactattaatgcttggttgtatttttctttattatatattgatttagttttcaattcttttaatatatttttgtataaataggggtttacccaatcgaaataaacaactaagaaattctcattcagcttctctttctctcgtcatcatcttcttcttgtcttcttaaatattttatattattttataacacgttatcagcacgaatctttgcctaaaccccaaagtaaatattttttttaagtttttgaattatttcaaagtcacgatacataatatatatatatactcatttgattgaaacaatgttaagattttttttttttttttt

SEQ ID NO: 152755 - DNA, 591 bp, Cannabis sativa
gaaattggcgtcaaataaataaatcatgaaaaacaacagtaaaacaacactaaaacaaataaaaaaaatgattaaaaaattaactatcttctgcacattatcaatatcggatgcactatatttgcaagattattctgaaaaattagaacaaaaaaaaaaaaaaaaccacactaactcttatattttccaaaaacgtgactaagaacttcaaaaaaaaaaataaacgaaaaatgaaaagaagatgaagaagaagaactgaagaagaaaaaaaagaaaaaaatttatatgttaatggagaaaaatagagagaacttggggaagtagaaagtgaaaaaaaaaataagaagatgatgaataggaagagagaataatgggaaagtgagattaaatgaaagaaatgggtattaaatatttagggtatcatatttttatcatcaattttaattaaaaaaaaatatgtcactaaaggggcaacacaagtcatatcacacttttatattatttaaaatataatataattttaattaaaagaaaataaaaaaaaaaatctaccactcccacacgttttttgtttttgcttttttttttttt

SEQ ID NO: 152756 - DNA, 570 bp, Cannabis sativa
attctgatcggccttgacatacttttgcacgtgcggattatttttccttataaggaattcgatctccttcttcagattgttgcattaattggtgtcatgcccgtaatcccgatgaaaacgacaaaattttgtcatatctctcttgctgacatattttgtcatgggtgtgggcttcttatacggggataatgactgagtagcaatatacacactttctatatcttccatcacgacggtaaatgcagtatacttggcaggattctcccggggagcttgttcggtcttgctagtgaactttccctttcccattcctttgcctattattgttgttggatcgttaccacccgagcttaaatttcttgggtaatgggggagttggacggatgtcccaatagaaggagcttttgactggctaggtttttgttcaccctctgctcgctgaatggcttcttcaagcttgataaaaccttttgcgcggtcaagaaaatcactcatcaaggctactggtccgttcttccttatgtccttgcaaagtttgccaaggagttcaatgccccccagtatcgcgga

SEQ ID NO: 152757 - DNA, 550 bp, Cannabis sativa
aaaatatcttatttaactaagtatctttttcacaaaatttgaaaaaatatctaattaagttgtattagaaaaaatctagaacttaaacaggggcggatgtatttgaccatgtaaagaggccatggccactccaagaatttacatattctattttctatatataatttttttttaattaatatgtattcactatattggttggtggcccccttaagtcaagggtcaaatattttttatttttaaaggaaaagatagcaaaaatataccaacacgtcaatgccatcaattactatatatgtatatatatattctttaaaatcaattacttctttcctttttttttttaaagtaattatttttttcattaatagcaattagcaagacatttttttaagtttattttgtaacaataaataaaaagtggaaactaaaatgtttataagaccttcaaaatagataattaggtattattattctcttcttcctttctcatagataattaggtattatcattctcttcttcttctctcattctatacctattacatga

SEQ ID NO: 152758 - DNA, 543 bp, Cannabis sativa
gttcttcttctttgtagacttgaacacagactcaagacaatacaaaatacaaatacacagagtaagagtcgaacaactgttctctacaaaataaagacactcttctctacaaaatatttttgtcaattaaatatgtcaaaaatggaattaacaaactgtaatcggacattttcaaaaatttcaaacattcaaaaaataagaagaaaaaaatgtacacaaaacaatacaaaacaaataaaatatgacattaataatacaaaattatccaccccaccgatcgtagtacaattaatcacagaacctacttcactacaaatcaatgtcaaaaatattcaaacttcactgaataaaaaaatttaaagttttagggattatacttttctccaataaaactagctacttttccgcttttaaatcaacacagagaacccgatacctaaaaaataataaaaacattaatattgattaaattttaaattttacaactactatcaacttgtgtatatatatatatatatgagttgttggattatattttaccag

SEQ ID NO: 152759 - DNA, 626 bp, Cannabis sativa
atgcaccatgctagaaagagacagaggtctaacgtatgctactagtttggtggcttgtctcaagggcctgccaacatgcgtggaggcatggtgcatgaggattggaccatggacatataggagtccttaggcgatgagaaagattgttcaaacaatatcgaatgtggcatgattagaagcgttggcatgtcagcttagtattggcatcttgccacacatgctaccttgatcacgagtgactaggtgagcgacggtgttagaatttttcttatcatagtgagaacctatggacagtgtgagtattttagctagagtttctcgatgcatgggtgcactcatggatgcttgtgaccatgactcatcgggagttgttcgagaggcgaaagtgtgcacgaggcagacggtcacgcgaaaaatgagctcattgttactcggatggttggaaggttgaccttggctaagataagtcaaggtattgcacgggtgttccgctgcgtaaaaagttgagcctgtaacagtttatatcaaagttatgttcatctcaatgggaggtgaacctggttagcttgtcctagaggggatgaaggcgtgtggaaggactaagatggtctgaatgctggaacaag

SEQ ID NO: 152760 - DNA, 525 bp, Cannabis sativa
aatttgaagtcgataacttcagaattataattgaagtgtgagacatgacttgatagatcattgaaatagattcaaaatacaagttgaattaggttaatcagatcaatattgagtgagttatgaccattttactaaaggcttttctgggcatagtgcccaagttgacatgtgatgtaaacctggatgttggtgagtggaaaaacgtgtcagggatgtattttttgatgcctatgtgatattttgacatcaagtgttctgacgaagctggtcactagttctcagagatgttgttgttctgcagaaatgggagactgaaactattcgattttcgagtaaatcaccttgtcgaaaaagtaaaaatatgaagttgtgaatttgactattttgacttcacaactttcaattattataaaaatctagatgaacggtcgaggcagaaatcagaattggataagcagaacccagcacaccaggccattttatcaatgtgttgggtgcttattttggagcttttaggatgtcatt

SEQ ID NO: 152761 - DNA, 691 bp, Cannabis sativa
tatgtttatagcatgcacagtggcatgcttcggggaaaataacctcgacagcatgttcaatgctttaatgcctattcgatacaaacactaagtttttagcctcccaaatcacttcccttaacttttgcaagacatacttccaagagtcatgattctcactgtcaacaattgcaaaggcaatcggaaacaattggttgtttgcatcgtatgctacaacaactaacattgtgcctccttaccctgtcttcaagaacgtgccatcaatactaattacatgacggaaaaacttaaatcccctcctacaagcatcctgtgaccagaaataatacttgaacctgttgtcctctatgacaatgtatgtaatagtacccagattcttctgttccagcatgtacaagtaaccaggtaactaactataagcttctctggcgtatccctcgcatacataagtgcgttctcccggcacctccaagccttctcataactcatcttgatgccatagtcctaaaacatatccctctgtatgtcttttgccttgtacttagttccatctgatctgaacttattcttaataaggtggacaacaacccacggtgctgtttaatggttatcagcatgtctagaatccaggctacatgtgtgtttgttgtggaatacagtgacctcaaacatgtcacaacgtgccttcttc

SEQ ID NO: 152762 - DNA, 524 bp, Cannabis sativa
ttttattttgattttttttttcttcgtgatcatgaacatattgacaatatttaggataacatatatacttttaaataattttgaatagtttatagtatcgacaataaggtttaaacagttaccatgcactgagaataaataattacaggtgcaacaaaatatttgaactttatttttgtcattgtatattattttaattaatatttcttcactttgttttgtcttgtatttgttttaagtaataaaatatatgtaaagatataatatttaaataatatagagaaaaatataaagaattgttacacaatataatgtaaatacgtgaggtaaaatgaaaaaaaataaaattttaggtggcctttattaggaaataaatttatgttagattaaaagactccaaaataccaaaataaataagaaatatacagaaacacttttttttccctaaaagttatttttttaaaaaaaattatttatatacatataaataatagatatacatatatatacatacattctagtaa

SEQ ID NO: 152763 - DNA, 721 bp, Cannabis sativa
tcattctctaaatcttgtactttctgatatggctaattgttgctctaaggctgtgtctttctttggtgtgctagaacgtatatactcattgttttcagcttctacaaaaagatgaaaggtttgttacagatcttgtgctaggtctcactattaagccattgtcagagacgcgttgggagagtcgtgttgaaagtgttaaaacaatactgtttcaagctcctcaaataataactgctttactttacttggcaaatagtaatgaagatgccaaaacaaaaaatgatgctgagactttagcaacatataatattcaaaattttgaaattttactaagcttggtcatttggtatgatctactatctgctgtgaataaggttagtatcgttcttcaaagtgaagatatgaaatttatgtagttattagacagttgaaaactctccttttgtttctacaaaaatatagagaaattgggtatgaaaaggctatggttgcagctacaaagatagcaagtgaaatgaaaattgaacctgtgtttattgaaaaacgaacatgtcacaaaaagaaacaatttgatgagagtacttgcaatgcagtcgtacaatcacctgtggattatttcaaaattaactattttctctacatagttgatcaagctatttcttcatttgaatccaagtttgactaaatatatactcatatgaaatgatctattatatgtata

SEQ ID NO: 152764 - DNA, 781 bp, Cannabis sativa
aggctaaggagcttccgatcaatcaaaaccaaggaaatgttgttgatcgttacgggcgatcctcataaaagattttgagggtacgttccatcccttgtgaatggtggtttgaactggatcatgcatattattattattattattttattgatcttttatctctgtctccacaggaatggacatagattttacgagcgatcttagaggtcctcctcaggcggacaaggaatccaggaagaaggtagtcctggttggcatggtctcggattctactaaagaactcaaccaacccaagacccaagcttacacaagaagaccttcatgccaacctttctttggtatcatgaaagtagctgaggctgggaatgaggtctcagctgcaggaaatgggatcttttgatgtggagaatgaggtctatgcagaggtagagaccttctacgtgtagatggtctttctcgagctatgtgtagacggtctttctccaagctatgtgcagacggtctttttttttttttgatgaatcaagtagttgtattgctcataaatctcatttgtacaaacaaaatagcatcctcatagaaataaggacctatatgaatcatatataatctctctttgtttatcaatgctagttactctatctttacaatttgtaaaaccaatcttgatcctttttcttgatatccttcggccaaagcaccaaaatacgggcccttactatctcttttgtgtgctgaataatctggtttgtatttactgtcttcatgtcccatatgtgtt

SEQ ID NO: 152765 - DNA, 961 bp, Cannabis sativa
gttagtagacttttttttattagataaaacttaaagctcacaaaatagtaaaaatactatgaaaaaagtatgagatgtcacatcatcacttttaaactctctttcatataaatatattagggaatagatccgcgcttcccgcggttttaataatttttttttaaaattatatatttttaaatttatttcttaattatgaacaaaattaaatctaatacttttcaaactttttttaattatttacataatatgtatatacatacactaattaatgtatatagaaactaattatgaaataaaaaaattataagtaattaagaaaaattatcaaatgtataaaaaaatataaaattaatttttagatatctattaaatttaatcacttaattgagcaagatttaagtattcaattacttatataaaataaaagaaaaatactatttggaaaaattaaagtgatcaataaagaaatgatttacttataaccctaacataatttgtaaatatgtgagatttttacttaaacaaattactaagaaaatatattattcgatgtatacaaaattataaaaaaaaaatacaaactcactaaaagtattaaaattaaaaaaataccacaaaataaaaaaataagatgtcaccttattaattaatttgtattttttaaaaaatcaaactgcacgtgcgtttagaattttatttattttttttttttagaaataggaaaaaaaatagggttgagatgcaaaattactctaaatttagaaattaagtttgtaaatgtcctttttttaaaaaaaaaaaaaattaagaaaatggccaaacctaataaattagcttataaaaattataaaaatacatttatgacatatttttttttagaaaaatatatattataataaaattaagttgtataatttttttagtattacatattattatattgtaacaaaaataaata

SEQ ID NO: 152766 - DNA, 542 bp, Cannabis sativa
aaaaaaaaaaaaaaaaacgaacaataaagcttttttcataaacaacataataaagcttttttcataaacaacataacatcaatcattcataaccaaaatcgtttcttaaactaccgacaagatctgtataatcgttttactgtgattatacataagattaaagtcactaattgaaactattcacactaacaaaaactccattaaaaaacaaaaaagcttcaattaccgtcgtcacaagatcgattatgagttcagtatcgaaatggttcctcaaactaccaaaaatacctaaaaattagagacaaaattgttgctagatgaaggaacaactcaatcgacactttaaaaaaattgatccaaaaattactctgttttgctgtgtgatttttattattttttatttttcctgcatttcaaaagtaactttttggttacttatgatattgataataaaccaatagctaattatgatttttttctcccgaactttaacatgtaccaaatcatgccccctgaacattttttgccgttaaaaattcccc

SEQ ID NO: 152767 - DNA, 599 bp, Cannabis sativa
  modified_base (47)..(80): a, c, t, g, unknown or other
  modified_base (201)..(209): a, c, t, g, unknown or other
tacatcgagtagggacaaatttccgttctacccttcaatgtattttnnnnnnnnnnnnnnnnnnnnnnnnnnnnnnnnnnttcagtaaactaatataattacaaaaatcagcgctttataatatattgcattaagcaaagcttgaaagaaatcattgtttcacttctaatggttatagaggctatagattccatatctatnnnnnnnnntcccactcaattacactatcatgttcctaagatataagtattgggccaatcaatttggtcagctttaataaacaagttaaagaacacaaataatatatttaagccagaacctaaccatctcaaaattaagaactattgacctaagatcaactaattgatattgacttagaaagatataatggtaagtttatgatatcttttccgctatcaatatcgatatagtccaatatataccccatacatctaatactagtatactttgctaatgtcctggaaaggacattccacatatcattttgtgagtaaacttttttgttgattattatgtcagtgtaaatctaaagcactgataaatcatgagactaaagactttgaagcatataatcacaa

SEQ ID NO: 152768 - DNA, 676 bp, Cannabis sativa
  modified_base (27)..(41): a, c, t, g, unknown or other
ataaatttaccattacacccttcaatnnnnnnnnnnnnnnnaacacttagctacatgtaaatgatattttagtgaactaatataatcactgaaatatatgttcagtttcccttcgttgttctattgttattttttagttgttctggttctttttatttttgatgtcttctcctacatgttctgttgttgtgctttaactccccacatttgttgtattttttatgttgtttctctttccagccagcttccatcctcttctttttttttagtctttcagatttcaccctttcaatgggaggcaagactattacgtctttcacattttgtggcactgttgggctaattttagtctaagttttgggatatattttcgggtagttctcactctttgtttctagttttagggctattttatgcttgattctttctgttttaggtcctcagatgtttaaagaaagcatttacaagagttgaggataagtggtgaaagaattgagaagaaaaaaaaaacaagacactttgctgcctagtccccccgcgatggggaaaaaccttcgccgcaaaggggattggcagagagttttggaaattgcggaaaataaccgtcactacgacgggcaattccttcgccgcggtgaagcttcagtgatgtgatttttggataattttgtaattt

SEQ ID NO: 152769 - DNA, 509 bp, Cannabis sativa
acaacctttcacctgtctctcgcgtatagtttccctcgtgaccgcatttgtcagatcgcaaaactaggggcatatgttatagtgagatttctctcacctagaaactcaagaccatactcttatttggaggacacgtgtatccagttttccaagaaaagcagagatgtccatgagagattcctctggtttaaatctcgcttgaactaggatcagcgagataattcgaatatgaccaaagtctaatcgcattcgtgtcactcgtgttatgtaggaccaaacaacggatttaattcgcatgtatcaggatatgtgcgagtatcctctctactctcctgcgagaatgtagatatcgactctctatgatgtgagctggtcccggtgacccagagccttgatgaaccaacatagacccgtgcgtctaggttctatcagctcattatatgatggccgtggatgcggttatctaaggacgcagacatcttaggcttaactaaatattaagtatatcc

SEQ ID NO: 152770 - DNA, 547 bp, Cannabis sativa
ttgtaatttttatttttataactttataactaataactaatacttttatacttttagctttagccacagtagccacagattttttagtcacaacataaaaataatttttattataattagtcataattcttttacttttagttacaaattttgttgtgaagaaaagtaaaattttttgtagtgattataatttaaatttaaactcactatacatatatctcttatttattatcttatttaaatatgtctttatacataattttttttaatattacaatttaaatttaaacttattgcatatattttaaaaaatatatttctattatcattttttattaaaaaaatatatttctattattattatttaagaaaaatagaaaaagtgtatcatatttcaaaaacaataaaaaatattatagtaattaaactaaaattataattaacaacgaattttaatatgttttatttttataaataacacttaaattaaatatttttaataataaataattggctaattaggatattttctcccgaactttgacat

SEQ ID NO: 152771 - DNA, 569 bp, Cannabis sativa
gttattcttatttataactggcccaaattgggacttaattttttttataacaaattagaagttattcttaaatagagtattcttaaatgaaaaatgctaaaaaacaccaatggtgtctagcaccctcctacgtgtcaatatcgatattggtccaactaagtaccgggtcccatataatttaatataatagcttttaagaagtatcgctagccaatcgcaacgcaacatatcgagaaggtgctagacaccactagtacctaatagcaatgctcttcttaaatatgtatgaaaatatttatcacgcaattcaaagcgcgtgatgttactgccctttaatagtgacattttttttttctgggatttttaaataatggcattaattgaaataaactgtagtaatatagagtgtgaggctctgaaaaaactttccagacttcctctcgactctctcagtatgaacagagactcttcttcttcccatgcgtgttcacacccaatctatgccagtttccacacggtgaaacccatgccaagctccagatcgctcgatcatggtggctccgattctt

SEQ ID NO: 152772 - DNA, 577 bp, Cannabis sativa
aaaatttgattttttttgtgtaaaaaactgacccaagccgaccgttgctcacccctagttcacaagatctttaatgttcaacctaattggttttgacccaaagcatgaaattcctgaaacttctcaaatgtttcagatttcttttgcattaggtaaagaaaactatatctagagaaatcatcaatgaaatttatatagtactcataacctcctctggcttttacatttagaggtccacagacatctgaatgtactaaccctagaggttctttggcacgctctccctttgcaggaaaagaacgcttagtcatttttccttctaggcaagattcacaaactagtaattcacccaagataaaatttttcaatggaccatctttggctaacctgcgaagtctatcatagcctatatgatctagtcgtaaatgccatagatatgtttcatcattattatcaatctctttctttttatggtttctaagtttagctatgttgaaaagtttgttattaagcacaattggtatatctaggcttaaaatataaagcccttattccatgtgagcaacacataattgaa

SEQ ID NO: 152773 - DNA, 924 bp, Cannabis sativa
  modified_base (314)..(315): a, c, t, g, unknown or other
  modified_base (604)..(609): a, c, t, g, unknown or other
tatactaaacggacccaaattttatttttcaaaatatattgctaatttttttttcacctaacacttttatattatatctgtaaagtcttttattggcatatttgatcaaataaaaaaaatatttgtggtattttcgaaattatttttatttgtctattcattatttttgaaaatatagtttcattttctcgtgtgaaaaggttttttaaaataagatcttattcttatttgactttttgtgaattaaatatgagttttccttttatataatatttgattttattctttgctttttaaggaaattcttattcatnntttattccttttgatctgatttcttgaccaaaaaaccgtgcacaactatgggaattaatatagtcaaagttgccttatttatttatggaaagtttgctgaaaactgtccaggttcactgtatctgtttaaatggactgactgtctgtttaaacagattttgacttttctttttgggaagattttcatttaatgacctgatcatttctagattgcttgaccacgacctagagggtttctaaagtgtataaatacacccttaagttgctggtattggttagctctcttggnnnnnnaattctatattacttttcaaagttagagtgtgttttgtttgttgtgtgaagaacttgagtccaacaagttcttagtattttattattgtgttactctgtattgtttcttgttagaattgtgcaggttaaacaccttagatattgttaataagcttcgggagaagtcttgtttgtgagtcacctttttgggaggaaaaagtgcatgtgagtcactcttcaagaggaagatcgcaagttagtcactttttgggaggaagattgcaagttagcactcttcggaaggaagattgcaagtgtgtcactctttgggaggaa

SEQ ID NO: 152774 - DNA, 601 bp, Cannabis sativa
  modified_base (530)..(534): a, c, t, g, unknown or other
aaattcatcaaaaataataaaataaaactggaaaaattatcctaatttatgttgatctaaaattaaattaattttcctatttaattaaatatcttaagaagaaaatcaaatatttaaatgtcttgaacaaaatcaaattaaatattaattttcttacttaattaaatatatctagaaaaataccaaaagtctacctagaaaatatctatatacatgatttataaactaattatttattttctaattaaaatataatatattttagtctttttattttaattaatcattaacaaaaattacttgattttagttgatctaattttcaaaattaaaaattttaaacaagtaaatgcaattcgaaattaggtgggaaaatgattattaaaataaaataaaatatattctgaaaatcattctaattaagttgatatgaaattaaaaaagaatccgactgaaatataatttttgatttaattaaattcattagaatagaaataactaagtgcctagaataaaatcaacttaattannnnntctaatttaatatctaagaaaaatattctaatttaagttggtgtaaaattaattaataaattaattt

SEQ ID NO: 152775 - DNA, 577 bp, Cannabis sativa
tagtttatttgattttgaactgaactcaattcaattctatctaaattaaatcaattttgttttggctatgtgcatatgcgaaaattttgacatatttttgcgtcaaattttggtgaaaataatttcaagaacgaaattaatttaagagaaattatagagataatatggtcttctatattttaaaattaagatattatcttgatagtgaaatattaaagtgtgggggtgatactccaacgtgaaaaatttgagacatgcttggtgtcttaaaataaattgtaatttagacatgtttggtgtctaaattagtgtttaattttgatatgcttggtatcaaaattattgagaatttgagttgcgtgaaaatttatcttctatgattaaattttcaaagcttaagtatacttaatgagaaaagttgccatgtaatactgaacactaattttggctagcaagattcgcttggaatcgaaaagtgggcggttataacaaatcgcttaatttctgtacaagattaaagtatgaaattttgagggatgggacctaaactcccttagagttttactcattgatggta

SEQ ID NO: 152776 - DNA, 516 bp, Cannabis sativa
tggaggcttgaagcggggacgttacactttccctcaaagattcatatataatcaaaatttcatattgacccatagtgttgcaaagataggattaggattagataatgagttgatttagaatggtcttttatcttccatataacttgtttgctttgtactttatttgtctatcttaaagaaacacaagttttacttcaaaaaaaaaaaaaatcataaatattttacctctagagatagacacactttttttgttttggcgcggggttgtagctcgaataaaaataataataataatttgtggtgtaaatatttaaatttaaattttcagttacagataaatatttaagtttaatcttttacggtaataatatttaagttataattctaaattttcggtaagtgtctggctattaagtgtcaagtgaataaccacgtgaataatgaccacttgacagttaacaactagatacctacggaagttttaaaaatataacttaagtattattacattcaaaa

SEQ ID NO: 152777 - DNA, 955 bp, Cannabis sativa
gggcacaaaacccaacacaaaacagtggcccaaactatgatagataatggagcctcagcaaatatcatgttcaaaacaccatatgaaaaaatggggctccaaatcaaagatctgatcccctgtcttcagcccgtatatggtttctttggccagagtgttgcacctttagggcaaatttgcctactcctcattgttggacaagctccgaagagcataactatgatggcacaattcctggtacttgatgtcctatcagcctttaacgtcatgttaggtcggtcagccttatatgacttaaaagatgttacatcaatattccattcgtgcgtcaagttcccaacaaagaatggggtagggtgcttgaaaggaaatcaacaagtttcacgggaatgttacaaccttgccctaaccaaggccaaaaaggaagaatcctctagttagagttcgagcaaggggaagagcattgccaaatagggaaccgcctaaggcggggacgaagatgtggatccccgacttggggagccaaatacaaatgttgggccagtggaagaattagaagaaatcgaaattgacccaagtgttctgactaggaaactcaaaattggaaaaggtttgttgcttgaagtaaaatcagccctgataaaatttctaagagcaaacttagacattttttcctggtctcatgaggacatggtcggtatcgatccttctgtaatttcacacaccataaatatcgatccaaacttccagcttgttcaacaaaaaagaagactgctagacaaggaacgggcccaagcactaaaagaggaggtagaaaagctgcgcaacagcaacttcataatcgaggcttcttacccgggttgggtagctaaccctgtactggtacccaaactgaacaaaaaatggcgagtatatattgacttcaccgacctcaacaaggcgtgccccaaagact

SEQ ID NO: 152778 - DNA, 545 bp, Cannabis sativa
ttctttaataagaatccttttttaaaaaaaaaaaaaaaaaactgtaggtgaacatattttatgattttattattttagggttaattggtacatacacacactaaaagaacgtgtcacatggatgatgcttgggtgtcaataattctactaacactaatttattttgggttccgttggtacgccgtataaagatcgtattatattaaataataaataacattatatttgaataaagtaatgtattgtattaattattacgaccaaactttttaatacaatgtatgttgtattaattaatacatgcataacaaatggtccgtattagcgtgtattataatatttacaaaagattcggggtcaacaccaatctccattccgacccgggacccgggacgtggacctgaacccaaactcaggacccgaatttggactcaaactcggacccaaacccgaatccagactcgggcacccgcggagactcggacccgaacccaaacccagaccctgacccgagactcgggacccgaacccggactcgggacccg

SEQ ID NO: 152779 - DNA, 524 bp, Cannabis sativa
  modified_base (140)..(140): a, c, t, g, unknown or other
catctctcgatgttgacagtgaagatattagtttggttaggaaagatatgccagatataactattgatacatcagtgtcctttaatgtaaatgatatggatgaagaagcttagtggtgtaggtattattattattattantattattattaataataataatactttgcttataaattttatttatcttaattcttttgttatggagatcaattttatttatttaaaattttttattatgatacgatggttatttattaagttttttttatctacgtttaaaaaattaattagatttaaatatattttttttataaatttgtataataaatataacttcaaaaaataaattaaaattaaaaattccactaattttttttttactagtaacacttttgaaatgtcactaaaagtacttaattagatggccatttaaaatgtcactaaatctaatatttggtgtcatttttataaatgccactattaatttattctagtgacatttttaaaaatgttactaaattt

SEQ ID NO: 152780 - DNA, 542 bp, Cannabis sativa
agcattcccactcaattgaactaccatgtctttaatctatatgtcacgagaagatccattggtcaattttaacgaatagattgaagaacacaaatgatacgattaaactaaactgtgatacccgaaattgagttgccgtctcagtggaggacacatatcaagataaagggaatatggatcagtgcaatcgatttttatggaataagtcattaattacgtaagtatcagagtatatttgtaacctgtagactgtaaggtcttaggcaaggaactaatatacaaactggtacttagcatattagcgagaaaccatatgtcattgaatgcgaattgcgaggcatcaaggatagtacacattggaagacaaaaatgacatatatcaattgcgaaagtcttagtattcaaactaagtgttacagacggatcaactcaagacaaagtaagcgaggtgcccgtcttgttaggggaagacctcatataacttcatcccgttagcattagcgaggctcacaaccctagcaagtcaagaagctaacattcaa

SEQ ID NO: 152781 - DNA, 1289 bp, Cannabis sativa
  modified_base (1110)..(1117): a, c, t, g, unknown or other
  modified_base (1225)..(1231): a, c, t, g, unknown or other
  modified_base (1258)..(1264): a, c, t, g, unknown or other
gggcaattccaggatattaatctcaggggagaaaggggttccacgtgctcaatccaactcgatatcgttgttcctctgactagtcaggtcttcgaacatattttttagttcgtccaactatgcctgcacggctggactaacctgttcggcctcttggccgatctgagttacattaacatctttttgagcgggattttgagcacgggtttcgggttgcacaattggcgcatcaagctgattccactcctctcctcctattcagaccatttctgagatcatgagtcgtcctcaacctatcaaatacggaaatgcctggttgtctcagtgactgattggtttggccaattttctgaccagcaccattaaccttgttggaattattgggtatgacttctcccgatgaattactagacaaggtccatccccctaccacttggcccaaaggtgggacctgtgaccggggatttgacggctgaccatttatagtcttggaggtattcattgctggatcttcgtctgtttcgcccaagaggatgacggttacgggctgttgcccgacagtttgataggcttttcgtatcagcacagtggcttttcgactacgatcgtcaatgattgcttgctgagcgcttaacgtttccatctccttgtctctccattcggcgaacatgcgcatctgctcttcaaaagcgaggttcaccacagcacggagttcctcctgatcgtgatgcagagtgttggtatgaccttgcatgattccaagagcggcacagagattctgaatttgagtgtcatctccaatggttgtttgaacattggtagcgggcggaatggctgtgctatgaatgccctagttggctactgaactggtattcacagtctcttgcacactaggcgtgatttcatccacaggagttgtcacaccgtgactcgcagttgatggctgtctaggatttacggttggcaaaacccttgtgtttcctgggttctgcagtgcaggatccactgcctgtggatttgccggatcaaccacgccctacgagtctgcaccaccatcgtactagtgattagatttgaaataaagagcgatccttgattctgctctcaatnnnnnnnncaaaatgttgacctcgcttttagctaacgacaatgagtctattttgtaagcgacaagtagttttgcacaagcgacatataataaagcaaataaagacacaagaatttnnnnnnngttcagccccaagcagttcggtaatannnnnnncctcgttatttgtattgacttaaga

SEQ ID NO: 152782 - DNA, 542 bp, Cannabis sativa
gctttaatagagacaacacaagagtagtggtccgaggtagtttcccaaccataatgagcagaagtatttccaaaagtatcatgccaatcctcattagcaaagacatgatcgattttggaataaattctgcttatcccgtcctggttatttgtccaagtaaaatctgaaccagttctctttaaggcttcaacatgagcttgggcaaaccaagcttgagaatcaaccaaatcattaagacaaggagggtttccacctattctatcttcaagagaaaagagagcattaaaatctccaaggataagtcaaggcttaacaggatgctttaaatcattcaagtcagcccacattgttgttctcccttccctagtatttttaccataaacaaaagtaatgtagcaagcctgatcagttcccgacactttaacataacagtggacaaattgtgaagtttcagcaatgacaatcactttgacaaaagttcttctccaaagaacaagaattctaccttcaatagtggaactagagaagtaatcccaattatt

SEQ ID NO: 152783 - DNA, 595 bp, Cannabis sativa
  modified_base (38)..(65): a, c, t, g, unknown or other
  modified_base (137)..(144): a, c, t, g, unknown or other
gcaacattaaatgttatttcagatctatattaataagnnnnnnnnnnnnnnnnnnnnnnnnnnnnatttagggcataagacccaacagtatatacatatgcatgttattatactaatcttacctcgattccgaattnnnnnnnnccggtcaacctgagtggaacaatgtgctcggtgaattacaggctcctaaatcataataaccgcaacactgatacgtgacacgctaaatcacttcccggagacttaaactagaaactaaaagtttccccatcgatacaaacatggcaataccctgatcaacacaaaaatgggaagaagtagggttcccaaaattgccccaaccgttagaccggttcctcaaccggaattccggttctgggtaaaattcttggaagccaaccggaattttggttcctacaggcctctctgaaacggaattccggttcagtgcaggaaacactaaaaatttcataactccagcaattcaaccccaattcaaaccaaactctccaaacctgttataaacatcccaaaaaacattttcaaggcaatagaacacaactaccaactcagaatcaaaacttgccattaa

SEQ ID NO: 152784 - DNA, 738 bp, Cannabis sativa
ctctctctctctctctgttttggtgtacaaaattagaactcaaaaacctaatttctattgtgattaaacccaagcaaaaagatcactttcaaccgaagaggaatgattttcattccacaaaaatctcggttgttacggcacggttatacataatcgtatatatgcatatatgcatatatacaaaacaacaacaacaacgatattctaacgctctgatgcttaggtgcgctacagtgatttttcaaataatatactaccttgctaatcaagggttttcttcgaaaattgtgtcaaatcaaaacttgaataaaattaataaactttataaacatacatatgtatatatattatataatcgagatcccgtgctaaaaacttttataaacattttgaatatattttttttttcaaacttgtcgcatagcgactacaaaatatatccccagctgtcccgagaccaaacactccagatttcttcgccttgacatgtaaaatcattacccgagctcggaactcactcctattcagcttcagcctttcttttacctacacagaaaagtagaatctatgagccaatagactcagtaagaatagcatacaacaaaatataaataatcgacctgtgtctaggcgcccatacactattcaaaaggcttaccaaatgatcaagaacgttcttaatggttggtgctattgaccatgatatcacccactaccagcactatgatcgcactgtgg

SEQ ID NO: 152785 - DNA, 532 bp, Cannabis sativa
atcaaatcctcatccttaccaacctgttttctttttttgttctctctctttttcttttacactctctcttgaacagtcaacaaaaacctagaaaatgagtatgaatagtgaacacaaccataaaacaaatttagaaaattagaataagcctaaaaaaaacatatgcacaaattcgaaaaatatttttgcactaaacctcatcacaccatattatatgtgattgatttaaaattgatagtgctaaagtcattactgtaacatatatatttatatatatatgtaagtatatacacatgtaagaggcgtggatagataacaagatccaaacaaagagagaagaaaaaaaaacaaacctagaatcatgtgcatcttcatccctataataccagatgagatccaaataaggagagaagaaagggaaaaaaaaacaaaaagcaaacccaaaatctgttggaatctatttaccaggatcttagatctactaacaagtatgttgtttaacaccctaaaaatgaactttctaaaacgataa

SEQ ID NO: 152786 - DNA, 542 bp, Cannabis sativa
  modified_base (58)..(75): a, c, t, g, unknown or other
gacatgacggctttcccttttctgaacacaggaggagatggccgaacaggtgaaatgnnnnnnnnnnnnnnnnnngcatgttcaacaggcctgggcgagaccaagagtttcttcttcctcctcatcggagtaacctgctcgtcctcagcctcatcttcaggattcaaaggctcctcagcatactgtttggccctggcacctcctttcaacttagcctcgcgcttaagttgaataagctcatcctccttatgagctcgttcaagccagctagcaccagatttcctcttcttccccgccacggacttaggagtaaattcctcgggataaaacccgtacgtcacaagattatgatcagaggtcaactagataatattctggtctttccccggtaacccggcaagtttctgagctctatacctaagagcaagagtgagaggaggatggttatatgtcgaaatctgctgaaaccgagttcgggtaatgctcggatccttcaccacaaagtactcatcagcaaaacgccctattttgttgatggcctt

SEQ ID NO: 152787 - DNA, 974 bp, Cannabis sativa
cgggaaatgaggccggcgacggcggcccacatgaaaaagtaacccacgaagaattgggcagctccagtcgccaggaccacccaaggcccgctgaaccacctgccgaggaacgaggaacgccatcgttgcgtggtaacggcatcgtagaggagaccggataagatacccgcgttagcaccgatgtccttgaaaacagagacggtgtcgagagttgattggttgtaaccctggctggacttgagagcggaggagtagattccgaaggtgtacgatgcacccacgatacactggatccatatgctggccgctgttgtcacccacttgttgttgaaactgagacgcctcacctccaccatttcattcattttttcttttctttctttcttttatttgcaaataattgcaatgaaaaggggcttttattccccattcctacgataaagaataataattataatatattatacttatttttttcatagaatattttattttattttatttttgaattattcaaaaacagaacaaatacaaggcaaagacgagttacaaaagctaaccacaaaaacaaactaccaattactgactaaactttatacataattatctttctttgaaataagtcttgtagattcccaaactctcaacttttatcacattttcaatctccatattaagaacaacactacatcacaaacaacattaaatattgttaaaatttgagataagataatgaagtttcatctcaaaattaattggtaatagaaggagtagttcattcattttatatttgacaatttatttctgtacattaacaatgtaggactaactctaatataccctcatcacgtttggacctaaaaagtgtgagtattacgaacgacctttaagagaccacaggaccgaacgtgacatttgaaagaatctcacaaggccaaatatcgggaaatttatgggtgtacacgtcaagaaat

SEQ ID NO: 152788 - DNA, 500 bp, Cannabis sativa
  modified_base (109)..(113): a, c, t, g, unknown or other
atttttaattataaatgttttgagttattttctgttatttgtttttattcattatgtcaaagaactagttatatttaaattataatcggtttgagttattttgtgttannnnnttttattcattatgttatagaacgggttctatttttatttatacctgagacatctacatctggtgacttttccagtaattttttcggggacggtgacttttctgacaacgatgacttttctggcgacaataacttttccagcaccggtgacttttctggtgaaatccaacgctagtaactttttcgatgaaacttattattacaatttttatcaaatttatttattgttttacaaatataagatttccattttttttacaaaaatatggcataaaaaaactcatagaaatgtaaaaaaagtaaaaaaaaaactcataaccctatggtattatttatttatgctataaaaataaactcttataattttcttatatattgtgtaatttc

SEQ ID NO: 152789 - DNA, 610 bp, Cannabis sativa
  modified_base (28)..(35): a, c, t, g, unknown or other
  modified_base (134)..(138): a, c, t, g, unknown or other
acgaatcagggaattaaacttttgaacnnnnnnnnatgattatattccactgtgctaatgacactataatcatgaacaaatacatacgttctggactaaatagattttttacattaaacataatcatgaaatannnnntgtgaaccatgcaatataaaatgcgatttctgatctttattaaatagtaagtatgattatattgaaatagattttatttagggcacaaaacccaacactttgaggggttcatggagtaagtacttgcctttaatagaattctcctacaaaaacaactaccagagtacgatgagaatgactccttatgagatgttgtatggtaggaagtgttgttccccaattcattgggacgaaactcgagaaaggaaatacttgggtctggaattagttcaagggaccaatgaagctatagaaaagatcaaggttcgaatgcatgcttcgcaaagcagacagaaaagttatgttgatccgaagtgcatatacattacatttcacgcaagggagcatgtttttctgcgagtttctccagtgaagggcattaggcgcattggaaagaggggcaagttaagccctaggttcattgggccatttc

SEQ ID NO: 152790 - DNA, 761 bp, Cannabis sativa
  modified_base (722)..(731): a, c, t, g, unknown or other
ctttacttgggcggttggaatatctctaatatgttttgttgtatgatatatggtttttgttgtgtagtacatcatttatttaagataatatttaattttaattattataatatatattttaaaaaattaatatgtattaaatttatttttataatttttattagttaatttattatatttgatcattttactaatttttttttaaaaaatagacatttactaacataatttctaaatttaaagttattttacatctcaattttttacaatgttattatttagtactaaggagtgacttaatacactatgtttggtgtgattttatcaaaataaataaataaataaaaacatgtgtgtgtatttatcttatattgctcataagtgagtaatttgtggtgtttgtactacatccaagtcttaaaacatcattacataattttagtaaataaatactaatgtggtgtgattttatattaaaaaaaactttaatacactttttttataattacaaattatcctatttcttaaaatatatatttaatttaaggaaaattacttcatatacgatttttttttctttttttttttctttcaaatttacggtttgagttaagtggttgctgcagcgctagttgcaataggggttttcatacgattttttgttgcaatttagattgcagtgctagttacaataaatgttctatgtagaatttcgtaaaaannnnnnnnnnaaaaaaaaaaaaacttttttaaaaaaaaaa

SEQ ID NO: 152791 - DNA, 557 bp, Cannabis sativa
  modified_base (27)..(33): a, c, t, g, unknown or other
acacataagaaggtgctaggcaccacnnnnnnnctttagcatttctctttaatataattataatgtaataaaggaaagtataatggtgatgacatgacagtttctatgtaatttcttttcctttgttttcccatattttcacatttttttattataatgcgatagttacaagaaatggtaataataattaaaaatagttatttgtgttgtcatcaaatatattaattgcttaattgagtaactcacgtcctctaatagtctatttaatacattaaggttttaataagttttttcaaaacttttaatcttcccaccatagaatcatcatatataattaacaaaatattaaaaaaaaaaaaaaacagagtatatttacatataaaagaaagagaatttccacatggtcaaagtatatatatagggatatgattttgtcccgtgattgtactttcacgtaatgaatttcgtgatgtacggcagccatcagacgatggactcatttgatctgacggctgagattgatctgggggtaattagggttaaaaagtagaaacgta

SEQ ID NO: 152792 - DNA, 680 bp, Cannabis sativa
aatttatcaagaatgaaggtaaatgttaatacaatatcaggcactgaaagattaattgaaggctccggaagagccattacattgatgtctagaggaacaaaaaatattatagatggtgccttattatccaataaataaaaaaagaatctgttaagtttcaaagatatacgtcgtaatggatatcatattgagacaatagatgaaaataatttgagtatctttgcgttgcatctattgtttcaagaaaaaagtgcatattaaaaaaattatcttgtttgtctttaggtttgtactttactcgtataagtacaatagaaactcatgttattatgaacaagaagttcacaaatcagaaaaattcatttattgtttggcatgatcggttaggccgtcctagttctatcatgaacgtagaataatagagaactcacatggtcatccattgaggaaccgaaagattctattatccaatgagttctcatgtaccgcttgttctcaaggaaagttaatcattaagccatcaccagtaaaagttgaaatggaatcctttagatttcttgaacatattcagggcgacatagtgggcctatttgtccaccatgtggaccattctaatattttatggtattgatagatgcctcaactagattgtcacatgtttgcttattatctactcgtaa

SEQ ID NO: 152793 - DNA, 610 bp, Cannabis sativa
ataataaactatgcaagaaaatatttagtttaaatttttagtagaagaatacaaatagttttgataattaatataaaaatttaatatataaacataaatgaaaatgagttatataaagaatacaaatagtctttttttaatataaagataaatgatgataagagatacaagaatatgaatagtttttttgttacaaatttttatttttataaaaataattagaaaaaaatggagaaaatagaaaatatagaaaaaacttcatatgtgatgccacctcaacctccctaaaaccttcctttatatatatatattgatgattgatatattgatattgattatgttataaagggattatcataatggtctatagtcaactcatattaatagtgttaccatgagttaatgtgttagggaaaatcctttttttaatcaattacattaaaaggattttgaattaccaaattaatatgctcatatccggaaaatgagctatgaaataaaaacaatttgttttatttttttgaaataaagattgcaactttcattaaagcaaatcagctaacaaaatagcttccaaaccagaagggacagaccccctactggaaatacg

SEQ ID NO: 152794 - DNA, 815 bp, Cannabis sativa
gctgtgccaaacgggcccttaatcttcctcgaaagcttttacagagattttaggagcttgaattctctattaaatgaatgattttggttccctgaatagggaaatgattccactatttatatggaataattacatcaatttagtttccccaaaaaataagaaataaatggggaaactcaagtactttcctaatttaagagaaataaaaagaaaactaggagattttctcttttattctgtcagtgcatatctatcccacaaaattagggatgtgattgcttgaacatttaagggggatatctctgaatatattctaatcggtgcatgcgagctgactgcgaggtgaattttggtcggacggtgtaacgtacattgtctggatattccaatttcttctttaaatcaattgttcacgaatgacaaatcactttgaacggtatgtcatggagcgtacagaccgtccaggtcatgaaatattctccacgtatcactcaaatggatgtcacatcactctatgcaaaaattgagataatatttgcccttaaatctatgtgggaactctttgctcgcacgtggacttattcgacgactaagttgtagggctgaatatcggtcggtttggtcagtttttttctatataaaaatataaaattcggttttcggtctggatcggtacaattcaaaaactgaccaaccaatccagaacttattttaaaaccgatcgttttaaacctcgatttggtcggtttaaaccgcttaaaccgaacttttttttttaaaaaaaaatgatctaatttattctataaatacattat

SEQ ID NO: 152795 - DNA, 616 bp, Cannabis sativa
tgtggtaagattgacaggatagcttagaacttgcatgttttattctattgaggcgaaatcttggacaacgttcaataggaatatgatttaggcatttgttggataaattgagcctttcaagcctacccttaaattcttatccctagttgaccctcttgagcttaagcttgttttgtttcgcatctattggaccaaaatatatatatccacactgctaagttcgtcttcaccattttatctatgatatcataagctatataattagtttgggggagcgaaaattcttagtgtgaaagaaaaagaatgtagagggaaaaagaacttgcaagattgagaaagaaaaaaaaaaaagagaaaaatgtgtaacttaatgtcactaaaaaaaaataagaaattctacaaatcataatagaaagtgagttctgtttgaaaagaatcattcaaagaaaaaaaattatgttagtgatgttagaaaaaatatatgtatcttttctcaatcatggtgaatgtgggaatactatggggttatttgaaaaagcaagaagcttgtgggttctggttgtgtacttatgatatcttgagccaaaactatttttttgatttccaaatatctaag

SEQ ID NO: 152796 - DNA, 534 bp, Cannabis sativa
aaatttagtttaacaacagaagaatattatggtgtttgattagatatgatatcaactcgctctcaatgaaagcaccaaactgttgacctcagatttggccaaccgacaacagagtcatattaattctgatgcttgccacgtgttacacaataagaataagaaagtaaaagaacacaaggattttataaaggtttggtccacttagttagcgggtaatgacctactcctcttttagttgtattgatactaagagataatactattcaaattactataggtgggatctgagagagctctcttaaggttacaatgtgggaattaaagatggaaaatctcaagtttagagagaagcaatgggcgtgagagagagatgagaagagttatcagacttagagcttaaggcttagggttttgaacttagttttgacttagggttttagggtttggttaaggctctttttacaggagagcttaaaccccctttattaggtaaaataagtagatacttacatattaaattagtaaaatataaat

SEQ ID NO: 152797 - DNA, 514 bp, Cannabis sativa
tttaataaaaatttatggaggaaaatatattttaccaaaaaaaaatatgatactaattaaatttttctaccactatattattttattcttaaataatgattattatattttttaaaactcttaaataattactaaataagtatgaaaaattattttatacagaatatctttttatttagacagcggacggttatatttcttagtatatatataaaagacaagtgtgagacggtgacatgacattttaaaatcactctaaaattatttttctcttctctctttaattctcttaattttaatattttattaaagcataaatctacaaattgatattttactattattttaataatttttctataaaaaaaatataaatttacaaactaatattttaataattttctaaaaaaaaatataaagcataaatctacaaattaatattttactattatttaataacttttctataaaaatataaaatttttaaaaaagttagaaaataaaatataaattc

SEQ ID NO: 152798 - DNA, 770 bp, Cannabis sativa
aaatcctaggggctgctagggtttgattttgttcttcaattcagcaagttttcaacaattcttagtgtaattcaagttgaggtaatctttgaacaatctcctttttgttttcttgaagtttaagaaatgagaatttttgcatgcttgatgattttgtggctgtggctgttgtttatgtttgttgttgatttctaaagcttaattatgttttaatatgaagattcaagcaggtttttgtggttgtttgatgattttaggtaagtttggagtttgaactcaaaattttgattttaatggtgaaatgatgatttacctactgtggttgttgtttgtgtttgggtttgttttctgaggttatataaggtgaattgagtgggttttgatggctagtttgtgggatgagcaagctttgagtttttgaactcaagcttggctcatcaatggtgatttttgtaattgtgcatgaagttgtattttgatgctttgaatttgatctctagggtgtttagaacaggtctggagagtctcatgtggtttggggttgttttgattgagaaatgaatttcttagagtttcctgcactgaaccggaattccggttcagagaggcttgtaggaactagaattccggttggcctccaggatttttccaggaaccggaattctggttgggaaccagtcttccggttggggcagttttgggaacccttgttttcccatttttgtgttatttagggtattgccatattatttatcgatagggaactttta

SEQ ID NO: 152799 - DNA, 726 bp, Cannabis sativa
  modified_base (525)..(530): a, c, t, g, unknown or other
cttatatgatcaacaattttaactcttccgacatggataagctagaagcagaattgcgagctcatgaacggaatttgattacaatgccacctcccggctttgcaaacttttgtaagaggaaaaggattaagaatgaagcttctaacaatgctgcttcttcaagtacaattgatagccatgctcttctatgttcaaattgtaatgagaagggacatcaggaagaacgatgtccaagacttctaaacaattcgaacgaaggtaatgcttttgtctttgaatcatgtgttttagagaatcacaaatccttatggattgttgattctgggactactaaccatgtttgttcttcattgaagctgcttgaaacttgggattatctcacccagaggagttaaagcttaaagttggaaatggcaagttaatattggtccaagcaaaaggaagagcccgcctcaagtttcgaaagaaatttttagttttagaaaatgttttatttatttcaaactttagtagaaacttgattannnnnncatgtttacaaacacaattttataaattgaattttttgagtactgtttgcacaatttctcgtaatggatttcaattatgtgctgctcacatggaacaagggctttatgttttgagaccgggtatacaaatcgcactaaataatgaacttttcaatgttgctagacctagaaaccttaaaagaaaagagattgataa

SEQ ID NO: 152800 - DNA, 1258 bp, Cannabis sativa
tgattcacagctggtggtaaatcacgtatctggagaatacgaggcttgggcagaaaagatgatagcatatttgagcaaaatacacgatctgcttccacagttcaaaagctacgctctagagaaattccaagggaagaaaacacgactactgacgcattagctcggcttacgagtagtaatgtaagtgatagagcgaatttggtttctatccagttcttcgaggagcctagcatcactagcacggaagagatcgaaatgattgatgcttccccaaactggatgacgccaatagccacctacatcaacactgtggaactcctagatattcgaaatgaagctcaaaaaatgagaaggaaggctacacgttacatcatagtagagggaattatgtacagacaagggttctccatgcgatttctcagatgtgttacccaagaagaagcgtatgacttttgtctgaagtgcatcatggattgtttggaaaccacactgccgggcagattttatttaagaaaattataaggcaaggttatttctggccgataatgatcgaagatccaagacctatgttaaaaaatgtgacaaatgctagagattttcaatgataccgcgagctccgcccaatgagttacctaagatgcaaagtccgtggccttttgccatttggggaattgacctgctcgaaaaattacccaagggaaaaggtggagtgcattatgcagtgaatgtggttgatcactttactaaatggatggaagccgagccactagcaaccattaaatcaaaaaagttcaagactttgttgtgaagaacataatctgccggttcggattgtcgtacaaaatagtctcggacaatggcaaatagtttgacagccagtccttcactgatttttgtgtgaaccatggtatcatcaaaagtttctccgcagtggcgcatccataagaaaatggtcaagttgaagcagtcaacaagacattgaaggatacactaaagaaaagacttgaggatgctaaaggaaactggccggaggacttcctaaagtcttatggtcgtaccgaacaattgagaaaatggcaactggacagactccattttccatggcatatggatatgaagcaatgctgcccgtagaactcgagccaccatcccacggaagactgatgtatagccaagaagcaaatcacgtactccttgctgaatcacttgatgaaattgaagagaagcgaaccatatcaaacttaaagctgatggccca

SEQ ID NO: 152801 - DNA, 542 bp, Cannabis sativa
gaagcgtttacacaatagcttgtctttgaggtagaatacacatgtactgtattatcttatacatacatatgtctatgtatatatgtctgtgtgtgtgtgtgtgtctccaatagttatgtttggagatagcttcatttcttttgtaatgactatcccttgtaccagttggtgcatacacatatttttaagtgtgtgattgtgtacattgtcgttgtttttttttaactgcttgctttgtaaaaggccattttaggtatgtataatgcatatatacatatagaacgacatttacattttaagttagtattagtttttttttacaagttatgttttactctcactcgtgtagaatgtaaaaagtagagaatgttttatcatttcaataaagctaaattagttaatatacatatatataaatatatattgtatgacaccaagagtagagaatgcgaagatacgtatatatatattaagttttatttcttagatctcatcttaataaaataaaactaaactagttaatatatattatgtgacacaaa

SEQ ID NO: 152802 - DNA, 560 bp, Cannabis sativa
ggacccaagcagcaatgttggacctatggaagagttagaagatatcgagatcgatccagctatcacagccaaaaagctaaaaatttgaaagggtttgatgctcgaagtaaaatcagagttgataaaatttctgagagcaaacctagatgtttttgcctggtcacatgcggatatggtcggaatcgacccttctattacttcacacgtcttgaatatcgatcctaacatccggccagttcagcaaaaacaaagattgctggataaagaacgagcagtagccttgaaagatgaagttgaaaagctgcacaacaacaacttcatcattcaagctctttacctggcttgggtcgcgaaccccgtactcgtgcctaagctgaacaagaaatggcgagtctgtattgatttcacaaacctcaacaaagcatgccctaaagactgctttccacttccaaggatcgatcagctcgtcgatgcaacaaccgggcacaaaatatggaagtcatgccgtttggtctaaaaaacgctggagctacataccaaagattagtaaacaagatgtt

SEQ ID NO: 152803 - DNA, 568 bp, Cannabis sativa
  modified_base (195)..(200): a, c, t, g, unknown or other
acaagtgggtgttaaggataggtttcttccactagctagtaggaccatcgaattcttagagaaacttccatgtccattcagataaatgaatgcccctacactgcgtactgttgcacattccgatcaatcctccatacttccgtgtccattccattgttccatatcaccaagttgtgatcaatcatccatgctttnnnnnngtgagcatgaacaccttatgttgggctcaacaactatcaatacctaatcgatttttatatcaagaaccagtgggtgttaaggataggtttcttccaatagctagtagggccaacgaattattagagaactttccatgtccattcggacaatgaaagcccctacactgcatacttttccatattctaataattcctccatacttctgtgtcgattccattgttccatataaccaagttgtcgcatcaattgttatggtaatctagtagccgatcaatctagtactctcgcatattgtgatcgatcatccatgctttgttaaggtgagcatgaacaccttatgttgtgctcaaaaactatcaacacctaa

SEQ ID NO: 152804 - DNA, 532 bp, Cannabis sativa
aatactattaaaaagtttaacaaatgtattttcgtattttaatattactaatttattatttaattaatttcttaattaaatatggaataataaaattgatgtttaacaattttttttttgtagctacagaaaacaactatgtaactctaaaataaacaaacaaacaaaaaaaaaacagtgcataaacgtgaaaacacacaaggtttttgtaagtggttttaataattcttgtagattgttactagtccacgaggtcatgctcagagataagattcattagatagatctcgaaaatacgaagtaatagacttatgcataaatactccatcttattgtatgctgtaagtttgatatattccaccttctaattgaatcttgttgaaacttcaattgctcgacctacctttcgatctccttgaagagtgcctgcttcctcctgagtcaagacttgaaaagtaatctcccaaaagcttgtaaaaccttttcccgaaggtagcactattgttcttcttcttttgtagacttgattaca

SEQ ID NO: 152805 - DNA, 694 bp, Cannabis sativa
gtgtacccttataagtgcttaaacatttgctatcataattataggtatttcaaaataatctcgtccattgattatgctaacataggatcaaagcgactttcacaatatttaacgtagctaaactcatcaatggtcacgtatatcaatagaaccaaatgacatagatcaatcatggatgcataacatgaaaattacatgcatatatgatcttagcatgtctatctccaactggtcctccttaactgagatcagtcctttattaattctttctaaccttatacttaaaccttaataggaagaaaacatttagaaactcaaaacttaaatccatactttatctgcagaatcaaaccataaatatgtgtcagctagatagaatattccaaatacaaactcccagtaaaccagcacaatcttaaataatacgatatccatatatgagcaacaagctcctggaaagccttaaatggtatatccttaatgattcgaattacacaaaatatagagtttgtccttattatgttctatagaaaccttattattttgaactttattttaataacaattagctctaagttaatgtgcctttgaccttacagagttcatgttgttactaaaatgtaacctaattgatttattgtcacaacatatatctttaatagctttcaataccattcctaattttgcagccata

SEQ ID NO: 152806 - DNA, 731 bp, Cannabis sativa
tctatacggatcacaaaagcctcaaatactgtttattttggaagaatttagataggagacagtggtgacagttagagtttattgaaattttaacggtgtgattttctaccactttgggaagtaaattagtaatgaatactttaaaccgaagaggtctaagacaagtttgtaaaacgaaaagatctgaccaaaggttactggaaatgcaaccagaacaaggattgagatcgtgattggagaacttgttaatattacattgtagttcaatttgttgggaagaaataaaaatggcccaacagagtgactccaaattttagacgtacgaggaaaggtttggaaccgacttgacaaaggacttttgattttgtttgaaggaaattttatgatataaatcagattggtgtatcagtctgataaggatactgaattgaaggttctaaatgagttttcaagtaataacagttattagaatactgttaatgtggcactaatgcagtttaaagattcaagtttgtatattgcttatataatggatgaaaagagctattatgctggctgatccaaagcgtagagatattaaattccaagttgggaaatttatctttcttcaagtggttccgatgaaagggaagatttagaaattggttagaaaggggagttgagtcccaagttaatctgtccgtttgagtttttggaaagggtaggtcgggtagcttatcagctagccatac

SEQ ID NO: 152807 - DNA, 1179 bp, Cannabis sativa
  modified_base (444)..(455): a, c, t, g, unknown or other
atctggccctatatcggaccatcaatcccatcgggcttaactcaaatggatagacaatcgggctgactatcgggcccaacatcgagccttatattagacctttgtcttcttcgtagatccatcttttacatcacagataataaatctaaccttaaatctaatttaaaactcacaaatcacagaccctaaatctatcaataaacaacgttttaaccctaaatcaataataaaaaaaataccaaagggacgaaatcttaccttggccgacattgcatggtggtgggttcggttgagtagtcttcctgctcaaatgggttcgagagatgaaatgcttttgagagaaagagagatgggaggaagagagagaatgtgtggtggtgggttcggtcggttgcgtggtagtcatgaatggtcctcgatgagagaaggatttgggtgaagctnnnnnnnnnnnnggtattcagattatcagaaatcgatagaacagatcccttgctctctcttaaacaacttacatagataaggttttaaagagattatcaatgacaaacaccaaaggggcacaactgccctctagatttggtgtccatctatctaaagaacagtgtcccactgatcctcgagagatagaggacatgagaagggttccttatgcttcagcagtttgaagtttaatgtatgtaatcttatgcactagacttgacatctattatgcagtaggaattgtgagcaggtatcagacaaattcaagacaggaacattggaatgttgttaagcatattctgaagtacttgaaaagtgcaaggcagttcgtgttagtctacaagggtggtgctttgaatcccgtaggctataccaattcagattttcaggcatgtcttgatgacagaaaatctacatctgggatggcgtttactcttgggggtggcgcagtggtttggagaagtgctaaataaaccgcaatttcagactctaccatggaggtcgaatacatagctgtcgtggaggctgctaaggaacttgtctggcttagaaagttcttcacaagacttggtgttgttcctggaatggaaagtcactggttttgctttgtgataacactggagccatagccaacagcaaggaggctcgaagccacaagagaagcaaacacatagaaaggaaatatcacatcatcag

SEQ ID NO: 152808 - DNA, 816 bp, Cannabis sativa
tccaatcttacatgcgtagagctatcagctaaaagaccgcttggaggagttggcaagcaaagttcatgagtacttcgatcagtgtctggggcatgcgcctgtgatgcatgagactcatgtcatgacaaatgaattgaatctcttcctactaatgttgttaagtcttcactacgctccaaacttacatgcatagagctggcagctaaaagaccgcttaggggagctggcaagcatagttcatgagtgcttcgaccagtgtatgtggcatgcgtctgagataaagaaaacggattaagagctctagaaaaacttgcaaacccggttgcttgcataagatatatacatatgtaagtatttatattatactacacatatacatgaaatatatataccggaaagacttccatacctttaaaggcgcagttgtgggagctaattcatgtgtgatagtactttgaattgtgctgctactaaaagaagggacaagtgggtatcttgtagtgaccttgaaattagaaaaaaaaggggatatgtaatgaaaaataatataaatgtaaagatatatatatatatggtgaaaactacgaacatattaccataagcaaaaatatatatatacatactaaccaagttcgtggtagcatcgctgtcaccattagttcctgaacaatggaagggtcgtggttcagagtttggtcgaaccgctacatcattcccataagagttaccacccaaagcgtcagaagatttacccactaaagctaccattacatcatcttctatggacccgatattaagattggcaggagtatgacg

SEQ ID NO: 152809 - DNA, 525 bp, Cannabis sativa
cctactcccgactgttagattttccaatctttatctttcttgtcactggactttgtgtataaaagggcggctcaagcttgtcatttttcacaaacttcttgctccttggtgagatccatctctagaatggatcatctctttcttgctagaatgtcccatctgagttcagaagttcacccccccaaattcataactccaggatgcaccaaccatttttcttctccatcctttcccaaggactttaaacctcaattggaaccagaaacgacagattccaaggctgaggagcttccgaccaatccaaaccaagggaacgccgttgatcgttacgggcgatcatcataagtgattcttaagggggagtattatcccttgtaaatatggatctgagtcagatcatacatattattaattttatatattttttgttgctccattgaccatttttctttgtctccacaggattagacatagatcttgtgagtgatcttagatgtcctcctgttgcatggttcacatgattta

SEQ ID NO: 152810 - DNA, 512 bp, Cannabis sativa
tttttagctcctaaaatgcttttttcattcctctgtttattcaaacttcttgttacctagaaggatgttaaagatgggaacacacttgtccatcgactttgaaacaaatctgctgaatacggttatccaaccaattaagctttgtacttcttttgttttgttagcgatttcatatataggagggcttgtattttctcagggttggcttctattcctcgagcattaacgataaatccaaaaaaattactcaagctgaccttgaaagaacactttaagggattgagtttcatgttttatttttttgaggattttgaagcattcatacagatcctctatgtgcccccagccttcttagatttgacgagcatggcatccacatatactttcatattctgtcctgtaacgtccccacttcatgcctccattgggcctttaaactcatggaatgatggtgtaaagcccgcttagttaatttagaaattagcagttgtttatgattatttatgaaatta

SEQ ID NO: 152811 - DNA, 644 bp, Cannabis sativa
tagatctgagcttttaaggatggatattggtgtagcaagtgtcataacacctctgatctacacattttttgtcgttggctagacctcaataagagatcaggtggtcttccttcttctcttgtacgtactctctttttgacaggcttgcatcggtaactgctgtgcatatctctttcttcggctctcaatgaaagcactaaaatgtttaccgaattttttggcaaccgaatatttgtagagcttaagaaagtaatgatggcataaataatgaaataacaaacaaaatatttttacatggttcaggcattaactatccttagtccacgagtctaggggtgttgacggattggtttggttcgaattttcatagtttttgaaccaaactagtataactattttttgaatattagaaaccaaaccaaaccaaaaaatttctcaaaccaaacccttaagaacggtttggtttggttcgaaaccacggtttaagtggaatttataattattacgttttaattttatttttcaaaatatatatttaacatgataagtaatagatctataacatatatataatgatataaaaatattcgcaaaagtcaaactaacataaaaatttaaaatttatgcaataaaaaacttgacac

SEQ ID NO: 152812 - DNA, 567 bp, Cannabis sativa
agcgaaagagaagagagagagaaactaaacttcaagcttcaagtaaagtaaatttaatttattaactagaaaattggatgttttgaaagctaactatgaggatacatatgaaatttatgctgaaccttattttaactatgacgtagttgataataagaatggtaatcataatttgaaatttctttttgactgtagtggaagtctgagtacaactacaattacaatgcacaaattgattggaattttgttgaaaaagcttataagttttgtcattcatctcaatttagcaatagcaaatcttttgaggaaaatagttcaacattgtatgctagtctggagaatgaaagaatgatgaatgaaaaccaaaatattttgcccactcaattagtagaggaagatatggaattcaatgaaattttttaaataatgttcttcctccacaaattgaaataataccatcaccctcgaccccaatctcttgcaatctcgatgaggatgacgcgattactatttagagtgataatatttctcatcttgaaattcttccaatcattccaaatgtcattc

SEQ ID NO: 152813 - DNA, 685 bp, Cannabis sativa
  modified_base (266)..(273): a, c, t, g, unknown or other
gtgcggattgggttggattagaaaattcaaaatccgcacttgtgcggattgaatattgattgacatgtaaaagtaactgattcaatccaatccaatccaatccacacatatacttataaaaaattaaaatatatatgtacaataatattttaatgtaaaaaataacaatttaaaagtctaatacatataatacaattatttttaaaacttaatagatcaaatgtatatttcattcttatatataattttttttttctacatacaannnnnnnnaaaattaaatattttttatacatacattttttttcttcccttgaatttgttatttgttattttatttactttaatttattattggagacataaaataataataatctattttattttattgctagttatgtgaaaaaaaaaatattttttcataaatactaagtaatttattattaaaaagtaaccaatctaaaataatcgatccaatctacacttttacaaactagattggattagatttgacctattgtgcagattagattagatccaaaaataaaatctgcacttagtacggattggatacactatgagcaaagttgtacggattggattggatgaacacccctaggactcaatatttaaatacaccaataacaatattaacacgtaagagagtgctagacaccactgt

SEQ ID NO: 152814 - DNA, 863 bp, Cannabis sativa
aaaccacactaaaaatttccaaattacaaccccaatttcaaactatcaatgtatccaaattaactcctttataccaaataaaccctcttccatgcatcaatttcaaactatcaatgtattcaccaattttctcagcccaatattcttcaacaattccaccaaattttcattcagaccacccaaaccaaaattatcacactgctaccacacttaaatcacaaaataacttccaattatgcaattcacaaaatattcgcagtccactacagctaccaattatgcactacaatccaaaataactttcaaattaatttacccaatcaaaacttagcttgaaccggtttcttgactcgagttgatgtaagtgccgactgaaatggctcggctgggttgcttcgaagtcaggtggatctgttgagtgtgagctggtggagtcgtgatgttgttgggtcgacttgtgtgcacggtggggcagtgggtttgagttggtgcacctggttgtgaatggttggtgcaaggtgattcggttgggtgatttacgggttggttgcaggttgaactgggtcgagctggcgatgggagcgactgggttgagtcgaatggtggaaatggctggtgcaaggtgaacggagatggctgggtttctgtttgagtgaacggagatggtgcgaatggtgagtgcttgggtgacttcggggggtgctactgctgttgaacgaagtggctgagtggagtcgaatggtgactcggtttcgtggttgggttgaagctcagtcaagtgggcgaagtggtgagctgatggtgcgatgtgatggtgaggtcgtggtgcagttcgaagtttcgagcttggaggtggctcggct

SEQ ID NO: 152815 - DNA, 625 bp, Cannabis sativa
cctacacgtgtaagctatattttaaagccaaaaattaattttttaattttgtcacaaataagatttattatttattttgaaacaaataataactgcttaattctcattaatctcttatttcattatgactaaaataattattattttacactaaaataaaattttctctctctaatattatttaagaaatatattatatttaactaatcaatatagtttcatcaaataaaattaaatagttaaatattactttaattattcaattcataattgatataattatttaaaataataatttatacaaaattactattttatccataaaaattatttctcattgaaattaattatttctccatttgttcatcaagtcaaaccttcactacaatattgtataaatgtgatttagggaccatgaacctatatattttaaagctccaataaactcttgattattattgaactctttaatagaataatccgatttattaatttcattattattctactttaaatatagaattgcactttttgacaatataaaattatatttacagaattcttacttgtagttcattgctgtaatcaatataagtagttcacctccaattattagttcataatt

SEQ ID NO: 152816 - DNA, 506 bp, Cannabis sativa
cacgtgttcggacaggccttgtcccagaaaacacgtacacgggttttctgaataacctactccacgcgcggaaaccctgcatgcagggtagatgtgtggtcagcctcgattaagagcaccattggacgcgcgcggatggtatgcataccatccgacttaaatccaaattttttttcaattttttaatttttccataatttttaaaggaattaatttcgaattttttgtgtaattttgtatgtagaatttaatttttcattatttttaaaatctaattattagtttgaatttaattatttttttaattagttttagatattagtagattttaaacctcaaaagataatatctacatccttttttgttcagttggttatcttatttttaaaatttgattattatatcttattattaaatttaaggtcagatattttatattcattatttaaataatttagtaaaatgaccttatttgaaatttaaaataagatatatttttttaataa

SEQ ID NO: 152817 - DNA, 631 bp, Cannabis sativa
  modified_base (46)..(46): a, c, t, g, unknown or other
acggctcagttaacacaaacaaggaactttctcctatgagagcaanattaatgttctcattccattgtgggctcagtcccacaataatattttcccgaaattgtgggctttatttacgcaccacgtaaataaatacggttattaattggaaatcataaagttgtaaacttgaattagatacgctgcaaagtgtatctcgttgggaacttgaatagcaataataatcctggcagtgaactagagcttttcccatgtcttttcgagattgatcatataaatcccgtcatttctgcgattgaagacataatgctccatctcacaattgcaattcttggtgacaaggtgaaccttagtagtcaacatcatttgaatgtcagcttctaactgagagagctaactcgacggagcattggatctcattaaaagatgtctggaactgattagtgaaggtaccatgagtatgccttccaacagcgagatggatgcctcgctatttgccacttaggttcttccagccatgatgcttagttagtacaaagtataatatatactaagtgttctgacagtcaacatgtctcgtcatcgctttttatacgtagcgaggttggtgcctcctttgtattactgatgt

SEQ ID NO: 152818 - DNA, 554 bp, Cannabis sativa
tatatttaatagattaaccagaattttgaatgtagaagggttagaaatttataacaaaattaagggactaattactaattcagtactacatatacagtgtacttaatgatagtaattattctccactcctgcataaatatataataagaaaagtccacttcttacacattcacaattacaatccaagacccaaattccaaatcttaaacccacttttgaaaaaaattcaagaacaaccatgccaaagtaataattgaaaatagaacataaaattgtaccaaccaaaggtttagactaagcaaaccaaaagatttgacttgacttaagactcacaagcactgttggccacttttagtttggtagtattaaatatggagaaattctaaaaggcaccattagtctaataatttttttggtattatagtgtcatatctagggctgaacattttgagcgggtttgatccgaacccgagcaacccacccgaatccgaactggttaacccgcaaaaaaaaaattttaaaaaagtttcgggcgggttgggttcaacccggta

SEQ ID NO: 152819 - DNA, 1103 bp, Cannabis sativa
aaacgaatcctataattattaaatagatagaattgacatttatagagttaatattaaaatatggtatttatgaaaaaaagatgagttaaataaaatgtcaaaattaaaatccataaggctcattaagggtttggcctaggtggattaataaagccatcttttttttttttaaaaaaatctatttaaattctatacctaaccctagtatctccctataaatagaaaagtatagctcttattttcagaagactcagtctccttcatcagataattagaaaataaagagagcttctatttttgaaattccttcttcttcctcaaaatttcgaagttcatggtgaattgagagtatgcccactcatgttaaagcaatacctatcatagtgaggaagactatgtataacaaaattgaaggagagaagatctaggttcagatcttgataatgctctgctacaaacaagaatcaagggctagagatctgaatggaaggagtcattattattccgctaccatcaatgtaaagatttcttaatctcttatgtgtttaattcattgttttaggaaattcatattttggatgttagattatagattataatcaaacatacatgttagtaaatctaaatcttgataaaacaagttccaacaactgacctcaaagctatggtaatgatttattttcatgaaatatggatttaaaatagttatttgttaatttggatgtgttcatgttggtttatttgtttcattgatgattgaatgtgaattacaatttttttttttgaaaaataaatttatttttgtgctagaaataatttattccttagtctagaactcaagtgtgtgggccgaactcagtggaaaacaagctgagaaattccggtcctatgtcacgacaaccaaaacttagtaaaaatctttatcaaaattcttggggataaaccctaattctcataaccggacaaccccatttcttcttggattaaactaacttaaatatctctaaaataccctgaatttcacttcgaaagataccctgaatgaaattggacttgaggggaaaaacccaaatttccccccctgctggccaaaccggtcgacc

SEQ ID NO: 152820 - DNA, 640 bp, Cannabis sativa
tatgttttagagaattatcatccctttgggttattaattctagatctactaaccatgtttattttattcttattttagctccagctacttaaacttgggatgatatcctagcgagttgagtcagatggttggacagaagggtggagattgtccaagttgaagatgaagctcgtttttcttctttaatttttgaattaattgttttagttatcgaataatttagtttcaattattactatagaattttactccctatttcatattttgtagacaatttattatgacattttcgagagtatcaataaaaaattttctttaagaggttttcattatgaattgtttttataaaattgagcttcatattctttaacttgtatgccaatactgtattatatttatatgtttatcatattttttttatgtgttttgtatttattaatgatataaaatctatggtataataatctctggaaagagataataccacataaacatttagaatttaaattcaatatttatgaataattatcatttcttcaataattattaagattttgtttaataaaaagatcttttgatctgataggggtggaagaagttaagaagtaatatatgcagttcaaatatcttttatatctat

SEQ ID NO: 152821 - DNA, 991 bp, Cannabis sativa
ttgattacactcatttgtatcctgactgtaattgttgtgatagcaatataattaattcatgtctctcttccctaactctttgaacaggagatatttacggtatgacattattaattgtgtggtcatatagatcttctctcttagagccaagagaatgaagtaggtggtgaaacaaggctcatactctcgtatgtgtcagctcccagtttaggccttttttccaccaggggagttgccttattttccactgttattggctcttttccctccattcaaacctcctttcttctcaatactctgtgctttagtgtcaagggatggggagtccaatgacttcttcttgctaccttttgagcccttggcttaggtgataactttttccagcttgataaagcaatctcctctatcaagaaagtcattcatggagtagacttgtaacgtcctaacaaataggcacgctacgacaaccaataatataacataatcccgctaaactaggaatactagaaaataagagtgggaaaatttaaacattgatttacttacggaataaaaacataacttgtaatattttaaactttacaaaccattccaaaatattatacgtgttttgggatcccataaaaaatttaacaaaatattacaagttacttttacatgccgacctagacagcaaaatctgagaatacaaaatacatccactgtagactcaacccgcttggtctcatatgcccgaacatgttgtacaatccaccgctaagccctcgaactcatggctagttacaaaaacaaatttcccttccctccacaatagagcacccatgagtcaagcccaacaagacagtataaatatcaataaacaaaagtcacataattattgatttcattgcacttattgtctatgacatagacctgcatgttacactcacatgcatatttatgtctatgtagcataggcttacgtgttacgctcacacgtctatttacaata

SEQ ID NO: 152822 - DNA, 763 bp, Cannabis sativa
  modified_base (615)..(622): a, c, t, g, unknown or other
ttaatatctaaatgaattttctaataaaaaataaataattttttatatcgcttaattagttttgaagtttagtttattttttaaattttcttaatcattcaaaataattttttttaagatctaaataaatttttaagatttattaaaataaatattgaatattttttatttttattttgaggggttacgttttgatagttatcaaagtttagggggcaaaattgttaattgacaaagaaacgtcatcatttaaacaggataatgggacataacctaacagaaggactaaatttctataaatgtaaaagttcaggggagattcttaacacgccgtatagtttagggaccaaaatcattattgttgatagttcagggagaaaaattactaattatgatattttaaataatgagctttaatctaaagaacattcaactttcattgttggttccacatagttcttgtttaagcgagattcatcactaatagatgttcgttcattaacaatttaacgtcgtaaaatctcgaaagataagtattattataagtcttctattcttagtaacgatcaccccaatagtggttgctaagtgtagggcttacaaagtatgaaacannnnnnnnagctcatgaaataagaatgaccttaactctctcctaaatgggacaacatcagattcacttttcgattaaataaaaggttgctagaatggtgtccatgttaaatgagctggctactctattcaatgaatgatatctttgaat

SEQ ID NO: 152823 - DNA, 539 bp, Cannabis sativa
ttacataaaatacagtcttttgatttatattatggtgtactcttgttaattttttgttaatttttcgttatttgtatattattttttgttattattttgatgttgtctgaatgttattttcctgttacttttatgtagtttttttttttattgttttcattttgtttttattgtacaccataaaaatgtaaaaagaaaaaaaatcacgtaaaaaatataaattttttataaaaaaataattttttatgtaattatctcatttttttaaggttatgtgtaatgtattatgtgttagataataatatgaaaatttaaataactttaccaggtttgcaagcgggttcgggtccaatacgaaacccaaccatctaaaaaatcaaatccaaaacccacccaaaagatccatccgttccgaaattccctcaattcgtcccttactgttcgcctcgatcgcacgaactatcttgcgtggaaatctcaggtgattcccacggtcattgggcatggacttgatgacatactcctcactggtgtggctc

SEQ ID NO: 152824 - DNA, 1331 bp, Cannabis sativa
  modified_base (1069)..(1069): a, c, t, g, unknown or other
gaggtggacttggccaggaaggacgctgatgatgctagggtggagctcggagctattcggatggagcttggtgaggtcaacaaaaagcttttcattgctgagaagaaagtagctaagttgactaaggaccttgaggcttctgaccagcttgaggctaccattggctcgatatcggtacaagtgaatagccttcaggaggaaaggggagttcttcggactgtcttccgtctgctagaagaggagaagaagactgaggaggaggaacttacagttgagattgagaagtagaagtcagggatggcgaagcaggttgaaaaagtccatgccttagagacagctggtctcgagattttttatgaatttttgaaggctaaccctcaggcaaatttcgattacctgggcaaggccaaagacatgtatctcgagtattgtgcttctcaagtggcttatggtgagcccgatgcgactgcttcttcctccggccaaaatgctgatgtacctcccattcaaacaacaaatcccctagctcctaccggcccagaagatccaaaccgagagcctgggactctagctatttaactacttctcttttatccttctttttatatagcttattcggccataaggacttttttaagacatcataaccagccaagcggtctttaaacttggaattatttttcattttacaaacaacaggctgaccgggcagcttttaatcccggtgttacgtgcttttgttatctttaatgaatttcattctctatttataatcatcgtgcaattgtgtttgttttatctttaccaaatgctttgtacaggtgtaggtgccccccaagtgaccgagcagacttatgactcttggtcacttgttttttacaagtatgcttttttatctattcggagtcttgggttcgaccagaccttttgtacgcactagatggtaaattagaaacatgttagtaatttcgactcaatttgaattttgaaatagacatctttattcatttattgatcgaaaatgtgtttgttaccgcagtaacttacatcagggctatttgatctaatntgatcttctagcttaacatgaaataaaacaaattatagaaataagaaattgtactttaaatggtggtcatccgacctgagtactttttcatttttgtcgaaacctttgagcatagtctgcccagcagtccattcacttaaaagtaaatgttctttcagtacttagtatggtcgtccgacctgatagtttattggtagtattttcttaaatgttccccattccaataccatggtactagaatgagttgcattttttcatcata

SEQ ID NO: 152825 - DNA, 555 bp, Cannabis sativa
  modified_base (222)..(225): a, c, t, g, unknown or other
cattgtgtaccttctagtcgggcactggaatctactccaatatttgtatcctattctctgaagataacgtctgattctgttgtctattttgtcaagttcttacatgtatcctccacatgatttcatgttgtatgttttggtggcttaacaaagttgattgtaagatcttccccgtgtactccaaaattggccttaatgttgttaagcaagtggaatatgcannnnccatggaatatgtttgggtagactgttgctactactttctttatgcttttgtgctagtctgagatgattgtcatgcctgcgagtcaaagtttatcgaatatcagtttatgtctgttttaaccggtttttttgttacttttttttttaaaacagttatttatgttaagtaagtctaacaacaatagaaaaactattacactaaagatgatgtatttgctgtaaatttctactttaaccagtttcttaccttctctttctctgaatgtttctcttagcttgtggaagaaccactcccatgatgaatcattctccgagtctcctattccaaat

SEQ ID NO: 152826 - DNA, 775 bp, Cannabis sativa
  modified_base (749)..(749): a, c, t, g, unknown or other
tataaacaaaatgtatgtatttacccatacagcccatacagtacacctatacgcacataataacttatataccaattaatatgtattatctaagctttggataatatatataaatacatctatatatattatatctaatgtcgtttcaaattatttgctcaatactatctgtaatccttattttggccaaattatacattttacaaaacaacattcggataaacttatctaattattaataatttactaatttaattataaccaatagctaaaaacattatatatctaattatgagatcgaattgaatgttatttttgaatatccaattagatcggattagatatttgatgaggtgtcataaaattcaatacatctaacatctaatggaactaactataatattttcatttagtttaaataagtcattagattttatgtggttatacgtgaaaaaaaataatatatatatatataaattagactaattagaatttttgtccccagacttttacatgtatcaaatcatatctctctgaacttttaaggtcgtcaaaaatcactctacactattgagattattgaatttaaaaattttgatctaattttagtaaaaaaaatctaacataaatgaaaagtcttattttgtcaatgttcgaggggcttgctttggaagctatcaaagtttagggagcatgatttagtacataaacaatcactaaattaataacactacaaaaaactgctactnttagtgacaactttttagtcataaca

SEQ ID NO: 152827 - DNA, 508 bp, Cannabis sativa
atttgtcattctctaaaacacatgattcaaaaactaaagcattaccattgttcttagtgttgagaagtctgggacaatttgattcagaatgtcccttctgatcataattagaacattgaataatatatctacttaactgttcttggaatatgttcttattgctggttcaatctattgtgaaagataatatgaggaagtggaatcattttctctatatttctcaactgagcctgaattagtaggattgtcaaaggaattattctcaatatcttcatctttccttttgcccttatctgcattactgaagaatgatctccatgcaagtgacaatgtccgttcataagcacgcaattcagcgtccaacttatctatgttagacgagttccaattaacaacgaattggttaaacttaggtgataaactattgagaataaaatgaacactttgctctccagataaaacaattcccagcatagctactttctggaattttatgttcatcatgagc

SEQ ID NO: 152828 - DNA, 542 bp, Cannabis sativa
aaaataatttccaacaatatcatatttgcccttgtgagtgtaaaagcatgatatatggccctagaggcaaaatggtcttttgacctttattttgttaattgattaaatatgaaattttgagaaaaagaaaggaaaaatttctggtttattcccccttgttagagtattagctgtatattagctgtaaaataattagatatttagtagtttcctattttgttggtagtttcctattttagtctcctaactttgtatataaatatgtattattctatgaaatacatacacaattcgattcactattttctacatggtatcagagctttgtgattcgaaattcggtttcataaaaaaaaagattagggtttgagttaagggttctttttcgaaaaatcttttttggagtgcgaatttattctcaccgcccactcagcagtgttgcccaaccgccgatctatgaaaccccaaagtctggtcaccgaattcctcgcgcgtggggctgttggaaattattttatcaagatcttagatctactcacaag

SEQ ID NO: 152829 - DNA, 666 bp, Cannabis sativa
tatagggctataagcttggagaggatgtctttcccctctcgttacaatggatataagcagaaagatcgtgggattaatgctaagtacaaggatcgtaggattgagacagaatacactgatcgtgggatcgtgtgtatgccatatccctgcaatctgatccccaagttagagggatttcgttgatgactcacaatgcgaaagttgaattcgctaagtgttggttgccctgcacggattgttgattgctttgctctgggcatgtcaacgaggcatcgtgctcggactgttccctctgaccagatactccaagtttattccacgtgtcaccattatgcgatgccacgtcagtgtaaaaattgggataatattttccccccaagtctgtacgagacttccaaagttgcgtgtaagcttcatccgagctgcttttgcctttggatggggccacgtgtcaagcacgagtgtccgagactcgatgtgaggctgagtgggcgtcctttcggttttcagctaataaatgctctgacaattaatatttcgaaatccaattttctctcaccacagctaatgactgcacttgattatttttgatttcccatatttgcttttaaggagggaaactgaggcgtctgaggttcctttgaaatgattacctcttttcgtgac

SEQ ID NO: 152830 - DNA, 520 bp, Cannabis sativa
ttctttctttatatatttttttttttaaaaaaaaaaaatagggtttcaatttgtcccaacctaacattatgtgaattttccacttcgatacaatttcttacatctatgccacaaactcatttctctagtcaaccagctacagttagatttctcattagtttttaataatttgcttgttattttcctattgttatacttatttgtgaaaaaaaaaacaataatttcaattaactggtaatctaatttgataatatttttttattatctttagattgatgaagataatttcaacgaggagcgaaaatagttaacaatcattaattttatagttgttattacattttttacttaattttttattttttaaaagaaaaaaaaaactaaataacttgaactaattttggacggacacactaatttaacacttaaaagtgttaaaaaataagattaagcataaaattatctttaattaaaagtcattcatactattttttattaattaaagttatatgtgtaataa

SEQ ID NO: 152831 - DNA, 672 bp, Cannabis sativa
gctcccaagaacttcagctgtctctctgcgagttgcgtcgagtgtagggcgagatggtctatctgcgaaaacaaaaaagagcgagttagcttaaaacctcaaaataactcagaaaaaatgtctaagttaggaaacatgcgacatactaggtcgacggttaaagtcagttctaatccctgggactttgaatatgtagaaccactttgatttccaatctcccatattagaaaccatgccttctaccccgttaatttcagaagtcgcccatctgctgaagcagtagaaaccattgtgaaggcttacgctttttatatcatagaagtagctaaactcttctactgtgggagccctatgtacatactccatatacatcgcgtaaaaggcaagggttgtgcgataaatgttgggggttagctggaaaggagacacatcataacgcttgaggatagccacaataaagggatgaaaagggactgataccccacatcgaagaatgggtattgagattaccacatcctctgtgggaataattgctggattggtaaaaggaaggtgcgccctcttggtcggtttaggtcgcagagaagcaagtcgcaataggtttagcctcgtaaaggtagtgatgtccgatttggtaactcttgaaaccaagtcctcgcacgaaaagggctc

SEQ ID NO: 152832 - DNA, 698 bp, Cannabis sativa
ataattttatttatttctttatttgcaaaatgctacttaatttatgataacagtgagaaccatttttttttttatcttaatattcatttaatgatttggaaatttatttttttcattcgtctgtgttcaagttgcgtcgaaactcaccttcttcaaaatccacgaatcattttttcacagagagaaagagatttagataaaccttttttcttctttttgtgtgtctcgatgatttgattcttactcaaagacccttatattagtttcttattttttttttgttctttcagactctctcttcaatttctttgatctttatcaccaagtgggctttgtatcctttgaataataaaaattgtattggtcgctcttagaagatggtcttttttaggttcacacttcattcatctgatcattctattcatacggatattgatttagatataatttttctttagggtggatttgttttaacactaccaatatcaattttcctaatattttgaaataatgtcgaatgagccttcgtgttttatgttggtgttttatgcaattaacattctttatgcaattaacattttctctttcattttctttctccgcgtttctcttatctttgcaagaaagtaaaggcaaagaagataagaaggtgatcactcagcttttcaatcaatgtggttgagtactccatttgggtt

SEQ ID NO: 152833 - DNA, 886 bp, Cannabis sativa
ggcaggtacttgctccaagagcccccgaaatccattacacaggctcgttacatgtcttccagtatctgaattgtccttttgggctatccatcggtctaaggatggaaagcggtattgaattttagtttggtacccatagccccctagagactctattagaatttcgaagtaaactttagatctcgatctgatataatggactttggaacgacatgtaatctcactatctctttcatgtacaaatctgcatactaatccactgtaaaggttatttttatcgatagaaaatgtgtagacttcgtaaatcgatctaccacaacccaaattgaatcgtacattcccatggtttagataacccaaccacaaagtccatggtgatatcctcccacttcaacttaggaagtgtcagtggctgaaacaaacttgccggtctctgatatacagccttaatctgttgacaagttaagcactgtgatataaattctaccatatctttctttatcccgcaccaccagtaataaggtttaagatcttgatacatcttggtagtgctatgcagtgactatggagtggtatgagcttcctcaagaatcttatttctaatttctgcactacttggaacacaaatcctagtcttaaacaacagcatcacactatctgacaccgtaaaatcttcagcttgaccagctaaaacctcttcacggatcttcactaattctggatcagctaactgataagctttaattcgttctaacagatcagattgcagcatcaaatgatgaagtttgcctacaacaaacttaatgcctaatttgaccatgtcttttgctaaccaaggtaaaatcttaatcatattaattagttatctgcccgggacccttcctac

SEQ ID NO: 152834 - DNA, 862 bp, Cannabis sativa
tttatatgtgtttaaattccattattttagaaatttatttagggtgttaataaacatacttattagtaaatctagatcctagtaaaatatactccaacaaacagggtgggttccttgaaatcctcccactacgacgaggtaccataactttttgtctaggaacattattggtattgacctcatctgttgtgtcaatatagcagaagcagtgggaccatcttatatagaataagacgatagaactctttggaattaaaaaaaaaaaaaaatctcctctactttgctttcaaatttagtcatattcttagaaaagtagtatttgttgaaacaaacactatcttatcttaatgactataggatagtccacccctaatcactttagaatagctatcaaacatgcaaattttagttaacagttctagtttttttaaagttcatgatagggcatccatgaatctagtaacggtgtacactaagtatatgatcaccccatcattctgaggttttcttgggatcagacttagatgggacgacatagaatgtcgtttgctatcactaaggcattctatagaaggacttggcagctggaagtaactaatcatagaccttaccttttcatcaatatgggacttcgaagttctggggagataagtttggatacaattcgaagttcaacttaataatctttgaactgcataattaaatatttctccacccctatcagttcacgagatctttaaccacttaccttaatggttgtcaccaatactagaaattcgtgaaatttctcaaatatttcaaattatattcaatgtataatctagagtgattgtcttaagaatttaatgataactcatatcca

SEQ ID NO: 152835 - DNA, 654 bp, Cannabis sativa
ttaaagtatattctgttaaacaaagaatccccgttagataggcacttttaatatataaagatatatacacatatatacttttacatacaattacatatacaagtatatacttttacatctatatacatatacacacatatttatacatatacacatatatgtatatacatttacatatatatacaaatacacatatataaactattatgcacatttatatacacatacacacaaatttataaaaatacacataaaactatataaaattacacacatctataaactaaaaaaactaaacacaattttatactcaaattaactaaaattattatatatacacaaataaaaacataaattaaataaaaataaaatagaaaaatataggttaccggagcggaggtgcggcggcacgtcctcttcggaatcccggtacaaatgtttttttgaaaaaaaaagaaaaaaaaaagaaaaagagagaaacaagtttggaggttaaaaataaggttttgggaggttgaaaatagagtttggaggggaacaaaggggtttgtcggcggtgggtgtgggaattgcatagagagagaaagagaagaggaaaatggggaagaagggttcgctgctggttttatttactttcaacttttgccggcgcaa

SEQ ID NO: 152836 - DNA, 943 bp, Cannabis sativa
  modified_base (900)..(903): a, c, t, g, unknown or other
aaactgatacagtgtcccgtattaggcgagagtcaaagatatcattcattaaatagagtcgtcgactcatctaaaatggataccattctagaaaacttttcttcgatcaagactagaatccggtgttgtcccgtattaggcgagtgtcaaggccattctatcttatgagctcattgtttcatactttgtaagccctactcttagaagccactattgggatggactttactaagaataaaagactaacaatattacttacctttcgagattttacaacgttaaattactagtgaacgtccatctattagggatgaatctcactaaaataagaattttgtagaaccaacaatagagatcgaatgtccttatagctaaagctcattattttaaagagtgtattttcatttgatacttattttaatctatttattttaacatacatatttattcaattaaaattactaatttagataactctaaatataaattttaatttagtatttataaaattataccttaggaagatctgaaaaataaaaaatatatatatttttcatccttagtatcaattttccaataaatagtatgaaaattacttgatttaaatttgtccaaaattaataaaaattaattttcaacttaaaactaattttctataaatatatataattgaattcgaaatccaatgtatttaaattaatacaatttcgaaattaaacttaaaataaaatgaaataaaaatagaaataatattctaatttatgttggtctaaaatcaacaattaaattaatattcaacataaatataatattcctatttaattaaatctcttaagaaaaataccaaatacttaagtgtcttgaacaaaatcaactttaatattaattttctatttaatnnnntatatctagaaaaataccaaaagtctacctagaaaatatc

SEQ ID NO: 152837 - DNA, 522 bp, Cannabis sativa
cggtaagattataatatctttactcagatcaatattggtctcagtccaatgtatacttcatacatctgatactagcatactttgaatgttattccaattttcgcactctcacggcatcgcataatggtgacacgtggaatccacttgaagtatctgctcggaagaaacaatctgagcaggatgcctcgctggcatgcccaaagcaaagcaatcagcaatccgcgcagggcaatcaacacttagcgaattcagccttcgcattgtgagtcatcaacaaaatccctataacttggggatcagattacagagatatggcatacccacgatcccatgatcagtgtattctacatttatcccacgatcaatgtattccgcatatatcccacgatcagtgtatactgtagagatcatgcgatctttctgcttacaaccattgtaacgagaggggaaacacttcctctccaagttcacagccctataaataaggatgcatgttcactgggcaaaaggtcgcaaacagtt

SEQ ID NO: 152838 - DNA, 584 bp, Cannabis sativa
acatctcacctatgctcatgcatcactcatgaggtttgctcttagcaattggctcccaaattccaacaaaaccatggtgtctcaagatttggcatcctttcttttttttatatcacctcgggggcacccattgatctggcttcatcaatattggaccagattgtttcttttcggagaggtaaaaacgtactcataaggttgtgtttcctaacctcatctataaaattttgtcctcttagaaagatgtggctcaatctcatgaaacacttgagtctccacttactggcaccatattccaaccctgagagtattttgatggagcttttccaaagcgtcctaaagctggtgttgctgctgctgcaagttcgatttttgctcctgcaaatgtctaggaagtcaagcatgaggttcaactgatgaacaatcatcttgctgccatggaggaggtttagcaagagatgtccaagcaactgtattcattgatcaagctctatggggcataagttctctttcttttttatattcttttgttggacatatttgttgggttttgtgccctaaataaaaccctttacaatctgatt

SEQ ID NO: 152839 - DNA, 519 bp, Cannabis sativa
agagtttaataaaatctccggaattgagaagttataactctagtgccaatttctaacaatgggactcataaataattataaaaatatcatatattagtggtaattgtctttactaatccaaattactaaagcagtcattacaattatccccctgttaaaaggatttcgtcctcgaaatctaacctgaatagctctagatgttgagtcctcatgtcagactctaattcccaggtggcttcctccaccttgttattcctccaaagcactttgaccaaagcaatagtcttgttccgaagaactttcttcgttctatcgaggacctgaacaggttcctcttcataggataagtctgactgcagttcaagggcgtcataacttaagatatgagtcgggtctgaaacatattttctcaacattgaaatatggaatacatcatgtacagtcgacagcgctggtggtaaggctagctgatacgctacctgcctgaccttctcaagtatctgaaatggcccaatgaac

SEQ ID NO: 152840 - DNA, 942 bp, Cannabis sativa
  modified_base (55)..(57): a, c, t, g, unknown or other
accacaagccataggtttagatattcttaaacctataatactaggatcaggaagnnntgttaagtccattgaatggacttactaacaaaatttcctttcttgtccttacaatagaaaacctttggtttctccatacgaatggttttaaccatagttctactggctttgcttcttagttccttattttgactatccattacatctttaaactaacaataaatttttgtcacaagtgtcttccaggtcataataggatgacttccttaaaaccctcccactacaacaaggtaccgtgactatctgtctaagaatataactggtattatcctcatcagttgtgtcaatacaacagaggtagtgggaccatcttatatagaataagatgatagaatactgtggaattaaataaataaaaaaattatctcatctactttgctactttattttcagatttagtcatattcttaaaaaagtagtatttgttgaaataaacagttctatcaaacagtccacccctaatcacttagaatagctatcaaacatgaaaacctcagttaaatgttctagcttttcttaagttcacgatcaggacatccctgaatataataatggtgtacacactaagtacaaaaccattcaatcattttgaaattattctatcactattgtattccctagaaggacttaggcaactactagtaactaatcatagaccttatactacatcaatatgcaaattgaatttctagggaggtaagtttggatagaatttgaatcaacttaatgatctttgaactgcatatccaacaaatatttctccacccctatccgttcgcaagatctctaactacttgccttaatgtttttccaacattgctagaaattcatgaaatttctcaaacatttcaaatttctttgcaaaaggtaaaatctagagtgatc

SEQ ID NO: 152841 - DNA, 833 bp, Cannabis sativa
  modified_base (49)..(53): a, c, t, g, unknown or other
  modified_base (705)..(707): a, c, t, g, unknown or other
ctgatggaaacttgtaataaagacacttagatgtgaagaataagatgcnnnnnaagattgaaaagggagttactcaaaaggaggaaaaatactcatcttacggctatagtgcagcattacagtattgggcatacgaggccatcgtggagctaggcaacgagaatgcagtgaagaagtcgcatcgctttccgagaatggtgaactgggagagtaagtcgaacacgacactagggaaggacgaagtgataagattatttgctagaaaatgtaagtttcttacgcttcatgttaatttccatctattaatatattcgttttacttttcagttgacagtttactctatgttatgtccccgagcgaatgagattgagtatgtgagttacatcactagtggtcaagcacctttatttgttgacttggaggaacttgtgttgggtgaggatgggcaaccaaaacaggatgctttgtgaagcaaggccgaaaatgcctcgattggaagaacgagcggatgcagccagaatatttagagactctacaccacctccaccgtctccaccacgtgcaccgtcttcagtaccagatgagtctggcgttgccccatctgcagcgtcacatgatcctcctcatcgcccgtcaacttctattcccagcaccttagaggcttacgaaccagtataccctgccattttggcaaggttggagannntggagagggggcagattgctttgaaggaaggacagaccgctctgattcacagtcacaaccacagccacagccacaaccagaagaagaggctcagtcaccggaaaatgaaatcattctcccaaatga

SEQ ID NO: 152842 - DNA, 848 bp, Cannabis sativa
agtccaaaattgctcttccaatttatggctcatttcacaagtttggattcacttttaatccattttatggctcatttcacaagtttggattcagtcataggtaccaagttttcctctaaatataaatccagttcagatttcacattctctactcgataggaagctctaacaaatctatcaaagttagaaagggcatccaatcaccgtgttgaagaagatgttgatatatttttcacctgaacccttctttctctcaaatgagaaaacttagacctgtactcctcgagtagctcgcaacaaagctcacgaacattcgccatttcagttacatattgctcatctccatagattacatggaaataatattcgagaaacataaatttgtatctcgggcctaaaacaaccgccacacacataaccccgtgaatctttccccaatatttttagaacttagatatcatttgaatttccacgtccttaataaaaggcacatctgatgacatccatgattcaatatttatcttaatttcacatatttttgggaaaaaaatattagcggtagggtactttgttccagaaaacaattctatcacttcatgaaacaactctaatttgtcacataattgttgagcattctgccaatcaacttccgaaggggcacacctcaaacgcaactcacgtagccttgcacgttcaaatactaacttgtatgataaagttgtgctaaacatcaaaaaagttgaattccaccttattacacaatcaagtgatatttttcggtgtatggtactccaagttgacgagcagtgtccttaaatttttcgtgtctttttggtgtgcccgaccaa

SEQ ID NO: 152843 - DNA, 502 bp, Cannabis sativa
gtgatggtcgtccgtcacaggctccgtgggagttggagcaaaggttcgcagaaatggaagctatgattcaacgacacgatgaggagattcagaggttgaaataacaaaggtatcctgtattacctttacctcatatgccagtcattttcaattcggtattaccagcagagcatagtatggctgataaccaagtgggattattgcatgagaaaatttggataggtgaacctaccgtccttcagggaaattcagatatgaagaatgctctctggactggaagccctaaagaatgtattttaggacctcaagaggttatgccacgaaatcgggatactgcttgccatatttctagttatggcagaggtggtaagggctccatggttgagcggaagagtaaaactacgtcgtcagtggtgggtttaaaacggaacaagcggttccgaggaaatcaaggcaagggtgtacgcaaggattattcttaccctgagtgcccgcgatgcaa

SEQ ID NO: 152844 - DNA, 500 bp, Cannabis sativa
taaaagttcccctatcgataaataacatggcaataccctaaatctctcaaaaatgggaaaaactagggttccaaaaactcccccaaccggcagaccgtttcccaaccggaattcatgttctgggtcaccaactggtcgaccggttgccacaggtcccccagaactggaatttcggttctgtgctgggaacccgaaaaattctccccttgacctcaaaatccaaccaaactctacaaaactttccagtatacctgtacaatgtatttacaacataattcaagcagaaaatcacaatacaaaccgataaatcaaaggatgccattaaagcccaaaccttgagcttcaaagctcaagcttgctcaataccctcaccacagctcaaatctaatagccagagctcaaaatcaagtcaaaataaacttagaattcaaaccctaagcaaacctaaacctaagagccactatttcacaacttcgtaaccttaaactcaaaaaaaaaaa

SEQ ID NO: 152845 - DNA, 856 bp, Cannabis sativa
caatctgtgagtaattatggtcggatctatcccgggcatgtccgagtgatcccatgcaaatacttggacatattattttaataattctatgacttgattctttcggtctcctgtaagtcccatgccgatataggttgtttttgttgggtccgtcgggtgtatgggtacttcctgcaactcctctactgtcggtgattgttctctcgccggggtcgaggagttgattaattgctataacttgtttttattcctcaaggatgaggagtaacactcgcggtcccccaactggtcccctcgaatctcccttacctcacccttgcaggggaacttgattacttgatggtaagacgacgcgacccccttcattgcatgaatccacgacctgccaaggatggcgttgtaggccaacgggcaatccacaattaaaaacttcactgatttgttgactccgttcacgtagacgggtagttggaggaaacttcgagcgacagcgctttcccccgagaatcctacaagtgtgacctgggtgtcctgggcttttaagtcttcgatttccatttctttcagaactccggcaaatagaatgttggctgagctcccagtgtcgacgagcatgcatttcattcgaacatgggctacgtccagagtgatgacaagaacgtcatcgtgggggtgttctaattcagaggcttccccttgattgaatgataagagagcatgtcagggccctctcgctgtcaattaccgtcatagcccttaccaattggacctgtcgggcgtgtgccatcgaaactcgtactgaattcccgctcaggtctgaccctcccgagattacatttacggttttcttaatgta

SEQ ID NO: 152846 - DNA, 500 bp, Cannabis sativa
  modified_base (468)..(472): a, c, t, g, unknown or other
tgtaatgtaaaattaagaccttcaattctacatctaaattgttctcaaaaaaatatatattctacatctaagtgttaaaaaaaaatatactgtattttgtagaaattgtaaaaaaaatttaagatgaaatagaaaaattaagaggattttgaataatgtagagaggattttaatttgttttttaattttcttaaaataaaacttttaatcttaacataaaagtaaagaaagaagttgaagaataacttttatttaatacaataactaaatttacctttacataaaatttaattcaaatatatatctttttataagtattgtacctaaattatcctcacacactcacataattaaaacatattttcaaatataatagatttgtattctttgtagatggatatataggtttgtggaaaagtttggcaaaattttgattagaaaaaaataaaaactatcgtaaagtgatannnnntaaaattggtagaataattgaaaaaaga

SEQ ID NO: 152847 - DNA, 528 bp, Cannabis sativa
ctttctctcaagttctctctctctgtttcgtttttgcttgggctgctagggctgggaatttctctctgtaattcttgtagtttcagctagttgatagtgatgtcaagctaaggtatagttctttaagcttttcttgttgtgttcttgaattttaaggatgaaaatggttgcatgcttggtgattttggtgttgtggttgctcttagttgttgttgttggtttcagaagctcagatatatttaattgagtggattcaagcttgttttgttgttagttagtgggaattaaccatgtataaagctttaaactcaaaactttggtttttatggtaaaatgatgaattagctgctgtggttgttgtttgtgtttgggcttgttttctagtgttatattatggttatatatggtcaatagagcaggttttgttagctaatttgtgggatgagcaagctttgagtttttgaactcaggcttgactcatcaatggtgatttttgtaatggtgcatgaagctgtgttttattgcttt

SEQ ID NO: 152848 - DNA, 828 bp, Cannabis sativa
  modified_base (395)..(395): a, c, t, g, unknown or other
ccccaaccacgtaaaaagtcttcatctcgctttcttacagctcattattataatcatattttactagttgccgaaaacctcggtcaacagattcatttgcttagattttattttattatattgagttttcaaaatctcggtcaacattaatccacttataataaaaaaaaaaattaagaaaagaatgataaaatacattttttgaataattagtatttttgccccttaaaatatatgtcttgttaaaaattctctctaaaatataacagttacataattatgccacttctattaggttcagtttcttttactcgttaaaaattagcatttttaccccttgaattttgaccaatacaaaaattttccccattttattaaaaaattaattttaaaanttataatattctattaattctgaaaaaattattaatgaacttgataagaatattaaattaattaaaaaagtattaaatttatttaaaaaatctaaattatttctacaaaaatgtttttaaattttgttgtatttataaacacgtatcttaaaatataacactaaaattattgaaaatctaataaataatttaagcaaattaagttttcttgaagaaaaaataaattttatttatatttttaaattcatatcttaaaaaataagaaatataattaaaaaatttgataaaaatataaaattattttgaaaacaattttaaaattaaactaaaaaaaatattatgtttacttaaataaatctagatttttggagaaaaaaaataaactcaaacttgttcccgtaaaatttagtttttataaaaataatatatattt

SEQ ID NO: 152849 - DNA, 607 bp, Cannabis sativa
atttgtatataaaaaatacataaaagtttaagagatgaatttctaacctttatatttgtattttttaaaaaaattatctaatttgtagttatgaagatttgaagctcttagagagtttttaaaatttttaccattacactaaagtactaaaactgtacttttgataataattaaactctatataggaattctaaaatttaagcttaccttagatcttatatatcttaaaatccttcttgtctagttatttacacataattttttttaaaaaaatataaataattgtgtgataaaaatagtatgtggaccaccaattaaaaaaaatacttgtggtctaaaaaacaatattcagttttctttaaaaaaaaaaattaagttgttaaaaaaaacatcaaattgaagtatttaatagtaaattttctaatttttttttctaccaaatattcattctaattatactacacataaaattgatgttgatttatgagatattttgtcgtttgaggaaattacgtagaatatggcattttttccttaaatttcatagatatggaaaaattagagatttacttaacttatggcttttttacaatttaagttagttgta

SEQ ID NO: 152850 - DNA, 776 bp, Cannabis sativa
  modified_base (27)..(34): a, c, t, g, unknown or other
  modified_base (695)..(699): a, c, t, g, unknown or other
cataaacctcattgattagcaacgagnnnnnnnntacgtttaaaaatcacgtaacacgcctatgttagttagggtgttacaaggctgataagatttaggttgatttggtcaacaccgtgtgcactgattgtgggcaattaatctctgaattaattgcataatatttgttacaagaagtttccttattactcctaatacaatacaattgacagctaaaatttccttatttgtgtgcatgaataaaatgggaaactagaaggatccattactacaaaaagaaccttttgcttcgattttaaagtgacacatatacaatttgcttcggtttgtgtaatcgacattataggcgtagacgcaaatattgattttttttgtttcaatttcgaaccgacgctaaatgtatattgtttcagttatgaactgaagcaaaaagaaagcttttacttcggttcataaccgaagcaaaaaagccagtgcaccgacgctaattggttttttacttcgattatgaaccgaagtaaaagaatttattttataaaataaaatcagtaccaacgcatcaccaccaccactacactattatacatcacataccaccacatatgcacatatttaaacgaccatttaaacccaaaaaacacaagtttaaaccactgtaccgcctcactacacaactgttgggaatattttaccannnnntagatttactaacaattatgttgaattaacatcctaaatatgaattttctaaactaatgaaataaacacataagggt

SEQ ID NO: 152851 - DNA, 1005 bp, Cannabis sativa
  modified_base (37)..(41): a, c, t, g, unknown or other
  modified_base (273)..(278): a, c, t, g, unknown or other
  modified_base (717)..(742): a, c, t, g, unknown or other
taattatcagaattaaattaactagtattttttaaannnnnttaagatattagtgaaatttgatgtttgaaaataggtaaaaatctaatttttggcttaattaattgtcttattttttcaatttatttattttatctttttttttttaaatttaaggtcagatatttaatattttaatttgttttaattaattgaccttatttgaaattttaaataagattactttaatcatgaaattttaaaaagaaataggatattttgctaacttttaannnnnnttattttttatttaaattaaattgtaaaattagaaaaaagatattatattttcattttattttattgaatatttaatttttaaaataacataaaatttgtaaagttgttagcaattttttttttttttgaaaaagatacttaggttagttgaaacctaattttttaaatttataggtttaactttgtttaatttatttaattattttcgaaactattaaattaaattaatttaaaaattaaaccctatatccaactatccaaattgtttcaggtgtatgttttttatattgtttgattgtcaaaacaagttttataaaacctattattgcttgatctaaacttccatggttaacttgttcacatatttaatgatctgattttaacccattgtcaataggtcaaaccaataatttgtaacaagtaaattttacattcttnnnnnnnnnnnnnnnnnnnnnnnnnnatgataggatccatccaaatctatctgcctgtgtgagcctatatgtttgctttacgcttagatgcatataggtagcccatttaattttgtaattaaaatggactaggttgctaaataaaatgtcacaccatgatagatttgacttaggcccattagtatttgggcctattcaattaataacagtggttcattttaaggttaaattcctctcttttgggacttgtgtgagagttagggggtcatagcagtgggtacgacatact

SEQ ID NO: 152852 - DNA, 838 bp, Cannabis sativa
aataattctctaaaacacatgagttcatagcatagataaaaataccttgcttctttgccaaaaacttaggacattggggtttctagtggcccttttcgctgcaatagaagcactttcctttttgcttttcatttagattagcagcctatttcttattatctattttaacaggtttaatgggcttcttgctattcttccaattcttctttttgatgggtttcgaagtggaggcaaggtttaccttagccttggtcgtaccattatcagtgctagaactaggagctttagttcctcctttctatggtcctccaatcaaattttcaaatgtctgaaggttgttgattaactgatggaagtcaagctccaacttgtccttgacataatttgatgtaaagggcacaaaagttggagtcaagctattcaagatcaagctcgcttttgttgtctggtctataacagctccatgattctcagcctcttggaagtaacaagtgatttggagcagatgatcacgaacattttgatgaggtttcatccgtccattgataaaattcttggtcgcctcaaagcgagcttgaattgaggccaccccaaacagttcactcaagtcgttcatgatatctgcagtcgtgagagtgttagcaaaccttattttcaaagtgtcgaccatggtagacagcataaagtatcgagctttgttgttagcattttgccaatgctcgcacttttccttgactgcctcgcttgcattctcacctggctgctcaggagcctcttcagttaacacaaatagggtattttcaccaatgagagcaatatcaatgttctctctccattt

SEQ ID NO: 152853 - DNA, 838 bp, Cannabis sativa
  modified_base (86)..(87): a, c, t, g, unknown or other
ggatggccctagtgctcggaccacgtgtccccggagaactcaacccgatgttgttcctagtacgcggacaacacgctcgaggaganntcagcgtgggaatggtcagaatctcgggacaagggatgaagtgttcaactgtggaggtacccaatctgtgggagagagaacttatgaaatgaaaagtcgccgcctgagatgccatctggaagaggcgcagcatcgaaacgctgagttagaacgagagccagcttcggccagggcgacgcaggggacgaatgctcaaaattaacctgaacttggagtgagaagaccgcgaggcagacctcgtggctcacgaaccaagagacaagaaaaggcccaggaagaataacccagggaaaatgagacaccccctgagaatcaggatgaacagccagaaaggagacaaccaaaaattgatgaacgagaaatccctcatgaaaatgaggaggatcttggaactcagccgggagaacggagatcacctgctaggaatcaccagcgttcttcccaaacacatagagcgaggactggtacgtaccctgatgggggaaatacgaaaaaccgctctcgagaggaaagaatagagcgtgaagaggcaagtatgactttgaggcgatgcagaactcatagccaatcaactcgaagaggagaaagtactcaatgagctaatgatcgagagagtatgggaacaaatccacttaaaaacaaagtctgtaagtaggacgtggtcaatgagtaagacgagaactgccagcaattactcccaaccggatctgcgagagcacttgaatcggaagaaacctgacctttgccaaca

SEQ ID NO: 152854 - DNA, 556 bp, Cannabis sativa
gtcaaagtattaacaagttaataattttaactacaagttaacctaaaaaaataagctaaggaagaaaaattcttaagcctttcagcatcaatcgtccaagccttcatgaatcactgtcatcaaccgttctgtacactatcgctgcaatggtaataaatcaatttttagattgtattcctgcttttctccaaagtataacaaaagtaaaaatttatattagtttatgtatatattattatttattataataaatactataattaataattaaaacttacggctttttgatcttattaacggttggagtttgcacgtgcgaagatgtcggtcatgtattttaaaacataataaccacattcttgatttttaggttgtcttggactatttgctagtaaaattcctagccacagtccaagatacacatttgatgcccctatatattcgtatgctctgtttgaaaaattatattaatatttcaattcaatagttatttgaataatttgttacatatataaatagtcattaaattattaccttcccaacatttgagtaattt

SEQ ID NO: 152855 - DNA, 525 bp, Cannabis sativa
ggagatgctttgttgcaatcttgctctccgggagtatacgagacttacatgccttctccgggaggcatgcctaaggtaatccgcgctttaaggagacttggctattttatttaaatgctaaccccttcccatccacgtgtcatcttccggctggtccacgtattttgggtaaaatcaggggaaacatttacccccccaagccttgtttaattatgaagtgaacaaggcttgcctagatgcctccggttgccttatcagcttcctggcacgtgctttgggcgcgtggtggtgtattaatgaccatcattattgcggttattcgttttgcaggcgtcgattcatttcttgtccatttattgatacggcgcattaatgggtgtcagacgggtactcaaacgttttcaccaccttgatgacaattcaatctaaccgttggatgtgtggaatttgaatcgtttgctatcccagccgttcgatggtggatgatcacagctgtcttacacatgctctggcctataaaagcca

SEQ ID NO: 152856 - DNA, 523 bp, Cannabis sativa
tcaatactaaacataatattgtattaaataatactagtacaatacagtataatatgacgtactaaatgagccttaatatttttatgccactgatttttatgttttaattaaactatgtatattgtaaataatatattgcttccccggtagttcatctattttgtcgctttaggtctatcaatactgcatattggaaaatgtttgacggttgaaattcaaattaaattgtaaaattatatttgcacccaaatgattatgttataatatatattacataatatataatgttgataaaaatatatttttttttatgaaaagcgtatttgattaaacaacaagttagaccgcggtcattacataagatgtttgaagggatggtggatagcggaatatcaccaaacaacctatgggaaaactcccacttagccacattataggctacaaaattacaagtcctgctaatattagagaaagtacaactagaaaaacaagaagagtgactattacaaaaggagacatagtt

SEQ ID NO: 152857 - DNA, 505 bp, Cannabis sativa
  modified_base (210)..(215): a, c, t, g, unknown or other
atgactgcttgctgagcccttagcgtttccatctccttgtccctccattcagtgaacatgcacctttgctcttcaaacgcgaggttcaccgcagaacggagttcttcctgatcatgatgcagggtgttggcatgaccttgcaagattccaagggcagcacggagattctgaatttcagtgtcatctgcaatggttgtttgaacattggtnnnnnncggaacgactgtgttatgaatgccatggttggctgcttaattggtattcccagtctcttgcatgccaggtgtgatttcatccacaggagtcgtcacaccgtgacccgcagtcgatggttgtctaggatttacgattggcagaacccttgtgtttcctagaatctgcagtgcatgatccatggcctgtggattcgctggatcaaccacgcccctacgtgtctgtaccataatcgtacttgtgattagatttggaatgaagagcgatccttgagtttaactctcaatgaaag

SEQ ID NO: 152858 - DNA, 894 bp, Cannabis sativa
atacttaatttaattatattaataataaaataatatatatataaattatgctaaaatacaaaattagaaactgaaaaaaaaaactataggaagaccctatggcgtcggttattatgaaataaccgacgccataagggtcctatggcgtcggttgtttttaaccctttagcgtcacctaaaacagcgtcggtagcgaatttcgccaataccaacgctgaaagcccttaaaaaccgcctctaaagctcaattttgtagtagtgatacttgccttaaattatataaatgaagaaattgatgataagctctataacactcacaaggtttttattttggctccttttagatttcattaagtatttggaactgagataaaatttaatatgtgatagttaattaggcctttatctacaaatttcgttatatgatttgtgtatttatctccctattttatatgtattaaaggttatatatatgtttgtggggatatgctgttatggggatgttgtatattgggggttcaaaatatggtggccccttgtgattggatatatatatctattgattattttccatagattcaagatttgctcggtcgattaattgtgattagatttcaattttaatttgttctttgggtttcaattgtgcaaggagctttttgtttaattaaaaatgattatgtttgagtaattattcttaatatagttagattattaagatttcttcaagtgtcatgcaaatttattaaatcaaaatcactaatgtattgtatttaagtatttatttttaatttgcaaccccactatttttattaattgaatatacataaaaataatttcaaacaataactcataatattttttctttaattatttattgtattatttttaaat

SEQ ID NO: 152859 - DNA, 580 bp, Cannabis sativa
acaaaattggcaataggaggagtaactcattcatcgtatatattttattatctttttacacattatcaatgtgtgactctctttcactattcgagaaataaataattgtgtaatttttgtaccaaaacaaagaatttaaacaaggatctgacccaattactaacattattagagattagatttatactatggacattgagattcaactatttctccaccaaaagcgacgaccagagctaaaaccaccacaaccaccatctctaagctcgatttaccctgaaaaataaaataaaagacgatcaaactctggggatatctttttgggtatgaaaaatgcaagatttaaaaaaacaggcgaaaatggatgaaaaataaagaaattggggatgggaggcggtggttgggcgagggtttcgtgaaggggctgctggttatttttttgggagaagacaaagtaaggaagaaaaagggctaaatacggttatataaaccctatggcatcggttattttgtaataaccaatgccataggggacacgcgtcagctaatgcgtgcctcgatagaggatctttgattattt

SEQ ID NO: 152860 - DNA, 516 bp, Cannabis sativa
ttattatcgttttagaagttcatacttaggttgttaaatcaacatacttttgagtatatctaagatcctggtaaaataattccaacacacacgccttccccaaatcctgaagtgcaacatcacttttatcccgaccagatccaaggtcagggatacggtcgtttcaattgggaacttagcaaagggtggagacgctatctttcgtccaactggacgtacatagtccaccgaaacgtagttgacactctgcccgagggccacccaaaccctgctattgcagataagcctgttgccaccttccccatgactattgctatgcacatgtctgataaaactccatctaagcgtaatatgatggcgcgaaccaagcagactgtacgaaaatcttcactgtctgacccacacattgcccgccttgccaccttgcctgaggtagaacatgttgtgttttgtgccctaaataaaacccatttcaatatatcagatttacttattaataaagatcagatataacat

SEQ ID NO: 152861 - DNA, 511 bp, Cannabis sativa
taccgagtataggctgatacggtatcacatcggtacggctagagtatgattggcgtaccgagtataggctaatattatggtcaaaagtaccgtcgtatgaatgttctagactcagtaccgtgtgggacacggggattagggttatggtcaggggtatgggcatctgatcataatccgggatatatgtatattatattatatatgctcttcttactgagtctgtcgactcacagtgctatgattatgtgtaggtaagggcaaggctaaagttgaggaaccgtgggaaggaacagatgaagattgtacatgtcggggcggttaggtctggagcgtacgatgctcgggacatcagggcttttgttgttagtcgccgggcgacaaatattttgtagataaatagcaaacttttgtaaagtattttgtaaacgtcatcccaaaatattatgtacgtaatactataagtttttaaataaataagcaaattttaattaatcacgattttcattaacct

SEQ ID NO: 152862 - DNA, 684 bp, Cannabis sativa
gtgaaggattacgactatgagatcctttatcatcctgggaaggccaacgttgtagatgatgcccagagtagaaaaggacagagtcagataaatacagtgaagcagatctccaagcagttggcaaaagaaatgacccaagcaaaaattgagttcgttgtggggcaattggctaatattaccctacaatcttctcttttggagcgaataagataaacacaattgcaagatccacagttagagaaatcccgagataggttttcgactgggaagactagtggttttacaatggatgacacgggaatgctacaatttataaatcgtgtttgtgtgcctatggatgacaatattaaaagagagatcatggatgagtctcatacgactccttactcagttcatccgggaacaacgaagatgtaccaagacctcgaggccatgttttggtggccaggcatgaagaacgatattcctaaatatgttgcaaagtgtctaacttgtcagcaagtgaaagctgaacaccagaggcctgcaagactgctgcagccattgaatcttctgaaatggaaatgggaagacattgccataaactttgtggttggattgcctaggaccacgggacaatacgactctgtgtgggtcatagttgacaggtttacaaagtcagtgcattttctacctatttggacg

SEQ ID NO: 152863 - DNA, 523 bp, Cannabis sativa
ctaactaatttaggcatgttagtgatttttaacgtactgtgcagctcgttactaatcaacaagattaacgaaaaatgtgatcaattaaaatttgcttatttaattgaaaacataaagtgatacattcataaaatcccgggatctcatttacaaaatacatttacaaaagttttctattcatatacaaaagttttgtcccctggcgactatacaataaaaagtactgatttcctaaagatcgtacgctccaggcctaactgccgcaacatgtataatcttcatctactcgccctcacggtttctcaaccttagccttgcccttacctacacatggagatagcactgtgagtcgacagactcaataagagaagcataacataaaacataatgacatcctgggttataaccaggaacccatacagccgatcataactttatccccgtgtcccacacggtattgagtctagaacgttcatacgacaatactatcgaccataatgtcaacctatactcaatatgctag

SEQ ID NO: 152864 - DNA, 508 bp, Cannabis sativa
tgccctcatcgacggaccgcaggcgaatcctcctgatctcgactcctaagcttaccccaagcttctcccgaatcctaagtctgcaccggtccctctacctccgaagaaccaccctcttggtgatgatctcgcacgcccactcttggacttgatcaaagaccctgtgccactgtcgctattcagatcaacccatggagtagtgcatcttacttcccccaacatgaactcctcaagtccatcacaacgtccctccagtctaacaagtagcccttgcaacactgaatctgaagctaccacatcctttgattgcagctcactcgccaatcgtccaatgcttactcctttcgacaaggactaagtgtagtgcacccctcggggtgaggttcgcaaacctaccgttcccaacgtcacctagaaacacgcttttgctgaagccaagtccctctagacaagtccctccggacacttcacacgccaactctatggcgcaccatcctcctgatggaaa

SEQ ID NO: 152865 - DNA, 651 bp, Cannabis sativa
aattatactattttaattattattaaaataaaaaactaaaatattaaataaaactaacactacgtggcttggcacgtaacaatcagctagtttaaatttacgtgtacgtgtctatgtgaataaaaataatttttttgatatttttgattataaaacaaataaaatacactaccttaatatattactaaaaaagattaagaaattagaagttttgtgtctttttttaatattactagaaaattaatatatattatatattataattttttaaaaatatatataattaagtacggattggattggatgggttactttttgaggtcaaacaacatccaatccgtacaagtatggattttaaatttttcaatctaatccaatccgcacaagtgcggatatctacattttacagattggattgaattagatcgtacggattggattagatcggatacttagtgaacacccctaaattttaacccctatttaattacccattctattcactcatttaaaattaataaataagattacatattcaaaaatttaaaaaaaaaatgtttctaataattaattacaataaatgacacaaaatatacaacatcaagaaaaaaaaaaaaaaaaagtattcatatttttttttttaattttttt

SEQ ID NO: 152866 - DNA, 646 bp, Cannabis sativa
acggtttttgccaatcttagtcctactatcagggcttcgtattcggcctcattgttagaagctgtgaattcaaaccgtaggactgcttggagtcgaagtcagttcggggatatcatcgcaacccctgctccagacccattctcgttggaggcgccatccacaaatactttccatgtcgggactggcggtgtgggtatgttagcgttagcttcttcttcgtggcactccgtgatgaagtctgctagcgcctgcccttttatggaagtgcgggggatgtagtgcagatcaaattggcttagctccatggcccatttgagaagtctcccagacgcctctggtttttgtaagacttgtcggagcaggtggttggttaatattttgattgggtgagcttggaaataaggtctcagctttctcgaggccattagaaggcaaaaaactagtttctcgattaccgggtatcgtgtctccgcccctatcatgcgcttgctgacatagtacacgggatactaaggccgcactaactgcattctgggagacagccaagtataggaacaagtcctctctgagaacgagtttcgataggattagaggtttagccatgtgctcctttagttttttgaatgcctcctcgcactcgttggac

SEQ ID NO: 152867 - DNA, 636 bp, Cannabis sativa
  modified_base (590)..(590): a, c, t, g, unknown or other
aattttatttgataattaagtataattattaaataaatagttttggcataggattgaattggaaaatatggtattgttgaaagaagaataagtggttaatataaagtgacaaaattttaactagagattggttcattatgtggccggccttagtgttggtttttccccaatattttattcttttttaatccatatacttcaatcctaagccctagttgaaaaactataaaagggacatgatgctctcatctcatctaactcattcaacctgccaaaatctaatttctaactttgtcagacaaatagtagatgagagacaccttctatacagttttcaagcctccttcattgttcttcatattcgaacccttagtgatagagtgccatgcccacacatagcaagtcaactactcaatcatagtgtaagacagtggtaaccaaacccgaaggagagaagagatccaagctcagatcttgataataatctacgacagaaaggaacaagggttagatatctgagcaaaaagagtcattatattttgttccaaacaatgtaaggttttccattaagtctagaacatatgtatttnttcatgattatagtgttgtcaatacaatggaatataatcatgatta

SEQ ID NO: 152868 - DNA, 814 bp, Cannabis sativa
  modified_base (782)..(788): a, c, t, g, unknown or other
ttctactcatgagttagtgtatataattcatatactaattgcttgaatatatgcattaggctcaattataagagcaagttactcagggacaagttcaagtccatggccaaaaggacatcctaacgcaggtgctcaggacaccagagcatcctggacgtgtcagggctactgggtatgctagtacttgagaaatgttgtttccttagttatacaaaataaatcatagataattttatttaataatttgcaagttccttaccaggacatctaaattgtttggcaggaagaaaagggaagtttctaatgctatggcttagaaacagaaggagattgataaattaaaagcagaattcaaatcccttaaatagaagaaaaacattgcccaacaagaggaagaaggagaggtggctgatcaggcatatattccacaataatacgctcatgaggatgagggtcgaccacaaatttatgctgaggagtttgtttccctcaacgagccacctctcctgtacaattttgatgaacagagggcccttgatcagctagtatatctctgctctgacaatatcgacaatgttgtggcctgagcgtatctgtacaaagatgagggtcaaatcaaagttcactgcaaggactacgatgattcacatgcccgggttctgatttcagaaatgctgctagaggatgctgaaatcccaatctcaattaacgggtgtagatatgttaaggaagtagcaaacatgttccttccttggcctaaatacctaattgcaacacccgannnnnnntttgttataaattaattattaatgat

SEQ ID NO: 152869 - DNA, 623 bp, Cannabis sativa
ttcactaatttataaataactttatatttatttttaaataacaaaagtcatactactaattatttctcttcgatgaatttttctaccaagccaaatgctaaaaataaattatctttgacgataacaaggcgtatggtgcttcttctctctctccccatgggtaggaagaaaaaagaagtgctcaagttggcggtgacggtggttgttgttgatgaagtctgattcgatagtgaactccctttgatccataaagagaatctaattgagattcagtctgaggtgtttcatgacccgtgtgatgaacttgaagttgattatgaacttagtctattacttcacatcagacgaaatctgcaaagatttctcgttgggctgaagaagctaagattgatgaaccagttttccagtcctctgccaaagaaatttggagtaaatttaaggttaatcaagttcgtactccatctactcaacttgattatatagagcttatgaaagtgggcgatcgtctggtagcgaagcttgatattgaggagattgaagttgaggcttcaatgtggaagacgtctattgtatgcatagttctgggtgctaatcccccatttcgtgtgtttgaaggttttgtt

SEQ ID NO: 152870 - DNA, 660 bp, Cannabis sativa
  modified_base (323)..(331): a, c, t, g, unknown or other
tacatggtcagacaaacatgtcaaattgtgtaattacctctaattacacacaaatctaattatattgtggctttccaaacgcacataaggacatgatccgaggaaaaataaaagctacgatcgagacaataaatatttttgtttacaaatcgtttaatagaatgtaaaaaaattactaaaaaaaccaagtaatggaatttttgaaacatatataaataaggtaaatagtgacataaatatcaggttttatgtttgtaagcggcataaacccaatgtttatttttagcgccataagtaaccaatgtttgtaaaattgtaatttnnnnnnnnntttgtcagtacagactctgttattgtcttaaacaagacacatataaaacctaaattttagatcattggatctagataaagttatgtatcagttacttccaaatgtttttttaataaattcaaaagagagtctgtactgacgaaattggaaggaaattacagttttacaaacattggctacttatgctgctaaaaataaatattaaatttatgccgcttacaaacttaaaacattgaatacttatggggcccgtttggtacgcaggattggactggattggactgaaaaggattggactggactggacaagattggattatgctgaaagt

SEQ ID NO: 152871 - DNA, 757 bp, Cannabis sativa
cttcaccttccaagatctccgaacacctaacatcttcgacaatacatactacatcgatctcatgaatcgtcagggaattttcacctccgatcaagatattcaaatttatgcgattggaatttctgatgtagggagtgttgaaagggtaagatgtggaatgggtaaaagttgtttgggattgagattgggattgggagtgagattctggctagctttagggccatttgaaaagaatcgtgtgaagaaggggatggtaacggcgttaaaagaaaatgataaatggttcttttggggttaaatttaacagaatattcttttatttgtagcgtatattctgttaaaccaagaattgtcgttagataagcacttttaatatataaagatatattaaactgtctcgcattatctgtttaaaaaaaaaagattgtctcgcattcaaccaaaaacaaaacagaaataacaagtaatatatgtataactctatatgaaaaaattgtacagatatatacatatatttgaagccaaagaaaggaacggaaaacaagactgaagccagataaagatataatggtactggacatatatatatataaattgaaacatatatttaaacttacgatacatatacagaagccataaaatatgaaatacagtacaaatcacatccgtatgtgaactaaaattaggattttcacgaacttttaagcttgttaaaaatgccccctaaactattcagattgttggatttaaggacttt

SEQ ID NO: 152872 - DNA, 596 bp, Cannabis sativa
tgttgaggtttttgactgtgtcctctaactttcccttttcagtctccacttgctctagagaactttttagaccatagatctgtttagtcatgaactcccattgtgcaaacatatcttcataagcattttgtcgacatgtgctatcagcttctaatgaggtggagattgcatcatcttcagactcaactgggtgacagctttgggccatgaatgccaaaacctgcttgtcctcatctgatccttcactggtagtggagttcttttcttcttcactgtcactccaggttgctgcaagggccttcttctttttgagtgtgttggcgcactcagcctggatgtggtcgtatccatcacactctttgcacttaattcctcgacctttttaatcagaagaagcttgtccttgtttgaagtttacacctttgtttttcttgaaggaattgtctttgtcagctggggaatttctttctttttcaagaattttgcataatttctcgtcaacaaggcaacggtttcgtcaataataccaatcaattcttctggacctggtttcttgttttcttgatgaataagtgcaatgcttgcatctgactttt

SEQ ID NO: 152873 - DNA, 506 bp, Cannabis sativa
cttgattgtgcaagagattgaggtagtttttatagtttttaatttgtgattccttgctgaaatattatggaaaagcatgaattaagtgatatagccttgtttgtgcatgtatgatgaagttagaggtaattctgttaaatttgagtatgtttgtgcttgaatctttgttgtggtgtttgattaagctgtagatggaattttagggtttcttccttaccttaattctattgtttgaggataattattgctggaaaatatttgggtatgttggatttaagctcaagtttgagagcttgaggtttgtgagtttaagcatgattttgatatgttttcacaatctgaattttcagggtaaagtgtgagtttagtgcttgttgtatgtattttaatgcactatatttgcgcttgatgaatggtaatcttgttttgaggatttggttgagttttgggatgatttggttgagttgggttgctgaattttcgagttttgcttgctggtttctggg

SEQ ID NO: 152874 - DNA, 728 bp, Cannabis sativa
ttgggtttaggtcctgatcttggtgctagtcctagttcagttctagttccctttgcaattttgagtttgagtttgggttttagttagggtcggagttcaagtaatggtctaagttttggctcgggtccggattttaaactaggtccagatcaggctccgggtgtaggttcacgtcctgggtcttggtctaggtttggtccgattcccaagttcacatcccgatctgagtttggatttagttctgggtttaagtccttggttctcatccaagtctgggttcgagtttgggtccgggtctcggtctagctttgggactaattttaggtgtgggtgtttgagttcgggtccaagtctgtgtctaggtttgtgtcaaggtcttgacaccgatcttggtctaggttgggtccaggtcgaagttcgggtcctgagtgcgggtccaactttgggtctgggtcaggatctccgtccagatctaggttcaaaatttcgatcccagtctgggtcgtggtccgagtccaggttcgtatccggatcactatctaggtccaagtctgtgtttgggattaggtgccagatttaggtccaggtccaggtctaagttctggtctgggtacacaaccatgtcagggactgagttccagtctcagttcaggtttgaggctaggtctgtgttcgggtctaggtgtgggtctgggtcctgatcacggtcctagtcttgttctagggtc

SEQ ID NO: 152875 - DNA, 829 bp, Cannabis sativa
agaagagttctattaatccttttaccaaattcattttattgtggtgtctagctaatacatcattggtacagatcgaactcattaaaaattttcaaaatataattcaagaccattatctattctgagtttcttcaccttacaacatgtttagttttcagtgaccctcatccaatttacaaaagtattaaaggcttcatttttgaatttcagcaggaacatccaaatttcatagttttttttttaatagcgaaaaaacatatgattctctcatattgaaatatttacattaagagtacatcacaatagtattttttttagagtcaaccaaataatagcgtgatcagaaattatttttaaaattaacaaaaaaaaaaaaaagaaagaaagaggaaagagaaaaaaaaataaaaaaaaaactaggcaatgaaaaattaaagaagaaggcaaaaacataaagtgaaattaggtagatccaattaaaatgttagatgtaatgccctaaaaatattttaccatttttttaaacaaggtcaatagatattgaatgaaataaagcatgcccaaaatgcccctacaccaacaccacaaagtggaaaaaaaacctaagatcaaacttgacctttccccctcaaaaccctgcctttatggcagtataaaagctctcttttcagcagaaaaacctagtagccccttttctttctcttctctaaccctagcagccgcacatcactcctccttttcctcttcttctagctgcagtagcagcacttcaacagcagccaagtcttcttcttctccctttcttcttgctgcagtagcagccgaaccc

SEQ ID NO: 152876 - DNA, 507 bp, Cannabis sativa
  modified_base (57)..(78): a, c, t, g, unknown or other
cacatggcaagcatcagatccataaaccccgctatcagttgatcactttttgaggtnnnnnnnnnnnnnnnnnnnnnnagagcgtggatatcgtatctgatcaaaagccatggtaaacacgagaagaactctaatcgcaccatctgcatcttcgggtttctcttaagacccacagactatagatccagacactgaggttccagtcacaactggaatcccgatgaacactgcggatgtggtgaatcctgtcaccacaacaggccccatgagtctggccacctcttggtagagctatagtgacctgctaggtcctacacaccttgtctgggcaggtcttgcacaccttttccagccaggtcttgcacaccttgtcggcctagaccctgcataccttgtccggctaggtcctgcacaccttgggcggccagacctcccttgtaggtgttgacctcacttttagccaacgacagtgagtctaactttgtaagcgacaagtagtttaatatg

SEQ ID NO: 152877 - DNA, 544 bp, Cannabis sativa
catatttgcctgtttactgttcgatatcccgaccaaacactcatctctcatgttgtcttttgtagatgaaccctggtgagtttcggggaagcgaacaccgtattgaccaggacttgctccaacttctgtacgaggatcaccctcgtctttgtgccagtccgtcctcttcaagtgacagattttccaattcaagctttacatccagccataggatgatggcttgaacaaagtagacgatgcgtaaggtcaacacatccgatccccacgtggcccagctcgccacattatctagcgccgaacagcatccacctgtccaggaggagggggatcacgtaggggatgctgaagtccaagagattgaggaacaggacgatgtccgtcctagcagtccttccgaggtagaggaagaggaggaggctgcacctccaaactttgggggatacaacgaggctggggagccagtagatgcggacagcgaagtccttatcgaaggagtggactacgtcaccgaggagcttactgctgcagttcctcacaggaggca

SEQ ID NO: 152878 - DNA, 1160 bp, Cannabis sativa
ctctctctctctctctcttcgagtagcatcaaaaccaggcggatctagcagctttttagcttaatttctagaaatcaagcttgaattcaaagtgtaattggtgtaggtaagccctagacactctttccttattgatttctcaaggttttagttagtttgattatgtgatttgtaaaataggagctgttagggtttgattgttgtataatctgatttctaagttgattttatgttgattttacgctttggatactagtcttggtgtatggacatagatttgagcaagtttgagcttagaaacctaaactttgatctttaatgacatatttgaatttagtggttttttctggaattttttggtttgattatattgtgtataccctaattaggtactctagaaggtttggttgcatttggttgagttttgagcaagaaatataaatttttgggtgaactggtacaaaccaggtaaccgggtttactagtacctgtaaaatcggttagccggttttggcagggtaccccgaatgttctatttcctcaattctcgtccatttcaatgccttagttgggtgtttccttatttcttgagttagagtaatccctagggagtataacgaaacctagactggtgggtttgggttttgatcatgtgatttacccgatttcattatgtgattagggcatccatctagcgcaagacttttcgttcaggtcggccagcacacttgaatcttgaaagaaggtaagaactgtgtataatatgtgatatttatgcgaatgtatatgtgtatgatatatatatgcatgctgtgtgcatgattgtatatctttgggtgatatcatagcgacacaatcattgtgtcggttcagcagtacaggtatcgtactagttaagagtgatattcaccccagaaagtatgaattggggctatcatagcgacacaaacattgtgtcggttcagcagtacaggcatcatactggttaagagtgatatcatggccaattgtacttttggatgttattgatgctatcatagcggcacgaacatagtgttgtcctgcattacgatcatagtgctggtagtgggtgatatcatggtcaatagcacaaccagttagaacgttcttactcattttttaagccttgtaaataggtg

SEQ ID NO: 152879 - DNA, 850 bp, Cannabis sativa
aagactcattgaagctgaaggccattacccgttgatagaaaagctcacttattacctaatcttaacaacaagaaagctaagaccttacttttaggcccatcctgttcgggtgtgtacactgatgactaacaactactattattacggccacaagtattattgcaaaaacctgatgcctctggatggttactcaaatgggtggtggagttgggccaatatgaaatcatgtatcagccccgaacagtgattaaggtgtaggcctagattttgtgttaatgtacaggtaagagcacttcaaaaaacaacccggagccagtataagaaccttagccgagcaacagcaaagacgagccaacatgaaaattacatgtagatgggtcagccacagatcaattgtccagtgcagggatttcccttgtcatacctggggggcaacgtctacacggagcagtctaattcaagtttaaagaatccaacaatgaagctaaatatgaagttcttattgctggcctacaacttgctcgagaattgcatgctgaacacattgagatttgtagtgagtcatagttagtgatgaatcatgtatctggggactacgaagctcggggagaaaagatgatagcctacctaagcaaaatacatgatcgactcgcacaattcaaaatatatgctctcaagcaaattccaagagaagaaaacacaaacacaaccgctaacgcactatagcccgacttgcgagcagcaacataaatgataaggctaatttaattcccatccaattccttaaaaaacctaatatcactgtcacggaggagattgaaatgattgacacatctccaaactagatgac

SEQ ID NO: 152880 - DNA, 526 bp, Cannabis sativa
ctcaactagtgaggggacaatgagcctatataaccgagcttctaataagtagatctagaattcaccaagtaaattctctaacttatcgattcctccttgaaccactataaattcgaaattacactcttaattatatagaacgctctatatgtaccaatttatagatacattatgattatccattgttacaatctaaatagtcaaagatcctctatagatgatctacattgaataaggataaatttattgttctacccttcaatgtagtttatccttaaaatacttagctacctataaatgatagttcagtaaactaatataattattcaaatgagatctaaattatttatctctattaagtcaagctcgaaggaaatcatcgtttcacttctaaatacttatagaacctatagattccataattatgattagcatttccactcaattgaactaccatatccttaatttgtatgttacgagaagatccaattggtcgactttaatgaacaaattgaagaacataaat

SEQ ID NO: 152881 - DNA, 667 bp, Cannabis sativa
aaagtaatctaaaatttcaaaattaaccataaggctattttgtgagaaatcaaacttttaaaattcaaagcctactaatatctaaaactaaatttaattaattaaaaaataataaaaattagtttgattctgacaattagatttttaatggaaaattcagattctacacaaaattttaacaaaaatttgcttttgtttctatgaaaaatgatttttaaatcaaaagttatgaagaaaacaaatttgaggcacaagcagccttatttgaccgtgtacgctcggcgctagcagcctgtccagacagggcttgtccgagaaaccatggtcagcaatgtctgaatgcacgtgcgtgtccgtacgtgtgtgcattcaaatcttgatattttcgttcaacttcaaaaaatcatacctaattcataaaaaaatcaaaattaggttctgtaaaagcctaaatttataaattttttatctactttccagtaaaaataattccagatcaaaataaaaaatatttcagcaacaaacattgtgatttctaaactatcatcaagtaagcacataaaccacatgaaatgatccaaatcaatgcaaatcatcattttaaattcacatttcatgaaagtaaatctaaagaccgcttagtttaatttagaaattagcagttact

SEQ ID NO: 152882 - DNA, 774 bp, Cannabis sativa
aataaatttatttttttagtaattataacggtaatatttgtcacaaaattttcacttttctatatattttaaaatagcaaactatctttttagttacaacactatattagtttgcttataatatacacgttaaaatgttatattttaaattatatcacataatataaataaaatatttatatataaaaattatagaagttaggcaacaccgcgcgaagcgcggcttagttccctagtatagtaataatagagattatataatagtgtaagttatagaaagtgatataataatagagagtacataatagtaatagtgtaagttgtagaaatgaaaagacacattaattatttgataatatataaaaaattataaataaatgagaaaattgagaaattgaaaaatcaaggaagagggtgaaaaactcatacaaattgccacctcaactccttaatgctttcctttatatatatatatactaggaaacaaaaccgctctttgagcggttcgagcaagtatataagaaaatttaatagactaaaatattaataaataaaaaattacaaatataaataaaatttttaaaaaattaaaattataaataaatatattagctagaatatggattctaatgtaatttttgaataagaggatactcatgtattgaaattatttcacagattaatcaataaatatgtattaaaattaaataaaaattaataatgtatatgtatgatgtatatacaatgtctagtgggataattaattaaaaaaat

SEQ ID NO: 152883 - DNA, 844 bp, Cannabis sativa
gacatctaattgttgaatagaccactgatgagttaatgcaagagaaagaaccacacgaatggtaaccggttttactacaggactaaatgtctcagtaaaatcgaacccagcttgttgatggaaccccttagccactaatcgagccttgtttctatttactgtgccatcaacatttaatttttccttatatatccatttgcaaccaatgggagtcctcccaggaggtaagggaacatatgtccaagttccatttatttttagtgccaccatctcttctgacattgcattacactacttttcttctttaagagcagccttgacatttgtgggctcttgagaaaccaaaagagctttaggcttgtgaatcccagacttggctctagtttgcatgctatgggtgttggttataggaccaattacattaggcagtacattttgatcactggttgggacagtggtactggtgtggtgtggaacacaagggggtgttgttgactgggagttggcatttgtggtaacaggttcagtaactcgtgaaggagtaccttgctgagatgaaatctcagtagtaggacatggaatgctaccgcccaaaccagatattggcattgcttgtgcaccagtaaaaggtgatccagtagatggagaagcatgtgaaaaaagtgtttcaacaaagtagttgagaggagcaataggtatagcactggaagagtaaatctcagagatggtagggttgttatttgtagagaatgtagcataaggaaacttggattcatcaaatataacatccctagaaatatacaacctaccattggaatctaggcacttataacctttatggttt

SEQ ID NO: 152884 - DNA, 800 bp, Cannabis sativa
gtggccgatccttttccgatgatgctagaaatccttattttctgtcaaatagtgatcatcctagagctagttcagttcctaagatcctaaatggatgtgagaattacagttcatggcgtagagccatgattgttgccttgattgcgagaaataagctgaagttcatcaatggcaagattcctgaactagaagaagacgatgacgattttgagctatggcatcgatgtaacagcaccgtgatatcttggattcttcatgctgtgtcgagtgaaataccagagagcatcatgtacatggagaatgccacgacgatatggacgaatctagaagagagattcaatcagaaaaatgccccacgtgttttcgaagcgatcaaaaccaaacagtctttggctcaaggaaccagcactatcactaattacttcactcgcctcaaaagcctttgggatctcattcaagaatatcgacctcaaccggcttgtacccgtggagccttaaaaacttttcaagaacatcaagaggaggatcgtgttcttgaatttctggtaggattgaatgaatcatatagtgctgctcgatcgtaaattctgatgcaggagcctcttccaaacattaatagagcttatgcctctattatccaggaggagagacaaagatctctaactaatgttcctcaaccgatgccttcctcacctgatgccgagaaatctacaggcgattcgagttctggccaatttgctggcagtgttcagcctttcaagcctaaaacggtgtgtcaccattgtggtgttgctggtcac

SEQ ID NO: 152885 - DNA, 590 bp, Cannabis sativa
gtaaaataatatccaacaaatagttcatctggtcttagaacataaagcccatgttccatagatgagacacaaatttgaatgtcatttcgagaaatcatagaatcaaacctcgaaaaaatcaatttgtattgttgcaattgtaaacatgagacaaaaattaagtttctactgaaatttagaataaataagacattgtctaaatccaaaattcagttctgaaacttgagtttggcttttcctctagctctaaccgataccatttcgccattaccaactataagtttcaactctccggattttaaataattccagttttcaagcaattgcaatgaacaacagacatatccaaaatcaagaatccagatggatttgtcaatctctaaaatgcatgattcaaaaaccaaagcattggaaacactgcttaactgtttttggattgttcttattgctggttcaatctgttgtgaaagataatctgagtaagtagaatcactttctatatccttttcaactgagcctgaagtagtaggattgttgaaggaattattctcaatatcttcagctttccttttgcccttatctgcattact

SEQ ID NO: 152886 - DNA, 1025 bp, Cannabis sativa
cactaccggagaccgcctcctctgtacagagatagctcccgaagggatcccaacaaaagatgcgaataccataacaacattggacacaacaccaatgaatgcaaaaaccataaagatgagatcgaaaacttgatccgattgggtcatctctagagtggatgaagaaccagctacctcatctcaacccggttccggcagcaggacctttgccccaaggagcgccagagggtgcgtccgaagcatggcaccagtcactcccccaagggaacctcaacagattcctggcctgccatcgagacccaatggaagagtagctatgatctctggaggaccccatattggagggactactcgaaaggaattgaaacgctatgtcggggccgtaaaacatagtgaggtttgggaagttactcagctcctagctcagaggccccgactcagggatcaatcgattacgttcacagaagaagacgcaaagatagtgtgttttcctcaccatgaccgtctggtcatagagactcccatcgccaacaagattgtggccagaatcctaatcgacaatgggagttctgtggatttattatttaaagaagccttcacggcaataggcctcacggaccgggatctctcgccaagtggttcccagctcacgggatttaatgggacaacacttatcccaatgggaaaagtaaggttgccagtcactttgtccccggacacaccccaaagcacttttaaatactgcacattcgtggtggtagaatgcccgactgcatacaacgcaatcctcggccgaccagccctggtggatttcggcgcagttacgtcgatcaggcacttgtgtctaaagttccctactcaggaagctagaatagggaccgtgagtagtaactagggagaggccaggcagtgttataatgttgctgcccgtctaccaatatagatggtctgtgaagttattgagccaggaatggtggaagaagatgagttggatccccgtgtgggatccgaaaaaattttagaac

SEQ ID NO: 152887 - DNA, 687 bp, Cannabis sativa
  modified_base (648)..(648): a, c, t, g, unknown or other
cgagattaatctgtgtcctatcaaatggaaggcttcgaactgtggtggaattgttgatttaaggtacaaaataaattacatggttggaccagtcgccacttatcctttgcaggaagagctctcttagtttagtctgtgttgttggggattataaattactggatgagcatctttattttaccccaaaaagttactgctgaagtcgataaattgtttcgtgattttttagggggtgaattaggtaatcgtagcaaattgtattttttaacttggagtcaagtctgctttgcctaaaaatcatagttttaatgatttggatttatttttaaaatcataattttagttatttaagattatatttatattgtcttattatttataatatatttacattattatttttttgagcaacatatgttactaatttcaataaaatattagaactaaccatattgtttgtcaaaaaaaattagttagtatagtcaattttgtttgtaatttaatttattctatgatgttgaagatatattatttaactttttttatatatatattttttgaaatctaacaaaaattctcactaaaaatagaccgatttaaaacattacatgataacttttaaatattaaattaaaaataattacaatntataaaatttgttagtatattaaattttgtttaaatttt

SEQ ID NO: 152888 - DNA, 1046 bp, Cannabis sativa
cctggtaaaatatttccaacatacaccgagtataaaattggatgtgaagtcaggaacattaacgatagaatttgatggtgatcaaatacattttagtgtattcaaatctgataatccaacatcaacaccaaaggtattgtcaaagttgagctaacgacgttaaataaaacaaacttacgggagtttttcttaccttttttttatttatttagcattgattttatttgattgagccttgaggacaatgcttatattaagtgttgggggaagattaattgtcgtgtctatctatttttttttccttagttgtttagttaattatttattaattttttatcgttttttttagtttatattagtttttctctcttcaattttaatgagcacagtttgaatgaaattttattgacaataattgctcgtatttgatatgtgtattactttgatatcttatgcatggtcttgtggaaaataattttattgatgatgaaattcttgattgcgtgaagttataattctagaaaaatgataaattctaatgatttgtgtgtttaactcatgattaattactgctcaagcttaatatttttttaagaaattacacatcagttgaattattatatttgctaatgtttggaaagatgaatgcatgtttgacttttgatttaaagtctcaaccactctagaacttgtttaataatcatttgaggtaaaattgataaattacaaatgattttgagatatgatataagcaatttttttggatcgattgagcttttcaagcctaccttatttgtgagttccctagttttactcaatttgagcttaaatattgaaactttatttttcttttggccctatacaataagatttgagtctaaaaaaagaaaacaaaaattctttgttcatctttttttcacaccatagtatattgatgttttatgtatttgtaaaggtacgagaattttgttgaggaaaaaatattgatggttatgtataagttgtaatgaccgctctagtaatgtggattagaaaaggcaattagc

SEQ ID NO: 152889 - DNA, 1231 bp, Cannabis sativa
  modified_base (339)..(344): a, c, t, g, unknown or other
ttgccggcgcacctaattgcgccggcaaaagttgaaagttaataaaacctgcagcgaacccttcttccccatttttcctcttctctttctctctctctgcaattcccacaccaaccgccagcagccccctttgttcccctccaaactccattttcaacctcccaaaacattattttcaacctccaaacttgtttctctctttttcttctttttttttcatttttttttccaaaaaacatttgtaccgagattccgacgaggacgtgccgccgcacctccgccgcacctccgctccggtaacctatatgttctctattttagttttatttaatttatttnnnnnntgtgtatatataataattttagtttatttgagtataaaattgtgtttagttttttagtttatagatgtgtgttattttatatagttttatgtgtatttttataaatttgtgtgtatatgtgtatatagatgtgtataatagtttatatatgtgtatttgtatatatatgtaaatgtatatatatatgtgtatatatgtgtatatgtatatataagtgtatatgtatatatatatgtaaaagtatatatgtgtatatgtaattgtatatataaatgtatgtacatctttgtatatgtatatatatgtaaaaatatatatttgtgtgtatatatatatgtgtttatgtaaatgtatatattacatatatatatatataatatatacatagtactatacttttaatttatttagttaatatttatttttttgctaaataagtttttggtattcctttattcggtgtttggcaaaaatcacttctcgttatattagaaggttagtatgcttatgttatattatttataatattaaaaaaagtttacttaaaaatgcatattagtagagtttgaatatcttatatattcactagtgatagtgacaatgaaaataatggagatgttaatgatgattatgatgacttacttttaagtattgtaatatagacgccagtgttgatttaatgaaatacatgcctctttcgtcaataatatgattaattaattattcgtagtttgtatttgtagaatggctgatgcatgttcaagtggaggttagaaaaaaaaggagttaggggaaagtataagggaaaaaatattgaacaagaactggccaagctgccagcaggtcaaaaattgaaatttagatttcatatggcgactggggcccct

SEQ ID NO: 152890 - DNA, 520 bp, Cannabis sativa
  modified_base (200)..(208): a, c, t, g, unknown or other
  modified_base (360)..(370): a, c, t, g, unknown or other
aagacggtccattgaaaaatgtcgtcttaggtgaattgcatgtatgcaagtcttgcctagaaggaaagatgaccaaatgttctttccctacaaagggagagcgtgtcaaagaaccactacgcatagtacattcagatctttgtagaccactgaatgtcaaagctagaggtggttctgagtactttgtcactttcatagannnnnnnnntagatatggtcacatttaccttatgcataagaaatctgaaacatttgaaaagtttcagaaatttcatgctttggctcaaatccaattaggtaaaatattaaagatcttgcgaactgataggggtagagagtatatggatatgcagttcaaannnnnnnnnnntgaacttggaattgaatctcaatatactgctcctagcactccacaaaaagatggagtagcagagagaagaaatcgcactcttttggaaatggttcggtctatgctgagttattcaactctgtctatgtaatgacccctttagtaatttgg

SEQ ID NO: 152891 - DNA, 652 bp, Cannabis sativa
  modified_base (444)..(445): a, c, t, g, unknown or other
aaagtatgcctggctaaacttctatttatagtggagcaagaagaatatttgagaaaaggataaaattgaaacgtcagcagacaaatctgttaggaataaatacatacatacctgagacgtgagactagattaatttgacaaaaaaacatgcatgatgcatgcatatttttttgacaaaaaaaaaacaaagtacatatataagtcattctattgtacgagacggcccggctcctgctccatgatcttcagagaacatgggaacttcatgcatgttgtcaattggagtaccccgattattaaggatgggagatgttagcgagacaggatgtctagcatctaaacatagacgaaaccatatctggatttcagtctttaacatctccactttcttattaaactgatcacaaaggacatgcacgtgtctatcatgttcgttgaggacanncctcatctcagcatcttttctagatataatagtcgaggcctgcagcagtttgtttctgagaactgtgttctcgaagacaattgttcaacctgatcatttagctcgtccagttgacgtagatgatcatggcactccatagcccgttctcgagtgacatcctctgaattagagagagaatgctccaaataatatactttatttcgtaaa

SEQ ID NO: 152892 - DNA, 568 bp, Cannabis sativa
aatctctactattgcgggacattaggtaagatagtagttagcacgtagagttatgcacggtggcgcttatgttggaaatggtatatgcgagtaattagtaactgcgattagggttattatcctaatatgagcagtttgaaagcctagggttattaccctagtgatatatgttgtgtaaatactatgccatgttgaatatatgaatatactgagatttaggtttatgtgtttaaggcataaccaggttggactcggtaaccagaacagagatgaattattctaaggccttattgtatttaaacgtgtgagcgcaacacgtaggtctacgtcacgtagacataaataggcatgtgagcgtaacatacaggtctatgtcatacagaaatatgagaatggcattactgtttatatattttgatgcacatgctattcatattttatactatcttgccgggcttgggtcacgggtgctctcctgtgcatgaaagggtaaagctatttttgatcagccgtgattgtaggagctggacgaggaatgtacatattcgggccacactagaccaagcgg

SEQ ID NO: 152893 - DNA, 546 bp, Cannabis sativa
ggggggggggggaacgtaaaagaaaactactgtatgttctgggtactcaaggatgggtgttgctggaaagatttgaagaccctaccccaaacaccctctccacggtctctctataaaggtcgtggacgaccctcatgtcatgtatgaggcgagtttcccgggcgtaattatcttccaatagtcggctctccttcttcaagccttcaatttgaagcttggccttagcgagttaagcgagaaggttcgcattagcattactgtaacgcccgtacatttataaaaatattaattttatttacaagcattaaacgaaaaaaatcataatattgcatttttatttaatacttgaaaatattcacaactggccaattttcgtacaaaagacataataaataataaataaaaataattgcaacattaatttaatatcataaataaataaaacaagacgtccaagaccgcctgcagttatatggccctcagcgagttaacacacacaagcgtccaaagttccactcgccaccagcattctagactttcagttac

SEQ ID NO: 152894 - DNA, 774 bp, Cannabis sativa
tttctaatgaatcctatgcactcgacaagacctactccaacaagaaattggtgagaaagctacttggtgttcttccaaaaagattcatgtccaaagtgacgtctattgaagaaagtcgggatatcgaagccctttatctagatgaattgattgggtcactccaaaattatgagttaactcttgaaagatgtgagaaagggaagaaaaccaagagctctgagaaggagaaaaccaaaatgggagttgcttttatccacaaggaagagaactctaaagaagctgatttgtctgagtcttttacagatgctaatctggcccttctggcgaagaattatgctcgatttttaaagaagaagttcaagaaaactaatcctagcaataaggaaaatacttctggaaggaacttctctagtcgtaacaggcagtctcaacaatcagaaaaaaaaggggaaagggattcaatgtcacgaatgttcgggttttggtcacattcagacagaatgtgcaaatacacttaagaaaaagaaggccttggctgttacatggagtgatagtgaagaagaagaggcgagttatgaatctaaggatgataagtctgtaatggcgtttatggtcaaggaatctatccctgaagaagttgaggaagatgagactttgtctaattctgaatcaacaattgatgagaagaataaggcttatgaggaaatgtttgcacaatggagctatatgcctaagagagtgaaggaacttcaggatttgaacaaagctcttgat

SEQ ID NO: 152895 - DNA, 512 bp, Cannabis sativa
  modified_base (179)..(181): a, c, t, g, unknown or other
gtgagcccgtacctacactcggtacttatcatatgtcactgacgcccggtacgttggcaggtatatcggatcacctaatcaggtgagcccatacctacgctcggtactcatcatatgtcattaacaaccatacctacgcccagtacgtctctaggtatatcgcatcacctaatcaggtnnncccatatattatgtccatagtatcatcacattatcattatctaatcagacaatcgataattttagaacctgtcatgccatgtggtacattatactttttttacctctagttctagttcaggtattttggccgatcttcttgaagtacgatcaatgattacgggccctatgccataataataataaactaataagtgtttatctcaaaatattacttaatagttacaaaagacaacctaaggtttcctaccaaatcttgtagttcaaaaacactaaaataaaacttatattttggctctaaaacatattccatatagtagagctcgttgcaa

SEQ ID NO: 152896 - DNA, 524 bp, Cannabis sativa
gcggaccgcgcctacccaagtgttccttcagcgggccaagactttctccacttacgacaagaaggccctcgacgttggggagttggtcacgatggagaactttcggaaggctaagctgatatcgaggaatcagtcggtggatgactacaatctctccaaggtcatctgcccgaacgtgagggctccgcctgcggaaagggcattccgggaagacattattgccacgacggaggaccggtatcagaagtacctttttaagagggagtaggagctggcttatatcaaggcccaagtggctgcggggatgaccctttgtctggaagctcctccggagctgagtcctctcagacccacgcctgcggtcccagttcccaactctggtgctcctgacgccagcacttcaggttttggtaagtctcctttagcacttcacgtaggcctatagggttcgatgagcgtctttataggtttagaatgccttccacccagtgggggaatcacgccaaggaatactatttttccca

SEQ ID NO: 152897 - DNA, 529 bp, Cannabis sativa
tactattcatagttttaaatccccatttttcttttacccaaagtctatagccttttaccccttcagggtaccctaagaaaacacactttaaagccctaggttcaagctttcctatactctaatgtgcataagtagcacatccaaaaacttttaaatgagaaaggtttggaggtttacctgacaatttttcctcgggagtttaaccttcagttgcccttgatagaattctattgattaggagaactgctgtcaaggtagcttctccccaaaatccttgagataatcctgactgaagtagcatacatctcactttgttcagtatggtgcgattcattctttcaaccaccccgttttgctaaggtgtaatcctcattgttctatgtcgctgcaagccattttctttacagtagaggtcaaattcattattacaaaattccaaaccattattagtccttaaattttttaacttttcattagttaagttttcaaccaataatttccaatgtttgaattttgtaaaagcatcatt

SEQ ID NO: 152898 - DNA, 721 bp, Cannabis sativa
taaatgataatggttaaatgttttgtacagtaaatttgatattttgttgtaagacatttataacttgtatctctttcatttaaaggagtacaatgacgtgtccaatgattcttatataattttattagagtaatttatgtcataaatatttaattttaacttttaattgcaaataaatatttaaatttaatttttaacggtaataatagataagttatatttttagaactctgtagttacctaatagttaaatattaagccattatccacgtgtgattttcttattggtatatttaaattaattttcttaaaaaataaaaatttaatgactctaacgaattaagaattgccacgtggcaatttacttaatacttaactgtcaagtacttacaaaagttctaaaaattaaacttaagtatttatttgtaactggagttaaatttaggggtttttttaatattatacctaaaaataatcttatttacaaaaatacttttaagaaaattatttgcacaaatattgttgtgccacgtcagcatacataccgaattctaaaaaaattatcgaaaatagaaaatctcgtttttaaaaatttttcgctttttgggagttttgaaaaaagtaaccttttagttacttttgattgaataaaatatcaattggttatttctctattaaagaatttattttagaattttattcatatataaataataaaata

SEQ ID NO: 152899 - DNA, 646 bp, Cannabis sativa
ttttttaataatatcgtcccaattcaaaaaggcacgcctctactactgtataattttacgcctcaatgtgtgtacatatatcctactcataattccactggcttggaagttaggcttgcgatcacccataattatagttacacgtgattttatttggcactaaaacaccacacatttacgtactcattttagttagcctaatcgaaccaattattgaaaagccttttttactccctttccttattttcatgttctttattaatgggtttctacatttctagttctatgtgacttaattatatgagtattgttggcacgagtgatgtctagtacttttagatgtcagtttggcacaattatactgtggaaaaaagtaactttaactgtgttgtgataaaaaacaattatagcaaaactgtaaaaaaaattgagctgagtgtttggtaaattataaatttcaaagtactgtgagttgttaagatctattataatgataatgataacgctataatctagtttattataattacaaatattgtacaaaatttattttatataataatttattgtttatatatttttaattttttttttcaaatataaatttatatgcatttaataaaaataaattatagtattatttttt

SEQ ID NO: 152900 - DNA, 503 bp, Cannabis sativa
ctattttagaaaatacatggtcaaatttgtcatttaacaaaacagagggttcaattggtaacttttgtaaaacacagtgtccaaaatagtatttaccctttacttttattcatcatgttataaaatcggttctattttaattataattggtctgattgttatttgtttttattcattatgttattaaattggttctattttaatttatatctgagacatctaactctggtgacttttttaatgacttttctagcattgctggctttctagtgacttttttttggcaccgatgactttttcggcgatagttattattatgaattttaacaactttatttatgatcttttgtttagtttcttgtattttaattattgtttatttttcattctcatattttttttattattcatttctaccatttaaaaataaactgcatgttatgaaataatataaaataatataaagtagaagagaagaaagaagaagatgaagagagaaagag

SEQ ID NO: 152901 - DNA, 596 bp, Cannabis sativa
actcgaagaaggtgggctagaacagagacgaggatgatcctcgtggaagagttgaagcaagtactggtcgatttggtgttcgcttccctaaaactcaactgggttcatcttcaaaagacaacacgcaagatgagtgtttagtcggaatatcaaacgttaaaacaagaaaatatgccgaccaggagtactcaatagattaaagaataaggatattcaactaaaagccaaaactcaagaagtttgaaattttctcgagttagggcaaaaaatttcatgaagcttagaataagcaagatgaaagacaggcattatgcggttcaaaaagcaaacattagggacagtgaaattgcatgaatcatgacaaaggaaaatcgcagagtttctaaacttagggtttcctacatatcttctacaacaaagtcgaaggtgcattcgaaagtaaatgtgcaaagtaaacataaaggaaatcgagaacttactcaaggatctgatgtctggatttaagttacaccaagccaaacgagcagttttgataaaggcacttcagcaaacttgaagccaaaaacctctcttttcgctctaaacttacttagcaa

SEQ ID NO: 152902 - DNA, 763 bp, Cannabis sativa
aaaaaaaaaaaaattggtagcagatatgatccgatgggtcctatggtggtccgatgggtgtctgatggggggtccaattgtgtaaatggaggtgatgtaaatggaaggtattttagggatatcataaaagttgtgatatcctacaaatattaattattatttgtttaggaatttttttttaaataaatgtaagcataaaaaattaaatttcccttaactaatcacaactgttattagtatactcaataaaatgaaatagtttgttgaagaaaagaaaaatagataaaaatgagcaaatttgaaaaagaaagatgaaaaaggagaagcccagaaaaaaggaaaatttacatacattactaatttttcccaatttattacatttctactgtgacacgcggattgtaacatttttactgtttttttttattcggcagttattgccttgattcaaatcttatatattatttgtggcttacaagtgtcttcaccgagttttgccacttcattttttgattttttttttcaaaaaagctttgattaacgtgtgggtatcactatttgtgacagtactcttctttttgtggggttttaatttattttaaaattatttttaaatatttcaaaaaagtattgatttgacatgggtgtcaatttatggcatatgcttctttttggagtttaaatttattttaaaattatttttaaatgttaaataatcattactaaaatcccactctcccatgtttcctattcatcttcttct

SEQ ID NO: 152903 - DNA, 645 bp, Cannabis sativa
  modified_base (612)..(619): a, c, t, g, unknown or other
aaaataattaaaagcttactaaattaactaaaaacttaagaactaagcaaattttagttaaaaaaaatgtgaaaataactctaattcctagagttaagttataattaataataagaaattaaattataattaattgagccggatcaagttatcaatcacccatatatttttggacaaatcaaaataaatgtaagaatactttatttatagtatacaagtatactaataaggtagtttttaatccatgtagaattcttacaaataataaaaaaaacttactaaatcatatatctcaacatctacaaatatataaattaaactaaattgactaaatttactaaaattctcttaaaatagtttaaaatattgtaggatgatacctcattttctatagtactttcctttatataaatatatagaaattcgatatttacataaatacatagactgaaagattctacaatagtgtgtgagatttagaccaaagtaaaactaatgcaacatatagtttctataaggttttcttattaaaaataattattatgagaagtaattatattttaaaaataaaaaaataaattattataatagtttttgttgggttttatgccnnnnnnnnaactccatttcaatgtaatctatttt

SEQ ID NO: 152904 - DNA, 549 bp, Cannabis sativa
tagcatgtcctctaaaatctgaatggtcctctcgaactgtccatccatttgaggatgaaatgctatgctgaatttcaattgagtacccatagttcagtgtagactctcccaaaatcttgatgtgaatttcgaatccctatcagaaacaatagactttgggacactatggagacgaactatttctctaacatatagttcagcataggagaagtttttgtctctgaacaggtaaaaagtgcactgaatttgtaaacctgtcaactatgacccacacagagtcgtactatcctgtggttctaggcaatccaaccatgaagtccatggaaaggtcctcccattttcattatggaagattaagtggttgtactaaccctgcaggcctttgatgttcagcctttacttgctgacaagttaaacacttcgccacatatttcgctatatcatttttaatgcctccccaccagaacacggccttgaggtcttggtacatcttcgttgtccttggatgaactgagtaaggggtcgtatgagactcatttaagatctctc

SEQ ID NO: 152905 - DNA, 505 bp, Cannabis sativa
gaacatgtgatttagaacctaaaatatcttaaaaagagtaaggttaaattgtataatctgtcattcacatcaagaaaaggatagcaattaggcattaacaattgtgaaaacaaaataacaggattctcttccctattttctcatcctgattaatctttatttgtctggttaagtttcttgaattttcattctgtttataatctttaaaactattggtttgccaaattgaatcataaatctagtctagtggtattcaatccaattccctgtggttcgacctcacctgtgtgattttactacttgattacgtgcacttgcatactgttctataattttcgtaacaataatcgaaatgaagctcaaaagatgagaaggaaggctaatggtatatcatagtagagaaaattatgtacaaaggagggttctccatgccattgctcagatgtgttacccaagaagaagttgcacgacttttatctaaagtgcacgatggattttgtggaaa

SEQ ID NO: 152906 - DNA, 849 bp, Cannabis sativa
tttattagttgccgaaaatctcggtcaacagtaatctactttgatcattttttttacaatctttagattgatgaagatgattataatgaggagtgaaaatagttaacaatcattaattttatagttgttattacattttaaacttttttttcacttaatttttcatttttgaaaaaaaaaaaaaaaaactaaataacttgaaccaatctttgaccgacacactaatttagcacttagaggtgttaaaaaataagataaagagtaaaaattacctctaattagaggtcattcacactattttttattaattaaagctatgtgtgtattaactttaaattatagggagttttatttcaattatttcagttatttaagttaaaaacaataattacaaaaagatctttacttattaataaattgcataaaattaattaataattattaataaattaatttttttaaaaaaaataaaatattaagttacaatttaattataaattatttttcttttaatttttatattaatcacaaccattcaataaaaataaatataactataataattaaaaatataactattttttttttttggataatgattaaatttcattaaactaaatcatccaaaaccaaggatgcaataacaaaaggtatggagtccctactaaaagtacggtcagcctcagaaagagaagatcgcgccaaggcatgcgcaaccttattagcagaccgcttagcagaaataaaagaaacagcatcaaaatcagcaaccaaagtcatacaatcataaagaatatggtcatacggagaagccatatttttgaacttttgcaaatcattaatgaccct

SEQ ID NO: 152907 - DNA, 728 bp, Cannabis sativa
gagaattgcgcatggaattccgaagagaaggttttccatgagctaaactttctaggagcaagcttgaaataccattgctgagcgacttccgacagagtggcgagaaagattctgcagcatacatccccccgtactccttgcaaatccatttgcatttcaaagtacttgagaatgggaaaggggatcttctctccccgtatacatcttccacgtcgacattttgaacttgtggggcagcggcaggagattgatctctggtgagaaaggagttccccgtgctcggtctaactcaagatcattattacgttgtccagccatgccgtgaaacatatttttcagttcgtcaagttgggcctgtacggctgtgctgacctgctcggcatcctggtcgacttggattacgtctgcatcattctgagcggagatttgagtacgggctccagggtgcacgattgtcgtaatattctgttcgtacgttcccctccttctatttagatcgttccttaagtcatgggttgctcccaacctttcgaacacagaagagccttgttgccttagcaattgattcgcttggttgacaggtggaaaggaaccattaatctagttggagccgtcaggtatgactcctccttatgaattactggacaaggtctgctggcctaccgctgggcccacgagtggaaccggggattgggcggctgaccattagtagtctgggaagtattcat

SEQ ID NO: 152908 - DNA, 601 bp, Cannabis sativa
ttttggtggtaaaactacctaaaccactagtccgttagcaaatacactctcccgtctaactgatcccgtattctgcttatgtggctgggtagcccaagtggccagtcagcaaaattcatattacgtggcattgtacaatttaaaatctgggtttataactgaaaattaaaattaaattaaaataataactaaataaaatcaaataccccattaaacacaaatccactttactagaataagaaccccaaacccagatatcacacccattttcgttttaaatcaaaggaaatcgagagaaatcaaagaagaagattaagaatataaagttcgaagggttgggggtactcctacctggattcatcctctattatcgaaggggaagaacaaagctactgaacatgtccacggggcctcacctctaccgatgtgatccccctagggttgcagagatgaaaacatcttagacgaataagaatcccaggcgaaggtttgtagatgcccattccatcaggtgagatcctattgctttaattatttgccctaatttttgtgttctttcttctttttttttcttctggtcagaattctttttttggttgtg

SEQ ID NO: 152909 - DNA, 566 bp, Cannabis sativa
caggacctccaatacacacgcactccttatggccacttgaactagcctcaagtggttaccctcagaactctcaaacacattctcgtaatgaaactaatcacatataggtgcaggattccataactcgatactaactctcataacagaatgtttgccaactcggttacttaagttagtttcacattggagtaggagataggaagttggcattagatcaagtatcactaaaagatgaagctgcaaagatgctgtgattagtagcattggttttggctttaaagtaaagattgtatatcatatgtgactattactcttgccacttttgtgattagtagcattggttttggcttagtagaccatgaaaacatgagcattataaatgcaaagctaaaatgctatatgaggagttggtttctatgcttcacaatacaaactcttgtaatgtaacaacccttttaggagaaatgaaaaatcattcacataataaatttgaagaaactacatctaacattcacatctatgaaggtacaaatgatgcattttgaatagcaaaatatcatcagcaa

SEQ ID NO: 152910 - DNA, 588 bp, Cannabis sativa
gatgaaattctttattattaaccaagaatttttttaaaaaatatatgaaaaagatgggtaataaaaagaataactcgaaaatttttcaaagggaaatgcttcttttaaaccatctgtgtctaacaaagagggaattcagtgcaaggaatgtgaaggttttgggcatattcaatccgagtgtgcaaacactttgaaaaagaataagaatagtttcaatgtctcgtggagtgatgatgaaaccgaaagtgatgaagaaaattttgagaatattgccttaacttctgttatgactaatgtgttgtgtgattcacaggtaaaagctagattggtatttttgaataataccactgaataagtagaatctgattctgaagattctgaaatctgtgaagagtctcttgctgaatcatacaaagtcatttatgaaaagtgtattcaggttacttttgaaaatagagagttgattaaaatgaataaaaaaatgtctcaagaaattgaaatatttgagttaaaaataaaagaatatgagacagatttttgtgttaaagatgaaaaatcactcttttaaagaaggaatttgaaaatttt

SEQ ID NO: 152911 - DNA, 508 bp, Cannabis sativa
  modified_base (27)..(27): a, c, t, g, unknown or other
aaaatagattacattgaaatggagttntatttagggcataaaacctagcaagaacaccatacaacatcctgtctattatatcagtaaaagactcattgaggccgagggccgatacccattattagagaaactcgcctactgccttattctagcaacaaggaagttgaggccctatttccaagctcatgatgttcgggtatacattgaccagccactacgccaaatactgcaaaagccagatgcttctggacaactactcaagtgggtggtagagttgggtcagtatgaaattactttccaaccccaaacaacaatcaaaggccaagccttggtagactttgtggtagaatgcataggcaagaaagaaagcatactggaaagcagcctcgagccggtacaaacaccccatccaagtaacaatgaagataagtcgacctggaaactacatgtagatgggtcagctaccgatcaactatctggcgtaggaattgcccttgtcacgcctagg

SEQ ID NO: 152912 - DNA, 818 bp, Cannabis sativa
tatttattaaaaaaacaagtgagaaccgatattgagttgcactgatatcaatattacacctcacataaataggatttaaaaccacgataacaatacaaccattataccaaaatgagtattatgttcattgtatcactttaatttacaaatacatgttcttactaactaaaatattttttgtttcttgatttattttttagggatgactacccttctcgcctttatgtgagtctatccatatttgaaacacaacatgataaataggtagatgaatttattcaccaagtttattgtttactttaattaagagcaatagttgctgaatttttaatttttttttgttaaaaggagtaataccatattaaatcctgtattttataaaagttaatgattagacttttgattttgtaaaatgacaaattagaccttatattttttaaacgatacaaaatagtaccttgaccgaaatttttgataatttttttttaatataaccaatttaaaaataatttttaacatgaagatatcttggttttgtaaaataacgaattagaccctatatttttcaaatagtgcaaaatagcaccttaagctgaattttcgatattttttttaatataacaaacatgaagataatttttagcatgtagagatgcagaaaatgtactcattttgtcataatatttctagatcgggttattattaatttttattttaacaaataattaatttaggtactattctataccattttagaatatataaagtccaatttgtcatttaacaaaacacatgatccaaaatagtatttaccattt

SEQ ID NO: 152913 - DNA, 545 bp, Cannabis sativa
  modified_base (396)..(399): a, c, t, g, unknown or other
  modified_base (501)..(504): a, c, t, g, unknown or other
ctatcgacaaactgtcaatacattgccaaataaataaatttatttaaattactttttcatcgacatgatatcgacaaactgtcgataagtcatccctgaccttctttcgcatattatcgacatttcatcatattctatcaacaaactgtcaatatagcctctagaaaactcaaattctgacagaaaaccagatttaccagatataccattttagaccaaaaaataccagttccaacaaataccacagatataacgaaagtaaactacatactattactaatgtctaacaagatgcttaaaacacaacttacccattataatagtgaatgattcttgaatgattggggtgtggtccagtttttcaccaccgggagatatatatatatatatagagannnngagagagagagatggaggagcttagagagatcctgtgagagagtgagctggaagctgagagtgagagagcagtttttgtcaaagtagagagagagagagagnnnnagagagagagagagagaaacacacgagagggaagagagaga

SEQ ID NO: 152914 - DNA, 1174 bp, Cannabis sativa
aatattatggtccttctactccttcatctagtgatagctcgccttctagtgattttggtaaatcccttaggtggaaaaatatactcctcccctttttaatcggcttttctataatgattgtaacacctcttcttgttttgcagacatgggttatgaagacatcctagaccgtaggggaagaaaaggacatccaaccctggagtccctactactgccgaagtggttcctcccaagaggcaatggaaaaccaccgctcataagaagaagtcactggtcgagcctatcgatctcgaggtttcggacaacgagatcttatagcaagttcctccttcagttgttcccaacgccaatgctcctcatcccgaggtgacccctgctactgcttcttcgagtcaggccattgagaccctgtcagttgcagcaggggaagctgggtctgaatttgtccaggcatatggagtcgctttttggcacaaacttcaaactctccttccccctgattgggattttctcaatcttaagagtccaaaagagattcttttaaggagcttggactctcacttcatggtacgtcggctttgttattataattatattacctttttacacctctttcatcttcatctgtttgcaattctttcttatttggcttcttttgcttccaatcgagtactctctgagcggctcgagtatttggacggcgaggctcacaaattgttatcccaatgcaaggttttgagtgagcaacgagacaatgcccaacaggagattacccgcctcaagcaagaagacgagaaagcaatggaagaagccgagaaagtaaagaaagaagctgagaaggcaaaagaggaagccgagaaggcaaaggaggaggctgagaagaccaccaaagtccaagctgaagagtttaaggagaagcttgctgaaaatacttgctgagaaagaagtcgataacgtagaacggtgcgataaagatgattttcgtgctatatatcgggcctgactttggaaccctaacatggataccagcttcttggaggagaaggaagggaaaactttagatctttgcgagaagaccaagatggaagaagaagatggtgaggtcgaggaagaagaagaagatctgtataagagagtggtagacttggccttaattgctaaggaggccgagcag

SEQ ID NO: 152915 - DNA, 547 bp, Cannabis sativa
atccacataattattaatatttataacaaattctcaattataactcttttatcaaatctaaactattattctgtgaactaccaataagtttccccaatatgcaaaactatgttttggattgtttataaggaaatgattttttctttgaaaaatgttagtaaatagttctatttctaactttagtgatagttaatgtccttttttttaaataattaagcaaatgtcattttttactttttaatacttaaaatatccttcattatataaaaggtattataaaattaacttagagtaatatgaatataatatacaaatattataccttagaataatatgagtattatgaccttttttttttttttgatatgtattcttttaattttatttttatttcattccttcatgttatataatttaacatacaaatattataccttagagtaatatgaatataccgccacaattctatagtcaaataaatatataaaaaaaacttaaataaacttccacaagttttttttttctctttctttcatgatataccata

SEQ ID NO: 152916 - DNA, 714 bp, Cannabis sativa
ttaccaacaagcttgttatgagaaaaattgagccctttgagtgagtttagcttaccaatcaactttggaatctttcctgtgaagttgtttcttgataaatcaatagttataagcatggtttgaagttttggcaactcaacgtaatatccttttatcattaatgaacttgtgtcataataggtaccatacataacttctttatccatgtagattaatttatcagtagtaacatctatcattcccacaaaattcttaaaataattttgttgcaaatgcccagagaattcattgctactaagatctacaattctcaaattttgaaagggatgtcttaccttgggattgcctattggaccttgaaatctattagatctcaagataagaacttgaagatttggaagagattccagccaccagtgaaatgatccatttatcttgttgttcccaatatctaacaactccaaatatttacaattgagcaatgattttggcaatgacccttccaattgattttcattaacatttaaaactcttagtctatttccctaggcaaaagttggaggaatgattccatcaaacttattattcctcaaatctaccactgagagagaggttgaatttcctaggcatggaggaatgttcccactcaaattgttattggacaaatcaagtccttcaagcggagtgagattgcaaatagatggtgatatttcc

SEQ ID NO: 152917 - DNA, 513 bp, Cannabis sativa
ttgaaaaaatagagagggagagagtggctgaatcgcaaaaaatagaaagggagggagggactgtttgttttttttttttttgatgcagagggagggagcggctgttataggagtagattagggttttatattaagttaagagagagacaaagagatatatatagtattaattttaaattttaatatcaaatttttttaagaataatattagaattttttttatactctatatttaatataatataaaaaattaatatttacttattatttctttcaaaaagaattaataacagtaatagatttattttttttatttacttatttatttatttattattattttattaatatttattatatatagttgtacatttttcttctttttttaatgaaggtacttagttacttttttagataaattttcttaatacatgatatagtgacgcgccaagtgtgttggggtatgttttcccagtcgcatttggcgtgtcactgtaagccaatatttttttt

SEQ ID NO: 152918 - DNA, 661 bp, Cannabis sativa
  modified_base (260)..(269): a, c, t, g, unknown or other
tccctagaaattcaatttgcatattgataaaagttaaaggtgatgattagttactagcagctgcatgaatccttctacggaaatacccttgtgataggaatttttagaatgatggaatggttatttacttagtgtaaaccattattagattcatggatgtcgtgatcatgaacttaagaaaagctagatctgttaactaaggtttgcgagtttgatttatagctattctgaagtaattaggggtggaccatcctatggtnnnnnnnnnnagaaagtgtttgtttcaacaattattacttttctaagtatatcactaaatctaaaaaataaagtagcaaagtagaggagatattttcaattccaaagtgttctatcatcttattctacataagatggccctactgcctctattatcttgatacaaacgatgaggacaacaccacttatgttcctagacaaaaagtcacgatgccttattgtagtgagaaaatttgaaggaactcaccatgttatgacttggaagacactgatgataaaatcctttgtaagtttagacaagtaatggttagtcagaataaggaacgaagaagtaaagccaagagagctatggttaaaacaattcatatggagtaaccaaaagttttctattacaaggataaga

SEQ ID NO: 152919 - DNA, 517 bp, Cannabis sativa
ttctatctttatagattttaatgccgagaacatagtttatttcttcaaaatccttcatttagaattttttggctaaacacttcttttagtttgataacctttctacattgtttccaataagtagaatgtcatcaacataaaaaaaactaggtataacactatattacctttaatgtatttgtatacacagactttgcctttgttttgttcgaagtcacactttgtaatagtcttataaaaagtaatattccaagatctaaaggctagcttcagtccataaatggatttaagcaacttgtaaatcttccgacattccttaggtagcacatacccttctggttgttccatataaatggtttcattaagattgccatttagaacaacagtcttgacgtccatttttcatatctcataatcataagtgttagctatggaaagaagaatgtgaataaatttaagaattgccacaggatagaaagtttcatcataatcgacaccttctcgctgtgtgtagcct

SEQ ID NO: 152920 - DNA, 975 bp, Cannabis sativa
aaccaggatagctcatcatctaaccgcagagcatgctttgccaagccatgagccgctaaattgtcagagcgaagtacatgggacaaaactgtccccggaaatttagacaataaagctataacatcttcaaacaacactcctaactcgttgaaatacatctttatgttgttgatgaccatcatcaaagctaacaaatctggataaactgaaaaaacatcagaaaaccaaaaaaaaattataattaaaaaattatcaagctcatcaaaatcaatcaaacaccgaaactaaacaactagatccccctgtaaaattactagaactagtcaaagggaataccctttagctagtagcagggtcgtctcaaggtgatgagaagcctagggcgaaatttgaaacagggacttttcttttaataaaaattaaaaataaattttaattaaattttgacacaatatcaattttaattcttttatctctatgtaataaataattttttgcaacgtaagctaactcgatcaagtaatatttaattattaaggacatctctattgaagtgctatatattttagcacatttgaaagaaaaaaataatgtgtttaaattatatatatttaaaaaataataataaatgtaattttatttattattaataatatcgttcaaaatgtacattaatattttaaaattagaaatacttcaatatatttatttatatagtgtaatataaatatttaagttataatattgttatttatttttgaaatgctaagtaaaatctttcacaaacaactaaaagtataaaaaaagtgaacaagtaaggatcgaaccttgatcctcaaggccaataaaagttctacttaccatatgtgctgcatgtttctaatgtaatttattgagttaaatatttatatattatatgtttttatatatattaattttaattttttcggggcctccaaaattgtggggcctagg

SEQ ID NO: 152921 - DNA, 900 bp, Cannabis sativa
  modified_base (497)..(502): a, c, t, g, unknown or other
gcaggaactgatgcagcaggaggagaacctgcaacaggtggaggagattccttcgaagatgaagacgatgaagtccaggttttgtatgggcgcacagatgtttgaggtccttgcttaggaagttgttttggcttcttgggccgagattcacgctgaggaagcgatgagtctcctatttttgcagcagcaggaggaggattcgagggggttgcatcagtttcaaccaccttttttggatgccctaggttctttgttctcaccattttgatctgaaagagacaatgaatagcaaagaagcaagacagacaaagaaatagaatcgggtaggtggtgagaataaatgacaaaaattggtttaaataaacatggaagcaagaagagaaaaggaaaccgattttgagatttcgaaaaataaccgctagcccatgaacaaaaaggaaaccacccactatcttccaaaaataaaaaaattctcctttcttttttttttttaaaannnnnnaaaaggaaactagaaaaaccaatattatttccaaacatagcccatttaagataatctttcaagattaaagacacattaccatataagagatcaatctttaaattgaaacatatcaaaataaatcaaggaagaataaatattgatacttaccaattaagcacaaaattttcttagcccgtgaatcaagacaccaacgcctccctctctttattttttattttaatttttaaagaactgaaaataaaataaaatatgtacaataaatataaggaattctaaaccaagcaaattaatcaaagatcattacaagtgacaaatatacatgttatgctttcaaaagagaataactaattagtatctaaagaacaaatcatacttaattaatgttgaagaaaaag

SEQ ID NO: 152922 - DNA, 545 bp, Cannabis sativa
  modified_base (71)..(78): a, c, t, g, unknown or other
attgaaaaataaaatttaatttatgattatttggttatttcagaaattcatatattaagtagttgttaatnnnnnnnntaaataagtaaaatattataaatcgtgtgtttattattttctctttatctctaaataaaaattagaataattttttattattttatatatatatataataattttatatgtattcaactaaaattaataattaaaaataaaaaaagatctatttcttttcatttgttaaataacttaaatgatttttttttaatttttaatatttcacaaattttaaaaaatgcaaaagtgcatgtttctttcattttaaaaaaattataagagtgactaagaaattatcttaattattttaaataaatttaaatatatttaaaagaaaattacgataaaaaattcttaagaaaaaactttttctatgaaatacttgacaaaggttaaaaaatataaagaatgtgttttgcattcatttataaaaattataactaattgatgattaagttctccaatcacttacataaaaataaata

SEQ ID NO: 152923 - DNA, 571 bp, Cannabis sativa
agagagagagagagagaattttctttgaattggaacgaacgaaacagtttttttccgcattggtcttttgggctataattggatcgtggtattttgtaaggatactagcatttaaacaagttatatttttgtggcaaaaagaggttatatcagttttcttgagtacgtgggaatttaacaattttctaccatatattagtgccacttaggcattgaccaaagcattttaaatttttttttcccttttttttttttgagatatgccttttgggttggattgaaaacctgttgtcaaataatgtgtctaagtactgattacaataaagggaagtttggtatgatctgttgaaaataatttgattatagaaatattatgaaggagaatatgattataaggaaatatgtaaagtgtgtttggttgtgtagggtaatatgtaatcacattcctgttaattgaattacactatttagtttagtacaaaaatcttatatattattttacaaaattaaaataaaaatatttttttattatatctatataatgttgtcctcaaaagtgagtgttttaata

SEQ ID NO: 152924 - DNA, 588 bp, Cannabis sativa
ccaacaacactatctatttcggttattgccttttcaagcatttctggttggttcaacatttcagatagtgcccattctgctgcgctgtatggattgtctacaactgttaggaacagttcctgtttttcatcaatattaattacccattaattaatcaatatatatataaatattgtacaaaaaactataaatgaggtggctaaccataaaaattatttacatataaattaaaaataaaaaattcataagggtactacgtatattaattaaagaagttatttatgagatatgatattaacataattttttttaaaaaaattataatatatatggaatttgacatgttactattttacaccatattcaaacttcaaagtattagtgtcagtatataaaattacttgtcgaattgaattcttgaattttgaattgaagatcacgatttagaagtagtaacttttaaaacaacatataaacttcagaggcataataatgtattgtggataagtataatataccttttttctattttaatattgctatatgaaaccataaacctaacgatccatatgtgccaaacatataact

SEQ ID NO: 152925 - DNA, 805 bp, Cannabis sativa
acatatcatccattcttttaccaaattgcttgataaatattggatatcacccccacattttctcacattcactatcaagataatatcttgattttaaaatatagaaaacctatttgtctccataattactatcatctcatataacatacacataatattaatatacatcacaactatatatatgttacatatctcgtataacatatagtcatcataatatatatcatctccacataatatatgttatatatgtattatatacataaatattctcatcataaaatatatattatcatatgctcaacatatataatatatatatataattcatatacatgttatatattatgcatatctcacatatacatattaacatgtaatatattcaaatatcatattatttatcactatattaatatgacatatacactcatacatatataactcatatatatacatatatttcaatccatatctcaatataaaaaaatatgtgaatatataatatttactattataaaaatagtaaataacaaaatatcacaattcttacccttgtattatcacatgttgatttcttacctttcattgaagcaatgtaggaaaggataagcttttgacggttggaaaattattgtgctccaatagaaatatcaaaccaacaagattacaattctatgacaaataattaaaggacaaaacatatataaataatgttacaacactaaacaaaatatacacataaaataagaatagagatgaagagagggattacaactcaaagcaaaaagctacacatgagaca

SEQ ID NO: 152926 - DNA, 640 bp, Cannabis sativa
aaaatatatatatattttttacatatcaaaattaccacattcaagagtggttcattttccttctaattaataagaaaataactaaattttaatgttaaacaaaatataatatgcgatcaaatttgcgagttattattttattattctatttaaaagttattatacattaactaattagtttctacattaaaataatgttacttaaatcatataaattattagcaaaatgtctagacttctaaattaataaccaaatagtttcttaaataaataacacattagtttctcaaatagtatggaagataacataaatattattatacaaaacaaaaaaaatatatataaatatatatgtatatataatataaatgtatatcttaattaacataatataaactaaaaataaacatataatttaaaataactaatccaaaaattaaagattatctactagagatatttttatttaaagtggattattttatgaaaagtaactagttggtatattattaaaagactaattagtaatttttttccctcaaatttttatatatatcaaatcatgccccttgaacttttttggccgttaaaatttttccctgaactattgagattgttaaatttaaagatttttgtctaa

SEQ ID NO: 152927 - DNA, 727 bp, Cannabis sativa
  modified_base (338)..(350): a, c, t, g, unknown or other
  modified_base (673)..(678): a, c, t, g, unknown or other
aataattaatttgaattttctagagaattagttattcagatattcttcaaatattattttaagttgaaaatttgttaattatggatcaacttaaaatggaatatttttcaaattaaggtgattagttcaggatactttttttttttttgaagatgaagttcagtatacttaattttttatttaattaaatttttgaaaaataatttaagttgaaaattttattattttagaacaacttaaatcagatatttttcaagtatttgttatattatattttaattattttcaaaattttatatatttttatataatgatttttaaaaattagattaaagttnnnnnnnnnnnnnttaattaattttagataaacttaaattaagtaatttttattattaaaatagatagagtaaaataagtgagtaaataaaaatacatttttaataatgagctttaatcaagagaaatttgatctctattgttggttctacatagtttttgttttagtgagttatcatccctaatagataaacgttcattagaaatttaacgcagtagaatctcgaaagaaaagtattatttgtaagtattttattcttagtaacgcccaccccaatagcggctgctaggagtaagacttacaaaagtataaaacaatggtggaagctcatgaaannnnnntgaccttgactctcgcctaaacggtacaacgtcagattctcttttcgat

SEQ ID NO: 152928 - DNA, 517 bp, Cannabis sativa
cctgaagggctgtaagttgtgtactatcatccaaattcctaaccctagctgtagccgtgctaaaatgacttaagtacgccttaagtgtctcgtcgggttgcagctttatattggttagcgaggccgcttcgaatcgtctatccctagtagcctggaactgtttttttgaaatccctagagagctgctccctggaagttattagtaaacttgttagaccaactgtttgctgctccaacaagcgagttgaggaacaaagtaaattgttcgtcacattactcgcttgcattattgtattaaagttgttcaaatgcgagactggatcagtggttctgtcatacggcaagacatgcgggttttcgaatcccgaaggaaaaggggtattcatgatatctggatgatatggcccaatatcctcctttgagtcctattcagattgtctcccttgttcccccacttgatatctcctgaacttgtccaccagctcgtttatccgtaattggatgggatcctcttgct

SEQ ID NO: 152929 - DNA, 753 bp, Cannabis sativa
gaagaacttcgtgattgagattgttatgggtgaatcaatatattctgagaatctctgagattgaaggtgaaattcgatgatatacacaggaagttaatcaaagacaataacgacatgcaaatacggaggagaaaagcaatcaaaaaaaccctttgcaaaaaaatttgaaggtttgaaaagcaaaaatgacaaaataagctctcacttctactttttatacctagtcactaataaccgtttgatctaaagaaattagatctaacggatgggaatactgcaaattggaaaagatagggcatttaatactaatgatgtgcctcgaagttctgaactgccaaaacccaaagcatgcattttttttaaattgggttaagacaaaaatacccttgtaatcatttaaaagttcattttaattaaaaaatactttttaaggggcaattgttatatccaaaattcagctacaattcagaagctgacacgtgtccaatatatggaatatgttacaattctaaatgatataacgatattattaaatggataataaatcgacgatctcttcgatcaacttcatggaaagacggtattttcaaagattgatctctgatcgggctatcattagttgagaatctaagaggaggacatcccaaagacagctttccccactaggtatggttattatgaatttcttgttatgtcttttggactgaccaatgctcccgcagctttcatagatctgatgaatagggtattcaa

SEQ ID NO: 152930 - DNA, 526 bp, Cannabis sativa
  modified_base (39)..(40): a, c, t, g, unknown or other
atcatcagaatcagattcttcttgttcagtggtattatnnaaacataccagtatggctttcacctgtgaatcacaaacacattagtcataacaaaagttagatcaacattctcagaattctcttcatcactcttagtttcatcatcactccaagtgacattgaaacttttcttattctttttcatagtgtttgcacactcagattgaatgtacccaaatccttcacattctctacactgaattctctttttattagtcacatagggtttaaaagatgtatttccttttgaaaatttcgagttattttttttattacacatctttttcatatatttttgaaaattcttggttaataaagcaatttcatcatcacattcattattagaatttttatattcagcaacttttaaagcgatacgtttacctttattagcaatggatttgggtttgtccttttgtttgatttgttgattcaattcaaaagtacgcaaggaacccattaattcttccaccttcattgtgctaa

SEQ ID NO: 152931 - DNA, 654 bp, Cannabis sativa
  modified_base (107)..(110): a, c, t, g, unknown or other
  modified_base (341)..(344): a, c, t, g, unknown or other
tcttggtgtagcaatcaaatatggaaggttctgaaggatctttctcaggaccttgtcctttgaattatcactcccactgatcaaggcattttcaagaaattttgcannnnttgatttcacaattcttgtgctatgagatggacaatagaacttgtaacctttggacttttcagtgtaccttataaagaatccgcttatggtccttgggtttaatttcttcgcttgtgaattatatattctaaattcagatggacatccccaaatgcgtacatggtttcaacttggtttccaacttttccataattcaaaaagagtttttgagactgcctttgttggaagtnnnnttaatatgtacacggatgtctttaaagctttagtccacaaggatttaggaagattagagttgctactaagcatactctggaccatatccattaatgtacagtttctcctttctgcaacacaatcttgctcaggtgtactgggaaaggtgtaatgggcaaaaatctcattttcttcaagaaacttagcaaatgaactaggtgcttgtccatcttctgtgtatctaccataatactcacctcctctttctgatctcattatcttaatttgcttgttgcattatttctctacttcagctttaaatatcttaaa

SEQ ID NO: 152932 - DNA, 523 bp, Cannabis sativa
ttatagctgggataagaatccaagttttgaaacgagacctccaaatactcccaataaagcttttgtccactgcttctctttttacttgtaaaataattaaatccgactcttcgtcctccctatccccactacccctaattatccacgtaagaatcttaattgtaatcttttttgggaaccctggacttgttctgactttcataatagtttatgttaaaattaaaaattttaattttctgcttttatttttcacttccttttcattaccctcctccactacctctgcttcctcattagatactattgttattcccttgtttgtcaaagttgccactattatgccaagacaacttgctcgattaagattcatctttatcaactccattatttcttctatatatctttatagacagtttatgttgatgttctgcctcactaacacattcttttcctctttcttcatgccacaattcatcccctcgattcaccatgatgttatcctcatgccacaaaacttttattt

SEQ ID NO: 152933 - DNA, 786 bp, Cannabis sativa
aaaatcgcagagtttctaaacctagggttttctacatatcttctacagcaaagttaaaattgcattcacaaaataaatgtgcaaagtaagagaaattgagaacttactgaaggatcgatgtctgggttcaggttatgcaaagctgaacgaacagttctcgtgaaaatgagtttgtgaacaaatgctcgatggtatttataagcaaacaacgaaaaggggtaatcatttcagaaacctcagacgcctcgtttccccgaaaagcgaatatgagaaatgaaaagcaatcaagtgcaaccgtcaaacgtggtgagagaaaattagtttttgaagcattaattgcgtaagagcatttattagctgaaaacttaagggacgcccagtcagcctcacatcgttgcgaacagaagcgcctgacacttgtcacccatctaaacgcaaagacagctcgaatgaagtctacacgcaactttggaagtcctgtacagacttggggatcaaatgttatcccaattttccactctaacctggcatcactcgatggtgacacgtgcaatcgactccgggtatctgctcgcaagacacaggttggaaaggacacctcatacatttgctcggacgaagtcctttagaccaagcagtgagcaatccgcacagaatgccaacacttagtaaattcagctttcgcatcgtgagtcataaatcaaatccctataactttgggatcagattacagagataatgcaagcggtctaaatcccactattagtgtattccatatatactatg

SEQ ID NO: 152934 - DNA, 517 bp, Cannabis sativa
  modified_base (63)..(63): a, c, t, g, unknown or other
tctggacattgtttcttagacaatgtgtactgtgtagttataggttggctagcaattttagancctttcattgagaatttctcaattatcgtgtgaatgtagtcttcctgagttagggtaagtgtcccttctgctctatttcttttaatagtaattcctagtatcttagttgcttctcctaggtccttcatttcaaactcagtcttgagtaagcccttcatagtgtttactctagctctttctttactgattataagcatatcatctacatatagaagtagatatatgactttattaatatcagtccctttatagtacacacagtgatcataaatagctcctagagaaacccaattttagcataaatccatcaaatccttttgttccattgtctcggtgattgtttcaaccaatatagtgactttactagcttgcaaacatagctttccttccccctttctgtataacctttaggttgcctcatgtagatctcttcttcaagttctccatgtagaaa

SEQ ID NO: 152935 - DNA, 632 bp, Cannabis sativa
ggcaaaatcaggggcaacagatatgaatattgatccaatttttcctcaaagacgcacaattcgaagaaaaagacaatattatgagaatttgaataccccatctattgagttatctggagaagaatcttttagacaatagaggtttgaagtcttgttgtagtcatttggaaaggcattgaaacataataaacaatatgatattaatggaaatgaattatctgtaaagttaaagttattaagagaaatcttgcatagggaaaatatgagagctattgatctattgaaatttttgaaagacgtagattgttttcctaatacaattattgcgtacagaattttattgactattcctgtgacaattgcttatgcagaaagaagtttttcaaaattgaagttgttgaagtcctacctgcggtctatcatgttacaagaaagacttaatggattagcattgatcgcgattgaaaatgatgttttaaaaactataaaatatgaagagatggttgatgaattcgcttcaaaaagtgtgcgaagaacgaccttttttaaatataacgttgatacttacttaaagttgtaatgaaataaataacaattattataataaaataatttttgttataaaataatat

SEQ ID NO: 152936 - DNA, 513 bp, Cannabis sativa
ataacacgaaataattcaaactagttataattaaaatagaactagttttataacagtgttacaatgaataaaaataaataacatgaaataattcaaagtggttataactaaaataaaactagttatataacatagtgaatgagtatttttttgagtatatgtaatatgagtaattatttggtaggttggagcatgttgaatgaatatttttgtttgagttattttatttaactgatttttgtgtgtaagttgttatcttagttgttttacataaccagttttttatctcaaatttttaactagttgataaatataactgatttctttatattatatttgagttactgtgtgttattatttgtgtttatttattttggtatggaaccagttcttttcatgtttatacttcaatattttttagaattgatccccactttttttattaaaaaaaattataaccggctttatgaagtattgggtgattctacagtgcacccctttaaaagagatgta

SEQ ID NO: 152937 - DNA, 877 bp, Cannabis sativa
caggacctgaccctagacctagacctgggacccgaaactcaaacatgaacgagattatgactaggaccctggaacaggaccgggaacgtgaccatgacccacacgtggactgggacccgaaacctagccccggaactcgtgctcggacccagtcctggacctggtcacggaccaagaatgggacttagactagaacctaaacccgaactcgggactcgatcccggacccaaatcaagcccctgacctaaattgggatttagaccttgacatggacacgacctcaaacccggacccagacgcatacccaaacccaaacctgggaccagacccaatacctgaacgtagatccggactcagacttggacccagatagggatctgaaaaactcgtacctggactaggactgagactcagaccctggccccaacttggacctagactcgaacccggaacaaaacactaacctaaaatcaaaactggaactgcgactaggacccggacctgtgaccagaaccgaacccaaaacataacccaaacttagaccaaaacctggaccgagaccttgactaggactaggacctgagaccaggacaggaacctagaccgatacccgtactaggacctggacttgaccttgtcctaaaccctccccgggacatgagacccgcgacctagaccaggatccagaccctgatgaggacccaaacctgaacccagaccaaggctaggaccgagacctggacccgaacccggattaggaccgggactaaaaccaagactcgggacccgaacacgaacctgtacctagactaggagcttggaaatggacttggatgggggacctaaaccagggacctaggccccggaacccagacc

SEQ ID NO: 152938 - DNA, 913 bp, Cannabis sativa
  modified_base (857)..(869): a, c, t, g, unknown or other
tcgtgtacctgctaggtgtgcgacatgcgaggatgaggaggcagattctacgttgttgtctcgcgaaggtctgctgcgagggttatttcgttcggggtcttcgtcgatctgtgtctctaggttgagatacctcgcagattggtctctcgaggttggttgatttaggtcgagtccttcggggttggtccttcgttccctgcgaacacggttattatgacgtcgagagtgggttagctgagggttttctgtgcgagtagtgggggctcgaggaggacgtcgagccctgttctgtccatccaccttggcttgtagggcgggcagctggtcctggatcgcgttatcctggtcagttgttagctggacgataccctcggacactgccgccggagtgatgggtggaaagtgccccattattgctactggcgtggatgtttctccgaattgtgggccagcagtttcagggaatagattgaggagtttgacatcacctcaacctactccgccattgatgacatctacaggtggtgttctaaccccagacaatggaacgttcatcattccgatgttgatggattcgttgttaacacctctgtttgcttggtttccaaccatgatgatttccttcttgtatttagtaagaatgtacttctctattaccacagacggcgccaaatgttgtcgagcaaaattcgcaacaccaaaaatgaataataatattaataataagaagaaattatatgaagaacaacctgcgagtattcaacctaaaacggcaagtactcgaactgggaatgtaatttcttaggaaaaaactgaaaaataacaagaagacaaaggagtatagtggttcagtcagnnnnnnnnnnnnntagtccactgtagcaagagttttcgtagtgtcctatttcatggt

SEQ ID NO: 152939 - DNA, 1103 bp, Cannabis sativa
  modified_base (265)..(274): a, c, t, g, unknown or other
tttgtaatttatattttaactttgcgactaataattttgtttttttttactaaaaaaattaacttttattttggcgcaggaagaatttggagtttcattttttcctcaaatattgagattcttttcattaatgatttactatttcttctctatttttttataaatcagaaattgtattgccacaaacttcattgatgaactagacagtactaacaaaaaaagatggtttgagttgtttagctactgctatactatacatgacatnnnnnnnnnncaatttgcatatccatgctaaattatgttgttttatcttttttggcaaaatgaaagatatctttattttgatatcatgttttatacaccttattttgaaacatagatggttactacatgtaaaatatttaatgcaggtaaagaactgagggaagagtacattaaaatagacaagatgatgtgataaagatgatggaagataaatacataagtattttttttcttgaacaatatctatatatttatatgttaagtataatttaaatgtattgttttaacgccattttaatttactgatttgaaatatttttttttaataatattgtgttattttacaatattcatattcttttttaattcactgtttgatttttatttatttatttatcaaaaatcataaacaaaatattatttttaaaaaattattatttattctgattttttttttagtttttaacattgttatctaatatctcataatacatattcttgcaacaaatgatagttgagatttttgtatttcattcatgatttcttagacttttgaattgagaaaaatttaactaaatataatttcaatacctccatctattctattcttaattgtttcattttttacttttttattacttttaaaagaaaaaatctttaattaaactaataataataatagtaataatctctaagaacaacaaaaacaaaaatatttaactaaaataaactatatcaagacacaatattttttatacgtatatatctttcaagtattactctttttttaatatatatatatatatatattctatataaaatgtggctatataacataa

SEQ ID NO: 152940 - DNA, 1104 bp, Cannabis sativa
tattttatttagagcatatgaatacttacttacatatttctgtgcagccaatggactaacaaatgtatttgtgtttttcaacaaatgaacatctttccaagtctcaatgtaacccttgtccttctaaaagaaattaaaaaaaaaaatagaaaatgtgcaaattaataacttaattaaataaatcttttaacttactcttttaaaacgcctctcagccatagatttcgatccctgtgatgtagggtactacatcttttttttttttctattttctgtattaattttagaacgagcaataaactctagactggtgaagaaattacaaataggaagccaatcctctggagtaagatctctaggcgggtgggcagcaatgttatcaaactcaacaggacttttgtagtattttttaaaatgcacatgtcttaacaacttccgtttcttatatctatctgccatttcagcccatgcaatatttgtaattgtctcagaatgttcattgttgtcgatatcgtaataatactggaaattaaaactaagttagcaacataataattgtgagtaaaaacacacaaaaattcaatataatttttttacccgaactctgttgaagactgcatcatgatacttccttgggactttctcccaactaccataatgtcttgggacgtggattctaatctctctcccaatcaaacgagaaaaagtgccactaaattagtgccaacaaactcattttttagtgcccaccatttgattggcactacgtgttgtgcccttttgatcgtgccaatagattcgtgccaaaatgtgacaaccggcaccacaaatggtatcgtgccaactgtcagaacaaatggcatgacaggtgtagtgcccacttgaaatgatggaagttgaaataatattgtgaatcttctatcacaaatattgaaataaataccaactgaaacggaaatatttacaaaaatttcaaattctatagtaatgaaatcacagcattgagtcatcaggttggatatccaatttacatgaaatctgcaaaaaaaaaaaaaaaataccaaacatgtaatacttttgcacatttaaaataatatttaatga

SEQ ID NO: 152941 - DNA, 596 bp, Cannabis sativa
tggaatactaatcatcaatatgtttttcagataatcttctttacaatttaaaaacgttagtgtcgtaggacttctcttgtatcagccctgtcaaattaaaaaaaaaaattagggaacttaaaaagaattaagaaattaatatttgaaatcaaatttgattagattagattgtttatacctttaacttaggatggtgagcacaagacacgtctcaccagccttttcacatccttaatagtctcataaccatgaacactaagcccagttacattcacaaacgatatcaaactctgagtttttcttgtccatagttgaggtccaccaggtgttataacccctccttatagctgatacatatatgacatttattaaaggggtatactaaatatataatatatgtctaaataagtgagcactgatatggttaatttctagaaaagtagttttgatattttgatcatacatattaaattggttaatgtatttatatagtacatattgagaaagaaccatggtgtgggacttggaattacgagcaatcctaaatattaagagccttacttagtctataaaataacattaacataccccaattt

SEQ ID NO: 152942 - DNA, 502 bp, Cannabis sativa
aaaaaaaaaaagtaaaaaagataggatgtcacatgattttgcttggtttttctttattatctctatatagataacctcactttctgccattttataataataaaaatatcatgcatgaatacatatttagttttatatttatttagttaataataatgttttaaatacacatataatctcgatgaataatttatatattatgtaatttttcattcactcatatttcttataatatctttataatacatctaaattacaaataaacaaatttatatttaggaaagaatttatgtgttttgaccaattactattttgggttacatatattctacaattgatttttcttataataattctattttggtccatatattttatatgaatatatttctctttttaaaagattttatcaaacacctaaattgtatataaatttttaaaaaacacataagagaaactcattataattctattactctacaaatcaacactattttttttt

SEQ ID NO: 152943 - DNA, 789 bp, Cannabis sativa
aataataataataatattgaattttggataaaaatttataattttactgtcacataattttttacaaaaatactattaattaagttatttgcctaagatacgaataaaaattaagagtaatttaggctggctgatgctaaatataccgagtattaaaaaaaaattaaattaatttcaaagaattactctcaatttttttttttaaaaaaaaaaaaagaaaaatttcccatgttaatttcattaattattttagcttttttctttttattttttaagttatatacttttttttcttaatttttctaataaaaatttatagaatttgttattttaattttttttttgtcttaataaaatttattttattttattttatatttaaaaatttaaaataaagtattttatactaggttgatgttacgtgtaatacacttacgtcttattttttttaattagttaatgtattttaatttttaagtgttatattaaataaagttatatgtaatttatttaaataaataatattattatattaaaaaattaaacaaatcctttaattagataataaaaacgtaagtgagacttgacaatatatgattatagaaaaagtatattacatacgataaaatatatcgtattatgtgattaaaaatatgtatattattgtttatgtatttaaatttaaattaaaatattcccatataaaaatatttagatagtttttatttttggatatataaataatattataaaattaattaagaatattatattttttaaggaagaatg

SEQ ID NO: 152944 - DNA, 527 bp, Cannabis sativa
cacctggagtcgaacctgtttctaaagctccatataggatggctccggcagaactcaaagagcttatgttacagcttcaggggatgcttgatattgggtttacccaacccagtgtatcgccctggggagctcctacattattgttcgtgaaaaagaaagatggttcccagaatgtgtattgattatcgagagctaaacaagttgacgatcaagaataaatacccgttactaagaatagacgatttgttcgatcagcttcacggaaaaatagtgtttttgaagattgacctacgatctggttataaccaactcagaatccgggaagaagacataccaaagactgcatttctaaccagatatgggcactatgagtttttggtaatgtcattcggattgactaatgctcatgcggcctttagggatatcatggataggatattcaagaatttcctcgataactgtgtcatagtgtttatcgatgacatccttgtgtactctcagttagaagaggagcacgagcatcatct

SEQ ID NO: 152945 - DNA, 730 bp, Cannabis sativa
  modified_base (63)..(65): a, c, t, g, unknown or other
ttggaaacaaatagcttggtgtgtgtccaagcgattcaaagcggtatttttatgccttcacannntggtcttattgttcaagatgtttgaaatttacttctgtctttaccttttgttgatttgtgttttgtaaaatgatctgcaaataagttggctcattgcttggcaagagaaacttgtttctctacaggtcgtgtgcttcaggttgaggactgttccgctgaagtgtgttctattattttggacgaatttattaattattaaatcttatcatttttattcaaaaataaagttcttatgataaatatggcacatttaagtttgaccaaatttatatggtatttttttatttttaagtctttttatggtatttgatacgccaatatatgtaaattaggttttcaaatcccatatttagtgtttttatttgtttaggtaattttatttgtcactaataccgaaaaagtcaacggagtttgctgtgagtgccggaaaaatcactcgagtagcggtcggtgccagaaaagtcgtcggagttgctaccgatgccgaaaaatttgtcgaaattgacattgtcgccgaaaaaattactgaaaaaatcaccaagaaactggtggtttcttgaagaagaatcaagaaaccggtttcttgatgaaaaaaccactttcttagtgatttttccggtcacaatgccaattctgacgacttttttgacactggcaactactcc

SEQ ID NO: 152946 - DNA, 826 bp, Cannabis sativa
  modified_base (762)..(780): a, c, t, g, unknown or other
caaggaattcttaatatccactataacatccgcaagggcagaaagctccttcttgtgactatgaatcttgctggccagctccttagaatctgtaaaaatagtagaaagtgagattcttacattgcagcacagcttaagcccaatcttagagccatagcctcagccatgatgggtgtagccttagctgataaaggcaaagaaactccagctgtcacctgaacattccaatccttaaccactgctccaagcccaatcttactgttcttgtcattaatggttgcatctgtgtacaattggtaagacccttccttggcttgagtttcctctgtggaggtgcgcaagtggcaagctggtacagcatcaattttcctagcctgtgcatccttgtattgaagcaaatagctactggcccattgcactaattctgctgcatctgaatgaatatttctgaaaagctttttaaatctaagttcccaaatagaccataaagtacacaacagtaaagaaaaatcatcattatttagatcagtatatccagataacataaagtctcttatatctttatttctatgcataaggtaaagatgatataaaggggaaagtttccaaacctgtctcgccctggaacagtctagtagtgcaacagttacagtttctaaaggacaactacaagaagagcgagaatccagtggtacctcaatcatagtgtggaagatcgtgaagcatccagtttcaacaaaaggacattcgggctcagatctnnnnnnnnnnnnnnnnnnnaaaggatacaagggttaaagatttgagtggaaggagacattatatt

SEQ ID NO: 152947 - DNA, 603 bp, Cannabis sativa
atgaaacttatgagaaattgaataagctttaaaagcatatatagatcattaaaaatggatgagaattgagagagttatggtattttaagtgaaagtacttttctaggaatatgaagaaaaacgaattacatcaactgcagcaagatgatcatttttgacatagaataatactgaaattgataaatagtttctttataaaaattttagatcatcgaataagatttctaacgatacaaaatcgttgaaaacagatcaatatcaagagagatacgactattttactaagacaataatttttagataaatgaaaaaaacgagatttcatagtttaacctaaaagttcacaaaaataagtggaagaactcccttacctcttgatgactcttcttaatcaaattctagatcttgaaatctcaattattagtggtgatgatgatctcaaccctacgttgatgaaaatcatgagtggtatttagcgaagagaacgaaacaagaagagaaataataaatccttgatagatacagagatgaatagattgtaggattaggattttatgaatgtcttctctaagaattgtattcaagctgaaagaaagagatgga

SEQ ID NO: 152948 - DNA, 625 bp, Cannabis sativa
tcacacttaaacaaacaaaagttaaatcaaaacaaataaatcaagaacaaaaaaccagcaaacacataaaccagaaaaatataacacagatgaatatacatagctgtcaaacacaataacaccgagatttatattggttccgatactaagttcaatgtgaacttggtcatactctagtttgaaagcattgccaccaatctttattgataatgagaacaagagatatcaatctcaagagctacaaggaaataatcacagcaagtcatccatagtgtaatcccttaacatacattaactcactaacccgagccaacataatcaacaatgttgctcaatacaatttctcaatcccagccctctctctctctcaaatatctctctccatttctcactctaacttctctctcttttctgctgtattgtgtctctctcttgtgtttgacttcaccttttttattttgtttttttcacttatgaaatgagaggagtagttctctttatataggctaagggacccaatatgcaagttgtccttttaaataattaagttagttaaagactaactaacaaaccgaatcttggttgttgggggtttaaggaataataccacaaattctaccttatt

SEQ ID NO: 152949 - DNA, 1120 bp, Cannabis sativa
acttcgatggatacgaaagtgcaggtgtaatggttgcttcaaaagattactctggtgttgattgggttatagactcgggatgctcttttcacatttgtcctgataaagatcaattcttggaatactaaagagttgatggtggattcgtgagacttggagataataaagcatgtgagatcattggaattggatcagtgaagctgcaactgacaggaggcaacacacatgaattgcagaatgtgagacatgttcccaacataaagaaaaatttgatttcagtggccatgttagacaaggagggatgctcagtcaaggtggaatcagggactctaatggtacaaaaaggagcaatggtattgatgaaaggtgctatgatgaatggggtctatgttcttcaaggaaattccactagcaactttgcatctgtggtctcgaaaagtttgaccaattcaactatgctgtggcatagaagacttggtcatgtgagtctcaaagggcttgggattcttgacaaacaagggctgcttgggaaaaatctggtgccagatttggagttctgtgagcagtgtgcattagggaagtcaacaagaatcaaatttggtactgggatgcacatcaccaaagcaacactagactatgtccactcagatgtttggggaccatctagaattgcttcaaggggaggatcaaggtatttcatgtcaataatagatgactactctagatatgtttgggttcacatattgcaaaccaagaatcaagcattcagcaagttcagagagtggaagactctagtggaaactcaaactggcaaaaaggttaagaaattgaggattgacaatggcttggaattctgtgatgattagttcaaaaatttctgcaaacaagttgggattatgagacacaatactgtggtaaagactccccaacataatggacttgcagaaaggatgaatagaactatcatggagagggttaggtgcatgctcattcattcaggattgcccaagaacttttgggcagaatctgttcttacagcatgccacctaataaacagatgcccctcttcagctacaaatttccaaactcctatggaaaggtggtctggacatcatgcaaa

SEQ ID NO: 152950 - DNA, 809 bp, Cannabis sativa
taatttacatctaactttttgttttcattttacatttttaaataaatattgactctccaaaatgttctttttttttattgatttttttttattatttatttacattttctttgtattaactatgttgtttttatccttacaaatgtatatatgtatatatataaatataaatacaaatatatattttttttgataaatatcatttacatagcatttattcacgggataaatacacaaaaataataaaaaattgtaaaaatacgattgtataaaatttttaatatttttacgatttttataattttaattttcaaaaaatacggtcttttgatgtatttttatgttttactcgttaatttattaattttttgtgatttgtatttaattttttattgttattttgatgtttggatgttatttttcaaatacttttatgtaggtttttttagcatttttgtgttgtttttatagaacaccgtaaaaatctaaaaaaaaaaatctttaaatgtaaaaatgtaaattttttccaaaattctataatagaacccatattaaagaggtttttttttttttttattctgtctctggtcacagctgtaaacaaagtaagggtcatctttaatgagctaggtgtgctacttgaggatgtcatagctttattgtctaaacttccgaggcagttttgtcccatgtggctcgggatgcaacttctacatcacatagtttggcaaaacatgctcttcggttagacgatgagctatcctggtttgaggaggtgccgtcggcgattgtggattgctactttgtta

SEQ ID NO: 152951 - DNA, 535 bp, Cannabis sativa
gtggtgcatcctttccaatgccctgccggttagagcaatcatctgtaagagatttccgattgaagatactaattgtcctttttgtggaaggggagaggaaactgtggaacacttgtttctaacatgtgatgtggcgatgcacttgtggcgctcttcaccttggggaatttttccagtcactgacaacggtattcgtgtgtgggattgggtgaaatttatctggagtcttaataataatggtgttagggttgaggatgtctttctctatgcatccattgttgttgacaatatctggagaatgcgaaatgaagcggttcacaacaatagcccccctcatgttttaaaatgtattgacattatttgttcttcttttgcagagctacacactactcttttgccttctccttcgccggtgaggagggacaactggaatccaccacctctggagtggatcaaatttaactgtgatgttcgagtgggtttagagagtatgtgtatagctgcggttggaaggaaccatctgggaagggtgatg

SEQ ID NO: 152952 - DNA, 676 bp, Cannabis sativa
aacataaaatgatttctgatatttgattaattagtaaatctaattatatttaaatgagtattatttagggcacaaaacccaacaagctcccacttgcactaatataaaactaaaagtgtatttaaattaatctcaatactttgatgaatactccctggcgtaaaaccggttaactggttcaggccctgtaaaaccagttaaccggattagcagctgggttcccgaacttgtcgtgttctcaattcgtgttagtttcatagctttggttggttaattccttgtcagtttagggtattactatgttaactttcagtaggaaaacttttggtttaaaacctaagtccatggttgtgatttagcgtgtcacttacccgtgttatgaacgatgcgatttaggggcctgtatttcgccaagtagctgttccactcaggttggctgacacacctgaattcagaaagaaggtgagattagtataatgttatgcatatgtatttttatgtttagcatacatgttttttatgcatgatagagcacattgatagcagtatcagtatacatagagttgtgatagatatcgataaatgtatgtttgtctaaaatactcatcgatgctatcacatcaatatggatagagtttgactgccatattgagtataggctggtattatggtcgat

SEQ ID NO: 152953 - DNA, 805 bp, Cannabis sativa
caccttcacaccaagggatcgaaaaaaattttgtcaatttcttaaatcagtcaagtttccagatggttttggatccaacctaacaaaaaatgtgattgataatgacaataagatcactggtttaaaatcacatgattgtcatatcatcatgcaacgccttttaccagttggtgtgaatgcatttttagataaatcattcagcacaccaattatcgagttatgcactttcttcaaacttatatctgctagaactctactagtctcagatttggaaaaagcaaaaacatcaatacttgagattgtttgcaagttagaaaacatttttcctccagcttttttcgatattatggttcatctagtcattcatttaccacaagaagcaatacttggaggcccagttcacatgagatggatgtatccatttgagagatacatgaaaaagttaaagaattatgttcgtaataaagcacgcccggaagggtcaatagcagaaggatatgtgatggatgaggcattaacattttgttcaatgtacttgaaaggagtggagacacgatttaatcgtccagatcgaaatgtagatgttgttccatcactttcaaaattatcagtttttcggtctcaaggtcgtctaatcggtaagaaacaattgagacccctaggtgaagaagagaagaaaacagctgagtggtatgttctaaataattgtgctgagatcgcaccatatattcagtaagtattttaaatattaatatccaattcaatttgaaccattcaaatagtcaaatttttttaaataattaat

SEQ ID NO: 152954 - DNA, 681 bp, Cannabis sativa
ggaataacaacaccataactagtattaaaatccttctaattattgttgccactcaatttacttaaataatttttaaaatatatcctcagaaattaataaaattttcgaaaacttttccctatttgcaaatcggtagattccaatccatcctaaataatacataagtcaattacagttattaccatttaaactttaatcctcttaaataatacaacaattcattttaaatatttccttaaaacataacttagccaaaatcaaccctattataacaattagtaaactcaaacaacgcataatttattaactttaaaattttaatatatttttaaaattcttgatatcgtgatattttaactaaattaccctaaataattaggggtcaaccatattataggtgcgaaagccttgaaaggcaccaaaaccattaacaatggtgcaaaagccttgaaaggcaccaaaaccattaacaatggtgtaaaagcctagaaaggcacaaagaccattaacaatggcacaactcaaccatcaaataggtaatgaattaagtaataataatttgctaaatataaatatataaactataaatagggtagaaataccatagtgtaaagaaaataaattgaaataaaaaatatttctttaattatttaatatattttaattatttaaaacaaaaat

SEQ ID NO: 152955 - DNA, 677 bp, Cannabis sativa
ggacgtggttggaaaccacacatgtatggtgatgtagtaaagtatataataatagttgttaattaatatgaccattctcgtgataacatttgatatgttgacgctgattaattcaaaatcttgaaactcacccaatagaaaaaaaaaaataaactcgagaatactatgagttcagggagatgagtttgagatgtaaaaataaatgagaaaattgaaaatatataaaagtaaaaaaaaaaatctatctatatatattttatgaatatttataattcgattgatttatattatacctattatagttttattaaattttttatttacaaaaatacaatttaaagttttcaaattataaaaatgcgacttctcagcaaaaagtaaaaaaataaatgaaaaacaataataaaacatcaacgcaacctataaataaactataaaacaactaaaaaataatgagaaaattagcattatgacaactataaataaattataaaatagcaaaaaaatagtttattatttatactaaagtccgtatttttataaataaaaaggtttaaactgtaaaaatgaaaatttaccagtgtcaacatacttttgtaatttttctaaattttttatctatgtaaaaatttcattatttattttaatttttaatatatagtaattataatttttaa

SEQ ID NO: 152956 - DNA, 640 bp, Cannabis sativa
aaattatatttctgaattatttaagtcgttaaaaatttctttcgaattattgaaattgttagaattaaaattttttgtctaattttattcaattttactagtatgacgatggtctttgtgttgagaattatagagtttcatctcaaaaccaattcatgatgggtggagtagcccatgttcttatatatgactcaattaatacttactatttattctatgtgggaagatgttcataatcttttcccacaagatatggtggctattctttttgctcaccaattttgaatcgtattagagtagacatagtcattatatacataagtgcagatcggataggatcacttgctcgcaaaggatatggttctgataccatattcagaattataaggttccatctcaaaattaattggtgataagtagagtagcccatattcttatatatggctcaatactctaccatttattctatgcaagaagatgtccacaatgttatgcactaaattctgttccccaaacttcgaaatctactaaattatgcaccccatctttcaaaagtacaaattgtgtaacaccctaactagcataggcgtgttaacgtgattttaaacttactgtgcagctcgttgctaataaacgaggt

SEQ ID NO: 152957 - DNA, 786 bp, Cannabis sativa
ttgccagcacttttcattttatgctggtaaaagttctaataccaacattgatttgccaacccccttttgccaacacgtcactgataaattctattttaccagcgtaatgccaacttttgcctgcacaaaaatgtgcttgcgaaagtgacatttcttgtattggttcttagacatttggattgaagaaattacactacacacctcttttaacttgatgtctttaatttttactatctcttttaaaatctattatatttaccttttcaatcatatattctaccaattttactcctatcacttcatgataattttcattattctctaatcaaacttttgcctaaagtttcctacaaacctacacatccatctacaaagaatacaactttattacgtttgaaattatgtcttagttatatgagtgtgtaaaaataatttaggtacaatactcataaaaagaagtatatttgaattaaattttatttgaacgtaaattggattaatatatatatatatatatatataaaaaaaaaaaagggtattcttcaattttccttaagatttgacaaataagccaaatgggccaaaatttgtctcaacaagaaaaatgggtccaattcgtatttttcaaatagcaaaatttgtttcaaatcccaaaaaatgttatttttctaactataatttcaaaatttatcttaatttttattttgtatgaatttaactatttttcaagtttttgactatttttttaatcgattttttttttttctgttatgttttgttatttgt

SEQ ID NO: 152958 - DNA, 593 bp, Cannabis sativa
gattcttacaacttttattttggagcttaataacatgagtggttgggaacatgttatacaaaagtggaatccaagctttcctaatggaatgaatattagttcccttagtgttaattctgagagtgctaataattagatccaaatctataataagttataactattcacattgaattaatggtacataaagaatcaagagctaattagaagagtaaaacggtaatttgaccaactctaattatgaactaataattttggggcgaactacttatattatatcaatgtaccacaaataaaaattttataaatgtaattctatattgttaaagagtgcaattccatatttatagtggagtaacaatagaattaataaactagattattctattgatgagatcgataataatcaagtatttattggagttccaaaatataagtccatggtcacaagtcacctttatacaatactatacaaaggaagaatttatttgatgagtaaatttcaagtgagaattgatttttatggaaaataaattcttaaaggcaaaataataatttatgaaattattgttttgattaattatgacaattat

SEQ ID NO: 152959 - DNA, 564 bp, Cannabis sativa
tagttagttaagttagttatggtaatatctgttatatattccgttggctagttatttcaccaccgactctactctgctatatatagcagtcactttgccattgtaatctcatttttccaatcaataaaattcaatttctctctgctcttcaaagctaatacgtatctctcatttttgtttcttatttcttaaggatagaaaaaattgatacgtggacattagctaagaatgaaaagaattatgagtatataagaatagagatatcttctttttcccgctccttctctctcttctggtgatctcaccggagctatggcaaaaagagcgaaaatggccgggaaaggcaaatcgaagggcaagaaacctggtccctcatcctctgatagagtcattaagactagatctatggatgctgttttggggatacaagaattggaagtcgaagatgctgaagaatcaatagaacagtaccaaaaccaatggaacagtacattgagaaggttttttcaccggaggaatcggaggcgattattttcaggcaaagtgagattcgacaggattttt

SEQ ID NO: 152960 - DNA, 1070 bp, Cannabis sativa
aattcaggccttgtatggtaaatctttgcagcttcactggagacagcattgctagtcttggcataatcatgctcgcactaaccttgggcaaggcacccctatccgccactattatgcaagacatcctagttgtcgacctgccactcgcttacaacgtattgttgggtcatccagcattgatcggactaggggtagttagttcaatcaagcacgtatccttgaagttccaaacatcagagggtgtgggagtggtgtggggcgactagatgctggctcgcgattgctatcgcatagagttgctacataggaaagttgatcatcagttaatggcaatcttggcagaagaaaataaaaagaaggacggggatcttgacccccggtttgaagatgaaagaaactttttaaaaccaattgaggaatgggaagaagatattctcgacccaggaaatcccacaaagtgtgtttatattgggaagaacttggaagagcagctaaaatagtagctaatatgtttcttaaaggcgaaccaggatcaatttgcctggagccatggggatatgatagggatcgaccctaacattatttgccatcatttaaatgttaatccaaactacccaacaaagaggcagaaaaggagacccttggattccgagagacaaggggcactaaaacaggaagtggacaagttattagtcaatgactttatacgcgagttattttatccctcgtggatagccaatcctgttctcgtcccaaagcctaacggaacttggagaacttgtattgatttttccgatctaaataaggtgtgcccaaaagattgttttcaactacccaggatcgaccagttagtggatgcaactgctgggcacaagcttatgtcatttatggatgcatattctggatataacaagataaaaatgcatgtcccaaatcaagatcatacaagcttcgtaaccaaattgggactctattgttataaagtcatgtcgtttggactaaagaatgctggggcaacatatcagcgatcggtgaacgaaatgtttgctaaccagatcgggcggaacatg

SEQ ID NO: 152961 - DNA, 813 bp, Cannabis sativa
tgtcacagaagacactaagattgtcctatggcataggagattgggacacattagtgaaagggggttacaactaatgagtgaacaaaagctacttggtaaggacaaagtaaccaaagtagatttttgtgaattttgtgtactaggaaagcatcatagacttaaatttcaaactcgcacacacaaatcacaaggtatcttagattatgttcactcagatttgtggggtcctgagaaaaccctaacttttgggggtagtgcttatttcttatcatttgttgatgactattctaggaaagtatgggtttatctgttaaaacataaaaatgaggctttttcaaaaatttgtgcattggaaattacttgttgaaaatttaactaacaggaaattgaaaaccctaaggactgataatggcctagaattttgtaatgatgagtttataggttattgtcaatacaatggaatccagaggcacaggacagtgagaaaaacccctcagcaaaatggtgttgctgagagaatgaacagaatcatactgaacaaagcaagatgcatacttttcaattcagggctctctaatgggttttggggagaagcagttgtaaccactacatacttaattaatagaagcccttctattacaattgaaggtaaaacccctgaagaaaggtggactggtaaaccacatgacttatctaatttggaagtctttggatgtgcagcttatgcacatcaaagtgtagggaaattagagccgagagctctaaaatgtgtgattctgggatacctaaagggtgtaaaaggctatagattgt

SEQ ID NO: 152962 - DNA, 896 bp, Cannabis sativa
  modified_base (715)..(721): a, c, t, g, unknown or other
tttatatataatactcaatactttcatatttttattgcataaaattgtatataatactctcttttatacattaatgataattttatgcggtatatagattgtatacgagtatatatatataaaagttttatttttctgtccataattttttcgttttcatttctggtatttattttgaatcctctattcattactatattcatataatattttagatcgattttatgaatgaaaaagatttaaaaaccatctgaaaactcaaaatttctcttaagaacacgatcggacccgaattttttatttttttaaaattaaagtctacattttacatgtttttcctgcatgaaacctacatatacctcttaattctatcctttagaacatttctgggttgatttcatgtgatttggacatggaagttcttttattctgtctaggtttttatcgggtccgcgtgaccccatatgcagaaaatagagtcgtttgacctgtctggagaaataagaagtagaaaacgacatctcgttctctatatagaagaaaaatgattgtcgtttcccatagttgtagtttccacagcatctgaaaatgacacgtcattttttatttaaaggaaaaatgatatgtcgtttttgaagggagttttttcaaaaaaaaaaaaaaaagaaaatttaagaaaaatttaaggaaatttcgaaaatttcgaaaatttaannnnnnnatttattttgaaattttattttatttattagtgttgttaatttattcaattagattatatttatttaaattttctatttttatttaacgtatattttttagatatgttatttagtaagaaataattatggaaaatttttaatttggtgaattaattacatgctttatttttacat

SEQ ID NO: 152963 - DNA, 516 bp, Cannabis sativa
  modified_base (305)..(314): a, c, t, g, unknown or other
aaataagatattaatataattaaattattatttaactaaccaactaaattttgaaaattcagggttgttaaaaacaattttaattatctttcaaaatttaaaattcaaaagtgatactaatttaaaatatctaggtttatttgaattattttatcaaattgaattaaatatctaataagataaatgatttgaaaataaataaatagatattttcaatatcattttcttatcttataatttaataaaatgaaaacaacaaaataaaccaattttaaaatagatatggttagacaattattattttnnnnnnnnnntaataaataaataataattatccttattatatgtcaaaatgtctcaaataaagcatttttttcaaatttttacaaaaatatctaggttatttaaatgttaaaaaaatttataaatttctaaaagtaaaatgatataatatagcataaatataaattttaactttgttattccaattttcgcactctgacgtggcatcacatg

SEQ ID NO: 152964 - DNA, 757 bp, Cannabis sativa
tttgttcaaacacgcagctattacggtttgtccacattgcatacaaaattgctaaaacaatagcattcaacacctgctccgtaacattgtttgaaggccaagacaaccaatttctgatgttgtttggccagctgaagtaaccacaccaagacataatctctttgatgatttttttgagtggagcagcagctataaaaagatgactatgtgtttccctctcagtacaataaacaggacagttctcatgggatatctcaatgaatctgcttatatcatctctagtaagcagctgttcattcactaattgccaaccaataaacttgtgttttggcaatatcaatctattccatatgttctttgcataatcaacaatcggtacttgaacaaaggaaacagaacagtttagagtggaatttacctctcctcaccgccaccttaacatcgtcttcacctattattgagcggagtcgaagaagctttttgaaataccaactagcatcttgatggaagttgacggtccatatgctttgtcttttcaaataaatggcatcaatccatctaacctaaagattatcttgcttgctcgaaacaacccaaagatacttagccattagagcaatattccatttctttccttccctaaatccaatgcctccaaatttcttagggagacaaactttctcccaaggaggggatgtgcattttgctacggttaccattcactccccaaagaaaatccctgcagcatttatcaatg

SEQ ID NO: 152965 - DNA, 589 bp, Cannabis sativa
taaggtaccaatgatggtactaagacgtcgccttataattaattaaagatattctataaaatgatattctataaaagttaatatagtatatgagatttgatatttaatgttaattgtaccaaaaataatgtaacacgttggaaggtgttagatactgaccgtttatcaaggccgatcctaagaatagacaagatagatgtgcggcgcctcaggctcccaaatgctcaggtcccaaaattgagaaaataaaaatattagtatatatagataaaatattatataataagaaaacttaataatattgtctagtgtagctaagatatcaagagatgaattcttaatctctatatttttttagaaacaaatatttaatgtgtaactatgaaaaataaaacattaatggagatcttaagaatttttaaaagttggcaaaaaaaatagaattttttaaatagaatttttagaaattttatttggcaaaaaaagttggtaaacgctgaaggaattgtggtgttggcaaaaggttatcttgatcaatggacaaatgctcaaaatactctcattgagtcatcatggtctggttttcaga

SEQ ID NO: 152966 - DNA, 539 bp, Cannabis sativa
atgcattcattccacaactctgcatctttgttgatgcctttgtgtgacttacgcccattggtgcttttacaagccaacacatcccacttaactgtctcgatgctttccatatggattaaataaaactcacatgcaaatgcctccaagtacggtcatcctctggcgattgtagcatcttcccccttggtctccatgtgcatccctcttaacacacacacgtagcaactgaagcattccatgtctatcccaatttgaaccatcttggtcatcaactctcaacctctgtcgtgactaataagaatccgacgacccctataatacttccaccacccatgccaacaagcttcttttccaataaaagtgcctcttgcgtcttacgatgtcgctcaggcaaactcgacctagtgtaccaagcatacaatatggactacccaatcaaaccttgtaccatgccgacgagtttcaaatctattgttgcgcctctctacaattgcacgtggtagttgtctttctagcatctctgaacttaattcgaagca

SEQ ID NO: 152967 - DNA, 558 bp, Cannabis sativa
attcataggcggtctttacattgtctgagtctgagtttaagctttttctagttgccgtttggcatatgcaactagtaaagattttagtaggccctctatatgcatttctacctcaagttgcattactccatgggagagtataagctgattgtgaatgcatggataatcaaactaatatataattggtatcattacaaaaaattttacttttagttacaataaaatttataactaatttaaattattattcttatattataactaaaaactctgttacaaattttagttacaaaaattataatttattatgaaaaatgtactctaagtcacaatatatatttgtcgtgactaaaactaaatcagttacaatttatatttaaatattatatttttgtcacaagtaacttattttattgcaacaaaaatcacatttatatcataaaaatttatgttgtaattgcaaaattgttactaacactaatttattttaatgagagaggcaatatatagttcgaaactcaacaagtggaacggttacataactaacaacaaaataaa

SEQ ID NO: 152968 - DNA, 1170 bp, Cannabis sativa
acatggtatgatttaaggtttgggtgttggtctggtccaagtccttgtctgggtctaggtccgtgtttgggttcaggtccgagtcttggtcacaaatccaatgtccaacctcatgtttagtctagttcgacttcttgtatggattcgggttcttgtccgggtttgggtcttggtccaggtccgattccttgatttacacaccgattatgggttgggtctaagcctcgggtcttgggttctgggtcccaggtccaaatccagatccttgtctagttctagctcatgtcttgggtcatggttcgggtgtcaggtggatgtttgcatctaggtttgggtcttcggtcctgagtcatgggtccaggtcccagatttagggcaggatcctaggtcccgatctgtgttcggtacttgtccttgtcttgcgtcttggcttggtctagatttgggtcatggttcagttctaaggtcctaggttcgagtatcgggtcccgggtcgcagtcccggtcccatgtcccggtcccggtctcgatctcggtcacaggtctcgatctcggtcacaggtctcgatctcggtcacaggttctagtcctagtcctggttcaggtcttggtcctagttcgggtctaggtcccatacctgatatcggtctaggtccacgtcgcgggttcgagtccgagttcttgtacgagtccgagttttgtacgagtccgagttcttgtacgagtccgagttcttgtacgagtccgagtctgggtctgggtccaagtttcagtatgtgtttgggtccgggtcttagtctgggtctaggtttgggtcagcgtctgagttctggtacaggtctcggttctggacctagtcctgggtcacgggtattcagttacgggatctggatcgcaggtcctggcgcaagtctgggtttgggttcgggtctaggtctggttattgatcccactttgggtcgggctcattgttcagttctgggtctagatctagtttgggtccagatctaattcccgttcaacgatccttattctagttcttattcttattttgattctcagatccaagttagggtttgggtcctagtttggaagtggttccaagttcgggtcttggtacgattccaagatctagacgcccactaggggttgggtccaagccctgggtcg

SEQ ID NO: 152969 - DNA, 527 bp, Cannabis sativa
aaacatttatccagactagatcgctccctgtttcctcaacaactatctctactatttcaacacatcaggtcttcacatatacatgctttatcgtttacatatgaatttgaattattcctccaaattttctataagtaaataataagtattattttgttatgactatatacccaattatattttactaaccaaacataatagcacaaatattactttaataaaataaatcattcgcatgatcatacatttagatacaatctaaataaaacaaaattaaactttaaataaaactaatatttacgtggctcggcacgtaacttctaactagtaaatatataaaggagaagtatgaggcggtgatgtggcactctaaaatatgttttcttaaaaaatctcacgttttgcttattttttaaaaaaaataaataaaacttttagaaatttgcagcataaatacttaaatttaactcccagttgcaaataaatacctaagtgtaatttttggcggtaataatatctaagttata

SEQ ID NO: 152970 - DNA, 592 bp, Cannabis sativa
  modified_base (531)..(536): a, c, t, g, unknown or other
tatcccttttaagagagtgcattataaaatttcccaatatttatttatatatttatgaggctaagaaatgagaaatatgcaagcctttgaatccaaatcaaacgtataaaaataatatataaataacaaaaaaatcattaacaaaataataaaaatataatcttaaaaacattaaaaattttatttttttttgtaaataaaactctaaaacctgtaaaacatatttaacattttgtacaatgtattttgtaattttttttttaattttttgtgtatgtataaaataatccattttattttttaaggggaagagccttttaattctattgcaactttcgagtgtggcttatgttttgcactattgcatttgcatgcgcaccacactaattttagttaaagtgtccaatccattctcagtcattctcttgcgaaaataaaaataataagtcatttatgaactcctttaaaacggatgtattgatgcactcttgatttgtttcggcctccagaagaattttttagtctattttnnnnnncatattcatgtacgttatagctatctaagataatctacaaaattttgaaaaattca

SEQ ID NO: 152971 - DNA, 583 bp, Cannabis sativa
atgtagcaatatatgaagaaaatgattatcataattttgaatttactcttaaggaattttcattcccagttagtgatctagacaaccaagatgttgatctagataaccaaaatcgaagaaaattattttagtattgaacgtgtaattaaaattttgttataatataaagtatttttcagctgttcttttaaattttcttaatagtcttaactatttttttatgtaattttgttcaaattagtaatttattgataatttaattgattaatttattctttttagttttatacattgtaatacataaggggactatatatatcaagtagatatgggaaaaacttatttatttgatcatgtacgtagaacacaaagtatgagattttcatcaccacatgatcctcattttaattttaactatgtataaaaaccaacagaaaaaaaagaaaagaaaaaaggaactaaaagaactaaggggagcaataaataaaatgccaataagtctctttaagggtaaaaaaaaaagtaagaggaaacaacattctgagaagcctggtccaaatctagaggcggtggatgagtccac

SEQ ID NO: 152972 - DNA, 743 bp, Cannabis sativa
gctcttggagatgacatgaagaagatcaaggaaattcagaacaaggcacacagtgccattctacttagtttaggtgatgaagcactcagggaagtgtcaagtgaagaaactgcagtggggttatggaaaaagttggcttcaatttacctgaagaaatcattggctaacaagctttatataaagaagaagctatacacaatgagaatggatgaaaccaaggatctaagtaagcatcttgatgagttcaataggataatcttggaccttagcaatatagttgtcaagattgaagatgaagattaagggacattgctgctcagtacattgccaaaatgttataagcactttgtggacaccatactttatgggaaggaatctttgaccatgacagaggtgaaatctgccttgaactccaaagaaattcagaaaagaagtgaagatagatcaaatggctatggtgaagggttgtttattcgaggtagaccagaatcaagggaaaacataggtagttttcacaaatcgaatcacaaaagcaaacagtacaaacgctctaatcaatcacataaagaaaagtttaattctaaggcagggaaatagtgctactattgcaagaaagagggtcattttagagatgaatacagagaattgaaagctaaactatagagagacaaaagcaaagaaagaggagatgcaggtgttgtgacaaatggctatgaattagttgatgtcttggttatgtctag

SEQ ID NO: 152973 - DNA, 515 bp, Cannabis sativa
attgcataaaatacaattcaatataatacaatataatacaatacgacctaatacggcgttccaaactagccctcaaatctagtactatcactttcgttaactcataaatataaatacataaaagttccagatgcattctatttatttattttattttaaaatttaatattcttaatatcagaaattaaatgttacatatttcaagaaaaaaatgagagaaatgctatatcaaattacaatagcggagtaaaccagtgcagtatatgaaacatgattatcgacttaaagtgccaataatatgtgaaaattgttatgagaactattttttttttttttttgaaaaaaaaagtagtatttagtttctaatattaagaatatttaaattttaaaataaataaataaatgtaatacatctggacccttcatgtgtccatatttattagttaacggaagtggtagtaacggatgtaagagaattgtaacattgagtatttttgactctaaaaataaagata

SEQ ID NO: 152974 - DNA, 610 bp, Cannabis sativa
aaatttgcccaaatttcataggaagcgaccccacttctacattcacgtaggtgagtctatcaagagtactcctgtagctcggtactccactctacatagagtataaatctcattaggagtttctattatctcaaccttctatcgcttcaggatttcatgctttacatatatagcatgatctcattccttatcacatcataacttgttattacccattgaacctatttcttgggatctctaatcttataggtcgggttaccattatgagtgatgactcatttattctaagggcaatagtcccataccttttgaggttttaagaactttctctctagctaatcctttcgtcaaaggatcggctaagttttcatcagtgcgtacatgatccactcttactgctccaatagagaggaactctttaacagtactatgtttatgacatatttgtcatctcttagcgttgtaataacggttctgaacttttgcaatagccgcgatactatcgcagtggatcaacacagctgatatcggtctttcccataaaggaatctcagctagcaggcttctcaaccaacctgcttcttcactagcagttgctagtgctatcatt

SEQ ID NO: 152975 - DNA, 646 bp, Cannabis sativa
gagagacatgaccaagttttgccgttttcatggagattatggccatgacaccaacaaatgcaacaatcaaaagcaggaaattgaatttttgataagaaaaaataattcgcacgtgcaaaagtatgtcaaggctgatcaaaatcaaaggggcgataacaaccaagatttactaccaccactactagtagtagatgatggaggacaacatctgcaagttattattggaggaccgcacataacgggagattcaggcaaagcccgggaaaggtatgccctaacagtacagcatgagcaagatgaagtagttctggccgtcgaagaaaggaaaccaaaaataccacgggcaggggagcccactataacattcagtgatgaagatgctgtcaagattagtttcccgcacaatgacccattggtcgtcgaagtccagatagcaaacaagatggtggcccaaaccatgatagacaatggagcctctgcaaacatcttattcaagacaccatatgaaaagatggggctccaactcaaatacttaaccccctgtctcccgctcgtgtatggtttctccgaccaaagcgttgaacttctagggaaaattcccctacccctcaccgttgggcaggctccgaagagcataactataatg

SEQ ID NO: 152976 - DNA, 784 bp, Cannabis sativa
aaaataatttccaacagtatcttaagcctgcgatcttatgcaagaatatgaacagccaactcgcactatagaagtctcatacgttgctgtaaattaagctggaaactattcttcatttattatgtttacgttttttagtttaattattgtaattcaatgtatgaacggattgataatgaatacaatccttgtgtaaatgataggacacttgctttgtatataaaggagtgatcctccgtgaaatggacaaggtagaatccttgcaacagtggactaagcagaccgagatctgactcaaccactatactctctggtgttcattgtatttcaagtttatttttgctaagtatttttgtgttcttaatttgaatactcgccattctgggtcaagtactcgcacatattcttcatatcgttttattattatttatttttggtgttgtaaaaattccttcaacaacagttggtgccgtctgtgggaacataatactttgctgatttagaaggagaatcacaatggctggaaatcagacaaatggagacgtcaacaatggatcaatcaacaaatcaacattgggacaatgaatgttccacttccaggaaatagggtacctcccgtcgataccatcaacggcggagtgggacggatgaacataatgtcgctcaatatgttccccgagactgctgctcacgtcggggaaacatccacgccagcagccacagtgggatagttcccgcctatcacgcctgtcgtagtgtctgaaggcattgttcaattaaccac

SEQ ID NO: 152977 - DNA, 811 bp, Cannabis sativa
tgtttaggtagttttatttgtcactgatgccaaaatagttactggagtttgctgccagtgccggaaaaatcaccggagtagcggtcggtgccgaaaaagccgttggagttgctgctgacgccgaaaaattcgtcggaattgacattatcggcgaaaaattcactgaaaaaaataccaagaaactggtctttaagaaaccgatttcttcaaccagtttcttgatgaagaaaccactttcttagtgatttttctagtgacaatgccaattctgacgactattctgacactgtcagctactccgacgacttttccagcacgaacatcaaacttcggaaaagtcatcggaattggcatagtcgccagaaaaattaccaagaagctggtttcttggtgatttttctgaggacaatgccaattctgacgacttttctggcattggcagcaactccaatgactttttcgacaccggcagctactccagtgactttttcgatatcgacagcaaactctgaaaaattcatcggaattggtattgtcgtcgaaaaaattatcgaaaaatcaccaagaaaatggtttctaaactagtttcttggtgatttttttttgtgatttttccggcgataatgctaattccgatgactttttcggcgccggcagcaactctggttactttctcggtgtcagcagcaattccagcgactatgtcaattccgatggcttggttcagttaactttattgtttagcatttatatttcattatgatttttcatagtgtcgaatctggtttcataagttcgaaactggttttac

SEQ ID NO: 152978 - DNA, 544 bp, Cannabis sativa
  modified_base (437)..(446): a, c, t, g, unknown or other
  modified_base (493)..(515): a, c, t, g, unknown or other
ctccacctgtccacctgtacagtctgaagcaagcctttgaaagccacaacattccaaaagcttggaaatgttatccatgtttccggaaaaatacatgtggattccaaatataagcttaaggcccatcagtgggcccaaataacataaattgggccaagcccaagacccattccgccttctactcgcccaggcaaggtttcatcaagccaagtcagcatctagaatggtatatctctgtgtatctggaagaggtcctcagcgtgtatccaaaagactcatatggtttcacatttactatctggcatagaataaggaattccttttccaaaatcttggatagagaataagatcttcctaaaaaggaaactggataatttaaaatcaagtaattaatatgtcattaattaccatgaatatagtgttggaatttattttannnnnnnnnnagatctactcacaagtatgttgtgtaacaccctaaatatgaactttnnnnnnnnnnnnnnnnnnnnnnntaaagttaagaaaaccttacatcggttgc

SEQ ID NO: 152979 - DNA, 517 bp, Cannabis sativa
ccaccttgattgtaccctctttgacttccactaggagcaggagtttggaaaccttgtgagtaccccatgttgaaccctgaaacttctagcctaaactgatgttgatactgagattgttggcccgattggggtgtaaaaacgtaagatgaagactaagactagtttgtaccctgggttgcccatgagaaggagtagactctacaaacttcatgtaaaattcattcacagtcatatccccttgtcttaaactatcaaatactccaatcaaagccctcctgtgagattgactaaaaatattgctccctgaaaacatcctcaaaatctcgtcaagtcatccaattagtttccattgtcctggacaaggtctcccaccaatctgctgcaccaccctctaacttggacacagcaaaagtaacttgatattcctcaggcactcctattctattgaaatttttcttcatcagcctcaaccgcctttcagctaccatgggatcttgtccaccctcaaactcaggca

SEQ ID NO: 152980 - DNA, 594 bp, Cannabis sativa
ataaaaagagaagtgtttaagcaactggagtcccaagttcttggttcggttcttttgggccaaccggagcaggaggatctgttgttttaacaggaggtgcatcagcagcttgaccggaggttgaagtagccgcctcagttttgccataggccacttgggacgcgcagtactcaaggtacatgtccttagcatcacccaagtagtcgaaattggctcgaggattagccttccaaaaatcaaagaagagcttgagaccggttgtctccatggcattgaccttctccttcaaactgtccacctcggccgaaagctccctctccttggcttccttttccttcttcatccgatgaagaactgctcgaagagaagtcctctcatcctgaagactattcacctcagtagataaggtcttgatgttctcctcaaaacggtcaacagcctcgagatccttagtcagcacagtgattttcttctgagcggcaaacaacttcttgttggcttcgcctagttccaatcgaacaactcctacttccaccctggcttcttcagcatccttcttggccaagtccgcctccgccttcagggtgtcggaca

SEQ ID NO: 152981 - DNA, 783 bp, Cannabis sativa
ctctgaccctgatcggtcttgacagacttctacaagtgtgggttgttttgccttatcaggaattcaatttccctcttcaggttgttgcattcattagtgtcatggccatagtctccgcggaatcgacaaaactttggcatctcccttttgctgacatctttcttcatgggcccgggcttcttatatggagtcagggactgagtttccatgtaaatactttctccgtcttcagtctagatagttaacatagtgtactttgcttgattctcccggggatcttgttcagatttaccggcaaattttcctttcttcccgtttcccttgccttggttgttgttggaatgtttaccacttcaacttgaattattttgataatggggaagttgggcagatgttccacgagaaggagcctttgacttcccaggcttttactcaccttccgctcgttgaatggcttcttcgagcttgatgaagccttcgacacggtcaagaaaatcactaattgagtttaccggtccgttcttccttatatccttccaaagttcgctgaggacttcaatgccccctagtatcgcggataactttccatcttcagttacacgagaaaccttggtcgccttcgtcatgaatctgcttatgtatgcccggagaggctcacctagtctttagttaatttcgaccaagtctcctagatgcaatggatgttggcgagaggaggagaactgtgcatggaatttcaaagagaaggctttccatgacctgaactttccaggggccaacttg

SEQ ID NO: 152982 - DNA, 712 bp, Cannabis sativa
acgtatatcatacattcatttaattattatttagttaagcaaaacatttttagcttactcacacattcattattaattattaataatcttgttagtttaaaaatttacttaatattctaaaatttattaattatataattaaaagtaaaagtaaaataatttgattatttatttgaattttgagtattgtttaacatattgcaaagccaaatcattaatgttcatattattttttttttttttttgaagaaaagcgaagcaatatatatatattaaaaaggatagcggttagacttcgcggtcattacataacagatcccccaatatagaggaaaccaaaataacaccaaatatcttgtgggtgaacgcccacttgaccaagttatgggccgtgaaattacaggttcgactaacataagaaacgacataacttgaaaataaaggagaagatctattacaaaatgagatgtagttctcaagcgcctattgagactctttcccaataagagcattgataaccatactcgaatcattttccacaataacaaaattaaccttaagatctaaaaccgtttcaaccgccaagcagcaagtcgccgcttcgccacacaaagcatcaacaaaatattataaatattagtgagtactctcatgtaaatgaaaaatgaaaaataaaaaataaaaaagtgaaatggtgtagctccaaaggaag

SEQ ID NO: 152983 - DNA, 669 bp, Cannabis sativa
tttaaaattagagtaaatagtacatacttggttgagaagattacaatatttggacaatttttaaataattcccaacaacttaagaacggggacaattaagaatgggtagtagtaaaaaattagtacaacttctaaaaaggaaatagtttaaactgtattaaattaaagtattctaggaataaatatgttcgaaattatagtttacattttaaaaggaatctcattatatccaaatattgagtaaacaagtgataccatactgtatttatgatgtgaagtactctgtacaaatattaatgtacgttatttttaaacttaaacttattgagatatgggagatccagcttctgacgtacattgaaatacgttccaaacatattttcatggaattgattatgttgtttatgctctgcctctaggaggttcaatattcaaagtattattccaaatcaaatttgagtttacggttggaaagatatacccaatacaacacaatcttcacataagcttttgtcaactttctatacatagccttgaaaatgacaaagacctcgaaaggccttttgtttccaataaactttttaaacaatacatgttagagtctttgcggtaatttaaaaaaccctaagtacgatattaaataactgacaactacctttttagtttttc

SEQ ID NO: 152984 - DNA, 629 bp, Cannabis sativa
tttctaaaaaatatatatttatcacatattaaaataattactttattatttatatatgaaatattataatatttattgtaataatccttaaaattagttggctagttttgttcaaatttaaaatttagttacttctttgttaataattaatgaaaaaaagaaaagttacttttatatttttttatcatggaaaaaatatatatgtttcccacaattcaaaatatagttcaaaattgctaataagaagccttaaggtatcttaaataataaaataacataatatagcttaaaaaataaaaaaaaataaaatcatatttttaaagttaactaattaaaataagcaactaaatatgtaagagaaaaaaattatcttgaaatatttttttaataaaaattaactaaatgatatattatttacatcaaaaaaaaactaaaaggttgcttttttttaaaacttgcataacactgaaatttctcgatgcgagattttttaattttttttttcaatttcggtaattattttaaatctcacagtcgaagtttttgatcgaaggctttgagtagcttcaatgatgagttatctcggcaatttcgattagcaactgtagagtttgttttgatttttgttg

SEQ ID NO: 152985 - DNA, 545 bp, Cannabis sativa
  modified_base (254)..(254): a, c, t, g, unknown or other
taggctcctaaatcacatcgatatcaacacacataagtgactcgctaagtcacaaccgagactaaggtttaaaaccaaaaccctatctactgcaacttagtataataatatcccaatctagcggggaatcaactaactagaaacctgaaactgacacaaaacgacaagctgaaaaaccagttttccccctgctacaaaattcgggtaaccggttttacccagaaaaccaacaaaattcaaacccctaaccaaancgtttacaaactcaaccaaactttccagacttgcatattataccccaataaacatattccaagcaataaaacaagaataaaagctcagaatcaattttcaccattaaagcttcaaacttgagttctaaaactcaaagcttgctaaaaccttcaaacaactactaattcatgcttaaatcaacataataaatcacaactaaacctctgaaaaaattcatcaacaactacaacaactacagcagcaaaagcatcaattcatgcaaaaattccattttcttacacttcaagaaa

SEQ ID NO: 152986 - DNA, 957 bp, Cannabis sativa
tatttatacttagtcattttttataaaaaaaatcctaagtatagggggtatataccactatgtactattgattagttatgaaggcaacgaaattttttgaagtttgaaatttttcaagtttctgaaattttctactctaatacttattacaccaagctgtaattaaaatcgcaatcgagatattataaatgacaaaaaatgcgagtacccgtgtactgcaaaaatattataaataaatatccctgagaggatataaagacgttcaaaagaaacataaatataaatttgttcaagtacaaggcgcgagtacccttgtaccgcatagattaaaaaaagatagagtttaacacaagtaaatattaaaggaaaagtcaagcattgggagcagcaggggcagatccatccgcgactttgctgatagcttcgttctcgacttcctcaacatccgcagcctcagcctccttgggaaatagattccctccgccgccttgagtctgcgtaggcgacatggcgcggaaagcctcagccattttagcagcttttgttccaaggattgagaagtcaaaatccagaattttggagagggtggtgtaaatatagtctgagaccgcctggtcatactgcttcttcccattctccttctcgacctccaagtcgcgagacatctcctcgaccttcgtctgagcactcttggcttcgagctcaacttgctccttggccttgcaaagttcctcgagctctttatccttagaagtcgcatcttgtttcagcttcttaatgtcctcctgaagctgaacattctgtctcttcacaagttcgacctccttggatccagtaacaaagaccttcgaaaacatggtaatgaactgcgaagccaactcagcagagcgaggcaacagctcttcagcaggggtcttgttgatctttgactggaattcatcacccacgaacttctct

SEQ ID NO: 152987 - DNA, 733 bp, Cannabis sativa
  modified_base (497)..(504): a, c, t, g, unknown or other
cggaataatggctcttatacaggattacgtcaccttggctgcttcatggactaatgactggccctacaaaccaacacaagtgtttccagcatgctttgtcctcacttgcatgcttcttgggaaaacttcccgggaggtcacccatcctaaaattacccaaggtcaagcatgcttaatcgtggagttctttcgcttccactgtgtagtcctaaacctacacagtctcaaaatcatcccacttgaccttcctcaggcggtgtgcgattacacagcttacccggtattttcccttacagatcacgggactactgactatcacaatcaaagatttgatgatttgtaacattccacgcttcaagcctccattaggccttcccccatggattcatggctcttgaacatgggtacaccactctagctgcttcctggactgaagattgaccctacaaaccaacgcgagtgtttccagcgtactttttcctcactcgcacgcttcnnnnnnnnacttcccaagaggtcacccatccaaaaattaccccgaatcaaacacgcttaactgtgcttgcatacgtatatcaacatataatgtcacacactattctcacatacaatataacatcatatcaaattataaactgaatgcatgcaatacttacacacataacacacagtatcttattgcacattgtcctcacatacaataatctactcccactcatgttgatcagacatg

SEQ ID NO: 152988 - DNA, 660 bp, Cannabis sativa
  modified_base (627)..(633): a, c, t, g, unknown or other
agcaactttattacaatctctatttacaaatttaattcccgcacatccatccaagagattagtagaataaatttccaccaaaggcacaccccactcggctcgaggagccttctttgacacaagttggtttgtcacaattagactatcagaactcacgaaaaagggccgggtcttcactttttgcaccagttacagccccaacttaatggctaacacttctgccataaaaagtgatctgtagccctctgtgaatattacttcagcagccaccaaattgcctttatgatcgcggatgacagcagccattccactagcctactggtttttgccgaaagctgcatcacagttcaacttaaaagagccagcaggaggagtcgcccagtattttgccctttgcccttccttcattgcactgtttgtatgagtttgcagcagagtattgtcaataaaatctagagcccaaggaatccagcttctcaaatcagtgttcttcttctgaaaaatacgctggtttctttggctccaaaccagccaactcaaccccaaaaacgtgtcaaacttttgttttgagcaatttggttaacagttctagcttttcttaagaattcgattaggtcatccatgaannnnnnnatgatttacattaagtatacaaccatt

SEQ ID NO: 152989 - DNA, 787 bp, Cannabis sativa
  modified_base (115)..(116): a, c, t, g, unknown or other
atatatatattcattctacataaattttatgcggatgacatacataaatgatataacgaacaaaaataagtaacatagtgataaaatatatagaaatattcattttaattaatannaaatacaataaaatttaatatttagtaattaataaatatatttttttaataaataattattttatttttatatataattaacattaaatagatataataaaaaaatatttttattttaattttttcaaataatatataagattcgtgtactcaaccaaacagtgcaatttaattaacaggaatatgattacatattaccctacacagccaaacacagtttacacatttctctataatcatattctccttcataatattccatataatcaaattatttttaacacctcataccaaacgacccctaagggaataacattctaatactagatcttcaaaacaaacaagataatgtttcacattacaattctcttgctagcattaacccattctaaaataataatttatttatttttattttattttttaatattaaatatataataacaatttttcctttaaaatatatcttacaaaatgactactatattttaacttaaaaatgcaatttagttaatttaagcattccgattacgtttcttaataaaataaacaaaataaatcactattattccgttttcaaaatattttagtaaatgttataaaataatataatatagaatagatgagaagaaagatgaagagagaaagagaaagtgaatgagaatttttga

SEQ ID NO: 152990 - DNA, 582 bp, Cannabis sativa
ataattcattaaaattataccaaaatcaaagattacacaaaatacatatgatacaattctgaaaaaaaaaaaataaagataaaacaagggagaaactagatcatatccatggattataggctatagtcatcgtagaccagatcgatattgtggccaccaaccagatcagatccattaattataggcttttttcaacgagttgtgcacctccgatcctggagtaagagcgaaattgatgaacacagcgagcaccgaagccttcaacttttgcctcaatgccatggtcaggcaaacaactcccacaattctccaaacctctcacatacacaccagtctgtgatgcaatattgcaatctccttcaaatttgagaaaacaaatttaccaaatgaattaaaaatcaaaagctcaagcacattcgttcgaatctgccgaaaaaaataaaaacatagtaaaatagaacgggtttatttgacgaccatcgctcggggaaatggccatcatggcgtggcagtgccaccgcgcaagagaaaatgcagagagagagagagaacaggagcgagagagagagacaaggaagaagg

SEQ ID NO: 152991 - DNA, 988 bp, Cannabis sativa
gagagagagagagagagaaattcaccaagaacattatctgtgtaagaactctcattaataacaaagacttgtggactacgactcattaatgcctgaaccacgtaaaaatcacctgtattaattatccgaaagctctcattattatctcatttaattggttgccaaaaatctcgatcaacattttggtactttcattgagagttgtgggaagcattgttgaggaagcaacagtcaaagaattagagcagcaatggtggaaactcgaaacaacacacaccaacctcatccccccaaggatcctcagaacccagaaggaaaagaggcagtttcacaggtaaatgtgggctatgaggaacgagatgagacgaacgacgaggaatatgaagaaaattttgaagggtatgacgtttacgacgaaggtagttacactgaactactagtcctaaggcaaaaagcggctgatcatgaggccgaactagcctcccaaaaagaacagaataagaggatgcaagagataatggtcgccatgcaaaaagctatggaaacggctggaatacatgtgcatcccaaggccatgccagcgagactagagaaaatagaagaggaatcctcgccaagcactcagaggcccaagaccagggagccaagccctatacaaaacccttccgaggagaaccctgagaaaaatcctacttgtatccctgggagaaacaggcacaggatccgcgaaaggtccgctctgatttcccaaaagggaaaggtccacagaggggcaagctccctcgagcgagtcttggtcctcaagatcgagaggaccggaagagcgtatccgtgcaccaagaacccagggaaaaggggaggaaaagtcggaggtatcccctggctgatctaagacagaaaatcaacgagaaacatggtgacttaagaaaccatcttgaaaagaaaaaacacgcattaccagtcccagaggctgttgggttttatgccc

SEQ ID NO: 152992 - DNA, 755 bp, Cannabis sativa
  modified_base (357)..(357): a, c, t, g, unknown or other
aaggacattctcccccaaatcttagacacaaccatagaatgatggctcgtacaaagaaaacaacgcatttggctgacgcatctgatcctcaagtggctcggcacgccactttgcccagcgccgaacaggatccagccgtccaggaggagggggatcatgaaggggacgctgaggtccaggagattgaggagcaggacaacgtgcgtcctagaagttcctccaagacagaggaagaagcagaggttgaactcccaaactacggggagtacaatgaggttggggagccattcgacgctgacggagacgtcctggttgagggcatggactacgctagcttactactgcggttcctcacanaaggtaaggtgccttgggcgccaggtgggtaagccctctgtccagggttactgaggcgcgcctgcggactctcgaccaaggtggatacctgggcaaattggactgctatattcccgcccacaataacagtgccacaaaccctgaaaaggggatgtgtgcttggtcgggtgcccatgcccagcaaggggcattgatgcatttgcatcaatacttcaagaatgtggtggacttcttcggcctctgcccggcccagttcactcctaagggcattaagtatctgtctgcccttttcgacctctacgcttcccagaagtcgggtatgccttctcctcacgaagtcagctggttctttgatttgaagtccacccctaaggaaggcaggtcggggtacttctatt

SEQ ID NO: 152993 - DNA, 640 bp, Cannabis sativa
  modified_base (586)..(586): a, c, t, g, unknown or other
tttctgatggctgtcttctaaccatactatttttgttctgtgcagacatgtctcggtagatgcttgacgctcttaggaagagaataggcggaagctctagcggctctccttcggccaagaagtcgaagggcggtgaggggtcctctacacaggcaaagaggcctaccagggaggttattgatctttccgaggagctgactgctgcaaacccctctaaccctaaagctgccaagtccaaggagtctggaccaccaacagttgggtctgagctggtcaagggagatcctgaacggatgctggcacctgcttcacctttgtcggtgcttctagagtccaagaagggcaaggagatgctggcccattatatgaaccggctggttcctaaggtcagtgagcaactggcgggtgctgacaatgactcttctttggagttgttggtgggcggagtcttgaaggagttccccagggtaagtcttttttgatacttccccttaatctttcatacttagcacaatatgctaaagattttcctttgtgcaggtcagtctgaagttggcctacacttactcccgggctaagtccgctncttccaagaatgcggctctgtccgacaccctgaaggcggaggcggacttggcca

SEQ ID NO: 152994 - DNA, 945 bp, Cannabis sativa
aagctattgtccttcatggatgcctactctggctataaccagattaagatgcatgttgcagatcaagagtgcactagcttcaggaccgatatgggggtataccactacttggtcatgcctttcggattaaaaaatgatggtgcaacatatcaaagaatggtgaaccggatgttcaagggccttctaggacgaaatatggaagtttacgtggacgacatgctagtcaagtccaaagcatgcgtgagccattcggacgatcttacagaatgcttcgaagagttcggagatatggaatgaaacttaacccgaagaagtgcactttcggggtcaagtcagggaaatttttgggattcatcgtcagccaaaagagaataaaggcaaatcctgaaaaaattcaagccttgctaaacatgccttcccctaagaagcacaaagacgtgcaaagcttgactagaaaggctgccgccttgagccgattcatttcctgatcaaccgacaagtgcatccccttctttaacattttaaagaaatgccaaaaatttgaatggactgaagaatgcgaggaggcattcagaaaactgaaagagcacatggccaaaccaccgattctatcaaagccagttcacggagaggacttgttattatacctggctgtctctgagaacgctgtcagcgtagctctagtctgggaagaagaaaaagttcagcatcctgtgtactacgtcagcaagcgtgtgataggggccgagatacaatatccattgattgagaagttagttttctgcctcttgatggcttcaaggaagttaagaccctacttccaggctcaccccatcaaggtgctaatcaaccatccgcttcggcaagtcctatagaagccggaagcgtcagggagactcctcaagtgggccatggaattaagccagttcgacatacactacatac

SEQ ID NO: 152995 - DNA, 583 bp, Cannabis sativa
aaatctctgacatttatcacatctcttgacaaactcatgtgtgtctatattgatcgttggccagtaatatccttgtctaatgatctttttagaaacactttgccaaccgcatgatccccgcagaaaccttcatgaatttctctaataattttgtttgcttctacaggaagaacacaccaaagtaggggcattaaataccctcttctatatattttgacttcgatcattgtgtaacgagacactgtatacaaacattttcacacctcgtttttgtcatttagaagttgcccgttgagtaaatagttaacaataggcgtcatccatgttcagcatatacttggctcgctcagcatttctaccggaactagatttagttcatctagatcattttgcgagggccaattttgcttttgctaaggcatcgacattgtcgacattgcagttctgttctctcagaatttgttcgattttaaagtaatcaaatcattccaagttcttttgaactatctctaaatactttgccattttcaagcctttagcctagtattccccgaggacctggtttacgatcagctgcgaatca

SEQ ID NO: 152996 - DNA, 655 bp, Cannabis sativa
ttaaaaaaattaaaatataacatcccttgcatgtagttaattaaaatataacatcccttgtagtttataagtaaatgtatcatgtgttccacagtaataaatttcacacaattattgttgttttagatataagcacgtcacaatataactgcccattacctactctgatgactgtttttaataatagggataacgtattaaagtattagagagattttacaatatccttatttcgacatttagaataatcttttagtttatttttattttttttcatatttatgtaagttataactatatttaagatattttacaaaattttgaaaaattcgaaataatttacaatacaaaaaaaataatattcaaatagtctattttacacacgtataaaataaaatagtcatgcgtgcaatacactgtttgaatgcagttttcggcgtgttaaagctttccaatttttttaaaattttacaagatgtcttaaataattataatttacatgacaatgagaaaaaatttgactaaaaaattatttcagatactaaaattaggggtgtgtatgatcgatccaatccaatgagaaccgaccgccaaacattggatatccaattgtgatcggatcgggttggatgctatttttaaatatccaattgga

SEQ ID NO: 152997 - DNA, 754 bp, Cannabis sativa
  modified_base (608)..(608): a, c, t, g, unknown or other
cttacaacatattgttgggtcatctagcattgatcggactaggggcagtcagttcgatcaagcacctatccttcaaattccaaacactagaaggtgtgggaatggtgcagggtgactagatgttggctcgcgattgctatcgcatagagttgcagcataggaaagccggtcaccaattattggcaatcttggcaaaagaaaataaaaggaaagacgaagatcttgaccctcaagttcaagatgaaagaaacctattaaaaccaattgaagaattggaagaggttattctcgacccaggaaatcccacaaagtgtgtatacattgggaagaacctggacgaatagctcaaatagcagctaataaatttctaaaaggaaaaagaggatcaatttgcctagagccatggagatatgatagggatcgatcctaacattatctgccatcatttaaatgttgatccaaactacctagcgaagagacagaaaaggagacccttggatttcgagagacaaggggcactaaaacaggaagtggacaagttgttggtcaacgactttatacgctaggtgttttattcctcgtggatagccaatcctattctcgtcccnaagcctaacggaacttggagaacttgtattgatttttgtgatctgaatcaaaagattgttttccactacccaggattgaccagttagtggatgcaactgctgggcatgatcttatgtcatttatggatgcatatttttgatataac

SEQ ID NO: 152998 - DNA, 505 bp, Cannabis sativa
attctaccagtgagtatccgttctgtgttgccaaagaaagttagatatgcaattacgagattgtgtttgttcttcaaatctctttgctgtaaagtggttggtgtgcctaagttagagaatctcaagatagaaattatagaagttgtgttacatggaacaatttttcttgtcttcctttttcgacataatggttcacctaacagtgcatttggtgagagaggtgaagatatatggacctgtgtacttgagatggatgtacccattcgaacgatacatgaaaatcttgaagggttatgtcagaagtagaagtagacttgagggttgtattgttcaatcatacatcgttgaagagacgattaaattctgctcaaactacttgtcataggttaccactgttggctctcgctctactcgggtcgatcgataaggaaataagtagggggtaggggtttttctgtttgtggtgtgagccgagctgattgtgaagaagcgcaccggcttgtgt

SEQ ID NO: 152999 - DNA, 609 bp, Cannabis sativa
  modified_base (338)..(342): a, c, t, g, unknown or other
  modified_base (425)..(428): a, c, t, g, unknown or other
cactccaaccggtccttctactcgaactcgagcccagcaagcctctgctgagaaggaacttcgagcttctcaaagtcgtgataagccaatgcctccaaccaagaagaagcttaaatccaatcctccttcggtttcttcaagttccgaagaagaagatccaatggaagtctcctctggcaaatcaatttctctccattctgagaaggagaatctagaggacttgggagtttcatctgacagtgaggacactgaactcgagccagagcctcatttgtcaaaatctgctcatgcagcaaaggcttctgctgctgctaaaggcaagcagccaatggaagagnnnnnttctggtaatgttccttcaactctttttcactgccctctattttattatcgtgataatgaacgtgactggaatttatatgcannnngtaagtttgaatgtgagaggaactatgatttgcatgctcatcgggtctatggtattgtcaagtttattcaatttcaccaatgggaaaacactctcactggtttcaatgggttcattgcaaacattgttaaggatttctatgctaatctcactgatgattttcttgatgagaattctagact

SEQ ID NO: 153000 - DNA, 915 bp, Cannabis sativa
ctaatataaaatattaaaaaaaaagataacataattataaaataggatacatatttttctttttatgaatatctttgggagttcttttttcaaatttatttttttcttaaactactcaaattatagtatattaccaatgactttcttaattgtatttcgttatgttttatataattttctaacaatgtaaaattgattttgtacaatttgaaagtttttgtgcaatatatatataattttgaccaattttaactaattaaataaatatttgtaagagaactttaaatttttaattataaactatatcaacaaattatttttaaaaaaaatgaagagagtgcaactgaagatgcacattacaacgctatacaatcttcacagattggttctcaaaagttataagatatacaagggttggtagatgtatataattgtatgcatattacttcacaaatttttataggtcctctcttatgtggatgctatttgattgtacaaaacaggttaatgagcaatacaatcaacaaaaaaaaatgttatacaatcttttgataaattttgaataatttctaatactaaaaatataatttatctttatatatttatactattaaagaaaaaaactatctcgaattaaaatattagtgtaattttttatttttaggcgcaccacgaaattttcctatatatacaattagggtttagatacaccacataatttttcaatatatataattagattttatgtagatatatacatggtgatatatataggatccaaaaatgagtgtactcgtatctttattatattgtatgtaggtataattttatttttataaatggtgatctatattgtatactcatttaaaatattatgcaattattttttaaaaaaaaaaattgtgtaatttatat

SEQ ID NO: 153001 - DNA, 661 bp, Cannabis sativa
aataccctttaatataattgccattattttcgttgattcatattctctaagattgacacgtctcatcctctgaagtgccagccgaattttgggtataacaattctcccttaaaagttcttttcagtgaaaagtgctttttaaatgattactgagggtatttttgtcataatccattttgaaaaaacgcatgtcctctgattttggcaattttgtagtttcgaggcacatcaacatttaataaccatcttttccacatctcttttataaattctacatgttggattaattgtctccttaatctgactaagatcaacccaagagtataaaacgaaaaaaggaaccaccttttcaatacctttgccattttgaaaactctggaaatttttcgagcttctctgtagaaaaccatacctagattatttcgaaaccttacatgccatctttgtcattgacattctacttgtgagtttcgtccgatttgatttttgaaaggttacggagcaaaagcagattgctcgttcttcaattcttttatatatctcttttaggcattgttactttcccctgcaatatgtgaccctcctaagataacaagaatatcctctccttcaagaggaggaggttgtaatccttggttgcctgggttattgggcggatttg

SEQ ID NO: 153002 - DNA, 899 bp, Cannabis sativa
tgcttatatgatcatttatttaccgctttccattttaggcagtatgtgagcatctagagtatttatgttatatatgatgccaagtttaaaatgtttatttatgttgaatggaatagttgagttagggtttgagccaataagtgcataagtgtggtattggtgcttaactcactggggttgttgattataggggtacttgtaaaaaggtcactccgcaatcatctagaccacagggtgaccaagtagagcttagggtaaaccaaaccaattcactagcatcgcctacacctccacagaattcaggagataatgtggggattggtaatgctaatccgcgtactgattggtagcagatgtttcaagaatgcgagctatcatacttcttcaagaggaagagttgcttcggttaaggcaaccggaaccttctgcccctgttgagcaagtgttaccactagcacttgtgccagtggtgggtaaccaggggtccatgttgccgcatagagattccgtgtttgagcgatttatgaagctgcaacctccaacttttctgggaggtactgacataattaaaaatgagaagtggatgagtacaattacccatatccttgacaaatgggggtgatgggaatagagagagtgaactgttaaactttcatgttacaagatcatgcccgcgtctaggactgaacatttcaagcgggttcgatccgaacccgagcaacccgctcgaacccgaaccagagaacccgcaatttttttttttaaaaaatgttcgggctggtcgggttccacctggtaccgttcgagcgggttcatgtgttgagtttttaggggcaccgggtttcgggttgaacccgccaacccgtaatttaaataaattatatatatttttatttttt

SEQ ID NO: 153003 - DNA, 948 bp, Cannabis sativa
aaagacgaagatcttgacccccgagttcaagatgagagaaacctattgaaaccaattgaagaatcagaagaggttattctcgatctaggaaaccccacgaagtgtgtatacattgggaagaacctggatgagcagctcaaatagcaactaataagctttttgaaggtgaaccagaatcatttcacttggaatcatggagatatgatagggattgatcctaatattatctgccaacatttaaatattgattcaaactacccagcgaagagacagaaaaggaggtccttggattccgagaggcaagtggcactaaaacaggaagttgacaagttgttagtcaacgactttatacgcgatgtattttatccctcgtggatagccaatcatgttgtcgtcccaaagcctaacggaacttggagaacttgtattgacttctctgatcttaataaggtgtgtccaaaagattgtttcccacttcccatgatcgaccatttagtggatgcaactgctgggcacgagcttatgtcatttatggacgcatactatggaaataaccagataaaaatgtatctcctagatcaggaacatacaagcttcgtaaccaacatgggactctattattataaagtcatgccattcgaactaaagaatgctagagcaacgtatcagcgattggtaaacaaaatgttcgcaaaccaaataggacggaacatggaggtttatgtcgatgatatgttggtaaaatcaataaaaagtaaggatcatacctcagacctcgcgaaatgctttaagatattaatgaagtataacatgaagctaaacccaaaaaaatggtttttggagtttcctcacaaaaattttgggattcatagttaacgcggggggtattgaagcaaatcctgaaaaaatcaaggcattaataagcatgccatcaccggcgaagcctaa

SEQ ID NO: 153004 - DNA, 595 bp, Cannabis sativa
  modified_base (479)..(485): a, c, t, g, unknown or other
tactagagcggtcattacagttctggaatttcaagttcatcaagagcaagtgtgaagtgatactctaactaggagtcatctttgcactttagagttcatttgcaaaggcatagagtaaatgaggattagggtgaggattattaaacaatattttgacagtataaatatcaataaacaaaaataaattacttggttcaaataaattcatacacatattaagaaaataacaagtaatgaaaacatgtttgtaaaaatactaaaaataaaatatatattcaattattttctaaggttttcaacaaaatgatattagtataagcttaggcgagagtcaaagatatcattcattgaatagagtagccagcttatctaaaatggataccattctagcaacttcttattcgatcgaaaagagaatctgacattgtcccgtttaggcgagaattaaggtcattcctatttcatgagcttctaccatnnnnnnntactttgtaagccctactcttaggggacactattggggtgatcgttactaagaataaaagacttacaacaatacttatctttcgaaattctacgacgttaaattgctaat

SEQ ID NO: 153005 - DNA, 653 bp, Cannabis sativa
tcaatgtttctaatagaaaagtgactcgcaatgctcttggtttcttccctatgaaatttgaaaatttttagagatgtgtaggaagagatttttaagaaaacattaatgagtgtaagaataaggtaaaatttgtcaaaatttaccctgaaaactagaccatttttaattttttagttaggggtcattttaacaaaatttaacaccaaaacgatcttcttcttagtagtataaaattattgttacaagaggggaaaaatattttgatatggatccgagccacatttcacaaaggggtaccactatcaaaaatatgagatttttactatttggattaaaatgattctttgtgcttgaaaactactttttctctcaatatttccaataaaaaagtgatgcacaaagctcttgacttcgtccctgtgatatttcattattttttgagatgtgttgggtgagatttttagagaacactaaccagtgtaagagtaaggaaaaacttgttaaaatttaccccgaaaagtaaaatgttttcaagtttttaattagaaggcctatttaaccaaatttaacgcaaaaacaatattcatattcacgtcttagtagtttgaaatcattgtgactagagggggaaaatgttttgacatgggtccgaa

SEQ ID NO: 153006 - DNA, 562 bp, Cannabis sativa
  modified_base (435)..(436): a, c, t, g, unknown or other
tagtatactcaaggagataggcaacatatcatgtttctttcaggtgaggtgttatagtatatatatcgttgtaatttatgttcaattcctcttgctgtggatccctctctactgcaaggcaatgcagagtggaattttgataaataaattgtagtgacagctatgttttgctgttgatttttatatttggtccagttgttgtctaatattttatctttttgtctcgagcaggttatccccattcagtaagtatttattttttctttattttattgtcacgttttcctagacgtagttttgaatttcgaaagaattagtagatatattttgattttgctcattaatagcgacacaattattacttgtttttatttgtagtgacaactgaaaatgatatgtcactacaagaaatagctacttttagtgacaattttnnagtcacaacataaattttttatggctaaatgtgatttttggtcacaacaaaaagttacttgtgactaaaccatagtatttagcaacaagttgtcgctaatttagttttagtcacaacaagtattgt

SEQ ID NO: 153007 - DNA, 512 bp, Cannabis sativa
ggatatttctgcggcatatccgtctcgagttcccaggtttcctcttccactttattgctccataatactttcaccaatgtcactgtctttcttctaaagactttctctcttctatcgagtacatgcactagttgttcctcatatgacaaatctggctatagttccaatgcttcataactcagattatgggacgaatctgagacatacttccgaagcattgaaacatggaacacatcatgtacagctgccagcgctggggcatagccaacatgtacgctacttgccctaccctctcaaggatttcaaaaggtccaataaacctcgggctaagctttcctttcttcccaaagcgtttaatacctttcatcggtgatattcggagaaacatcttgtcctcgattagaaaatcaatatcccgacgctttggatcagcataacttttctgtctactctgaaccgcgagcattcgcgctctaatcttgtcaaccacctcactcgttctctgaacagcc

SEQ ID NO: 153008 - DNA, 1149 bp, Cannabis sativa
aaaataattaacctgagttttgcggatgacttgatgatattttgcaaaggagaccttggctcgattcaggttattaagcagattctagatgaatccagtgccactttaggacttgctatcaacatcaataagtcccatctctactttgggggtgtgaaagaagatgttaagcaaaaaatggtgaaagagttgtcctttcaagaaggagacttccctctcaagtacttgggagtccccttaagaccaacaaaatggaaagcggaggattgtggtgtgataatcacgaaaatcaagcaaaggctccacacttgggctactagacatctctcatttgccggtagggctcaactcatacatttagttcttcttgggttaaggaattattggatgatgagtatattcattcttccgcatagtgtcacaaaggaggttgagaaactttgtcggggattcctttgggattggaatgggaatagaagtaaacttcatgtggcctcttgggagaaagtttgtcttccaaaggcctatggaggccttggcttcaaggatggtatcaagtggaatcaagccattcttacaaaatatgtttgggccatttcttccaaaagggacttgctttgggtgaaatgggtcaataatatttatctaaaaggcaagaattggtgggaatatgaacttaaaagtgacactagttggtattggaggaaattatgttctctaagggataagttcactagagaagacataaacaaagcagggactggtatgcgattcaaggctactctgttgtataacagcagcattcctcaaactctctttgagtacagcaggttcatttggtgctcattcaacctaccaaagcacaggttcattctatggcaagctatcaattctcagctcttaacccgtgacaaatttgagcaatttcacattgctcttgacagcatccaatgcccggtctgtgaggatgcagcagaaagtaactcccatttattctttgactgctggttttctcagcaggtagtgaagagcatcagcaggtggcttggaattcaatgctggccgactggattccatggttggaaacatcggctgatcctgaacagagggaataaacttcataggattcatgtgtctctattggcagct

SEQ ID NO: 153009 - DNA, 533 bp, Cannabis sativa
gtgggtggttggtcaacaccttgattgggtgagcttggaagtagggtctcaactttctcgaggccatcaggaggcaaaaaactagttttttaattaccaggtatcgcgtctccgctcctatcatgcgcttgctgacatagtacacgggatgctgagttttctcctcttcccggactagggttgcgctgaccgcatgctcagagacggctaagtataggaataagtcctctccgagaacgggctttgataggattggtggcttgaccatgtgctcttttagttttctgaatgcctcctcgcactcgtcggaccattcaaatttttgacacttcttcaagatgttgaagaagggaatgcatttgtctgtggaccgagaaataaaacggctcagggcggcaacctttccggttaagctctggacgactttgtgcttctttggggaaggaatgctcaggagagcttgaattttttctcaatttgcctcaattcccctctgactgacgatgaagcccaaaaacttccctgacttaacc

SEQ ID NO: 153010 - DNA, 553 bp, Cannabis sativa
gctcttccgatctcttccacactttcacacatctatgaatatagatataactttgtctctaactttcatgttttattttcttcttgaaataattttacactaactttgacaccaagcatgtcaaagtttatcatcttttgcactcataattaatcacactattcaaggagatattcaggcctttgtggaagattgtgatgaacacaatcagaggaggaggagattcaagtttagatcttgatcatactctgtgagagaaatgatcgagggttagagatttgaactgaaagaaacataatattccactgcaactaatgttaggttttctacaactcttatgtatttaatttatttttttaaaaaaattcatatttaggatgttagattagtcataatcatacatgagtagtaaattaagatcttggtaaaaaaatttccaacaaaaacaacataaatactatgtcataatcacatcctcatcttctatggcattaatcttatttttcattggatgcctacaatctcttgcgtagtgcccagattttccacacac

SEQ ID NO: 153011 - DNA, 529 bp, Cannabis sativa
  modified_base (497)..(501): a, c, t, g, unknown or other
aatggtacccaaaattaacctgactttaggagaagagattcacgaggcaaaccttgaagctcgcagactaaggggcaggagacaacccagagatatactcagaactcttaggagatgcaacctgaggaattaaggaaaatctggggacacagcctgggatttgtgaagcatcagactgaaatcgccaactctctctttaggttcatcagaaagaaactcgcgcaaacccttatagggagaataaggtgaatcaaaccttaagaggaagagcaaggtccgaccgtagtcacgacaggagtgatttacgagagcatctgaacttgaagaagcctgaccttcatcaacgactcggtccaaagcaaaatgattcactccatttgcgaatggacgagttggagaataagttcagaaggcatcaagtcataaaacctagaagacaactggtgttggaaattattttaccaggatcttggatctactcacaagtatgttgtttnnnnncctaaatatgaactttctacaacgataa

SEQ ID NO: 153012 - DNA, 853 bp, Cannabis sativa
tttgctatatttttttttaaatgaggacataaactaacatagtcctataatttggggccatttattataattttcctaatatttttgtcattttagtatatacccaaaaaaagccttttttaatatctataatgattcaaaaaattcaaaataatttataatatagaaaacaagattcaaacaattcattttactcgagtataaaataaataaaaaaaaaaaaaaacatgcatgcaacaaagtgtttaaattttacttttaatgtgttaatttttttctctcttttttttttaatttcacaaaaaatttgtaggatgttttaaattattgtgttgtacactttatacgaaaaaaaaaattaaaactattttgatgtcgaaaatacaaaaagtgtatcgataaactctttttgagaatgcaaggtagaatttccaatatttgtgttttcttctaattaatcattttgacttgagcttgtttggatgacaatttgcaagatcatcaaagcagttgagacattttcattaagtggggtagtaacaccacttagtcttgacaacaaggtaccaccaatactaaagtggtggaatttgattgaccaaaaattgacccgccaactcaatcaaacctaaatagatatgacttttctctaaatattaaactagtcaatttggcacgctttcttgcattttcccaaattcatacacattttatttaccactttaacattctagtgttgcaattagaatcttctgttagacatttatatgtataaactgaaatatatatgtttatgtataaagtgcagaattaaatcaaacatatatatactatgaataaggatcgaaatacc

SEQ ID NO: 153013 - DNA, 740 bp, Cannabis sativa
attttttgtttaattttttttgagaaaaaattatttattttatttgttttaaattaattatgatgtatgatatttacttattgtaatttacatattctactatgtatatttgatatcagtaatacgtacttattgtaatatatataatgtaatatgtaatttatggtgtaatagctatatatcgaaatgcattatttaaatttattttttttttctatttattgattcatatatatatatatataatttttcagtaattttataattataattttaatataaaaaatataaaaaaaattatttaatattttttttttaaaaaaatgatagcatttatgtctggtaaagctggacgtgatacatatatcttggccgacaaccactttcacgtccactccagttggaccagaaatgtttttctagtccaatattgttggactagaaaaataccctttttatgtcccttgatattatgtccaacataaactagactcaaaaaacttatctagtccaactttaatggacataaaatggggtttttgtagtagtgtcctttcaggcttcttccttctaaacgaatacttgagccctttcattgaactccgtgatgcttcttactggatgacattgtaagtcatcccacaactcgccccctgcggttaatggataagtagagatccctgttggaaaccttagaaattatttaagatgagccggttttgtattttcacatgtgtttg

SEQ ID NO: 153014 - DNA, 504 bp, Cannabis sativa
  modified_base (393)..(401): a, c, t, g, unknown or other
  modified_base (473)..(478): a, c, t, g, unknown or other
tttacggaactcgattcccataaatattgaaagagttatgaaatttttgaaaattgggtgccatggctgtcgagtaggtgcatcgagtgcaccaggcgctcggacaaaggagtgtacgcgcgcggattgctggggacagcttctgtctgaagccccgttgctccccccagctcgcccagctcaccctgcaagacgccgagagacatgctacaggcgccgaagaatgatgcccacagcaccctgcagctttccacttccgtgcgcgtagcctccagcgtgcagcctcctgggggccgcacgggtgatttcacccaaaaacccaaatttcatgggattttttcccaaaatttgatttttctaattttcaaaccccaaatttaaaataaaatattnnnnnnnnntatatttgaacttaaatatcattttgtaaatttataatatttatttttcaatagattattattaattttgannnnnngaggtttaaatttaaaaattgattat

SEQ ID NO: 153015 - DNA, 519 bp, Cannabis sativa
  modified_base (270)..(271): a, c, t, g, unknown or other
tcacgctagatggatgccctaatcacattatggaaccaagtaagttgcatgattaaaaccctaatcccgggaaacccgaacccacaatcgtaggggttacacaaactctggaaatagggaagcacccaaccacgacactgaaatggacgaaaatcaagaaaacgaaacatttggggatcttgccaaaaccgattacccggtttgcaccagctcacaccaaatttttcatttcttgctcaatcctccaccaaatgcaaccaaaccttccanngtacctaattagggtatacacaacataatccaaccaataaaccacagaaaaacccactgaataaaaatatgccattagagatcaaagttaaggtttctatgctcaaacttgcacaaaacctaaaacaaacatcaaaaccagttgcaagaagcgagaatgaaagagagagcttctcttgatttttttggtattttcttttaattcactaaatgaaatgaagattagggaaaatccatttcccttgctga

SEQ ID NO: 153016 - DNA, 906 bp, Cannabis sativa
ttttttttttttttgtataaattttcaattttaaaaacctaaaatatctaatcttaaattttctctatttgggttttacgtatgataattgtttttttatataaattttcaattttaaaaaactaaaatatctaatcttaaatcttctctatttgtcttttattttatttttctcttttctataaattaaaactaccataaacaaaattctaaacctaaaaatatatatttctatctctctctcaatctctctttcatattctatttttttttttctttttgtgcaaattgatttatttgattgtgtatacatatttctctcccatcatcttctactattctcctttatttatatagaaattgatctatttaattgtatatacacaattataaattacaatcttagttatttctttgttttcataaatttatgattatttctctcttacttttgagtgtgtttattttctcttctaattcctttcttattagtcaatatttgatttattttttattttcttttttatttattttgtagataggattgcgcgatctttttgatacttgaaagcttttgtatgtggcgagaattgagtggatcaaggtaaatagtcgtgaagccaacatgaaagttcatgttcagtgccagttaaaaagaaaatatatagaaaatatttgaggtatttttcatataaaatgttttttatattatgacttaggtttgatttgagattttgatgatatttggaaaggaataaaaataatcttatcatattttattaagaaaaaaagtaattatatcatataattttgagtatatgaaatgcaaggttcttttatggagtggaggcaatttcaagtacaacactttcattcttgaaaaaatgaaagtttattggcaagact

SEQ ID NO: 153017 - DNA, 5184 bp, Cannabis sativa
agtttttttagggtttaaatttttggtttaggaaaaaaattctaagattttctaagtataaaaaatcaaatttcccattacaaattacaaattatttacacagaacaatacaacacaaaaatttccaaaaaatataaaataattaacaatgatggagaatggtaactcccaaattaagaattatatttcctattctgaaattacgtaaatacccccttcagttgcgttaaccttaagggtatattcgtattttcgcttaaaaaaccccaatttgccatttttttcgtaccgtacgaccgccgaaaaccctaggccactcacaattcgcgaaaattttcctcttcagacattcgttgaaagtttttttcctctatttctccgaatgaatgattgtatttagggttccttcttcgtcgattgttgctccagccttatgaatcggagttttccctctcaaattggattgtcatgtctaaaaggtgatttcttttaatcttccccgatcctttaacttctctttcgtactaatttttgttgtaatatttctgtcgtaaattaggtcatttctgatccaagtttgttgattttgattgatcttcgttgtgtttatgtgattctgtatctttctattggttttgattttgggggaaatgcacagttttcttgtataatcgatatttatatatacatgtatgtggttgtatgtgtttttttgggggattattggattttaagaggagatatttttgagcttgttattgggtttttataaagaaattattttgaattttacgttcttattattgtatctgtttggttgatgagaaaaaagtgagccaaagataactgtggcaaacattgatatctaatgcttagtagtaaatgggaaatgtatcatttttattatttttctgtaattattttacagggttctttgtaagttctttgcacaaggagcatgtctgaagggggagcattgtgagtattcacatgattggaaggaccctccaaataatgtaatagttcattgattttattagtgtatctaggcattgtttatgtttaagcatatgaatttaatcttttttgtttaactgtttcaggtttgcaccttctatcagagagggctgtgtgcttatggtagccgatgccgatatcaacacactaaggcttctcaatctcaatcttctggttcatcttcgtccacaagttcacagaaatttcctgtttcagattctcggtctcgtcctcattcttccagcacctcattaaatggggttgctttagtttcaggggtgttttccgagctctctgctgcaagcaggccttttgttgttcccaaacaacctgcttggaatcaagggcttgagcaatctgatgctctacatagtggtaatgttggtgagagcagtcttagtccggcggatcttcctatctgttcatttgctgctgctggtgattgtccacgtggggaaaaatgtccacatattcatggggacctttgccctacatgtggaaaacattgcttgcatccttataggcttgatgaaaaagaggaacatctgaggacatgtgaaaaaaagcataagaatctagaggcattgaaacatagtcaagaaattgaatgcagtgtctgtttggaacgtgttctctcaaagccgacagcagctgagcggaagtttgggttgatgtcggaatgtgatcatccattctgtatatcttgcatcaggaattggcgtagtagttcaccaacttctggcttggatgtcaacagtgcattgagggcctgtccaatatgtcgcaagctttcatactttgttgttccaagtgtcatttggtacacttctaaagaagagaaacaagaaattgttgacagttacaaggcaaagctcaagtaatttgtttacctccgaaccaaattatatatggataatttctcaattatttcaatagttgtcttctacatttgcaatatttttaaagaaaaggaacttttaattttttatagctgaaggcatattgtattattctcaagtcgttaagttggtatttacatgtgatgaattgctagttttaattagtggaatcaattggtttttcttctgcaggtcaattgattgcaagcacttcgactttggcaatggaaactgcccatttggtactagttgcttttacagggtaatactctactcctagttgctgttattttgttcatataatgctccaccttttgtatttcatatgttatttgcaatttggatacgtggctgttattatctgagaatatatgctatcgacaatataagtgagaaaggtcttgttttcttcgatttctaatttgtagattatttccttggcttctttgttgtgaatttcttttgaagttcttgttcttcaatgtcagttttacctttaggctgtaggctaacttacagaggctcaatgtgtactcagttaatataaactgaatttaacgtactgactaatatttaaatgaattaaattggtgcttatcatctgttgctgtgttagaattaggaaggggttagtattagaaatcattcaagatggaccacattttttgcctgatcctcgaaagcctcacccaggctcagcaacagttgatcgacctggcatttttcttgctgtcttattggtcgacctgcggagatttgggcaatgagtaacattaagttttcatgaactctgcaactgaagtagacagtttttttagaactgtgagtggtaagatgtagtggggcaagggcatgggggggacatttacttgaattatatcatgcaacttctttgctgcaatttactttcatgaaggagagtattagctttattactcctttaatggatagaatatttgttgtgttccagcatacggtcaagccaggctcctatgtatggaaacatcacaggccaccaccacgaaggcgaactccacacagatccaattttgtggacatcgatgctatgttagacgaaatggagtgtttattggatgacggtttagactctgaagatgatagtacttggaacatggggttaatgttttcgttgatgggctttgagacggactcatctagtgatgaggattttatgttctaaactcagcttttggattagccaacttttaattgccttatttttattttggacgttggaattgttgccatccattttttttctttttttttggcatatttgtcggggacagaatttaacttgcgtcattgaacgggcgaaacatgtagtgtctaaaactataattaaacatgtgaaataagatataaattttatcttcttggtctttgataatgtttggtatcctggtttcatttctactgttttcgtcttccatggctctgatcatggttggctactaagcagtgaacttagctgttgttatctgatatcatttgcagcatgcataccgcgatggcagtttggaggaagttgatctgcgtcatctcgggaacgaagaaggtctaactgtgatagctaaacacgttaggttatatgcttttttcccttcctttcaatttgttcccaagaattaaaacaaaagccaaaacttttccatattttttttctcacaacttaaaattttcggtattctcaggctatcagacttcctaagtgacatgcatataaggtgatacccccctatgtaagtttgcccctacttattatgatttccttatcttggtgaacaaaaatcttgtttcgggtccgaatataagtagattctttgtcaatcaatatgtgcagggtgtttactcatatgaacaagaagataataagagattgtatgatatggtgttgtatgttatcttttgccggtggtatgctcaccttgttttttttggggtatggtgattcttcggtagggtatgatttttataccgtactattaggatacaattcggaccattcatcaaagattgtacgctgattcttgtcttcgtacaacttctggatgaatggttattatcgtgtcttatcatcgtaaatcataccctaatcgtagattgtacgagtaacttcttctccaagatagagaaagagagagttgtaatttaatgtattttccttccaatttttgtgttgttttgtaggctcaacacttatacacgatgatggcagaggttggttggttggttggtgatgcttgttgttatgaagttgaaataatagtactaaacaaagaacaaaatcattgcaagtaaacattattgaaaaagaaaaagagagatatacacgtgaggatttttgacaaagtttgctcctttttttctctttttcttagattgtatacatataatcatacatatgtctctcaaatttcaatggctaattcttgtgagtcaagattgaattttgaataaaggggcatgatgatatgaatatgatatatatgatagaggtgttgtatttgtagtaattaagtaccttcctttgtggatgagtttgagcctccaagtgtatatatatatcttgatattatatgacatggctatggctacttctactggtcttactccaaatttttaataagagagagacttggttttctaatatgttaagctttttacatttacaatagtttctattttcagctaagaattcaaagttttagtttttatgttttaattgtgcatgtgattgttctgaacttcattaaaaatgttgtaagccttttcatttgactaattaagatttttgacactcgaattctgatacgtatcaaatcatgttttatgaacttatcaagtcgtaaattattttttttgaaatattgacattgtaagattatttttcaattttatttacaaaagtttaatgtagataaaaatttacgggtacgatttggtatatgttaaagtagaattgaattggattagatagaaattcttaaatctagaatttaaagggaattttaatttcctaaaaagttttgagtataattataattagcattagctgattaattttctttttatcttaatttcaaaaaaatcttaatttatgcgcttaaattaagaaaaatttaattctagttctacttttgtaacttttttttgagatgaaatatcaactttattgaataaattagcattctgaatacaaaagatgtaagagttcaccagaaatagaaatatcagaaatgttacg

SEQ ID NO: 153018 - DNA, 577 bp, Cannabis sativa
  modified_base (55)..(58): a, c, t, g, unknown or other
agcacaattgaagatgccctcttttttaaggctagtgattaagaataactatgtnnnncatttcgtcaaacacatggaaggtagcccttatatacacattaacaaaaaattcaacttaaagaagaagaaaaaatttacaaaatttgaggacaaatgagtagaatcaataataaacaatcacactacaacaatattctattttaaattttcaaaccttattaatgtaatttgaaaaggaaaaaaaaaaagaacaagaaaagaataacttacaaatcgaagcttcacaaaaattaatagcagtaaaaagaagtttgaaaaaagagagggataacttgatcaaaagaggaaaataaatatgaagtgtctatctttctccctagatcacaacatagaaggttgagtagagattttatatgacattgagggactggggacgagagaggtttgatgcgagatggaaatggtggacagagttgtcttttaaagtggatctgtgtgaataggaggaagacagaaaaatagtattatctgtaattatcaaactttataaatagtattaaagaaaaatttaaaaagt

SEQ ID NO: 153019 - DNA, 586 bp, Cannabis sativa
ctctctctctctctctctcgctccctttcctccaatccaccaccaccatgttgaaaacttatttttatcaagatctagatttactaacatgtatgctgattataattctataatctaacatcctaaatataaaatttctaaaaacgataaataaaacatataagagattaagaaatccttgcagtggtggcggtggaattttatctcattccatttagatttctaacccctgattcctatttgtagcagaacataatcaaaatctgaacctggatcttctcatcctttgattgtgttcatcacagtcttccacaaaggcataagtatgaccttgaatagcgtgggttgatactgtttaccaagatttttggtaaccaattatatttagatcttaagaaaataaaagataataaacaataaacaaataattttttacgtggttcaggcgttaatgatccttagtctacgagtcaatagtattggcctccttgggaaagtatttaggtattacatgtcacgacccgagccctaggctgtggcagatgtgtaatatccataacttgagtggtcaaaggtcacactttga

SEQ ID NO: 153020 - DNA, 1123 bp, Cannabis sativa
  modified_base (37)..(54): a, c, t, g, unknown or other
acataaaatgttaattctgatctttattaataagtannnnnnnnnnnnnnnnnntgtgttttatttagggcacaaaactcaacactacctcccgtggtaaaacctgatgcaggaggggaaggagcccaggcaacaaccgaagtcccaccagactctatcatgcatcccactgcaccctcaactcgcagtgccttatccaccatttcagcataggtggttctagtgatcatcaagtcgtgtctgatcttcgcatttaacccatccaggtatttttctttcttactgaagtcagttggcacaattcccgaggccaacctcgccaaacggtcaaattgtgttgtgtactcagtaacactcatattttctttctgagtcaattgagtgaattctttttttttagcacttctgactgcttcgcgttgaacaactcctggaactcttcctaggtcatcgtagtaacatcttgggtcagggataccatgtcccaccatactagagcgtcttcttagaacttgaatgtggcacaagccactctgtcattactggtgacgcccataaaattcagaattctggtaatcactgatagccactgctcgtctttcataacatcaggacctcccaggaaaactagaggtgcttgcttacggagcctttcatataggggttccattcggttcagtgcaactacaggttcggcatgcacagcaggggcaggtgccactggtatttctggagcaggcactgcaggagcaccctgctgcctcaaccgacgaatctttcatcttgctcattgatcttggcttgcatcgctacaaaccggttttcataatcatgggcagcttgggtaacctgtggcgggttaacatcaccccgtcctcgtgccatgcttctaaggcctctgcttcggccacatcatttaggggaatacaaactccctgaccgccactgaatccgaccaagttaccctgactcttggtgtttcgtctggcgtccacactactagaacagccagcgtaaccaagagcaagtctggtcagatcgcgatcaagaataacttactagtgccgcttatttggaaattaaaaacattcgcctattcagctatgaggctactaacatgctt

SEQ ID NO: 153021 - DNA, 600 bp, Cannabis sativa
  modified_base (63)..(81): a, c, t, g, unknown or other
  modified_base (129)..(130): a, c, t, g, unknown or other
gttatactgaatgtttaatgcattattagaaactgaaattaaaaatttctatttggaatctannnnnnnnnnnnnnnnnnntaaatttataccaaatatttcttgagtaatgattctttcttggaccannactactaatctaactctaagtttcggctgccttaagtaagcatatacaagtagaaaatttctaagatcgaggatttatatcatttcgggatagaatgtcagaaatatagtcatctgcgccatttaatttcatggaagaaaatagagtgacatcataagcagatgatttataaaccatttatccaatgatatactttttaagcaatttctaaatgaaaagctaagatgaaaaatacaggataattttgattaaaattagaatccaacgatgtcccgtttatgcgagagtcaaagttattcttattatataaatttcttcattgtttcatattgtaagcaatcgtctaagttgtcatctttagatgtacaactagatgttgcatttacaaatacttatttatcgagatctaacactattatgtttgtctaacggatgacaattctttagaatttgtcatgttaaaacaacaa

SEQ ID NO: 153022 - DNA, 501 bp, Cannabis sativa
ttgtaaatttccatttacaagttaatataacatatagctatacacttgtatagaagtctcatttaatgtaaatttcaatgcaagttttgcaatcttttttccttcttgctcaatgtggtattatttcttaaacccccaaccaagaatcgaacagttagttagatgcttattaactaacttaattgttaaatataacaacaagtatctttgggtcctttggtttatataaagtggactactcatttcattttacaagagagacacaacacagtagagagagaaattagagcgagaaattgagagagatatctgagagagagagctgggattgggaaattgtattaagcaacaatgtcgattatgttgactcgggttagtgagttaatgagtgttgaaggattacaccatggatgacttactgtgattatttctttctagctcctgagatagatatctctaattctcattatcaataaatattggtgacagtgttttcaaact

SEQ ID NO: 153023 - DNA, 569 bp, Cannabis sativa
ttcatcgctggatcttcgtctatctcgtctagggggatgacggttgcaggctgttgcccagcatccagataagctttttgtatcaacacggtggccttccgggttcggtcatcattggctgcttgctaagactttaacgtttccatctccttgtccctccattcggtgaacatgcgcctctgctcttcaaatgcaagatttatcacggtgcagagttcctcctgatcatgatgcaaggtgattggtatgaccttgcatgactccaagagaagcacgaaggttttggattttagtatcatctccgatagttgttcgaacattgattacgggcgaaacgacggcgtttggaatgccctggttggctgctgaactggtattcccagtctcttgcataccaggtgcgatttcactcaccggagtcgtcacaccgtgacccacgatcgagggttgttcgggatttgtggttggcaaaaccctcgtgtgccctgggttctgcagtgcaggatccaccgcctgtggatttgctggatcaaccacgcccctacgagtttgtactaccatcgtacttg

SEQ ID NO: 153024 - DNA, 1064 bp, Cannabis sativa
  modified_base (252)..(255): a, c, t, g, unknown or other
  modified_base (603)..(604): a, c, t, g, unknown or other
tcattatgtctatataaccgattccattttagttataatcggtttgagttattttgtgttatttgtttttattaattataacattgttatataactggttcattataacattattatagaaccggttctattttaattataactggtttatgttattttgtgttatttatttttattcactatgttacagaaccagttttattttagttataatcagtttgcgttattttgtgttacttatttttattcatnnnnttatagaaccagttctatttttattatattcgagacattttcccacatttttttttaaaaaaaaaacaaaaaaattataaccaattttatgaagtattatgtgttatgaagtattttattgtgaaatagttttgtttttaatttatatttcagtgttttaggaactgatttcttctttgttaacttttaattataatcagtttgagctattgcgtgttagttgtttgtattcattatgttatatagccggttctattttagttataaccggtttgagttatttcgtgttatttgtttttatttattataacactattatagaaccggatctattttaattataactgnnttgagttattttatgttatttatatttaattataattggttctgtaacataatagaaccggttatacttttagttatatctgagacattttattctggtgacttttcctataactttgccggcgacggtgatttttccgacgattttccctgtaccgttgatttttccggtgccggtgaccttttcggcaaaacttattgttgttttataaatatgagatttcatatgagatttccactttttatttccactttttttttacaaaaatatggcataagaaaaactcatataaatgtaaaaaaaataaaaaacctataacccttataatgttatttatttatgtcataaaaaaagtaaactataccttcaattcactaaaaatttcccaatttagtttagggataatttcacaaatgcacaaaaacaacaaaaaaacaaaaaaatacggtttcacggaatt

SEQ ID NO: 153025 - DNA, 587 bp, Cannabis sativa
  modified_base (50)..(54): a, c, t, g, unknown or other
  modified_base (531)..(534): a, c, t, g, unknown or other
aaataatgtgacagccatcatcccaaaaatcatgggatttgattacatannnnntagtgtaaatgcggtttatgatttaaaaattttataactgttattttcttgcttttactgggtcaaaactatggtgtattaaacatgtctttaagtgttgaatctggagatttctcaacaaaaacttgattatagtgattccaatagtgagctgggccattcttccttcttaggtcgacaatgtttgtcttgtgtcgatcgcggttatttacaaagaagtcttctaactcaccaaggttgtaagcctcactcctgttagctggatgaagctataggaagtcttcttatagcgagatggtcacctcgcttacttgttatttaagttgatctgacttttacacttagtttgttcaaggcaagctaaggacttttacggttgatatgtgtcaccttctccggtgcctgtctattcgcatttagcgacatattctttctcgctaatataccaagtcccagtttgtacattgattcctcgcnnnngaccttacagtcagcgggttacaaatatactatgacccttatgtaattaatga

SEQ ID NO: 153026 - DNA, 526 bp, Cannabis sativa
tcaaaaaaaaaaaatattggcaacatgtatctataaaaaaattattggcaaacatgtttgtttccttttctttccccaatgaataatgaaaaatccaaaagaagtggttaaaaaaaataatgaaaaataaaattgatttagcttagatttaaaaaatgaggtcttttttaatttaagattattaccagtacaattaaatgaaagaataatagtatttttgtctacgtctaaaatatacaacttattaaaatttctcattaaaatataattgttatataattatgtcacttttgataagttctgtttcctttgctgttaaaagttaatatttttatcccctaaactttgagaaatatataattttacccccttttattaaaaaaagatattaattttaaaaattataatatgctataaaaaacttgataaagtattaaattatttaaaaatattaagtttactaaaaaattctaaattattcttaaaaaaatatttttaaatattattttatttataaatacgtatc

SEQ ID NO: 153027 - DNA, 619 bp, Cannabis sativa
tcatcgctattgatgagttttgaaggaggagcatttttactgaagagtaactcatcaagatcatgacctataacagtaggtatgactgtcgatttctaggaaaagaaattcgtgcaatcgagtttcaagataagtgaagctgtcaaagagattgagaaggggttccatggttgtgtcattgaggaggactgagttggcacagcagcaggatcaaaggctccaacttgagacgagtggtcatcggaggaagccattgacgcaagtcaagtgctctaataccataaagaaacaaaacagaagaagaagatgaaagaacagagtatgctcaaaagagaagaaatgcaaaatagcttgattacattattgaatgattaagtgtttatatacacatgagaattatattctattaaaattaacaacccaagaaactaacaatagctttaactaacactaagaaactctaaccaactaacacatcaattagttagttatcacgaataattttcacggtatgtaatgcaagcatatataatagttcttatcattaattagcactactacaatgttagcctttagaggcagttttttcaaccccatttataaaaagggaagctaaagg

SEQ ID NO: 153028 - DNA, 564 bp, Cannabis sativa
  modified_base (351)..(351): a, c, t, g, unknown or other
agttgtttggagaagtgctaaacaaactgcaacgtcagactctaccatggaggttgagtatataactgccgtcgaggctgctaaggaacttgttttactttgtgataacattggagccatagccaacagtaaagagcctcaaagccacaagagaagcaaacacataaagaggaaatatcacatcatcaaagaatatgtggcaaggggagatgtattggtggagaaagcggatactaaagacaaattagatgatccatttaccaaagttttgactacaactacatttgaaaagcacaaattgaatttaggattaattgaaatgcactgatagttttatgttagtgcaagtgngagtttgttgggctttgtgtcctaaataaaactctatttcaatgtaatcttttctattcaattaccaataaagaaacaaatttatttttattacttgttatatgtattatttggttcatctgatcatttatacgtttatttaatttataaattcatcaaaatccttatcacattgatattcttgtttattatgtcgtcagcacagtggaaagt

SEQ ID NO: 153029 - DNA, 662 bp, Cannabis sativa
gcatgcaaggaagatcatctcgacgacagaaagtatcgttatcagagttaaaacaatattagtctcgagaagccaaatgacaagcaactgccctctatcaaagtgatcttggctccattctcggggaggcatccctatgagataaggcttaccgtatactttttattatgcattaatctcggcccaataaaagcgagatattcacagctgtgtaaaaacctcatttatttagcttgatttgtaatcagatcccatgattttagggataatggttgtaaatatattttggtcagctttgtaattaactgctactatgcaattatgaatagtggaacacaagatcaaaatgggggacgaaaaaactcttatgaaagaggccttgaaaaaaatactcagtgttgacctcgcttttagccaacgtcagtgagtctaatttagtaatcgacaagtagtgtataatgatagaaatataataaagcaatataaagacacaagaattttatagaggttcagccccgaacagtttggtgatagcctaatcgtcgttatttgtattaacttaaaaacaaggagaaatgttccttttcttatagctcttacaacattatctctgaatataaattcttagataatatctctcaagtaaaatctttcgacccttt

SEQ ID NO: 153030 - DNA, 515 bp, Cannabis sativa
  modified_base (94)..(96): a, c, t, g, unknown or other
gttcttagctataaactatatgtggacgcagcaatatcaactcctcaaaatgtgattggttttggagcagtcattttctcctcagacaaacaannnaaggcagccttatctaaaccactataaggtaaatctttccaatttaataagtattatgcttttcatataaaaaagactaggataatacatacaattttaaaataatatagtaaatatcattttggtctattttttagttttaagtttatgcttcaaatttacttatgaatgtataaaaggatgtaataataacaagtgtggctgcaacttaaatatttttaactaaataattctaagtggattttatctggataaactttaaagaattttaatagttatgttttttcaaaatagatatctgatctcctttagcgtgcgggttatttaaatttatactattatattatcatgctaaaaagttaggtaaagagtcaaaccaaaggggtttccctttggtttttgactctataacaattata

SEQ ID NO: 153031 - DNA, 569 bp, Cannabis sativa
atgttttttaatttccaaataagcggcattagtaagttctctttgatcacgatctgaccagactagctcttggttacgcaagttgttcagattaatatggacgccaggcgaaataccaggagccagggcaattcggttggatccaatgacggtcagggagctcagattcccctaaatgtttgtggctgaggtagaggtttcaggggcagagcacatggtcggggtgatgtttacccgccacaggttgcccaagctgctcaggatgcccagaatcgggaaaacaggtttgcagaaatgcaagcccgaatcaatgaataagatgaagtgattcggcagttaagacagcagggtgctcctgcagtccctgctctagagacaccagtagctcctgcccctgctatgcaagccgaatctgatgctgcaacgaaccggatggaacccctgtatgaaaggttgtgtaagcaggcacctctagttttcctgggagtccccgatgttatgaaagtagagcaatggctaactgtgatcaccaggatattgaatttcatgggcgtcactggaaatgatag

SEQ ID NO: 153032 - DNA, 556 bp, Cannabis sativa
  modified_base (496)..(525): a, c, t, g, unknown or other
ggtggtagcttggtaatgacccaagtattgtttttttcaagggcggttgtttctttatccatggcaagaagccaatgtcgaaattgagctgcttcagcgtagcttttaggttccaacttcagaataggctgcaagtacagctgctcgaaattgaggatgtaacttgatatatgataggaaaggctcgattggatgtgatgtagacgaagcatgacaaacgtagtcattgagatgcttaggtttgtgcaaaattctgccagttttggtggtttttggaggtgttggagctgctgtgatgacagcttgtttgtgagaaccagtagtggtggcttcggatgtagaagctggagttatggatgctggtgttctgttagtttgcaagggaattttgggaattgcttcagtaggagaagttgtgtgtttagttggggaattgatggtaggtactggtgcttcgatgctaccagtagctgaaatgtgttggaaattattttannnnnnnnnnnnnnnnnnnnnnnnnnnnnnttattaacatcctaaataagaactttctaaa

SEQ ID NO: 153033 - DNA, 581 bp, Cannabis sativa
  modified_base (252)..(260): a, c, t, g, unknown or other
  modified_base (391)..(395): a, c, t, g, unknown or other
atgcccctagctcaccaacggagtcttagcatgtcataatataaattctcatatattaaattatataataatataatttctcaattatcataattatctagttagggttttgctaatccatttcttaattctacggtattacagtgtttgtacctatataaagtgtattcctaccatcctttgattaatgagaaaccattttataataattcacttctttaacacaaaagtgttggaacttattttaccagnnnnnnnnnttactaacatgtatgtttaattaacaccctaaatataaattctctaatacgatgaaattaaacacataagagtttagaaaactttacattgatgacagtggaataatatgactccttccgctcaaatctcnnnnncttgttcctttctgttgcagagtaataacaaaatctgagcctggatctttttctctctttcagtttcgttaaccacaatcttgaacactatgattgagtacttgacttgctatgtgtgggcatagtactttatcactaaggctcaaatatgatgaagaacatcaagaaggtttgaaatcactatga

SEQ ID NO: 153034 - DNA, 702 bp, Cannabis sativa
ccaacactgcagacagaagagtcatatagcaaagttaatcttgaggtggatcagtcacattgcacagataaaggttcagatgcagatgagaaccaagctcgagaggatgataatcaatctcatgaaactcaaggagaccttgatgactatctcttggccagtgatagggtaagaagagacatcagaccaccttcaaagcttggttatgtagatttctctgcatttgcactagctgctgctagtgaacttgaaaattctgaacccactacatacaaggaggcactgaaatgcagaaacagggaacactggttgagggcaatcaatgaagagaaagtgtcattgatcaagaacaaaacatggtctgttgtaaacagaccaccagggcagagattgattgatagcaagtggctgttcagacagaaagatggggttaatgaagattcagtaaggttcaaggcaaggcttgtggcaaagggatttactcagagagaaggtgtggattttaatgatatatttgcacttgtggtgaagaaagcttctattagagccattatggcaaaagctgctgctcaagatctagaaatagatcaaatggatgtgagggcagctttcttacatggcaccttggatgagaaaatctacatgaagcaacctgagggatttgacaatggtaatcctaaccaggtatgcttgctacacaaa

SEQ ID NO: 153035 - DNA, 701 bp, Cannabis sativa
tataaaatatggacatatacatgaaactttgattacataataaatgtatatcatttaaatagaaattgtgtttgtacactcccatcatcatgttttttatattcaaatagttttaattctagtttttttatgatggtgtatatagtatttattaagaaattttataaatttattaagctgagtaaatttttatttatttatttttaaaaaaaatatatacatatgtttgattaactctacacgtttttggtaatttggtctaaaaaattaccaactttcttgcaaatatatttaattttaggggctttggcttcgtagcttaaaaattattttttgttttaaggttgtttggccaaattttttaaaaaatagttttttaaaaattgaattttaaaaaaactagacaaaatacattaaaatgttgttttttattttcaaaaataattttttttgtctaatatattatagtttatatttttgctcacatagtcggaccttggactcggaccccggactcggaccctaacctcgaccctgatcccgactcaaacctcaactccagactcaaacccaaatctagacttggggctaggtccgaggtcttaggctgggtttagggtcgggttcgggtcttggtccgagtttgggcccaaggtccagggtttggatccaggtccgggacagggtttgggtctaaatcg

SEQ ID NO: 153036 - DNA, 1035 bp, Cannabis sativa
aaaaaaaaaaaaaaagaagtagattgtgatgaaactgaatcatggattggagggcatacataattccaccgaagaaatgtccaattggagttttggtaaatgagcagtggcacacatgtgatgctgtaggtttggtgtcagtgtcagtgtcattgacttggtgcccaaatataatgggctttacttaataatactataggacgccacacgtgcactctgaagcacccattcgtgtgaaccaaaccaaagaccctaaacctacctactcacccacctacctataatctatacttatatagcaaagcaatgcatcactttggaaagcgtacgtgcatatctctcccctcttaaattcatcacacacctcagaactcacacgtgtgtttcagatctcgtgttttgttatctgaccaaccatcgcagtttgactttggactttctatttctctctctctcttaattttacagtttttgatcttcaatagattctatatatccttcctattcattaatgtcttttcttttgtcttttttcactttcaatttgaagctacttaaggaactctgatcatgcagcgaataattaatataagaaatctcagcttgtaaggtttttcaacataaaacgccttcattcaccataataattagtagttgttaattgcgttgatctacttagtaatttgtagctccgcatgcatcatctgcgtgtattaagtatttaaatactcgaattattatttttctgcaacccacataaatagatttaaaactaataagaatttttattctttgaattttgacatgtactaaattatgtctccttaacttttaacgtttttaaaaatgcaccatcaactattgagattattagatttaagaatatttttccaattttagtaaaaacgcctagatgaaagttcaagggcatgatttagtacgtgtcaaagttcgagggacatgacttagtaggtatcaaagtctagggaggcatgatttagtatataaacaatcactgaaatagtaaaattgaat

SEQ ID NO: 153037 - DNA, 805 bp, Cannabis sativa
ccaaactcgacccaaacgtgtacgccgtgacatgaaacttgaaccaaactagaagccgattgggacccatgaacaggaccaggaccagtacctggacccagacccaaaactttaaccggaccaggacccagactcggacacagacccaccttgggattggggtccaaaacctgaatcaaaacccgaaccgagactcgggacccaaacccagacctgaattcaaagctgaacattgaacatgactcgggacctagaattgggatcgagaccccgaactggacactagtctcagtcccggacctagacccagacccagatcgagacctgggacataagccgaaactagactgggacccgtggttgggatccaaatcttgtcccgggatctgagaaccggggcttgggcaagacgcatagtcgatttctttatttgggactcggacaaggacccaaagctggaccacgacctggacccagacccagacttgtgacccgaaactgaaacttgaacaagaacgtgaccaggaccttggaacaggaccgcgaccgtgaccaagacctggacctggaccgggactcggaactagaccagaacccagcctctgaactcgggctcgaaccttgtcccggacccagactaggatttagactagaacctgaacccgaaactgaactcaggactcgatcccaaaccaagacctagcccctgacctaaactgggatttagacttggacatggacacaaagccagacctggacccgaaaacggacccagacccaaaccgggatcgaaacacgagaccta

SEQ ID NO: 153038 - DNA, 661 bp, Cannabis sativa
ccccggatcctggcctgatcgagatccaaactttgactcggatcccgaaaccagactcagaccccagcccaggttcggatcttggtccggggctgggtctgggtccgagtttgagtccaggtctgggttttgggtctgtgggtttaagttcgagttcgggtctaggtccagggttggatgggttcatatcatggtatgtataaaatattaatttttttagtaaagaaaatttagaaataattttaaaaaacttgagtcaaatattattaaatttttaaaatgataataaactgttttcagtccttaattttgaaaatacaattttaaaaattaaaaagtaaaaacaaaatcaaacaggttttttaaaactaccaaccaatcaaaaattttcgtgtggactcatcttttaaatttttaaaaacataaaacttttttgaattttaaactaatcaagcctttatatatatatgtacagtttgataatggatatatatgtggtggatttttaaataaatttaattttgtaggtgaaaaaaatgacaaaattagttgtaaatcacaaaaagataattgagaaggatgagtagggaaccgaatatagtttctttgtacttggagaatgacacatcccatttacgataaatggaaacatgttactttt

SEQ ID NO: 153039 - DNA, 526 bp, Cannabis sativa
aagctcattatttaaaaaaaaatgtatttttatttaatcatttattttaattatattttaaaaatgaaaattataaatttaaagttggtccgaatttaattgaaaattatttttgaactttaatttaattttcaatatttaattttttcgaaaattatatatcaatatataaacttcgaataaataaataaataaaattaaaatataataaaataaaatttgaaaattatttaattcaagttgatctaaaataactaaatttcaaacttaaattattttcaaacaaaatttaatgaaataaaaaattaagttactaaccacctaatttgaaaaatattccattttaagctgatccaaaattaacaaactttcaacttaaaacaatattccaagaatctttcaatagctaattccaagaattcctcaaaccaattatgaatttcaaaaatattcaaattcaagttgattcacaaaattagttataaataactaatttacaacttaaataaaaatatttaattaaata

SEQ ID NO: 153040 - DNA, 881 bp, Cannabis sativa
  modified_base (254)..(255): a, c, t, g, unknown or other
  modified_base (826)..(841): a, c, t, g, unknown or other
aaattatttaagatgtgtttgttttgtactttcacatgtctttcttactcactgaatgtatgataatttatgaatgtgtatgaatttatagtgaatcatgttgtaaactattattaatgttgtagtataattttgaatcttcattgttggtctaacttaatttgttatttttaatgggacaaatcccaaaggattaccatccgttagacaaatacaatagtgttagatctcgacagataagtatttgtaaatgnnacatctagttgtacatccaaagatgacaacttaagagtagtctttacaatatgaaacaatgaagaattattaaataagaatgactttgactctcgcctaaaccagacatcgttaaattcttattttaatcaaaattattctttagttttttcctcttagctttttcattaagaaattgcttagaaagtatataattggatagattgtttgtaaatcatatgtgtatgatgtcattctattttctcatataaaattgaatagagcagatgactatattccaaatattctatcccaaaatgatataaatccttaatcttaagaatctcctacttgtatatgtttactgtaggcaactcagacttagaattagattagtagtgctggtccaagctagaatagtcactccgttgtatagtttgtataaatttatgtctttgactttcaattttagatttcaaatagaattttttttccaagaatgcattggacaatacaatatgactttcccaagttgttaactaaggcttagatgtttaatagctattgtaaagtgattaggggtggaccatcnnnnnnnnnnnnnnnnaagaaagtgtttgtttcaacaaacactacttttctaagaa

SEQ ID NO: 153041 - DNA, 819 bp, Cannabis sativa
ggtgactgaggagatccttaacaacaaaaaaaaagtcgtggttgtttctggtctaatgagagtaaaataggagagagagacaagacaaattataaaatatggtattcccaagttttattataaaaatatggcataatttaaagggtgaataggggcataagtaccttaagtagccaatgtttataaaactgtaatttaaagggtgaataggggcataatttaaagggtgaataggggcataatttaaagggtgaataggggcataagtagccaatgtttataaaactgtaattttttctctaattccgtcgatacaaactctgttattttcttaaacaaaccacatataaggtccagattcttcatcattcggtctagacataaattagcatattaattaagagacagaaaaaaaactggaaatagagagatctaataacccactgtaatacataaatatgttcattctataagatctaataatccactttatttctgcgtgttgagactagcttgaaagatcaaggtatggatttttcaatcaagctcttggattggatgtttgattgttatacgaaaagaaacagggataccctgaaaggcatcaagagataattgaatttttttagtagttagatttaatttatatacattatgttgagattattgagcttatagttcatattagataaaaattattttatcaaaattctgttttcgcttttataactctagtatggaccataaaaaccaataataaaaagctctcactaggattgtgtttctaggtcaattgaatcaacaattccctatttgtga

SEQ ID NO: 153042 - DNA, 666 bp, Cannabis sativa
gaaccagttgacaatgttcaacactataggtcaatcgttggagctttgcaatatttgaccataaccagacccgagttgtcctatagtgttaacaaggtttgccaatacatgcagaaccctttaacaactcactggaatgctgtgaagaggatcctcaggtacataaagggcactcaacacttcggtttacacctgcagaaaccttcttctcttgacattgtagggttctgtgatgccgattgggcatcagatcctgatgatagaagatctacatcaggacacactgtgttttttggagacaatcttgttgcctggtcttgcaaaaaacagcacaccgtttcgaggtcaagcacagaggccgaatatagaagcttggctaatatcactgctgaaatatcatggattcactccctgttttcagaattgagtattcatctatctaggcctcctgtgatttggtgtgacaaccttagcacggttttattgaccttaaaccctgttctacatgctaggacaaagcacataaagccggatctttattttgtaagagaaaaagtgcagcaaggatttatagaagtaaagcatgtcccagcaatagaccagctcgcagatggattaatcaaggctatttcaagcacacgttttgctgattttcgaaccaaactc

SEQ ID NO: 153043 - DNA, 515 bp, Cannabis sativa
agtaaaaacagttttatagataatgtttttgaaaaatatttttactttttcaattttaaaaacagaaaactgattaaaaaagtattaccaaacgtcacttaaatatttaaaaatttgtgtttataatttatgtaaattgaattgtaaagaagtttgaccgcaaagagtgatgtttttagagcatctccaatgtgggcaatcttttaaattaccataaaattctatatcatctcaaaatataatattttattttatctcttatccacattatttttgactactttactactaaaaatgctccaatgctaagcaattctaaaatttaccaccatgatccacacactattatttaatattaacttatatttttattattagtttatttcaaatattatattttttattatttttttttttgaaaaaaaaacacataaatcgttgttcttgtgcaaccaccccaactgccataaaatttatctccaatgcataagctactttagagagtagttcaccac

SEQ ID NO: 153044 - DNA, 526 bp, Cannabis sativa
  modified_base (32)..(60): a, c, t, g, unknown or other
  modified_base (370)..(371): a, c, t, g, unknown or other
tttagaaagttcttatttaggatgttaataannnnnnnnnnnnnnnnnnnnnnnnnnnnngtaaaataaattccaacattgatgacatgacatctcggaggaataaagtaataattacagctgtcttttcgaaaccctcgacaaaaaaaccaaaagtcaccatcctgtggcaacaactcgcctgcctctctaatagttccctaatgacatggctatcagtcgcaaaactaggggcatgtgttatagtgcaaatttgttgcctagaaactcgagatcagtctcctatgaaattgacacatggatctaatccccaaggaatggatgagctgttaattaatgactcttcgagagttgacctcgcttgagccannactcacgagatgatgcggccttgatagagttaagttgcatactatgcctcgcatagaataagataagcaggaccaagagggatttatacaagttgtgcatataccaagacatatgcaaggactaggtagccttctcttgcgactaagtaaagatc

SEQ ID NO: 153045 - DNA, 1185 bp, Cannabis sativa
ggtggcaggaaaaatcctgcaacatacatctcctcgtactccttgcagatccatttgcatctcaaaatacttaaggtgtgatagcggatcttccttaccagtatactcttccaagttggtatcttaaacttgtggggcaattctaggatattgatctcaagggagaaaggggttccacgtgctcgatccaactcgagatcgttgttcctctgactggccatgccttggaacatactctttagttcatctagctgtgcctgcacgactagactaacccgttcggcattttagccgatttgagtcacaccagcatctttctgagcgggattttgaacacgggtcccgggttgtacgatcgacatgtcaagctgatcgtctactcctctcctcatgtttagatcgtttctgagatcatgggtcatccccaacctctcaaatacaaaaacgcctggttgtctcagtgattggttggtttggcttatgtgctgactggtactgttagcctggttggaattgttggttatgacttctcccgatgaattactagacaagctctgcccacctaccacttggcccacatgtggaacctgtaaacggggatttggtggttgaccatttatagtctgagaggtatttatcgctggatcttcgtctgtttcacccaagaggttgacattcgcgggttactcctcgacagtttgataggcttttcgtatcaacacactggcttgccgactacgattgtcaatgactgcttgctgagcccttaacgcttccatctctttgtctctccattcgacaaacatgcacctctgctcctcaaacacgaggttcaccgcagcgcggagttcattctgatcatgatgcaaggtgttggtatgaccctgcatgagcccaagagtagcacggaggttttggatctcagtgtcatctccaatggtcgtttgaacattggtggcgggcggaacgactgtgctatgaatgccctagaaggctgctgaactggtattcccagtctcttgcacaccaggcgcaatctcatccacatgagtcctcacaccgtgaccagcagttgatggctgtccaggatttactgctggtggaacccttgtgtttcctaggttttgcagtgtgggatccaccacttgtggatttgctggatccaccacgcccctacgagtttgt

SEQ ID NO: 153046 - DNA, 773 bp, Cannabis sativa
  modified_base (693)..(724): a, c, t, g, unknown or other
ttcagctcctgaaagattgcttcaaacttgtccatccacagaaaactgattctttttagtgagctcgattaagggtgttgaaattttagagaacccttctacaaacaggcggtaataacaagctagacccaagaaacttctaacttctgtaactttttttggtctcgaccaatccctaacagattctatctttctcggatccactttaatcccatctttgctgacaatgtgtccaagaaaggagacctgagatagccaaaactcgcacttcttgaattttgcatacaacttatgttcgagaagccattgtaaaaccatccaaagatgttgttcatgctcctcttctgattgagagtacacaaggatgttttcgataaatacaataacacaaatatcgggaaaatccttgaataccctattcatcagatccataaaagttgcaagagcattggttagtctaaaagacataaccagaaattaataatgtccatacctagtgtggaaagccgtctttggaatctcctcttctcggattctcaattgatgatagcctgatcgaagattaatctttgaaaagaccgtcttcccttgaagttgatcgaagaggtcatcgatcatagataaaggatacttgttcttgactgtcaatttattcaattcccggtagtcgatatgttggaaattattttaccnnnnnnnnnnnnnnnnnnnnnnnnnnnnnnnntaacaccctaaatatgaacttctacaacgattatgaaataaacacatat

SEQ ID NO: 153047 - DNA, 552 bp, Cannabis sativa
aggaagcttgttggcatgggtgtggaagtagtgcaaggaccgtcagattcttgttagtcacgatagtggtcgagagttgatgaccgagatggttcaaatcgtgatagacatggaatgcttcaattgctacatgtgtgtgtcaagagggacgcacatgaagaccaagggggcagaggtcgcaatcgttagaggatggttgtacttggaggtattcgcatgcgagttttatttgatccatatggaagcgccaaggcagttgagtggaatttgttggcttgtaaaagcggtaaagggcataagtcacacaaaggcatcggcagagacacagagttgtggaatgaatgcatcaaagaagccagcagggctaagaagaccgagtgcaagctttgagatggcgctagagtttgagtggaggccagagggctgtgccagcaagacttagttagtcatgttagcctgcgaaggtcaagaagggtgctaaggtttgcatgaaggccagagggctacatcattggaacttagtactttgtgggagccagaagggcgtgatgc

SEQ ID NO: 153048 - DNA, 698 bp, Cannabis sativa
ttatattaaattatatgggaccagatacttagttagaccaatagcgatattgacacataggagggtgctaggcaccactgataccctttagcatttttcattgaaaaaagacttaaaacatcacaaagataaacgagaacctggatcgggaccagtagaacacaaacaggatgacatgctactagagagttccaaagcctttttactcagttttagaattatatgttgtttgtacgaaagaatgcggttattgaatgttaatttgttcagtgaaagaaaaagaaagttaactggtaacaaacaagttgcctagtattgatgttaaatcacaacagcttgtggttatcaactcaagtatcagcataataattacacatcaatttattttggcaaatgattagacataatatgaactgttattttcctcatgttatcagtattaataagcctctcactggggtcatggatggatacatttttctttttacaaattgggccatatgcatgaatgtttgggaccaaagtctatctttttatgtccaatccagtgatccacacattctatataaatatatatttatttcttgacgttttatataaatatgtatatgcataaatatatagtatatagatatatatatatataaatatggaacacttattacccatgaatggttattaaataaatttaactataa

SEQ ID NO: 153049 - DNA, 545 bp, Cannabis sativa
aagttcttatttattaagttttgtgtgagtgattagtattcaaatagtattaatttatgtttaaagtatatttatatatatatatatatgagtctacatagatttttgtactattttttttttgatggttttgatgtttttatggcttatgtgccttttattaggggtgggcattcgatccaatctaatttttttctctcacccgatccaatccaattagtaattggatttaaaaaatcatcatctgatccaatccaattagacctcaaaatccaatccaatccgatccaattactaattggattggatcgatttttcaattggatatccaattacacacttaatttttaatattaacttaaaaatataaagataaatacgtaaaaattaaatatcatcatttatttttaagtttgatactccataaaaatatcattgttacaggcatcatataactaaatgtttgaaataactaaaacaacaacatttccaagtaatgaaatataacaaaatatcatgaaaataaatacatagaacaaccaagt

SEQ ID NO: 153050 - DNA, 675 bp, Cannabis sativa
  modified_base (53)..(80): a, c, t, g, unknown or other
  modified_base (277)..(278): a, c, t, g, unknown or other
  modified_base (528)..(537): a, c, t, g, unknown or other
attcataaacatagaaatgaaattctaagtgtttatgtagcattaactctttnnnnnnnnnnnnnnnnnnnnnnnnnnnnatcaataataaaaacacatacatactatcattaaacatataaatataattggtattggcatacacaaaataaagtaaatgaagctcaattcataaatgcaattcatttttcaaaatagaaaactttattataaaattctccaaaataaaaggaattgtctgcaacaatatgaaaaatagggaataaaaatcccaaannaataattgaaatccaaattgttcttaaactaaaaaaattaattcaaaaataataaaaaacgatttcgagcttcatcttcatcttggactagctccacccatctgtccaaccatccgattcaactcgctaagatagcatccgagttcaagcagctggagctgaaataagaagaaagcaaataaacatggttaataggtccagaattaataatccaagtggataataattctctaaaactcatcagtttatnnnnnnnnnnataccttgtttctttgctagaaatatagggcattggggtatccagtggcccttttcattgcaatagaagcattttccttttggtgtatcaccaggagtagcagcctttttctttttaattgttttcacagcttgaaca

SEQ ID NO: 153051 - DNA, 854 bp, Cannabis sativa
gtaaactagtggctaatggagagactactgctatttgggaggatccatggattccccactataaaggtttttgtccaaaaccaatcaggggaggtgtaaataacctcaaccgagtgtctgatctgattctttccaatggacactggaacgtggataagctgaatgaaagctttgatcatgaaactgttgatgccattttaaaagggggccacccctcaggtcatggctctgacagatggatatggactcaaacaagtaatggaattttctcgtgtaagtctgcttatcttgttcaagcgttggatagagccccccagtgcaaggttgccccgaatctctggaagaagctctggaatagcaaaatcctagaaagacataagatcctgtggtggtgtattctgtctaatgcccttcctacaagatctgtgatcaataaaagataccacattgaggacacaagttgccctctttgtggatcaagggaagaaactatggaacacttattcctttcttgtgacgtggcctttcatctctggcgttcttctccttggggtttttatcccatttgtgatactggaatccgagtttgggattgggtcaagttcatctggggtctaaaccgtagaggagtcctagtagaggatgctttcttgtatgcctccataatcgtggatacaatttggagggtgcggaatgacaaagttcacaataattgccttgttgatgtgaaaaaatgtgttgatgatatatatttttcctatgctcatttacctgcttctttgttacctagtcctacttctcatctcaaggaagcttggtcccctcccccccgggattggattaagctgaattgt

SEQ ID NO: 153052 - DNA, 524 bp, Cannabis sativa
tgatagtagtctcacttttagcacacccaaaaggtgccaaggggtggtggagagctgacactaggatacccccctaaagagcattctgagcttttagccttcttctaggaacatacatgattttggctctgtagacatacggccaaactgtaaaccaaatcacatagtttcgccaatccgattgcaccattatatttgtagacccaaataaatggaaaataccaagtcccgtcccaattcgaacaatattgaagatatttacgaaaatgccactacatacaaactaagcatcagcatgccaccaacatgcaccacaacatgcgccaccacttgaccaccatttggccaacttgtgggcatcacttagcttgtaacatgccatcttagcacgcacgttacactctccctcacttcaacatgtcgatgccctcatcaatggaccgctggcaagtctacccgatctcgactcctaagcttactctaagcttctcctgaatcctaagtctgcacttgtccctctacct

SEQ ID NO: 153053 - DNA, 683 bp, Cannabis sativa
tgacatgtcttattcatgtctaagtaagaattttgagccatttgcactaagatgaacctaaaaattgaaaccctagttaggaatgtcaacttgagtgctgggtaaaaatcctaggcacccgggctgatttctagggtgttgtttcatctcttttcagtttccaggccttggacttggattcttcttgtcttcttggtttggagtactaaaggatggtgagttagaaataatttggccggataaaacacacattttggagttcccagagtcaacatgggctagggctagggatccctccgaagtcgactgctatgactcgggataacttaactctgtaaattttttccatcttaccacgtgtcaaacattgatgtctacgtcaccaaggttagtttttggataaacactatcctttaaattacctaatcaaaactttattatttttattttacctcatacatttgcattacaccatacatcagcttctctatacttttctctacatcatttaaatattgtctttacatatatgtcatttattataagtcaaaaaaaaaataaagaaaaaaataataaaagaatgacatgttagacatttatatgtataatataaaatatatgtatgtgtatataacatacggaataaataaacatatacactatatgaatataaggatcgaaat

SEQ ID NO: 153054 - DNA, 768 bp, Cannabis sativa
  modified_base (63)..(70): a, c, t, g, unknown or other
aatataatatattttagtatatttgttttaattaaatcattaataaaaattacttgatttaannnnnnnnaaaattaattaacaaattaatttacaactttaatctaattttgaaaataaaatttcaaaatatctacctttagataaatgtattttgaaattgtaaaagaaatgactcttaaaataaaataaaatatactctaaaaattattctaatttaagttgatcagaaaattaaaaatttccatattcaatataatattctatttaattaaatttattaaaatagagacaaataattaagtatcttgaataaaattaacttaattattaattctaatttaatatctaagagaaatgttctaatttaagttggtctaaaagtaattaaaaaaattaattttccaattaaatatattttctaatttaattaaatttcttgaaatagaaatcaataattatgtatcttgaataaaatctacttaattattaattataattttaagttctaagaaaaatatcctaatttaaattgatctaattttaataaattaatcttcaacttaaatatattttttaatttagttaaatattagaaaatataaattagttactagaaattactatctagaatcttttctttaaacaaagtgtatttttcttaattaatattaaaataatccaatgaaaaattaattacatttatttaaaaattaattatgttgctaattcaattttgaatttggttaaactagtacaattagccta

SEQ ID NO: 153055 - DNA, 517 bp, Cannabis sativa
  modified_base (47)..(56): a, c, t, g, unknown or other
  modified_base (371)..(389): a, c, t, g, unknown or other
taaccataatattttcaaattaaaaaattagttattttgttaaatannnnnnnnnntataaattataagttagaaaaaatgatagttatgctattttatatcattttacttatcagatatatataaatagtatcacaaatatttaaataacctaaatatttttgtagaaatttaaaaaggcataatttgagatattttgacatataattaggatcattattatttttttattattttattcctaaaataataattacctaaccatatctattttaaaattagtttattttgttattttaattttattaaattataagattagaaaataatattaaaaatatctatatggttattttcaaatcatttatctnnnnnnnnnnnnnnnnnnntttgataaaataattcaaataaagtaaatattttaaattagtttgaattttaaattttgaagagatatttaacgttgtttcaacaactctaaattttcaaaatttagttggttagttaaaataataat

SEQ ID NO: 153056 - DNA, 500 bp, Cannabis sativa
gttaaacataagggggttttgccacaaattgttcttatttttgtgatattttgttactttattagttagtagtgttgttgttttagttattttaaatttttggctgcattaaatttgtaaaaatgatatatttgtgtagtattaaatttaaatgaaggtttatatttagtttttgggtatcttttgttatgttttaagttaatattaaaattaggtgtataattagatatctaattaaaaaattgatccaattcaattagtaattgaattggattttgagatctaattggactggatcggataatgatttttcaaatttaattactaattagtttgggttaaattaagagaaaacgtatgattggatcagatgtccaaccctaatatttggtatgagttttttttaggttgttaaaaatttttctcaaactattgagattgttggattcaataacttataatcaattttgtttaattttactaacgccacgattgtctat

SEQ ID NO: 153057 - DNA, 539 bp, Cannabis sativa
tctaggtcatgagtcgggtattgctgttcataatctttcaactaatgggacgcataggcgattacagatcggcctgcatcagcacacaccccagaccctgtatggatgcttcacaaaaaaccacatacttttctttgtgagaaggcagagctaacattggagctgtaatttacctttatttcagttcctgaaaacttgattcacacttattcgtccatacaaaatgctgattctttttagtgagctcggttatgttgaaattttagaaaacccttatacgaacaaacgataataactagtcagacccaagaaacttctaacttctgtcactggttttggtcttagccaatccctgatggattctatctttcctggatccaccttgatcccatctttgctaacaatgtgcccaaggacacctgagatagccaaaattcacagttcttgaatttagcgtataagttatgttctcgaagccgttgcagaaccatccagagatgttgctcatgctcctcttctgattgagagtgcacaaggat

SEQ ID NO: 153058 - DNA, 557 bp, Cannabis sativa
aaagatgtgcaaagcttgaccggaaaagttaccgccctaagccgattcatttcccgatcaacagacaagtgcatttccttctttaacattttaaagaagtgttagaaattttagtggaccgaaaaatgcgaggaggcattcaaaaaaactaaaagaatatatggtcaaacctccaattttatcaaagccggttcacggagaggacttgttaatgtacttggccgtctccgagaacgctgtcagcgtagccttagtctaggaataagaaaaagtccaacatcctatgtactatgtcagcaagcgtatgatagggactgagatacggtacccattgattgaaaagttagttttctacctcctaatggcatcaagaaagttgagaccctactttcaggctcaccccatcaaggtattaacaaaccatctgctttggtaagtcctagagaagccggaagcatctggaagacttctcaaatgggccatggagttaagccagtttgacatacactacataccacgcacttctataaaaggacaagccctagctaacttcataa

SEQ ID NO: 153059 - DNA, 729 bp, Cannabis sativa
ttttattttaaatttatatttgtacgttttgttttttttttttttgagttgatttatactttctatagcagttgtattcttctctttcttttactttatttttttgtatgggaaggggaaattccctattctaaatattcctactaaattggaatttgaagagccttttgatgatattgttgttgaagtgtgtagactttttttcaattatttatttttttatttcctagttgttttggtattatttttgagttattttgaaatagatttgcatatttatttactcaagactggacatgtaaatataagcgtttacaacattatcattctaattaagtaataacttcttgttattattcaattattaacgatattaaaactattctaaccccaacccagttgaaaatcttttcctaaactgtttttggtcacttccttcgaattctagagtgcattattgatttccaagtcttgcatgggaagttcaaaaacctaatgagatggaattctacatatctgttgctgggaaatttcttaaatttagtgtagaagaattttccttagtcacaagtctagattgccacattgagtttgatatttttcagttcaaataggataagaatatgctagttgaacattatttgaagggtaataaaaaattaccaataattcgattcaagttgcctttactgctaacaaccttaggaataatgatgatcttgcagtcaa

SEQ ID NO: 153060 - DNA, 904 bp, Cannabis sativa
  modified_base (276)..(277): a, c, t, g, unknown or other
  modified_base (486)..(502): a, c, t, g, unknown or other
gtactctatcactatggctcaaatagatgaagaacaatgataaggtgcaaaataactatagaaaggagtctctcatctactaattgacaaagaatgaaaactaaatttaatttggttgaagtagattgttagatgagaatgagagcattatgttccttttatagtatttcaactagggtttaggatttaattatatggattaaaaaagaataaaataatggacaaaaataccttaagtggccgaccacacttgtgggcttcactagttacaatttnnccactttatttcaaccatttattcctctttcaataataccatttctaatttcaatcctataaatgtgaaaactatttttttaataattataattaattattaaataaaattaccacttattttattcattaattagacttaacaaagtctcctagttaacaaataaacctcaaaacctcttttatttacaattaagcccttacttagtnnnnnnnnnnnnnnnnnacatagtctaattttagaattgtatttgattaattaaaaccaattaactgagtttacaagtaggggtgttcataaaatagccgatccaatccaatccgtaaagtgcggatatccgcacttgtgcggattggattggaaaattcaaaatctgcacttgtgcggattagatgttgattaacatgtaaaagtaaccgatccactccaatccacactaatcattatatatataaataacatttcaatgtaaagaaaatagtaatttaaaagtctaatacatgtaatacaattatattataaaacttaataaacaaatatatattctattcttatatatatttttctacgtataatttaaaataaaaaatattttttatacatataattttttttcttcctttgaat

SEQ ID NO: 153061 - DNA, 867 bp, Cannabis sativa
atctaagatcctggtaaaaataaattccaacaggcgggcagttgcgtactggattcgatttgtttttaactttttaggtttctttttcttttttgtttcaaagtgtgttcataccaatttccattcaattatttgtaaatgtttgaatcacagaattctatttttcaattcagaaatattctgttaatttattattttttctgcaatcgtgtaatttttttttcttctctattgttttaaaggttatatttgaataatttgcgtaaaatttttgtgtaaatttatggaattttttgtttctattttaattttttttttaaattataaattataattatgtatctgtattaattttttatttctattttaattgtatttttttataaaatgatctgatttacgtaataaattattaatttttatgtatgtattttttaaattgtatcattaattaaattattattataaatttattgttggaattttatgccctaaataaaactcattttaatctaatctaatttgttatcaataaaagattataagtcatttatgtttagatgttgttttcatgtttatggtttaatgtgtacaaaatctattaagttcaaaacaatatagttattcacaattacatcgatgtcaagacagtggaatgtaattgtgattatatgcttcaaaagataatctctctgattaatcagtgcactggatttacactgatgtgataatcagcaataaagtatacttacaccttggatacgtgttatgttctttccagaacattggcaaagtatgctagtcggatgtatggaatctatagcttctatttggacatagaagtgaaatgatgatttccttcgagct

SEQ ID NO: 153062 - DNA, 530 bp, Cannabis sativa
aaaaaagctaatgttggtgctgatgttcgaaccgaggtttgttttcggtttcatttttgtttcccctattttatacattttcttgtatttccatttcatcgttttggtttcttctagtttgtgaaattttagggttttgattttaaaatgtcgtttggttttctttggttttttaggtctttaattttttttgaccaattttattttgttcttttgtgggcttggcattttcatttgtttcttattaatttcgtttcagttttttttgtgttttaggttctgtttgtgtttgttgtttttttttagatattttgaaacttctgttttcattttagtgtctctaatcagtgggttttagttttctcttagtttgtttatagtttaatctatttatgtgtgatgtgttttgggaattttgttaggtatagttgtttgctgttattttttaggtaacaattcgatttcagatgtttgtagtttatattcgtagagttgtttctgtttgtgagtttgtttttagttttgttata

SEQ ID NO: 153063 - DNA, 1091 bp, Cannabis sativa
tgctaacctcagccctgctatcaaggcttcgtattcgacttcattgttagaagctgtgaattcaaaacgtaggacctcttggagtcgaagtctgttcggagatatcattgctacccaggccccggatccattttcattggaggcaccgtccacaaaaactttccatgccggggtttgtggtgttggcacgtttgcgctagcttctgcttcatggcactctgttatgaattccgctagcgcttgtccttttatggaagtgcacggtatgtactgtagatcaaattggcttaattccatggcccatttgagaagtcttctggacgcctccggcttctgtaggacttgccggagcggatggctagttaataccttaattgggtgagccttaaagtagggtcactttcttaaggctatcaggaggcaaaaaactagtttttcgatcactggatatcgtgtctccgcccctatcatgcgtttgttgacatagtacacagggtgctgagtcttttcctcttcccggactaaggctgcgctaaccgcattcttggagacggccaagtatagtaacaagtcttctctgaggacgggttttgataggattggaggtttagccatgtgttcttttagttttttgaatgcctcctcgcattcgccggtccattcgaattttggcatttcttcaggatgttgaagaagggaatgcacttgtttgtggatcgggagataaactggctcagggtggtgacctttccggttaagctttgtacgtctttgtgcttctttggagagggcatattcaggagggcttgaattttttctgggtttgcctctatcccccgctggttgacaataaatcccagaaactttcctgatttaaccccaaaagtgcacttcttcgggttaagtttcattttgtatctccgaaccacttcaaagcattcctcgaggtcatctgcatcgcttgcacatgcctttgacttgacatacatttcgtccacgtacagctccatgtttcgtcccagaaggcctttaaacatccggttaaccatccgttgatatgttgcaccagcgttttttagtccgaaaggcat

SEQ ID NO: 153064 - DNA, 690 bp, Cannabis sativa
  modified_base (125)..(128): a, c, t, g, unknown or other
gggcagagggctcgtagtacccccaaatgtaattctatatttatagtggagtaataaaagaattaataaattggattattctattgatcagatcgataataattatttattggagcttcaaaatnnnngtccatggtccccgagtcacctctatacaacactgtacaggggaagattttatttgatgaataaattagagtgagaattaatttctatggaaaataaattcttaatggcaaaatagtaatttaagaaattattattttgataattatgaattgtataattaatattatttaactatttagttttattagataaaactatattacttagttaattgtaatattattcttaaataatattaaagagagaaatattttattttagagaaaataatattttattttaatccttgtgaaataagagattaatgaaaattaatcaattattatttattggcaaaataagtaataaattttatttatgataaaattgagaaatcaatttcaaaccttaaaatacggcccacacgtgtgggcctagcccacatgtgtagggtgacatataaaggcccaagttaattttatttgattatattattggataaaataatttaaattaaattaattaattattaaattaaatgtattattagataatgtatttaattaaaaagataataataaa

SEQ ID NO: 153065 - DNA, 740 bp, Cannabis sativa
tgtgtgtccttattaatcgttggccagtaatatccttgcctaatgatctttttagatagactttgctaacccacatgatgcctagagaagccttcatgaatttctctaatgatttcgtttgcttctgcgggaggaaaacactgaagtaggggcattgaataccctcttctttatagtttgccttcgatcattgtgtagcgaggcactgtatacaatagttttcacgcctcattttcgtcatttggaagttgctcgtcgagtaaatagttgataataggcttcatccatgttggagagctatctatcatctcgacctctttaatttcacatatacttggctcgctcagcatttcaaccggaaccggctttagttcatccagatcattctgtgaggccagtgttgctatggcatcggcgttggagttttattctctcaaaatttgctcaattttgaagtaatggaatctttccaagttcttccgaactttctctaaatacttttccattttcaagcttttggtctggtattccccgaggacttggttcacaatcagctgcgaatcactatgacaaatgagatttttgactttcaaggcctctgctatctttaagccggtgatcaaggcttcatattcggccttgttatttgatgtgtcacattggaatctcaaagcatagtgaaacttaaagccttccggtgatattaatattacccctgcacccgaaccctgttcgttgga

SEQ ID NO: 153066 - DNA, 628 bp, Cannabis sativa
tatagttagacattggggatgtcgagattagtcgggaattgaaaatttcccaaaatacccctaagtgccattttatattggttggtgagggaagggcaaaatagtcttttgccaagagtttcttttttcttttaccaagatttattttgagtttatttcagcttatactttagataatttagtagttaataccaaagttattacatttatcatttatttttcataaaaatcaaaagaaaaatcaagaatcaagctctcttctctctcttcactccttctttctctcgagccctaggtgaaccagcagtttagtagagttcctcagctggttttgtgtttagtagttagcctttggtgtttcctttgaaggtaattctctttagcatgtattttccatagttttcttaagctttaagtaattatttattgcatggattgaatattagtattctgagctgtggattatgttttctttagttgagataggtttcatatgttggttttagcatgttttgattgtttgggttggagtttggacaagatttgagatagaactcaaactttggtctataatggtgaaatttgattttgaggttctgcagtagttttgttgcttgggttttgttct

SEQ ID NO: 153067 - DNA, 594 bp, Cannabis sativa
  modified_base (35)..(37): a, c, t, g, unknown or other
tttttgaattaaatgggtattggaaaataatagannnttgaaaatggaacaaaacccctcaaacggcgtcgaatttggtcgccggatgtgggagatatggccgaatcacggaccgggtcgcgccgatccggatttctgtcccacggacccgactgaggaattttgggcgacagggacgaccgaaaaatgacgtgtcgtttgcctctgtcgggcaaaacgacatgtcgttcgctctattggttcagcccagccgaggaaaaatgacaggtcgtttttgaccatgtttggatgtcgttcggggaaaacgacatgtcgtacggacagtgaccccagccccttttcaacgcgaacgacaggtcgttattggaccccttgcgatagtcgttttgtccaaacgacacgtcgtttctgtcaaacgacatgtcgtacggacatataaaaaaaaggagaaaagaaaatgggcgcgtgggggcgcttataggggtgcttttgggccatttttctaccattttcatgttttttaattctctattattttttggtatacacaatactaattgcatgaattttattcatatttggttgataatttta

SEQ ID NO: 153068 - DNA, 615 bp, Cannabis sativa
ttgtgatgcaggactaaaatttatcaataaatgtcgtcaaacatcaacagtgacctttgaatgacactatcattgtaacatatcgcaaacaacattgcaaaacatcgtttattatctagcgcacaaatatccaaggctatatcgcgacacgtcgataaatatcctgaaatatcatccctaacctcggactagaactagtatcgcttgatattgctaaaggcatcactaaacatcattaaaacaccaaaaaaaaaaaaccaagaaacacagaatacattgcagatacagaattaccaaaaaaatagatgtgtagactatacatatcaaactaaatacaactaaacctaacaacaattaataaagaaattacatactcattattttttgtaaggatttgattcttaaatggaaatttcaataatttccttagtgcaaggtcagtgtgtggggagctccgacgagagtgttctggggggtgactgtgtgtgggtgtggtgattgtggcctttctaaaaagagataagagagaaattggtttttaattatagaagggcataattgaattaaaaaattatgggtaaattgcggcataaatacttaatgttttcgatttta

SEQ ID NO: 153069 - DNA, 524 bp, Cannabis sativa
taaggttagttttctttcagatttttgggtgccagtaaagtttaatcaatcaagaatctcataaatattaagttcaaccattacacaagaaccaagctatgacttttacgtattgaaaggatactgacataaagctcttcaccatttttagatacagagctgaaaataacaataataaacatagaactaaatccacaacaatatgaaatcaaaatacaagcataatgattaaaatagtgacaaatactataaccaaagagatacataccattatacattagaacttacaacatatttagcttcatacaatcatttcaaaacaaaaagaacgcattatctgtgacctaaagcagagaaaacccatcaaaatgttggttactagaaaagctagccatgattttgctcacctctctggcaggggcggatgtatatagacctctatagaggccatgaccccccaaagtttctatatcctatattttttcatatatataatatatttttattattatatactatatggt

SEQ ID NO: 153070 - DNA, 612 bp, Cannabis sativa
  modified_base (42)..(51): a, c, t, g, unknown or other
  modified_base (559)..(561): a, c, t, g, unknown or other
ccaaaaactccatgtgctgggtttcttgtgtttggcatgacnnnnnnnnnnaccaaatctcctactcgcagagttctctctttgaccttggaattgaaatagcgagcagttcgctgctgataggccgcattctttaaatgagcatgatcgcaattttcttctaaaagatcgagttgaagaaattggttttttgtattttcactaagagtaaatatatctctccatagggatcctgtcccaaccttgactggcaccatggcttcacacccgtaagagagcgcgaagggggtttcactagtcgtggatcggggagttgtattatacgaccataggacttgtgaaagttcttctggcaacacacctttacgctcttcgagcttacccttgatggtaggcttgattatcttatttactgcttctgtctgaccattaccctgcggatatgcgactactgaaaatgctttcttaatgcccaactcatcgcatagctggcgcatctccttataatcaaattgttttccattgtcagagattaacttgtaaggtatgtcgaacctgnnnatgatggcactgtacacaaactcgcgcaatttagcagtagtgatagtcgca

SEQ ID NO: 153071 - DNA, 554 bp, Cannabis sativa
acaattttattgacatatttattaaaattaacaaaattaattatatatggtattttttaaaaaagtgttatattattttgtgaaaaatgtttatagtttttattttgttaagaatacaatattgtattaaccttgaagttatagagttacatatgggatattattagaacaaatatagaactagaatggatagttctacgtttaattatcacaggtttcttccaagttgagaggaatttttttcaagaaaatttattgtctagcaagtgcatgttaaacaaattcataagctattgtggtattattccttaaatccctaacaactaagattcggttagttggttagtctttaactaactcaactgtcaaatatgacagcaactatattgagtcccttggcctatataaagtggactactcctctcattttataacaagagaacaagtcaaacacaagaagaatgacaagtagagagacacaatacagtagagagagaagttagagtgagaaatggagagagatatctgatagagagagagctgagattgggaaa

SEQ ID NO: 153072 - DNA, 721 bp, Cannabis sativa
tgatatgtctgtgtttcctttcaactctgccattttgctcatgatcatggggacaagggtgttggaactgaatcccatgttgggtgagaaacttagcaaaagacctatactcccctccccaatctgattgaacaatttttattggtaaattgaattgtttttcaacaagctttttaaattctaagaagatgggaaaggcttgggattttaaacttaaagggaaaatccaagtatacttactgaaatcatcaatgaagatgatgtagtacctatgtccttcaagagaagtgatgtgggatggtccccacaagtttgtgtgcagcaactcaagaggctgagatgctctagagttggacaagggatatggctatttatgactttttcccatctgacatgcttcacagaatttaagctcttttaagctagttgaaatattaattttggatagagttttagataagactctaggtgcaggatgacaaagttttagccacgaccacttttggtggtgtgtagactcatgtgatggtgttagattttgtgttcgtcttggctattgctcatgttttggtagaattaaattgtcttagtgtcataaatgctcttaaaattcatttggtggatcattcttatttagggtgtatattagagatgctgaaagagcttatctatgcagtaagatctaaaagaattcaatctataagattgcaattcaagatta

SEQ ID NO: 153073 - DNA, 514 bp, Cannabis sativa
  modified_base (61)..(62): a, c, t, g, unknown or other
acgtgatgactcccacaatgtccgtctaaggcggagtggtggaggaaactctagaaacaannatggtgaccgtggcagaaacagtggaaggacgcctcaacgtagggagtggcaactccgcgatcaacgtggccaaccacgagatggcgatgatcgcccaagaaattgtagttctagggggagaagacaagaccctgaggtcaacagtgactaccatccaaactaccctgacggtcatggagatgatgaagctgaaagtcgggctaacaaccaaccaaatcttgagctggggggttatcaagccagagggccgtatgccctaaataggcaacatcaacatgaaaatccaccccagaggggtaggaatgacaaagtaccacccccggcagatggaaaggctgacaatcagaacgctggaggaaggccaagaactgggttagtttttgaacgggtaggcccccgagggggtagagacctgcgggacgcccttaacagaaatagagacaattgtggt

SEQ ID NO: 153074 - DNA, 530 bp, Cannabis sativa
caatttaaaaaaaaaaaaaatctataaaccggccaaacttttttttttttagtttcaaagtcaaaatcaataaaaatgtaatatataattttatatgtttatatacatatatatatttcattcatatatgtttatatatatttgcacatagaatatataattttattgcataaaaatgtatgtgatattttcttctatacatataatatttttatgcgatatatacgtgcatatataaacatgattgaaatttttcggtctgattgtttaatttttttttattttttataattcgatgtttatttcgaattctatatacattattatattcatatagtattataaatcgatataagcatgtgaaatttttttgaaaaacttaaagatggaaaaaaatttctataaaaacattttcggacccgacttaattttgtgatattaaagttcatattttttcgtgttttcgtgcgtaaaatctatatggatctttttattattggatttagaacattttagatttgaaaacacgc

SEQ ID NO: 153075 - DNA, 886 bp, Cannabis sativa
tattaaaaaaattattaactaataggcaaagcatcaactcatggtaaaagtaaataaacaaatatatttcatggtaatattagatagtaggagtattcgcggtgcagatagtgcaggttataacatttctttcaaaccaaatcatatatgcgatttttgtaattttttaaattgtaactgcactgcaagattttaaaatcacaaaaatcacattgcaaaaatatgtggtatagtattgtgctatttgagcgatttatactatcatcattatcaaatattatgatgaaaatttaaaaattaaagtaataaaattttaacaataccaaaaaaaatcttattaaaacttgaacattataacaaatatactattcatcaagttattttattaaatcgtctctaaaaataatataatatacacatatatattatatatatttatttatgaaaaaataaaaatcatattataaaaataggtaactttgtaatatacaatgcggtgcaattttaactgtaattattaaattcaaatctgtagattgcaccacattgcgcagtttggtaaaaatacaaatagaaatcgcaccgcaaaagattttaaatcgtattttttacgcaatgcgagcgatttctgtgagatggacagtttaataaatatttttattagataaaaaaatattgaaaaatactagtggtatctagtattattttacgtatcaatattattattggtgaattgataaagattatcaatgctttgttaaatattactaatgtctacttgtaataagagtacatttctttttgaataattatcttttttaccccctgtacttatgacactatactattatgccccttaatctattcagcttgttataaatagtcc

SEQ ID NO: 153076 - DNA, 1149 bp, Cannabis sativa
  modified_base (462)..(468): a, c, t, g, unknown or other
  modified_base (1099)..(1122): a, c, t, g, unknown or other
cataggaagacatgcacgcaaaaaggtcatctcgccatcagaaactgcggttgtcagataggatgttatgtttccagagtaaaagcgacgaggtttgcattatcaaccttggaaagaaatatgacgaactctagctcgctatcaagattgcctctactatattcccaaggagacattccaaaataatacggtttacaacatacttaatacacgtttattttgacttagtaaaagctagatattcacagttgtgtgatattcaataataaccgaatttatttaacatgatatgtaattagatcccatgattttaggggataatcgttgtaaaaatatgagtcaaccctaaaatttactgcctactatgtgattataaatagaggcaagttagactaaaaacgggatgaaaaaatcataaataaaaaggtcatgaacagccatcaaaaatctaataagattgannnnnnnactatgcagaattttaactgcaaaaccacgtaaaaaatcctttgtgtctaaactttttccattattatttttatttttctgtgtgagattatcactgttaggctcaaattttggttaacgaaagtcagcattaacacttacccttctagtaatcctgttttaggggagtagggtttcataatctgttggtggcgtgcctaattgttagggcgatataaacacagtgtatattagaagattttccattgaaataaaatacaaatatagcacaaaaccttgttttggcatcataaattatggaaaagaacacaagtgtgactgtagagaaacgcttaatatatgtgactacagagatctagagaaaatgcttgttatagctacagcatatgaaaaagaaacacttaaatacttttagctacaacatggtctgcagaaaattattgtatttctattgtaactttggactatatgatgaagttgattgtcaaagctagagtgcttggtttgtgaacaaattataggtgtgttctgcttgtttaagagcagttggttgtttaactaattgcttctaatgttggacagatcataggtgtacattcaccaaggcagttagtgttggaaattattttannnnnnnnnnnnnnnnnnnnnnnngtatgttgattaacaccctaagtatga

SEQ ID NO: 153077 - DNA, 583 bp, Cannabis sativa
ctaaacactaaacccaaaaccataaacccaaaaccctaacctggacatgggcctagacccatacccatattgagatcgaaacccaagacccagacccaaaacctgaatatggacccgaacctagaccaaaactcatgacctgaacccgtatccaaacacagaccagaacctggttcgagacctagaccttgactgggacccgaataaggaccccgacccggacccgaatagggacctggactcagaccgcgacccggacccaaacccaaacctgaacccgtattgggacctagactcagaaccaaactcgggatccaaacccgaacctgaacttggacctacatcgagacctaggatccaaacctagatgggggacctgggccccaaacccaaacctagacccagaactggacgaaggattcagacctagataggagacttggacccaaaactgggccttggaacaaggactaagacccaaaactcgagcctagactcgagacataggacccgaccctggacccagaacccaggacctgactacggggacacaacctaaacccggacccaaacccaaacccaa

SEQ ID NO: 153078 - DNA, 606 bp, Cannabis sativa
accataatgaccaatcaaagtcctccacatgtgagtcttacttctcttctacctcagtgacatcaaacataaaaaaactcatattattgaacatgttttattgaataaattggagttcaaaataacaaatatatatatatatatgcttttaaaaatacaaaataccatttaagcattataaatagcgcaaaaatacaaaatttgtattttgataaaagacaaaatacctgatatcgattattcactatataaaagcacacattagaacgattagcttctttttagttatggtaaattgcctatttatacttgaatacaattaatacaaattcttagaagtcatttagaaagggactaaaccacaacattttattaaattgaaacatgtctcattagtctacagattcaattttgttatgacgtctagcttaattccagagcagccactaaaagaaaaagttaagaactgacctttgacataaaccacatagctgaccgagctgctattcattctcgctcagcatcttcaatttcttcatcctccggtactccacgaagataaagaacattgttacatctgttgtaaaaagtaaaaaggaaatgtaa

SEQ ID NO: 153079 - DNA, 650 bp, Cannabis sativa
ctcacaagctaaaacgttggaaaactgagcaattatttgttttttcttttattattatacttctagaatttagagaatgaaaattgacatcattccaaaaaaatgtttgatttagacaagtattgtagggatacttttgttggcatttttttttttttgttggggtcaagggtttgaaccccattattacaatcctgttagaaggaattatttagcttcttggaaggctaacttgttatgcggtgatgtcatcctcaatagaataagatgagaattttgaaggcacataatcgacgacccactcgagagaaagtgagatatgagtcccctataggcgacatgtggtctaaggaattgtctaaagaccgaagaggtgaaatcatctccagcgattgcaccattttaatgtacatttttcaccaatttgatgtagaatatattatttttggtacaacttcaattattcaacaagaggcggaagggaggggaccttatggggccatttgctcccttaaattttttcaaattaattttgtatgcataattttttagctaattataatttttactctataaattttgacatgtacaaaattatgctcctgaacttttaaggccattaaaaaaccccatgaactattgagattgtt

SEQ ID NO: 153080 - DNA, 507 bp, Cannabis sativa
actgttgactcttctaggtgcttgaaatacaaatagtgatcaaacttggaccttgtaaaaccaatctcctgaacatagctgtcaaatcatttgttccatttgatggcttaaggccgtatagggacttttccaacttacaaaccatctcctttccatcttgttccacctaaaatccaggtggttgctccatgtatatctcttcttctagataaccatttagaaatgcagatttaacatcaagctgctccacttctaaaccttgttgagttgccattgacaacataagtttaatggtcttatacttcaccacaggtgagaacaccttggtgtaatatatcccttccacctgagtaaaacctttggcaactaattttgccttaaaccttactggctcatcctctgtcacaccttctttagatcaccttcttctcctcaggtcttggaaccaatacccatttcttgttctttctaagtgagcttaattcatcatccacagcccgagaccac

SEQ ID NO: 153081 - DNA, 655 bp, Cannabis sativa
aattattaaaagataaataactacttataaatctataagtatataactaattgggtaagatattaatcaatcacccataaaataaataatatttcttagacaatagaaagtaaaaagaataaaagtactatttataacctacatggataacacttaaaatgtctctaaacaatgtgagacttttagcttgtatgtgtagtttatttttcaaataaaataagagaatgtgtcacaaaataaaaaaataggaagagaaaaaaagtaaaatgccacctaaactctttttgtacattcctttatatatttatattaatatatatatatatatattaataaatgcattgcataaaatatctatcatagtataataaaataaaaaatattctaatgaaataagaaatagctatataaaattagaggccaacaacaagaagtgtgaagcctacttagattcctgtataatatggaatctcaaacttgatgcatataggagtctttctctcgagaacactttcgtctgctgttatggctaaaagtcgaaactctaccctcaacattgtaacgccctaatgctaaggcacgctacggtgctttttcaattaccgtgcagtctttgctaatcaaagaattttcttaaaaaacgtgtcaaattaaa

SEQ ID NO: 153082 - DNA, 730 bp, Cannabis sativa
tccgagatccaagtccccgatccgagtctcgggtccgagtcctgggtcgagttctggatctcgagtctgggtttgggtcccgtcttcgggtcccgggttcgagtcccaatttaggtctgggtcccgggttcgagttcgggattcgggtcctaggtccggattcgggtttcgagtctggattcgggtcggagaattagtgttgacccagaatcttttataaatattataatacaaattaatacagaccatttgttaagtattaaataatacaacatacattgtattaaaaattttgattgtattaaaaattttggttattaaaaattttggttgtaataaattttggttgtaataattaatacaatacattgttttatctaaacataatgttatttattatttaatacaatacgactcttatacgacgtactaaacgagtccttagtgtgatatttaatattaaattattagtattgttacataaaaaatatacaccaaacaaatacaattgttagaaatggtctaacaaattcattaatcaaagattcaccataatggagaaagttgcttttaattattatatttaaaaaatggattaatctattttaggtttgagacgaccatcgttatattgtcgtttggattgtaaattacgatctatataatatttcttcttattattttttttagggatattggcggctaaaccacctaaactttacggtttgta

SEQ ID NO: 153083 - DNA, 791 bp, Cannabis sativa
taattatcatatcataatttttttaatttaaaaaaaaattaatttaagatattagtaaaatttgaagcttgaaaattggtaaaaaaactaatttttgcttaattaattatcttattttttaaaatttgattattttatcctatttttaaaatataaggtaagatatttatatattttttttaataaaatgactttatttgaaatttaaaataagattattttaatcatgaaattttaaatagaaataagatattttgctaaattttaacttttgttatttttttatttaaattaaattgtaaaatcagaaaaaggatattgtattatcattttattttactgaatatttaattttttaaataacatgaaatttaaaaagttgttagcattttttttcttttgaaaaagctgttcgggttagttgaaacctaatttttgaaatttataggtttaattttaatttttttttaatttatttatttaatttatattacgagctcatgaacgaaaattgattgcaatgccgtcccccggattcgcaaacttttgtaagaggaaaagaattaaggatgaagcttctaacaatgctgcttctttaagtacaattgaaggtaatacttttgtttttgaatgatgtgttttagagaatgacaaatccttctggattgttgattctggaatcactaaccatgtttgttcttcattgcagctgcttgaaacttgggattatctgaatccagaggagttgaagctcaaagttggaaatggcgagttagtatcggtccaagcta

SEQ ID NO: 153084 - DNA, 761 bp, Cannabis sativa
agagaacattaatattcctctcattggtgaaaatgccttgtttgtgttgactgaagagactcctgagcagccaggtgagaatgcgactaaggcagtcaaggaaaagttcgagcggttgtaaaatgctaacaacaaagctcgttactttatgctgtctagcatggtcgacatctttaaaataaggttttccaatactgtcacggctgcagatatcatgaaccagttgactgaattgtttgggatggcatcaattcaagatcgttttgaggcgaccaaaaattttatcaatgcacagatgaaacctcatcagaacgtgcgtgatcacctactccagatgactagttatttccaagaggttgagaatcatggagctgttatagatcagacaactcaagtgagtttgatcttgaatagtttgactccagcttttctgccctttacttcaaattatgtaatgaacaagttggagcttgacttccacgagttaatcaacaaccttcaaacatttaaaaatttaattggaggaactaaagctcctagttctggcactgctaatggtatggccaaggctgaggcaaacattgcctctactttgaaacccatcaaaaagaagaattggaagaataacaagaagcctcttaaagctattaaaacggataataagaataaggctgctaatcccaatgcaaagcaaaaaggaaagtgcttctattgcaacgaaaagggccactagaaatcccagtgtcctaagtttttggcaa

SEQ ID NO: 153085 - DNA, 589 bp, Cannabis sativa
attgttacagctcggagagctcgacacctcagtaggttcttcagaaagatcatcaaattccacctttgactcaaggtccctctccctagagtcccaagggaagtccctaacaacatccggatgacgtctaacgattttgttaggacgggtgcatagagaagcggagccctcaaattttctcttcttaaaaggggtggtacgctcattagtttccgacgttggcttcactccaatgtctccaccaatttttttaatttcatacaagtccaacttcccaaaatgcttaaggtcataaagtaactcttcttggactttaagaaaatgagttaaagccctttcctcatcaccttgatgctcggtcccacttgcaacattcacgtgggctatattctcctccaccagatcacattcaatcccacaaggcccaccaataacctcacctctctccttgccctttaatacatttaactcaatcggcctctttaaagccttagacccaacaacccatttaaatttatatgtatgtgtctatgtgaataagaataatttttttagtgtttttatcataaaataaataaaatacactaac

SEQ ID NO: 153086 - DNA, 580 bp, Cannabis sativa
ttagaataacgatactttgagaaattttatgcaactagaattgtttagtgtaatccttaaggtgaaatctgctagctttacaacttagaaataatctaggtcatctttggacgatttagtcttttagctatcctgttaaatagtcatttcacttagtcccccttgtttgagccgatttgcctattctttcttaacaattatcaatgattgtatccccttacccatgattcattttatcctgcagtcactgaacctaacctctaaaattcatcaaggagagttatggttagataagtggattaaccttgggcataatgtggtgagctattcctggttttatttgtatagccacattggagacaatgatgggatttaagtttaaggtgtatagaaatgaactcacaatactatatacataattctctcactatatacatataaacatgcatctgccatatctgtttaataataaaattaaaatatatatatattatcaaagagagagttccttgaaactaagtttaggatgtaccaccctttcttaaagactaatttgtgttaactctctctctctctctct

SEQ ID NO: 153087 - DNA, 686 bp, Cannabis sativa
cacttttctccttaagtacttaagttttgaaaattcaatcataaaagattaattttcacacaactcaaattctcaataattttgatatcaagcatatcaaaatcaaacattaatttaaacaccaaatatgtctaaattacacacttaactttagacatcaaatatgtcaaagttacactttatttaagacaccaagcatgtctcaaatatacacattttagttttagacaccaaacatgtctaaacttctcatattggagtatgaaccccaccattttagatttaatttccttcttgaaattattaccactaaattttgacaccaaatatatcaaaatttcacatatgcacatagcaaaatttaatttagaatattaaattcaaaacaacgtatataatcaataatttcttaacaaatttgattaaactcaaatctcacccccacattttaccataaagtaaaaatgtcatatcactttaaaataaaatctctttattttattttgttctctacacattatctttcaaaataatgtgcactcaaaattatcattaacctttagagatcacatgataatatctcaaataccacttacaaattaatagaattattttatccattatttgtcctttattaacaaaattatacttaaaatttgttaatagataacacaaaattcacataa

SEQ ID NO: 153088 - DNA, 735 bp, Cannabis sativa
tatatttgtaatgtttagctttcatacgatatgtaatttgttttttcttctaacgaactagtttctgaatatttatgagtgttgacgtaaaaatttagacatagatctctgagctacattcgcttgctagattagcgagaataaattatacattaagtatatatatgagacagacataaattttatagtagttccctccctatatcacgacagtaaatgagctacgtctacttcgaattttatttctcatgagatagataacagacaaatagctataagtctaaatgttctaattttttagagagagaaagtagagagagatgctctgaccttatggatacttttccaaataaacttaaaaaatgagttagtagagctctcatttgatagaggaatgaggtcctattaaatgataataaattaatccaaaaatatggaaaaatttattgaggctattttttaccgtagatgatgatctaactgtgaaattgactccagaaatagatcgtcaattttcgaagcttgagtcactttttcaaggctcactttaggtaagctgtagcttaaatttgtaactcccttgggttgaaatttggagacaataaattttgaattgtgattgaagtgtgagctatgacttgatagagcattaaaatagctttgaaacgcaagttgaattccttcaatcagatcattattgagtgagttatggctattttaccaaaagttgttgtc

SEQ ID NO: 153089 - DNA, 770 bp, Cannabis sativa
tttgtatttttacggaattttacagtccctattacaactagcgctgcaaccgtttagaaacacaaaccgtaaatttgaaaaaaaaatattaaaagaatagtatatcttgtaatttcttaatttgtggattggctctaccattgtgtgtgtatggctcaaaatatatatggtgcatttagtaatattttttttaattaatttattattttttaaattagaaaaataaaaatattttttaaaatcatttctatataactattttcacttttttattttttaatcaagaatctaaattgtaaaaacaaaaaaaattacttttaaaatttttttaaacaatgttttttaatcaatattttagactgcgaccccaacttataccttagaaaacggaaccccggatctggtcccagacttggacccaccctgatcccgacctcggagccgctttggactcgacttaaataaaatcaacaaataaaaatgaaaataaaatttacagaagacatttttattttttgtttttaaaattgaaaaacaaaagtagttatagagcacatttctattttttaaaaataaaaattttacttttattttaaaatttttaccccacttaacttttcagttttcatctccggcatcatttcatatagttaatcaaacctcgattaatttacaatctatgaaaacaaaaaacaagggaaattttatttacactctaaaattttctaaaagcactctattttaataattttaatttaatttaaaattta

SEQ ID NO: 153090 - DNA, 592 bp, Cannabis sativa
tctttttattttaagttgtaattagttggttttacaagatatttttatttgcaatccctgtggagacgatcttatttatcactctattacttagttgactacgtatacttgcgtatataattttcacaacactacttcgcaggaagacctttatagtgctcgcatatacaaatcttaaacctgatcttcggtcttgcttcgtgagagctatacgaatgcgactagactctgtcaagatcacattatcccgctgagtctagttcaggcgaggtttacactcaagaggtgtcctgctgacatcttagacctcctcgaggagagtgagtccatgtgtccttttatgggagcctggtctcgagtttctaggtgagaaattcttgttgtaacatgtgcccctagtttcgcgactgacagctatctcatgagggaaactataagcgagaggcatgcgagagttatcacgagatggtgacttttggatgtctaattgagggtctcgaaaagatagctataatcagtatacttaacccatttttggtgccatgtcaccaaaactcttcggagtccatgtaggcgttgttatggataaccg

SEQ ID NO: 153091 - DNA, 717 bp, Cannabis sativa
ctctttcggctgaggcaaaactaggggaagggccagctttttctccctaatttgctggaattaagctaaggattcaagtgttcttggagctaaggtaaccctagaccctttagttgtgtgtttttaagcttttactttggtttcatgttgtgaaattgtgaattgggggttgttagggttaggtgttgatgcaatttgaattctaggtttagtttgagttggttttaggtcctagcagcagctggttttgatgtttgatttaggttttgtgcaagtttgagctttgagttcaaagctttgatctctaatggcatatttatttacactgagttttcctgcgaaatattggctggaatatgttgtctatgcattgtttaggtactctggaaagtttggtggcatttagtggaaaattgaggaagaggtgaagggtttggggtgaactggtgcaaaccggctagctggttttgccagacctctatctggttttggcaggattccccaaacacttcatttcctcgattttcatccactttagtgccgtggttgggtgtttccctaatttcaaagtttgagtaacctatagagagtataacagaacatagggttgtgggtacgggtttccctaaattagggtttttgatcatgtaacttacctggtttcataatgtgattagggcatccatctagcacaagattctccgttcaggtcggcca

SEQ ID NO: 153092 - DNA, 758 bp, Cannabis sativa
  modified_base (732)..(733): a, c, t, g, unknown or other
aaatcacgagaaaagtttctagtgactaagggctgctttgtcacatgtccccgaacttctctactatatcgatgacgtctggcaccgtgtcttaaatcttggcgacgtaattaatactcagcattcatatgtgaactgatgcttgacttccatgtacaactttattttcgaaaagacttatattatggaaacaaaaggcacggaagaagaacgcgtcaagaacgtacgatataagctaagtgacagcagtaaggaggacataactaaatctgtgaacgtaacaaatgaacgagatttggaagaattagaaatgccagactaatttgaaatgacagcagaaatgttggaacttgaactaaaaagcccccctcaaatagaagcagaggaaatagtagaagtaatagagattccttcagatgaagaatccaaagatgaggaaatgctagaagggtccaatgagccagattactctacagtaccaaagagcaaggacttagatctattcacagcgaccaacatcgatgaactagaagatgacatacctgattatcattttgaagtagaaattgatgagtcagactctgaatctaagaacatgccagcaccaattccagcaaatgtagaaatagaaatagacttcgaggaacacccagaagaagacctggaatctgaagtcgagtcatgcgtggaggacgaatagtagtctcttgttgttggaatatgttttaccannatctagatttactatcatgtatgtt

SEQ ID NO: 153093 - DNA, 704 bp, Cannabis sativa
tacatgattatagtaatcttaattgaaatttaaataaggtcaaataattttaaaaaagaatttaatttaaaaatatttaatatatggtttttaaatttaaaaaataagataaaataatcaaatttaaaaatatgatataaaatcaagcaaaaagatagatttttacttgttttcaaattgaaattacacaaatatctaaaattaaatctaaaaaatttaaattaatttatttctgattttggatttgaaaattgaaaaataaaaaacaaaatacaaaactacacaaaaaatcaaaagttaattccatgaaaaagcatgaaaaaattgaaaaattggaaaaaattgcatgtggtacgggcagtatgcattgcatactgcccgtgcacacgagatgggcatcttgaccgcgaaaccccggtgcacgaggctgcatgcagcctctgtggcgcgcaaggggtgattttagacacaaaaacgtgtcagtgcgcgtgttgtccgagggaagcccctcatgcgcgcgcgtgaggtagatgcaccatcctgatatttttctgattttcaaaaaatcataactaattcaaataaaaacgaaattaagttctgtaaaagaggaaattgcttaatgttttccaaactattcaataaaaataatttcaaaaacagattttcaattattttttacgaaacttcacaaacatcaatca

SEQ ID NO: 153094 - DNA, 646 bp, Cannabis sativa
tttttttatttttctctcacacataagatttgttattttttttttttaaaaaaaatagtctaatagttgacaatactaaaaattatcaccatagtcccccatcatattgaattaatgactttctaagtaaaaaataatttttttcttattacaaaaattaacatgtgactattatttatattgggcaacacttcatataaaattggtattgaaaattagaccaaattgtatatgtggcaacacaactctaacgagcacccacatttgagatgctctaattgtagtgcctagaactactacgaggtgataccctataatgagttagcaattttctacggtcattattaaagtaaaatgagtgagcttcaatttacaattgcaccaatagcgatattacatctcacaaaggtgttagaagatgggtgtcctttagcaatttttttccaattaaaaataaaatggacaaaatcgatttcatgcaaaaaaaaaaaaaaaaaatttagaataggatgagtattcctaagcataaaattattgccagtccaaacaaatatctattaccagtcccactcaatcacaaaacttttctattaatttaacattaattaccctaacctacgagcaaaacaaaattaaatatatatat

SEQ ID NO: 153095 - DNA, 760 bp, Cannabis sativa
  modified_base (380)..(385): a, c, t, g, unknown or other
atgcaagtaaacaaatgtaagggaatgattaccttactattgattctcattacttattagtaaacatgccataaaagttaaaaaaaaattaagtacaaaaagagtagaggacattcaatccaattcaatctaagtacaaaaaattaaatatttaattaattacaattagaagttaaaagttaaattctaattggattgtatcgtgattgaatatcaagaaaaacttacaaaaatactgaaatttaggttaacttttacaaaaatactgtcacacgaaaatctttttgaaaatattgtgtttttataaaacaccagtaaaacacaaaacagaacaactcaaaataacagtagaacaacaatgaaaatttaacacagtatannnnnntaagaaacttataaaaaaacacagtaaaaaatactgcctatttttgtaaaaaaatggtaaaagttagtatatcatgtaaattttccaatatcaattctaaaatctaattaagtaccgatccaatccaattacatttatatacattaaaaaattatttatattgatttatataataaaaagtaataaaaaataaaatatatatatattaattatatttttaatagatatttttggttaaatttataacatttagtaattctatgtatttattttaatgatatttatattttattacttggcaattttgttattttagttacttcaaacgtttagttacattacgcttgtaaaaatgatatttttatgaagtattaa

SEQ ID NO: 153096 - DNA, 565 bp, Cannabis sativa
ttttttttttttttatgaaaatcagtgattcaattataaaaaaaagtttgagattggacttttgttcctaacaatatttggtatatcaataataactataccaaccataaactcaaacataataactactaaccataaacactaaaactatattttgtcctccacttctattttgttctcatctatgtcctcactcatatactaaaaaaaataatgtatattctaatcatcaagatcaactacgtaaggctcctgcaaaaaattaaaaacaaagaaaagtattaataataaaaactaataatttatttgataaattataaaaacttaactaattaccattgttggatcaacatcattatcttggtccttcactgttgatgtaaaaaaaaacaagacaaaaattaattcaaatgaaaaaatatatatgaatatacaattgttaaatgatatctactttttgttaggcatcaaccaattttgtgtacatactaatgcttctaatgtagaaggatgaagcctcgattgatgtggactcacgtgtctaccaccagtgctgaatgtagat

SEQ ID NO: 153097 - DNA, 578 bp, Cannabis sativa
  modified_base (318)..(322): a, c, t, g, unknown or other
ggccaaataaacaaatatacatcctaactaaaaaaaattacataaataccacttacacacacctttaacccaggatctatgcttcttaggcaactttcacgcaaccatcgcgcaaccatcgtgcaactacgcagcaatccaacgcaaccgaaacgaaaattcaatcagaaagagaaccaccattaattctggcgacttcacctgagaagacgacctaaatcaatcaaaatagaggctgttttaaattcataaaaaaagtgttgaaaaactactacgaaactaaaattcaacttgaaatccagtttaatttgcataaannnnntgtcctgacttcaatttttagatctataaaaggcagatctcaaaagttgaattggagttcccaaacaatccaactcaagtataatcaaaaaaaaaatacatcaatactatagtaaaatatttatcctgatgtattttgttgttttctaaatttctaatggtgaatttattcatatcaaattataaaaagacatattaaattataaaaatattgttctgatttttaatgtttcacaacagttgcattacagttgcat

SEQ ID NO: 153098 - DNA, 857 bp, Cannabis sativa
cggcaggacaccctgcaaatcacctgctccgcgcgcgtaatggctgtttgcagcctgtctgggatgcatgtgcagccttcctgaacagccactttaaatttgatttttggatgatttttcacccaattttgaattttttaattttcaaactctaatttcaaaaataaaatattatttttaatatatttaaatttaaatgtcaaattcaaaattaaaaatatttaatttttaatagattattgttaatttttgatatttagaggtttaaatttaaaaattgattattttattttaaattatggtcagattttaaaaatttgttaatttttttaatatttatatagtatttaattataagatcagatatttttatattgactatattttaaattaaaagatagcattatccttttaatttgtaattttatattaaaattatcttatatgatatattaaataattaataaatttaaaattaacctagatatttttatagatattataaccataatattttcaaattcaaaaatagattattttgtgaaatatttaattatttttaaattatagttagaaaaataatattttatatcattttacttatcagaaatttataaatgatattttaaatatttaaataaactagatatttttgtagaaatttgaaaaatatttaatttgagatattttgacatataatttagataattattatttgtttattattttatttttaaaataataattgccaaatcatatttattttaaaatttgtttattttgttattttaatttcattaaaatataagattagaaaatgatattgaaaatatctatttagttattttcaaatcatt

SEQ ID NO: 153099 - DNA, 876 bp, Cannabis sativa
tattgttagtcaatcatgcattgtagacaaggttacatgtgctatttagattgggatttaactttcttgtgctcgttatgctttacagttggagtggcaattagtgttggtgtgtcgtgttcgtgttgtgttgtcttaaatttactaaaaagttggtgacacgaacatgacacgtgacacgaaaaaaaaaaaacacagacacgaacacgactcaaataagtttgtgtcgtgtcgaacccacaatatcgtatatcgtgttggcgggttgtaaactaaattattgattttaatgtcatcatgccttgttcgtgttatgttgaattttgaaatttattttagatggcagacacgaacacgacccgtaacataaaaaattgataaaacgcatatacaagtagcaaaattttcatgtcgttgtgtcaaactcgtaaaatctcgagtcgtgttcatgtcaaatctgcgtatcgttacctaaattgctttcctactttacgtctcaacttgtattttccttgtatagatgttttgaagtcattaatgattaatttttatttttaaaaaaaaaacatatattaaataaaaacaaaataataataaagttgtaaaaacttatctacaatatatactcttcccaataaaaaaaaattgtattaaaagcttaatttttttatttttaattattttgaagattaataataatatagttgtttttcttaaaactcttagctattaaaataatttcttatttaaaacttaaataattttaatttttttttttgactaaaaatcaaaagctttattaattaagaattttgttcaaaacaatagaacatacttcagcggaaaaccctccaactgaagcacacaacctgtaga

SEQ ID NO: 153100 - DNA, 967 bp, Cannabis sativa
  modified_base (606)..(609): a, c, t, g, unknown or other
ttaaattataagattaaaaaaatgttatttttaatattttatcttattagatatttatcttaatttttttaatttttgtcgaaataacatgaaattttgaaaagttgtgaatttttttaatagatattttaggattttccaaccataaaattttcaaacttgggatattttattttatttttattaaataaaattaataacatcctaaccatcaaaatatcttattttcaattttgtctatttttgttaaatttattttattaaattataagattagaaatataatattagattatctcaattttcaaattaggatattatattatataatcttattatatatttaattagtttaaattatttttaaatatactaaaaataaaattagttggatatttgaatttcattttaatttttaaaaatttaggagatttgttagattttaaatattttcaaatatttctaacaacctaaatttaaaatctagttaaaatattttttaaataatttaaaattcttaacctactttccaaatatttgttgcatgattcttttgtttgtttatttatttattcaaaaatattttttaaacaaacctattatttnnnngatctaaattgctatgattgacttgttgacatatctaatgatctgatttcaatcatagtacaattgtcaatagatcttataaataaacaggtaaattttgtaatttcttgtgttgaacctaataacatgatagggcccatccaaattatttgacctatgtgagcctatatgtttgtttttggacttagatgtatattactgttgaagaaatttagacaacaccaaaataaataaataataataatatgagcagaagaatatgcgagtactcaacctagagtggcgagtattcgaactgagaacacaaaaatgctagaaataaactggaaatattaagaacacaagggaatatagtggt

SEQ ID NO: 153101 - DNA, 518 bp, Cannabis sativa
  modified_base (55)..(56): a, c, t, g, unknown or other
atgtgaaccatgcaacataaatgttatttataatctttattaactagtaaatctnnttatattgaaatgggttttattttgggcacaaaacccaatagctcaatcttctcaattcgagattctgatgctaacaagagagcttcaatcttagcaagcgagtattcttcaattctagtgttatttgatatgatgaaagtatcatattcaggtggtaaacctttgaagatagcaacaatgtaatcccttgagcttagaacttctccaactgaggcaagcagatccacattttgcttaactttcaatggataatcatttaatgacatacaaccttttcgaagtgtctgtaatttggtttgaagctccaggatcttggaggaaacttgtagagtaaagggtttttcgagagcactccagatttgtctcgttgtgttacacccaaccatgcgtgtaaggaaatgttctgtcattgaagagagaagccaggaaacaaggaactgatcttgaacctcccattcaag

SEQ ID NO: 153102 - DNA, 502 bp, Cannabis sativa
ttttgcattaggtaaagaaaactatatctagagaaatcgtcaatgaaagtgacaaaatactcataacctcctctgtccttcacatttaggagtccacagacatttgaatgcactaacccaagaggttctttggcacgctctccctttgccgagaaagaacgcttagtcatttttccttctaggcaagattcaaaaactggtaattcacccaagacgacattttttaatggaccgtctttggttaacctgtgaagtctgtcataacctatttgacctaatcgtaaatgccatagatatgtttcatcattattatcaatgtcttttcttttatggtttctaggtttagcaacattgaaaagttcgttgttaagcgcgatttgtattttcggtctctaaacataaagcccttgttccatgtaagcaacacataattgaaatccattatgagaaatagtgcaaatagaactcgaaaaattccattgataaaactgtgtctgtaaac

SEQ ID NO: 153103 - DNA, 654 bp, Cannabis sativa
cattttggtgcgtcggcttctggtggtgggggttatggtgcgtcgacttttggtgttgggtgttctggtgcgtcgatggctgtccagcaaagtggtgctgatttccagccgagaggagagaggaacattaatgtccctgatttttgtgatggtcagcagattgttattcctcaaatggtgggtcaaggagtgacgcatgggaatagggatttggttggtggccatgcaagattcgtgggagattgtgtcgtgcatagtaatggagttggtggagaagatattttaggaaataaaggatataatgatgtggcatctgatttggatattgatgaggagagaatgatttttcttgaaactaaaagaaaaagattgagccaagaagtttctggtgggccgaatgggcctttggagaatggtagtgtgattttgggccaagagaagggtgctcaatcaaaaaacgatttaatggcgggctcgttcgatcgggttcgccaatcattatgagtatattgagctggaattgccatgggcttggaaacccatggacttttcaattcctttaagatatgatttatcaaaagaaacccacttttatttttctttgtgaaactttaagcttgaaacctcggttggagttactttcttctcaacttg

SEQ ID NO: 153104 - DNA, 553 bp, Cannabis sativa
  modified_base (389)..(403): a, c, t, g, unknown or other
taatcttgatagcatcttcatcattaaatgttatggtgggttcccctgcctgtggtatttttggctttcttttctcgacgaccagtaccacttcttcttgctcatgctgtaatgttcgggcatacctttctcgggcttttcctgaatctccagctatgtgcggacctctaataatgacttgcaaatgtccatctactggtggtggtagtaaatcttgattgttatctgccctttgattttgatcggtcttaacatatttttgcacgtgcgagttattctttcttatcaaaaattcaatttctcgcttcaaattgtcgcattcgttggtgtcatggccataatctccatgaaaatgacaaaacttggtcatgtctctcttacttacgtcnnnnnnnnnnnnnnngggcttcttgtacagagctaatgactgagtagccatgtagatagtctttaaatcctctgttaggacagagaaagcagcaaacttggtaggattttccctagggttctgttcgattttgctagcaaactttccatttttcccattgccttg

SEQ ID NO: 153105 - DNA, 544 bp, Cannabis sativa
tttccaaatttattgatgagaacatcctcatgaataaggggtcagtatatttttttttaaatgtctttttatgttttttgttttctatttttaactttatttgtgtttttttgttattgttttgagttgtgtgaagaagtactcggatgttgacaacttattatcgccacctacagatttttctttcatcaaaatatcagaaaagatgtggttctaccagcttcattgttgtggtgaatttttgaacgactgtgtaaaaaaccagttttttttatactttttttatgttcatttttttttataagtttgaaatttatttagtttatatctttgttctcaatttgtgtcaaaaccggtttcatgtacatgttttttttttgtttgctttatgttttgtagcatttagatgtggtattctattacttaaggaagaagataaagcaagatgatacaagtcatatgaaattcatacaattatttcttgaaattgggttctaatccttctaagattaattttgataatgtcattcctagatacattatt

SEQ ID NO: 153106 - DNA, 530 bp, Cannabis sativa
ttttttttacttcatgttgatcaattttctttgagtatactcaagcgttggacttttggcagcattctgtgctctctttctttttccgaaaacttctcggttgttgtggtattatactgcaatttaagtgagtgattataatcttcccatttgttcatactaactgtatatacattttgaatcaaatttttttatacatgtacatgtatgtgccttgtatgtattatttttactgagcagtatatacatatctttcgtctcttcccttttttgtaattattaggatgatatggcatatttttaattttaagaaaacattttgttttctttggccacgtgagagcactgaaatgtaatatatatgtatatatatatatttaatagaaaacttttagtatttatacatatataatatatatatatataactgaactaaccatatatacatatatatatatacacatattacttttactgattcatacatagcgaaccatcaaatcagatttttttgatgaaaaatcatgtct

SEQ ID NO: 153107 - DNA, 554 bp, Cannabis sativa
tattttagtaaaattttacgtaaaaggtgtttgtatgagttcatgttttacgttgaaaatattcatgtgagtacatgcaatgtgtttgtgttaatcgaaatgataaattattatatatggtgtggcatgcaagtaaaattggcttatgtgttatgtatttttacgtaggtttctgtatgagtacaaatattcatacttgaatgtattttgaatgtattgttgtgttaatgaatgttaggatcttgttctcaataaggaaattcattgaggtgcttgaagtagaaaaaatgtgttctcaataactgaggtaagaagagtggacatctgtgcatagggtgtatgttaaaacatacaactgtattatgggattgtatttccatgttttattctatggtggattgttgttttatgctaatgttattaatgtatgatagtgataaggcttttgactgtttgtgtgagaataacacttgtaggataggttttttactgctggtgtgagcatagcaatgcatgatatattttttggctgcttgtatgggtttacttgcagg

SEQ ID NO: 153108 - DNA, 682 bp, Cannabis sativa
  modified_base (50)..(50): a, c, t, g, unknown or other
ttttagaagtttatgtttaggatgctaaaaatatacttgttagtaaatcnagatcctggtaaaatatattccagcaggacctacatcggatgtgcattggaccttgccccaaaatcacagatctgacattcgaaacctaaatctatccctaaatctaacaaattctatctttaactgtaaaatcacaaacaaaatctataaaaaactaaaaaaacaaaacacgaactcacctttgacattgtgcccgatttgtctgaggaacctccgtgcaccgtgggttatgggttgggtctcactttggttgtacgtgcatcgagggccgtggatagggtcgattgaggtgcgtcgtgggccgatcggggtgcgtcgtgggtatgtcgtgggtctattggggtgcgccgtgagtatgagcgcgagggaaagagagaaggcaaccctaatttgttttttgaaatgtgaggggtattatggaaaaaataggaattttgacatatatggccaattttaatacatatatgtttagggaaataattttagggtaatatatgcataaaaagtcaaatttccctaacacaatggggctcaacaataaaattaaaaaaaaggctgagatgcaaaatgactctaaatttgaaagctaagttagtaaatattttttaaaaaaaaaaaattaagaaagaat

SEQ ID NO: 153109 - DNA, 716 bp, Cannabis sativa
atcttctggtaataataataaaatacattggaaatcttggaaaaaactttgtcagtctaaatgtgtaggggggttaggttttcgttctttaattcattttaatcaggctatgcttgagaagcaagcttggaaaattttaaaacaacctaactctttgttgtgtcgtgtgcttaaagctagatatttcccaaattcttctatattggaagctgtcccaggtcataacccttcttatgcttggaggagcatcctttggggaagagatttgatggcttcgggtttaatttggaagattggggatggggaaaacattttaaccattgatgatcattggatccccaataagaaatatctttgttataaagatggtattttgcctccttcaactaagctttcttttttcatttcagattctgggtattgggattctactaagcttaggaatcatttttatgagtctgatattcaggatatccttgaagtcccaatcactggtttttctggcaaagatgatattatttggtctagagaaagttctggtcttttcactgttaagtctgcttatcatttggctctctctactcaggatatcccatcctcatcatctgctgtgaattctaggaagttttggaataaaatttggcattctcaagcccctccaaaaattaaacactttatgtggagagttgtgtctcatactattcctgttgcttcca

SEQ ID NO: 153110 - DNA, 554 bp, Cannabis sativa
tcctcatgttgatccattggtgataaccattcttctcgccaataaaaggatcaagagagtattaatacacaatgggagctcggtaaatatcctttacaaggggactttatcgaaaatgggactcgaaaaagccaagctaaggctttgtatggtgaacctttgtgaattcactggagacagcatcgctagccttggcataatcgagctcgcattaacattaggcgaggcacctctatctgctactattatgcaagacttcttagtcgtcgacctgccctcaacttacaacatattgttgtgttgtccagcactgatcagactaggggcaatcagttcgatcaagcacctatccttgaaattacaaacactagaaagcgtgggggtggtacgtggtgaccagatgctggctggggattgctatcgcatagacctgtagcataaaaaagccagtcatcagttgatggccatcttggcagaagaaactgaacaaaaagacaaagatcttgaccattgagttcaagatgaaagagacctgctaaaaccaatcaaagaat

SEQ ID NO: 153111 - DNA, 739 bp, Cannabis sativa
atgtatgtataggcttaaatgtggctacacttgagtttattgtccaagtaagtccaaccaaaaggaaaataaataaataaataaagtaatttatgctgctttacttgctgaacgatcataggggtaggtgattttcgaatatatgctcttattctcttttactgatgtttatttttagacttctattttgctgtatttgttgttttgctcggctctgctctttattttcagtcttttttattctctgcttttgttctttcttaaacttccatctttaatgaatgttgtggcctcttatcccaattaaaatgttataaacaaaaagaaagagaattttacattattcatatcttttgctacattataacatttctactttatcaggagattttatcaaatttatgattgcaggaatttatttttataaatatgctgtcgcatgtcaaaagactcatttgttactgacaatatattgtagaacaaatggctaattattggggtgggtttaaataaatgagtgaaatgggtcttactagaatctcattggtgcagcctgttaattggagtaattagggtttcgtattttcatgcacgggccaaatttgaaccaagagtaactgggttgagtttgggcgtgatgtgataggattttggtgaagggataattacataaagcactatttattgtaaaaaaaaaattatatttttacgttttaagaatttttttttttacattttt

SEQ ID NO: 153112 - DNA, 538 bp, Cannabis sativa
  modified_base (240)..(240): a, c, t, g, unknown or other
cttatcactttattacttgtgtgactacgtatacttgcgtatattaattttcaaaatttgtaaatacattgtcaatgtatagtttgttctttattataggccatttaagggtactatttgggtgtaatcaaatgttcttgtgctaatacaattcctgattcatccaaaaaaaaaattcacaacaagtttttggcgccgttgccggggattgaaactaaaaattgtgtattatcaactatnttgcaatttattttctggtttgaggttctaatttcattttggtgcgctaaatttttctctttcaggtgtaattcagtgcatgaacgagcaagaagaaggccttgaacttgctcctattgaccccaaaattgaatgcactttcagacaaaagagaaaggaacaaaaggctaaaaaagccccgatgggtttgaagttgggggtgctcataataatgccaatcctattgctttggccaatgatagagctcgagcaataagagagtatgcagcccctatgttcaatgagcttaatccaggta

SEQ ID NO: 153113 - DNA, 639 bp, Cannabis sativa
aaggataggaacttagacacgaacccataccacgaccaaacccgaacctggactcaaacctaaaatttgacccgaacttgggacctgcttccggatttgaacttaaacccagaccgggatcgaaactcaggacttagacccggaactaatcaagactcatatcgagatcaaaaactgggactcgaccacgaacctagaccaagacccaggaccctaacccacacccggagcccgatccagacctagaacaatccagaccaacccaaactcaggccaggactcaaacgccgacacgaacacgaaccctgacccaaactcgatcccaaacttgagctcagaatcgcaagtggaactggaagcagactaggactacgaccaggaccaggacaaggaccgagacccaaacccaaaccgcgactaggacccaaacttgaacctagacaaggaccccaacctaaaccaaaactaggacctagacccataatcgagatagggaccagggcaacaaaacaaggagcgggacccaagacctagacttaaaccagaccaagacccgatcgcgatttggaactcaggcccaaacccagacctaggaccgaactcgaacatagccccagaccttaactgagaccgaaactc

SEQ ID NO: 153114 - DNA, 718 bp, Cannabis sativa
tgtgttcggatctgggtctgggttccgagccgcaggtcatggtctgggtcctaggtacagatcttggtccatgttcgggtttgggtccatgtcacagttttgatttcgatttagtgtctgagttcgagtttgggtccgggcctggttggggtctgagtcttggtttgagtctaggtccgagtctgggtttaggtctgggtctgggttcgggtccaggtccaagttttggtcttaggtgcaggtccaagtctgggttcgggtccaggtccaagttttggtcttaggtgcaggtccaggtctgggtttgggtgacagtctcagtatggatctaggtcccgagtttcgatcctgacctgcgtctgggtctgggttcgagtctaggttcgtatccggatccctatctaggtcaaagtctaggtcttggatcgggtcccagggctaggtcaaggtccggctctcgctcccagtctgggtacaggattgtttttgagctcgagtttttgtctcgctttgggtttggggctaggtccgagttcagttctaggtttgggtccgggtcctggtcacagtcctactcttgttcaagggtcctggttttgcagttcttgttcaggttgcaattccatctcctgagtctgggtcagggtccgcgtttgggtcctggtccgggttcgggttcgggtcctggtttgactccctgatctagtcccggtcacct

SEQ ID NO: 153115 - DNA, 946 bp, Cannabis sativa
atatgttgacttaaaaagaatgttggatgaggctccatcatttaccatgcatcttgtatggtcatgttctcgatttgtgcagtaatgatgagggggtcattgtgcgagaaactgacctaagcagcatcttcttctgtgaaagagattgtgggcgctataaactttggtttcttagagctcctgtcttcagtagtcaaggtatttcttttaagctcatgatagagtgtccgagcgtagcgatccctagcttttttggtctaacctacaatgtggggtccaccaatgatgacccctagatgtcctgccactggtggtgacattggatctccgttctgggcaccttgtgcagagtttggtcgttctgcacataataatgcatgtgcagattatgtcaccttatgaggtgttcaatctccctcttcaaattccgaaaatcattggtgtcatggccgaagtcgttgtgatactagaagaactttgacatgtccctcttgctcaactcccttttaatggaaaaaggcttgaaaaaggctttcggtaggggaccgttccgggaccgttccctgaccgttccctgagtggccatgaagatggcctcaagtttctttgtcaagagggggaagtaggtatacttgtcttttttcttttgtggtgtggaacaagtattatacttcctctttttgtcactgtttcttccagagctattggtgttgcacttgtttctagtgtttctgccactagaggtctgggcaaagttgttggtgtctgttttgcgcacttggtaggtcatgggaattgtaggatgtcttgtgactgcctgttgttgacatgccttgcctgggcctaatgtatgcttttcgagttcgataaagccattagctctatcaaggaactccttcatgttgttggttgagatccttcggatggctttccagaagtcactgaa

SEQ ID NO: 153116 - DNA, 628 bp, Cannabis sativa
  modified_base (579)..(580): a, c, t, g, unknown or other
tttttaattaagagactttatggagtctaactaataaatattataaatgacaattttatttgatagttatttgaattattaaatcaatagttttggcatttatagtgtgtaaagtgcaaaaagtagtatttgtgaaaaatatataaaataggttagaaaaatgataagcccaaactaatgtagggcccatcgtatggccgacctttaggtggctttttcactctatttttatcaattttttattcctaataattcaactgtaaccctattggagaatagtataaatgaaaggctatggtctcattatccaactaatgccttcaaagctaaaaacctagttttctatctagttttgatgagacctcttccttcttcttactcttcaatttttgaaatactatagcctctcttcacaaataatttcaagccttagtgattgagtgcctgcccatatatatcaagtaagtcctcaatcatattgtgtaagattgttaagaatccaaacataaggaaggagtttcgggctcagatgtttgtgcaactgtgctatagaaaggacaagggttagagatctgagtnnaaggagtcatttaattccgctgaaaccactgtaaggtttctcaaactt

SEQ ID NO: 153117 - DNA, 581 bp, Cannabis sativa
taaaataattccaacaaaaacctcataacacataatacctcataaaactgattataattttttttaaaataaaatagagatcaatttcaaaaaatattaacgtataaatatgaaaagaacctgttccataacaaaataaataaacacaaataataacacacaataactcaaatataatataaggaaaccgtttatatttatcaactagttaaaaatttaagacaaaaaaactagttttgtaaagcaactaagataaaaactcacacacaaaaaccagttaaataaaataacttaaacaaaaacttccattcaacatgctccaatccacaaataattacactcatatcatatctacctcaaaaatactcattcattatgcctatataacgattctattttaattataaccgatttgagttatttcgtgttatttgtttttattttttatcatattgttataaaattggttctaatttaattataattagtttgagttattttgattttttttgtttttattctttatgttacagaaccggttatatttcaattataaccagtttgagttattttgtgttatt

SEQ ID NO: 153118 - DNA, 1196 bp, Cannabis sativa
  modified_base (360)..(375): a, c, t, g, unknown or other
ttggctttgcttcttagtttcttattctgacaatccatcacttgtttaaactaacaatggatttcatcacacgtgtctaccaaatcataacacggtgagttccttgaaaccctcccactacaacgaggtaccgtgactttctgtctaagaatctaaatggtattgtcctcttcagttgtatcaagacaacaaaggcagtgggatcatcatatatcgaataagatcatagaatacttttggaatcaaggaaaaatatctcctctactttgctactttttttcagacttagtcattttcttataaaagtagtatttgttgaaacaaacactttcttgtctattgactatgggatggtccacnnnnnnnnnnnnnnnntagctatcaaacatgcaaacctcagttaacagttctagcttttcttaaggtcacgatcaggacatccatgaatctaataatggtttataccaagtacacaaccattccatcattctgaaatttttctatcagtagggtatttccctaagaggacttaggcaactggaagtaactaatcataacctttcactatcaccaacatgcaaattgaatttctagggaggtaagtttggatacaatttgaagttcaacttaatgatctttgaactacatatccaaatatttctccacccctatcagtttgcaagatcgttaacccctcaccttaatgtttttcaacattgctagaaatccatggaatttctcaatttcaaatttctttgcataaggtaaaatctagagttatcgtcttaagaatataacaataactcatatccacccctgaatgtaaatccatattcgaatacagatgatcttactttcaagtggatataggcatgctttctctttgcagagaatcatcttgtcaaaaccactatgaacaagatgcaaatgccacatatatataagaacgtggttgtggtcttttgatgacttgatctagttacaataaagagttcttagaatagtccaagtgggttctggtcatagaatacaaaactcaaaaatccatacattaacatacagttcgaatccattaacagaaaatggatattaataacttgtgaaagctatactgtatttatcaatgtattctggaaactaaaattaaaaatttctatttggaatctaaaattaaaagtcaaagacttaaatttata

SEQ ID NO: 153119 - DNA, 779 bp, Cannabis sativa
ttctactagttaagacaaccttctcagtggatcaatatgcagatctgtacgttaaagagattgtaagactgcatggtgtgccaagatccatagtatctgatagagatctgaagtttacgtcaaagttttggcaaagtttgcaacgagctatgggtaccaaactgaaattcagtacagctttccatcctcagactgatggatagtccgaaaggacaattttgatactagaaagtatgctaagagcctgtattatggattttgagggcttctggagtaagtacctaccgttggtagagttttcgtacaataacagttatcaaagtacgataggggtggctccctatgaattgttttacaatagaaagtgtagatctcccactcactgggatgagacaggagagaagaaatacttaggtccgaagttagtacaacggactaatgaagcaattgagaagattaaagctagaatgcttgcctctcagagcaggcaaaagagatatgcagatctgaaacgcagaaatgtagagttccaagtaggggatcatgtgttcctacgggtgtctccaatgaaggggatcaaacgtttcaggaaaagaggcaagttatgccctatatttgcgagacctttagagattctcgagaaggttgtacaagtggcatatcaattagctttgctttcagttctttcagaagttcacaacgtattccatgtctctatgttgagaaagtacgtttcagaccctgcttatgtacttagttatgaaaatcttgagctgcaa

SEQ ID NO: 153120 - DNA, 602 bp, Cannabis sativa
cattaaacatagaaaccctataagctatctaaaccatacaggtactctcgtccaaatttagttctatttcactatagcataatcgacattcacttctcagagctcacatcaaaatcataaaatagttaattcaacgccagaaaattaaaaataattaagcacgattgaaatagaatatatagaaattaggaggaaaataaatcatattaaaaccataaagtaatgtcaaacaacatccatctagaccctaatcaagtgtttagctacacatgttcatggaagcaaaatcacacacagcattgactttggtctctgaaattcgtaatcatttttctctctaaaattgcttgattcaaatcaactccagttcagcctttatataggctttcagggactaaaaagatataaaaacgcacatgttaaatgcatattcgaattaggaaaccaccaaaacccacgtgagagaaaaagacaattttcgggcagtttaggggggcgggccgcggccccacaagggctgggctgcggcccgcgttggagtttcactacatggcttcgtttcgacggtgatttttctgctgcgtcgactgatagtattttgg

SEQ ID NO: 153121 - DNA, 824 bp, Cannabis sativa
taatattcactaatttttattttaagtcgtcattaaataaaaaagtagccccgtcattaacaaaagctttaaaaaatttggttaccaaaatatttttatgaaaaaaaaggtaaatactattttggacttgtgttttgcaaaagttaccaatttgatcctctattttgttaaatgacaatatggaccatgtatttttttaaattgtatagataagaatctgaactgattttttgtcaaaataaaacttaataataatctgatctagagatattatgacaaatctgattacattttatgtatctgttcgtgttagaaattgtcttaaagttaattatattaaaaaaataaaattgttgaaaatcgagcttaaggttctatttttataattttaaaaaatacaggattcattttgttatttaataaaacaaaaaatctaatcgataacttgtgcaaaactcataatccaaaatggtatttaccaaaaaaaaaattgcattatgcattgatgggatcatataatttttgttttcaatattgaagacaatcaagtacatgcaagcaatgcaacgttactcacacattcacgtgtgtaaagtacatttccaaaccaatcatctaaactcaacatcccttccaccaatcgcaacttctcccaaactatccacttacacgcctcacccaatcataatcaattattattattgtattatttcataaaactaatatttcaactttctttatattacaaattacaattttatttttagaacaaattataaattgggataattacattacacaattttattttattttcttttttt

SEQ ID NO: 153122 - DNA, 1170 bp, Cannabis sativa
  modified_base (358)..(360): a, c, t, g, unknown or other
gcaccaacaacttatttactatgtaagtaaaaggttacaaggggcaaaatccagatatccccttctagaaaaacttgctttgtgcctagtctacgcgtctcgtaaactaggaccatacttccaggcgcaccccataaaagtgttaaccgatcagtcctcgagacaagttttatcaaaaccagatgcttctagaagattaataaaatggtctattgaactggggcagttcgacataacataccatcctcaaacatccatcaagcgccaagccttggccaatttcttaatagaaggaataactttagaagaaattccacctgttcagcgagatgcagaaacttggaagttatacgtggannntgcatccaacgagcagggttcaggtgtaagggtaatattaatatcgccagaaggctttaagtttcactatgctttgaggtttcaatttgacgtgtcaaataacgaggctgagtatgaagccttgatcaccggcttaaagatagccgaggtgttgaaagtcaaaaacctcatctgccatagtgattcacaattgattgtgaaccaggtcctcggggaataccaggccaaaggcttaaaactggcgaagtatttagagaacgttcgaaagaacttggaaagattcgattattttaaaatcaagcaaattccaagagaacaaaactccatccccgatgccttggcaaactggccttgcagaacgacttggatgaattgaacttagttccggtggaggtactaagccagccaattatgtgaaacgaaagacgtcgagatgatagacagctctcctacatggatgactactattatcaattacttactcgacgggcaacttccaagtgacaaaaacaaggttcgaaaactatggtattcagtgcctcgctacacaatgattgaaggcaaactatatagaagggggtactcgatgcccctactttggtgtgttctccctgcagaagcgaatgaaatcatcagaaagattcatgaaggcttttctggggatcaaacgggttggaaaagtttttctaaaaagaacattacacaaggatattagtggccaacaatcaataaggacacccacgagtttgtcaagaaatgtgataagtgttagaggttttcacatatacctcgcgtgccgccaacagaact

SEQ ID NO: 153123 - DNA, 662 bp, Cannabis sativa
cggttctataactgattaagttctatgtaactaaaagttctatgtaactaaaatgacactgtaactaaaatgacactttaactaaaatgacacttgcttaaaatgacacttgctttgtatataaaggagtgatccaacataaataaaccaggacagaaatcctttgcaacagcagactaagcagactgtgatctggctgaaccactatacatctttgtgttcattatttttcctgcttttctattgtctgggcagtctcgttcaaatactcgctattttaggttgagtactcactacttttttgttagatattaattgtttattttctatttagtgttgtctaaatttctccaacaacaaatagtattagttagtagcacatctttttcttacaaaactatattatttccaaggaagtattttttgggaaatttgcggtaaaagtctccaaaaagtttattttgatgcagattaatcttcaagctcgataaatagcattaatagtccccaaggtcacatttcttgtaagtccgttagtccttattttaacggaaccgtttacttatttaaaaatgccacgtgtcaaaatattattggaccaaattataattataatttaataaatattaaaaataaataaatatattatttaaaaatcataa

SEQ ID NO: 153124 - DNA, 646 bp, Cannabis sativa
attttaaatgtacaataaatttgtgatatactaaaatatatgtacaattcacattctactcaataatcaaatataattttatcttgattattcgtgtgtccgtattacaggtatgtgactactattattcaattccacatgtacatgatttatagatttcatgcactttgattgtgtgtggtatttcatcttttggttgtttccacattcttttggaaatatttgagtagtaaataatgccatcgattatttaaaattattgcattcacttcagggaatgacattgaacaagtagaacattattataaatttcttaaaaaattattaattgttcatccataaaaaattattcagcaatttcttttacaatatttcaaagaatatatgaatacaattttttgcataatctttaagatgtatgaaaaatttaatctttaatatatatcgcatgcaataatttcctatataaatattgcaagtaataataatgtacaataacatgactaatatgtagaatacaaacaatctttaaaagtaattgaatttaattcgtatcattctctccagagaatgatgaacaataaaagcatgtctcatgtatttaaataacattagtcatgttcattgttattcttatactttgatg

SEQ ID NO: 153125 - DNA, 680 bp, Cannabis sativa
  modified_base (27)..(45): a, c, t, g, unknown or other
tctatattaataagcaaatctgattannnnnnnnnnnnnnnnnnntagggcataaaacccaacactgccgtacaagatagtttcagataaatgcaacttaatccttcactgacttttctgcgaaccatggaatcatcaatagtttctccacagtggcacatcctcaagcgaatggtcaagttgaagcagtcaacaagaccttgaaggatacactaaaaaaacactcaaatatgccaaaggaaattggccagaagggcttcctgaagttctatggtcatatcggacaactgagaaaacggaaaccggacaaacaccatttgttatggcgtacgtatatgaagctatgttgcctgtagaactcgagccaccatccaacagaagattgatgtacaatcaagataccaatcacgtaatcctagcaaaatcacttgatgaaattgaagagagatgagtcaccgcaaacttgaagttgatagcccatcaacaaaaagtagctcaatatttcaacaaacaagtgaaggctcaaaaattcttcgtgggagatatggtcttaagaagggtattcttaaacaccaaagacagtacggtaggtgtacttggacctaacaggaaaggaccatatgaagtggtcgaagttctcgaatccggagcataagaattaggtaagtatgacgaaaaaa

SEQ ID NO: 153126 - DNA, 534 bp, Cannabis sativa
gaacacgatatcatcttaatgattagaatgatggacaccttccaaatacagcagaagagttctttaatatgaagcactcaagtgctaggaatgtaattgagcgttgttttggattgttaaaaatgcaataagctattttcaaaagttcatgtttttatgacataaaaacacaacgtataatttttatttgttgtatgctacataattttatcagaagagaaatgagcatagatccaataaaaaatgagatgagtagtgtactaagaaatcatcccacagcagataataattatattaatagtatcgaatcttcagatttatagattatttggagacaaaatttggcagaaaaaatatgaaatacatagcagggaactagatgattagaatatatatgttgttaattttaccatttttatatttaatttgagcagttttcaattatgatttgatgtaataagaacatagggatatgattttgtcccgtgatgtactttcacgaaatgtattccgtagtacattagataggtctca

SEQ ID NO: 153127 - DNA, 1239 bp, Cannabis sativa
  modified_base (1202)..(1209): a, c, t, g, unknown or other
actttataatagcatatacattatacatatgtgcccacataggatttttaatccaacaaggaattcatttgagtttgtttgtacaagtaatgtgttcaatttctattttaagcgagttttgcattattattattattattattattattattaagggagggatttaaatttgagtttgggacattctctttattataagaaaaagtgtgaaccactaaattatatttataatcacccattattaattttaatatgttgtttgtaactaattgtttgataataataagaattaaaagtgtatacatatttagtcaatgttagtcattaatttatgtaagagtattgatcagtattacatatttaaattgtcacggcttatgtttacggagaagaatataataattaactaataaattgaaattctcttaataattttttttgttgtcttatggatctaactagtgactacatagataggcagtttgttatataaatcaaatttggacaccacaaaccattgaagacagcacaacgttaaaattatacttaatagtctagttgtgaatacgatgtgtctatgattttgactaaactcttccaatttaattctacatctctttataagctacagtgttcttctaatttctatgaggagtacacggatattgaattagggttcttttagatgtcaacaagtctattaggaggggtatctatgtttccattcaaggcttacaaggatattcttgtttaatattgacaatatatatatgtccttaaagctatttatagttcacatgtattttaaaatttataaataattgaatgaaattaaatttagggtgattttacaatgcacccccttaaaagagatgtattgatgcacctttaatttgtttcggcatccaaaaaaaaatttccgtctaattttttttcatattcatgtacgtttatagctatttaagatatcctatacaattttaaaaaattcggaataatttataatatagaaaataatattcaaacaagagaaaaaatttgactaaaaaattatttcagatgctaaaacagatagagatatatcaatatatccattttaaggaagtgcattgtagaattttccttaaatttatatatgtacacattgttatgaaaataatatttactaaatgaagatgttttaatggttacatttttattgnnnnnnnnatggttacatttttttaagccattggatta

SEQ ID NO: 153128 - DNA, 575 bp, Cannabis sativa
taaatatatattttgaaaaataaaattaaaaacttagtaaaaatagtacaattattaaaaaaaaatgaataattatcaattccacataaaccgtaatttcgaaccaaaccaaaccgttgttaatggtttggtttgatttaaaattttttttggtctggtttggtttctaatattgaaaaaaccgttatactagtttggttcaaaaactatgaaaatctggaccaaactaatccgtgaacacccctaccattaaggaagacatctcatatttcaagctatccaaaagattatcctacatcaaaaataaatagttgacttggcagccaactattggtagcagaaaccaaatgagcaagagcaaccaaacaaaggaatcattccaatactttaatataaaaaaaaaaatggaatgaaaattatttccattacattctattacccccaaccaaatccaaatgccacctagtctttcttcacagagtgaatggatgaagtcgtcttctctgcaacttggaaccttcgaactactttctttcccccatggagttcgactctctgattcaattctctaacgc

SEQ ID NO: 153129 - DNA, 550 bp, Cannabis sativa
  modified_base (170)..(170): a, c, t, g, unknown or other
acaagtgtctctcaagttataacaaggtgagttccttaaaaccctcccactatgacaaggtaccgttactttctgtctaagaacactaaatggtattgtcgtcgttggctgtgtcaatacaacagaggcagtgggaccatcttatattgaataagatgatagaacacttntggaatcaagaaaaaatatctcctctgctttgatactttatttcagatttattcatattcttagaaaagtagtatttatttaaacaaacactttcttatgttaatgaccataggatggtcaacccctaatcacttagaataactatcaaacatgcaaaccttaagttaacagttctagctttcttaaggtcatgatcaggacatacatgaatctagtaatggtttacactaagtagacaactattccttcattctgaaatttttctatcattagggtaaatccctagaaggacttaggcaataattagtaactaatcttagaccttatactatcatcaatatgcaatttgaatttctggaaaggtaagtttggatacaat

SEQ ID NO: 153130 - DNA, 511 bp, Cannabis sativa
taaattcatacacatattcagaaaataacaagtattgaagatatattataaaaaatacaaaactaaaacatatttattttctaaggttttcaacaaattgaaatacagtgtcccgtttacacaagagtcaaagacatcatctgttgaataaaatagtcagctcatctaaaatgaacaccattttagcaaccttttattcaatcaaaataagaatccaacattgtcctgtttaggagagaatcaaggtcattcttattttatgagcttctaccattgtttcatattttgtaaatcttattctgagcagtcactaattgagtgatcgttactaagaataaaaaatttacaatgatatttatctttcaaaattctacgatgttaaattgtataatgaatcaacatctatttaggatgaatctcatcaaaaagcaataaccatgtagaactaacaatggagatcgaatgtcttatattaaagctcattattaaaaaaaatatttttaattaatta

SEQ ID NO: 153131 - DNA, 547 bp, Cannabis sativa
aaacaacttacccagccaccaatctcaataattccaacgtctggtcattgaaatctctgcgtgtggggctcaaacgtcacctgaagcttttgtgcacatccccacgtgctggcacatggaagcacgtgtgatggcatctttgacgacattctttttttgtttgtttactcaattcttctaagcctactcgcatctatctcaagttataatttggtattgtttgccttattcgtgtttgggtgttcattctttggtgttcgctttctttcctttctctttcaattgttttcgctttcgagattatgacagagataaaattagattcaaacttagtggttgtttttgatgtggttcccgtgatgtctaaaatcacggaccataaattgattggttcgaattatttggaatggagtaagatgattcaactgtatctgaagagtattgacaaagatgattacttgattaacaatcttcccaaagaaaaaggcgattcaaggaaaatatgactccgtgaggatgctcacttgttccttcaaattcaaaattc

SEQ ID NO: 153132 - DNA, 777 bp, Cannabis sativa
aaaaaaaatacaaaacattttgaactgaaatattcccattaatcaataaaattcaatacatatagctcgaatatgggtgtggagctcaatacaaacctaaaaaaaaattcataatagttaaaaaataaatataaacaaaataaacctaaaaactatcaacaccacgtcgaagtttgctgttcaaagccgtccgactgcaccaaaaaaaaaagcaagtgagccacatagaaacagagaagtaaaaagagttaaagtgatatcaaccttgggttttcggggttgggatctcagatctacaattgagtggttggatcgagatatcaaatggagaaaaaaaaatagcagagccttcgtcatttgtcgtcgattctttagttcagtcgtggctcgagctttggaggttgcagaaaaaaaaaaatagcagactgtttcggaggttgagatgcttgagcacgaagaagaaaaaaaatagcagagaaagaatgcactgccgcttagagagagataagagagagagagagacggctggagtgaatgagatgtgtaaataaaaccctaaaacctaatgttctttttatatgtgtaaaggcccaacaacattaaaaggctgagatattgtgtaaaaaccgggataaaaagtctcacttaaaaactaaagttacgtttggtaaacacataaaattagccctttcaacaccgttttttctccgtttgccaaacaaggcccttgttccaaatttttttaaggctccaaatgtaaaagtgggattaaaagtt

SEQ ID NO: 153133 - DNA, 578 bp, Cannabis sativa
  modified_base (300)..(303): a, c, t, g, unknown or other
gagactgggaataacagttccgcatacagccagggcattcataacatgactgttccgcctggaaccaacgcccaatcaaccatcggatgcgcgaccgaattgtaaaatctccgtgccgcgctcagaatcatgtatagtcatggcaacactttgcatcatgatcaggaagaactgcgtgccgcagtaaatctcgcatttgacgaacagaggcgaatgttcgctgaatggagagataaagagatggaagcattaagggctcaccatgcggagatcgaagatcgtagtcggcaagctaccgtnnnnatacaaagagcctaccagactgtaggtcagcacacaccgaacgtcattcccctgggagaaacggaggatgacccgatgatgaatgcctcccagacaaccaatggtcagccgtcaaatccccggttacgagttccactcgtgagccaagaggtaggcaggcagaccttggccgggaattcatcaagaggaacctgacggatccaaccagaataatggtgttattccgcttgtcaaccaagcgaatcaatcgctaaggcagccaggctcttctgtgt

SEQ ID NO: 153134 - DNA, 689 bp, Cannabis sativa
taacgaccaaaaaaattcaggggtcatgatttggtacatgtggaaaaatcctaattagccttaataaaaattatacataagggaaaattacaagagtttatttttttatagcataaataaataataggatttttacaaaaatattagattttgggtcaaagtttacaattttactgccacacgaaattttacaaaaatattatctttttataaaacaaccataaaacaacaaacaaaataattaaaaacaacagtagaacaacaaaaaatacagtatttttgaaaaaaattccgccccacagtaaaaaagaaaaaaaaaatttgaaatttcagtatgtggtgtaaaaacccctaaatagtaccatgaggttatgagctttttttatttttttacatttatatgagattttttatgccatatttttgtaaaaaaaatagaaatcccgtatttttaaaacaataataagttttcgccgaaaaaatcatcggcgctggaaaagtcactggtgccaaatttttttttgaaaatgttagtgtcaccggaaaagtcaccatcgccggaaaaagtcaccggaaaagtcataagaaaaattaccagaaatagatgtatcagatataaacaaaaatagaaccgattctataacataatgaataaaaataaataatacaaaataactcaaactagttat

SEQ ID NO: 153135 - DNA, 850 bp, Cannabis sativa
actttttagtttgtctccaacaactgtgcctgcacggctggactaacttgttcggcttcttggccgatctgagtcacatcagcatctttctaagcgagattttgagcacgggttctgggttgcacgatcggcatttcaagctgatcgtctactcctctcctcctattgagatcatttctgagatcatgagtcgtccccaacctatcaaatacgcaaacacctggctatcccagtgactggttggtttggtcaattagctgaccgcaccacgaacttggttggagttattgggtatgacttctcccaatgaattactagacaatgtttgcccgcctacaacttggcccacaggtggaacctgtgaccggggatttggcggctgaccatgtatagtctgagaggtattcattgctcgatcttcgtgagttttgcccaaaggaatgacattcgcaggctgctgcccgacagtttgataggctttctgaatcagcacagtgggttgccgactgcgatcgtcaatgactgcttgctgagcccttaacgtttccatttctttgtccctccattcagaaaacatgcgcctctactcctcaaacgggaggttcaccgcagcacggagttcctcttgctcatgatgcacgatgttggtatgactgtgcatgagccaagagagcacggagatttcggatctcagtgtcatctccaatggttgtttgaacattggtagcgcacaaaacgattgtgttatgaatgccttggtcatctactgaactagtattcccagtctcttgcacaccgtgacttgcagttgtgggctgtctgggatttacggctggcagaacccttgtgt

SEQ ID NO: 153136 - DNA, 538 bp, Cannabis sativa
  modified_base (27)..(40): a, c, t, g, unknown or other
  modified_base (395)..(419): a, c, t, g, unknown or other
taagtcttacaagtagtattgtctcannnnnnnnnnnnnncatgggcctatataaccgagcttcgaataagtagatctagaatttaccaagtaagtccattaacttattaattcctccttgcaccatatagatttggaattacactcttaattatatagagtgctctatatattccacgatatagatacgctgtaaaattttccatcgttctaatcccaataatcaaagattctctatagatgatttacatcgagtatggacaaatttaccatttcacccctcaatgtatattatccttataacacttagcttcctataaaatataattactaaataagagctcttccatttatctctatgaagccaagcttgaaggaaattatcatttcacttnnnnnnnnnnnnnnnnnnnnnnnnntccatatttatgattagcgctctcgctcaattgtactatcatattcttattgggttttgtgttctaaataaaactcgtttcaatataatcagatttactaattaataaaagatcagaaa

SEQ ID NO: 153137 - DNA, 521 bp, Cannabis sativa
aaaaaatggtcgacaaaatatcgacatcctgtcgatatttagtcgacattatcaaacagccaacaaaattaaaaacatgtcaacaaaatatcgacatcctgacgatattcagttaaaaatatcaagcagtcaacaattacaaaaatatgtcgacaacatatcgacatccagtcgacaatttcaagtagtcaacaattacaaaaatatgtcgacaacatatcgacatcctgtcgatattcagtcgaaaataccaaacttaaagcaacaacataatattatcgacaacatatcgacatactgtcgacaagttgttgacaatttagggcagaaaataaactcaaccaaatatcgacatcctatcgacacacatacgatatcctatcgacatacaataacaacacatacaattctaatagtcaaccagacacccaaatctatcgacatcctatcgatatgtcatcgataaccctgtaacaaacacagataccattgaaacaccaacatctacaacctatcacaag

SEQ ID NO: 153138 - DNA, 594 bp, Cannabis sativa
ttaacaagtttactcatcattcaataacctcctgcaagtagcattccagggatttcaaggaacaattacaggttgttagggatagatgacccgaagcggcctcgctaaccaatataaagcagcagcccggtgagacacttaaggcgtacttaagtcgttttagcacggttgcggctagggttaggaatttgatgacaacacacaacttacaacccttctggtggggatctctactgatccattgaccacaggggcgagttgtgggatgacttacaaggtcgtccagtaagaagcatcacaaagtttaatgaaagggctcaggtattcgttcggaaggaagaagcccaaaaagaaatgatttgttgaaaacaagctggggaagcaaacccaacaatgtttcaacaagtacgatttccacgtgaattgataactcgagggattctggttcaaagagaaaggacggtacccgggaaccgtcgaaggataaataaaacaaaagaagcatgataagtacgtgccagtgtatactatttataccgagcttaatgaaacttgggagaatatttacctcgcacatgagcagaaggttgcctt

SEQ ID NO: 153139 - DNA, 789 bp, Cannabis sativa
  modified_base (218)..(218): a, c, t, g, unknown or other
acgtcgaattctcttttcgatcgaataaaatgttactagaatggtgtccattttagttgagttaactgctctattcaacaaatgatatctttgactctcgcccaatacgaagcattgtatcagtttattggaaaccttagaaattatttaggattatttatttttgtattttcacttgtcattcctacttgctaagtgcttaataatttctgaatgtntatgattttgtattaaaccttatttgattactatttattgatatttgtagtacctaatatgactatgaacaaccccatggtgtcactgttgactgacaacaagctctttggagctagctttgtcaaatggaaagagaacattaatattgctctcataggtgaaaatgccctatttgtgttgactgaagaggctcatgagcagacaggtgagaatgcgaccaaggcagttaaagaaaagtttgagcgttggcagaatgttaacaataaagctaggtactttgtgttgtctagcatggtcgacaccttaaaaacaaggtttgccaatactctcacggctgtagatatcatgaaccaattgacagaactgttcgggatggggtcagatcaagctcggtttgaggtgaccaagaattttatcaacgcacggatgaaacctcatcagaacttgcgtgatcacctactccagaaggcaagttacttccaggaagatgagaatcatggagctattatagattaggaaactcaagtaaatttaatcttaaatagtttttctgcccttcacctcaaacta

SEQ ID NO: 153140 - DNA, 607 bp, Cannabis sativa
atattaagatagtgagatcaaatataaaatggagaatactacattaaaattcgtgagtatggataaactcccagtctattacacccaatacatatgcctattacacccaaattatggtgtgtgacatgtttaacaaactaagaattgttggacatggggtggagcctgcatatcaaactccaaactttcttaaatatttgccgattgataatcttcaatgggagtgtacatatcaaattgtgttctaactaaagttgtttcttaaacgtattttaagttgtaataaggctggaatccgactttatgacatgtacacattttaaaaatacatgtatacagttaaagtacaattgtcaaagaaaagatctgggcccaaataccataaatgagcatttcatcagaaaggctataaggtctaagggttacatatttcattatccatctcacaatactagaaccgtggaattaaaaatggacttgatcagtgagagcgatcgatctaggttcctagtttcttgaaaagatcattaattttctcaaacttacacctcgagtattagattaattatgattcacaacaaccttttgttgggtttaatgccctaaa

SEQ ID NO: 153141 - DNA, 679 bp, Cannabis sativa
attgcttttgctgttaatcttggagggttggttttagtatcaatatatcatctatattgatatatgtttggtttgtgatgtttattttgttcttaaagtcaaattgtatatgttttcttggacagagaattgcatgtactgggaaaaaagatttcttcgattgttaagtaatgaacaacttcaagagttaatgaggaaaggatgccctctggttggactgtgtgatataacttgtgacataggtagttcactggaaagtgtcaatcaaacaacttgcattgactcacattttttcaggtttagttattctgtgacataattcaagttacagtattctatcaattatgatatattcaagagagtatagtacaataaacccatgttttgataagaattgaagaagcttgttaggcaatgatcattattagtgattgattattcatgtgtatataaatatgcaaattgcaaactatttagttgtgttgcacggtatttgtaatcattttatgtaaactcttcaattgtctctcataataacttttgacagctatggtaaaatagtaattaattattgttttatttatctcactagttttgtactcttgttttttttttgtaaacgttattttttagctttttttattatgtatttactattatataaaattattttaaaatt

SEQ ID NO: 153142 - DNA, 600 bp, Cannabis sativa
  modified_base (40)..(42): a, c, t, g, unknown or other
tcttcttcttcttctggcctcttcttcttcttcttcttcnnnttcttcttcttcttcttctttcgatttctgcccagtccatctctggcgacgggcgatgaacgacggacgacgaatgactagaaggcctcctcctcttcttcttcgttggtctcgtcgattttgttcttcttcgccgatcgctgctgccagccagtgccccaccctccttcgaaaccatcactgaagttctcaccaagaaaccagcaccgaagttctcagatccccggccaacctcgaaatccaaggtcagtttttccttattctttcatttctctgtttctctctctttctttcttatctgcagggatcttggattccgttgtcgacgatatttgaagctcgctgtggctctcaactttcgtgttcgacggctgtggattttggcgtttgacagcgtcatagatctgtgcaaggatttgatttttttttgtgtagttttttttatagttcaaaatgcgttttattaatttctggattttgtatccatttgatagttttaactgttttgaatattatgcttgtgtaatgtatatcaaatttttcagtttaatttttttt

SEQ ID NO: 153143 - DNA, 1061 bp, Cannabis sativa
  modified_base (1026)..(1031): a, c, t, g, unknown or other
gtggttatctttctgattgaattttcgtttcgattgcgttgggttgttgcgtagttgcacgatagttgcgtgatagttgcccaagaaacatagatcatagattaaaggtgtgtggaagtggtatttgcgtaatttttttagttgggatgtatatttgtttatttggccaactggaagtatttttgtaatataattacttttttttggttaaaactgaaaaaatcccaaaaaataataagaaaattatgtgcaacctaataatccttaaaactaaaatgctcattctgattgagagctgaaattgaattcctatttccaaattaaaattgaaattaaatttaattactaccgttgagcaaaccaataattcttttcactccaagtcgggagaagtattattgatgacaaatttaggacgtgaagtgtactttttcaccttcacaggactccttagacgagcccttcgcagcttcttcatctgaaatatataaaaagcataatttaatcaatgtaagaggatctttttgcagagttaattaagtcttatataagttcagaaagttaactcctttctagattataacccaacattgaacaatagaaaaatgctattgtggtataccatgctaaatcaagtcaaatattttctcaattaaagaataagaagacacaaatcaacaaaaattctttcaagaagcagctgacattcacaatcattatccagcaattccaagtgttcaggctgtgattagcaagaatgggacagatgcacgttcactcaaccctttgaaatccacatgttttgagaagcatatacaatgaaaactagaaagtgcgtatgtaaaatattgcaaccaaatttaagaacgagacacaaggcacaaaacattcaaatgatgcatagcaaaaggtattcaaagttcattacttttgaaaatatgcatcatcatatgatacgcacctgccaatacttaatagatatatatatatatggaagaggtttcaatagttacatttttattgtannnnnnatggttacatttttttaagccattggatta

SEQ ID NO: 153144 - DNA, 1745 bp, Cannabis sativa
  modified_base (576)..(580): a, c, t, g, unknown or other
atttatatatatactcatttgactaaaataattttaagaactcttctttctttttcttttttatctatatatctatattatttatatatgtgtatatattttaattctcaaatagttattcttaaattcatttatatatattatatgctcttactatttatctatcatatgatagagaatatatataaattatgcattttcgataaaatttggatatatcttgaagattatgcaaacataatattcatcatataattgactgaaatataataaaagagatgaatatatatatatatatatatattcatatatatgttcttgtattctttgaggacaataaaaaataatctaatatcgatatagattttggcaaacatttcctgaatgacatgttttatatttgtcaaaaaaaatattgtatttatgtgaatacaactaaagaatcattaaaataattattattgatacaattttattgtgaatttttaatacaaaaaataaagaatgtttagaaaattacatttaaacatcaaagtataagaataataatgaacatgactaatgttatttaaacannnnngacatgtatttattgtttatcatttcatgcagagaaagataggaattgaattcatttaattttaaagagtgttaatattctatatatttgtcatattattatacattgttattatttacaatgtttatattagaaattattgcatgtgacatatattaaagatcaaattttgcatacatcttgatgattatgcaaaaactatattcatatattctttaaaatattgtaaaagaaattgttgagtaatttcttatatttttattgatgaacaattaataaatttttaagaaatttataataatgttctacttgtttaacgtcatttcttgaagtgaatacaataattttaaataatcaatgacattgtttactactcaaatatttctagaagaaattggaaacaaccaaaagataaaatacgacatacaattaaggtgcatgaaatctatatatcatgtatggaattgaataatagcagtcacgtacctgtaatacgggcacacttataatcaagataaaattatatttaattatcgaataaaatgtgaattgtacatatattttagtatatctcaaatttattgtatatttagaatatttaaatatcattcctaatagacatgaaattctattttaaagaatatagattttacatatattagtagtgttagaagtaaattaatatatgtatatttattatttctataaattaatagtttcaaactattgttggtactaggggtgtacgtcggtcggtttggtcagtttacgttatattttatttaaagcagtgtaaagatcgggttacaaaaatctaagtgtaacccgcacaattaagaaaaaaaaaagtttcaaccctccaataaattcgtcgatttagtcgggttaacccgtccaaactaggcactaatgtttattttttttcacattcaattgttatattttagttattgtgataatgagataaatataaagattgatttttttttttgaagaagaagaaaagtgttctttattaagaggaactatcgctcacaagaatggataacaactctaggggaacaatattaataaggaacatacattcagcgagagtcataaagtgtcgggcaacaaaatgcgcggcacggttcgcagaacgcttgacaaaaaataaagaaacatt

SEQ ID NO: 153145 - DNA, 1519 bp, Cannabis sativa
  modified_base (233)..(244): a, c, t, g, unknown or other
  modified_base (589)..(589): a, c, t, g, unknown or other
tttcaatttttgagcagttgtcaattttgcctcgctatagcagtaataatctgccttaagcaaacttaaatatactttaagaattttatcacgttgtatattcttaattttcttatatgaatattaatattatctaactattttttaggttcaagtacttttatcaaggtgtcgtgatgcctcgttaagtactttcctagcttgcgagaactgttagtattcagttttatacnnnnnnnnnnnnttttgattttcctttcccgtcggataggttataaatctaaaattatagttgtttgatcccttcttcgtcaaaaaggtttgatcaaggtgttataacgattcgacccctctctcgtcagaaaggtttggtcagggagttataacagttcgacttcactttcatcaaagaggtttagttgagaacttctgaatttcaaaaaaaaaaaaattgaaatgatgggtttgcattatacaatgtatttccagataaattccggttgatcatacataaataccccttaagtaatttttaaagaacgaaactttgtaattacttaatataaatgattctctttattcataaatnaagtttaaagtttacatcattaatgcgagttacatcatttatttattggtagtaaggttgcaaatattctacgttccagtagttcatcattagtgagtaatcaagtcaagccaatttatagactccgactccaactactacttcgatgacatatggacccaatttgggttgaacactcctacagatgcatctctcgtatttacaaagaatcgtcttagcaccaagtttccaacatttaatagtcttttcttgacttttttgttgaagtatcttgtaactcggtgttggtatgttgtgttggtgatttgcgactcaattcatttttcctcaagtagatccaaaggacaattttaaaagttcttggttttcttcttgattataaaactcccttctttgagtcgatatgttcacttcaactagcagcattgcttttgagccaaatgctaccgagaaaggagtgtgtgtcgtagctatcttctcggtacttctatgggcccagagcacctgaggtagctcttcaacccatctacctttagcagcgtctagcttcttcttgatagtatcctttcgggttttattaacagcttccacttgtccatttgcttgaggtctggatgttaacgagaagcttttgataattttattcctttcacagaattcagtgaacaagtcgccatcaaatttggttccattatcgaatactatcttcatgggaattccaaacctatagataatgttcttgacaacaaagtcaaggactttcttgcaggttatggagatgaggggctcggcctctgtccatttactgaagaaggcgacggctatgcatacttagccctcctcgcccagtgggtaatgcctcaattatgtcaatcccccatatagcaaatgggtagggcgaggtcatcattctaagttctgttggcggta

SEQ ID NO: 153146 - DNA, 573 bp, Cannabis sativa
ggtagctctattccagtaaggggcctgacaagtaactgaaacaagacacgctcaactctagataagaacattatgtaatcccaatcacacataagaagtaacatgaatattttaactcaacctcaaaagtatgataagaacgatatcctaactaatgataatccaaaagcatatacaagatttgtcaaattagaatgagtgaagattagatgcaagaaaagaataacttaacaatattgtacaagaacaaggacaagaacaagagagattagacaatgcaaactcccaaagattttccgagggagtcaaagcaacttaagtctagggctttggtgaaaatatcaactaattgtttttaatatcagcatatcctaattgcaatgatttattttcgacaagttcctgaataaagtgatgtcttatgtcaatgtgttttgttctagaatgttgaacatgatttttggaaatatttattgcagtggtgttatcacaaaaaatagttaaaacacccaattcaaatccatagtcaatcaacatttgtttcaaccatagcaactgagtacaacaactacc

SEQ ID NO: 153147 - DNA, 520 bp, Cannabis sativa
agaagcccaaaaggaaatgaatctgttgaaaacaagctcgggaagcaaacccagaaatgtttcagcaggtactgtttccacgagaattgataactcaagggctcctggttcaaagagaaaggacagaattaaagaaccgtcgaaggataaaaataaacagaagaagcatgataagtacgtgccagtgtatactatttataccgagcttaatgaaactcgggagagtatttacctcacacatgagtaaaaggttgccttcggcaagcccgagcccatgaggagttcgaggagcaaaagagatcctaaaaagtattgtaaattccataaggatattgggcatacgaccgatgaatgtcatcaattgaaagataagatagaaagtctcatcgctcaaggcttttttaaacaatacgtgaaaagacagggccatggatacaaccagcccagtctgcccaataacccaaacaaccaggggttacaacctcttcctgttgacggagaggacatcctggttatttcg

SEQ ID NO: 153148 - DNA, 600 bp, Cannabis sativa
tgaaatttatttttcatcagattattttaaaattaatttaagaaaaatacacttagtttaatgaaattaatttaagataaactatatgtattttccgatatttaattaaatgaagaagttatatttaattagatttttctagatacttaattatttgaattttcttagaaaaaatatttaagttgaaaattatttttttcaaattgattttggatcaacttaaattagaatacttttttttttagaatacttttttaaattaataattaagtagatttttctaggacattagttatttagatattctttaaaaatatatttacgttaaattttttttaattttagatgaaattaaattgggatatttttaaattaagatgattagttcaagatacttaatttgttattttatgaaattttgaaaattatgtaagttgaaaattttagttaaatttaaaacattaaattagatatttttaggtatttggttcattatatttttaaataattttgaaattatatgttaaatatatagatttttgaaattaaattaaagttaaaaattaattttagacttacttaaattaagtaattttcatt

SEQ ID NO: 153149 - DNA, 545 bp, Cannabis sativa
  modified_base (230)..(231): a, c, t, g, unknown or other
  modified_base (478)..(482): a, c, t, g, unknown or other
  modified_base (516)..(520): a, c, t, g, unknown or other
atttacgaagtatgaaacaatggttgaagctcataaaataagaataaccttgactctcgcctaccaggacaacattgaattcttgttttgatcgaataagaggttgctagaatgtttccattttagatgagctgacaactctattcaatgaattattactttgactctcgcttatcgagaaactgaatcaatttattagaaaccttagaaattatttaagatatgatagnnttgttttttcacatgtctttgttacttgctaaattcttaataattcttgaattgtgtgtgaatttatattaaaccatggtgttttcttttattaaatgtatttgtaaatttcgtgtaaaataagaataactttgactctcgcctaccgggatgttgttggattcttattttaatcgaaattatcctaattttttttcttagcttattcaattcgaattttcttacataatatatcattggatgaatnnnnnataaatcatctgcttatgatgtcactctaatttnnnnnatgaaattgaatggcgcagatgact

SEQ ID NO: 153150 - DNA, 859 bp, Cannabis sativa
tgtaatattttgtaataatatttacgggatcccgagacatgtatcttttggttatttgtaaagttaaagttattacaagtttaattttcattttgtttcaaatcaaagtttaaacttcccgcgctcatccttctagtaatcccagtttaggggattagggtttcataattagttatcgtggtgtgcctaattattagggcgttacaactactttgaaatgcagattgatttgcaaggtgtgagagatgatgacaggtgtagaatcttccctgctacactaacaggcctagcacaacggtggtacattaagctctcccttggatcaattgactcatggaaagatctagtggatgcttttggcaaccagttcgctcctttccaacaactctagagccccaatgatttagtggatgtcaagcaacaggaagacaagcccctcaaggactacatacaataattcttagaggtagcttctaagaccaaaagtcttagcgaggatgcaagggttatggcacttgtagccgggcttaaggagatgagtcttttgtggtctaaccttcgtctcaaggcagtctacaccgtgaaaaacttattagatagagaagatgggtttatcaaacttgaagaagctgtcacccgagcaaagggctcaaagggtggcaagtagaagtcaccacacattgaagccccaactactaaggtgcaaggcaatgggaaaaagggaggctcgaatggagaaaaaagagccaacaatggtggcaaccaagggaactctcccggaggaaagaagccttaaactaggggcaagcccttaagagattatgagcctcgcttcaccacctactccattcttttggct

SEQ ID NO: 153151 - DNA, 590 bp, Cannabis sativa
  modified_base (492)..(498): a, c, t, g, unknown or other
aatctctgtaattaataaattacacttatttatccacttatatacaaatttataatttatgctcaattaggttaccaagattataatcctactcattactacctaattaatccataatacataataaatcctaattattcataattaggtttccgagatattacactcttttggctttgttaaacttagtccacaccataaaaatatctttaacaaaatgtaagacattcatcaattaagtatccttctacaatctaaccttttggttgtgccttattatgaacatactcttttaatgtctgcatatacctataaaaacatatatatatatatataaatgagtatatattctcttccaaagagtagagaaattagagaaataatttaaagagaaaaaaaacataccgctcaatagggtacatcctatgatattgcataggacctattatagcttccttaggcaagtgaatgttagaatatattttaccaggnnnnnnntttactaacaagtatgttttttaacatcctaaacatgaactcataaaacgatataaaataaacacataaaaggtatgagaaaccttgcagtg

SEQ ID NO: 153152 - DNA, 884 bp, Cannabis sativa
  modified_base (487)..(502): a, c, t, g, unknown or other
  modified_base (583)..(591): a, c, t, g, unknown or other
ttctcgtggaccgcattgctcataagtttgacagttggtatcctagattccatgtccagattaattgtcacgagtcattttatggtatagctaagcaatacggtactatggaagacagggcaggccacatagatgcgagctgggatttaaaaccaatcaaaccttttgatatattcaaaattacaggttgtagggattttagcaaatattatggtccttctaccccaacatctagtgatagctcgccttctactaattttggtaaatcccttaggtggaaaaatatactcctccccttcttaattggcttttataatgattataacgcctcgtcttgttttgcagacatgggttatgaagacatccttgaccgtaaggggaagaaaaggacatccaaccctggagtccctactgctgccgaggtggttcctcctaagtgttggaatttattttactagaatgttagatttactcacaagtatgttgnnnnnnnnnnnnnnnntgaacttctaaaacgataaaaagaaaacacatataaagttaagaaaagcttacattgattgcagcggaataatatgtctcnnnnnnnnnagatctctaacccttgattcttttctgttgcagagtataatcaagactgagcacgaatgtccttctcttggatgtgatccttcacagtctccaaatctatgattgaggtactgtttgctgtgtgtggcactactctctcactaggattcgaaattgtatctctctctcttgagtgttgtgttgatcgtccaagcacacaagaagaagagaatgggcagctatatatagagaaaagggaagctcaactttctgaaagaggcagtttccagaattacagagtaaatgcttaattg

SEQ ID NO: 153153 - DNA, 674 bp, Cannabis sativa
gacctagttgaacccatctaattgatgcatgatttttacctctcttttaggtattaattagtagtgaaataggcatattttactaccttgcataactaaaaatttgatactatattggactatttgtgacttgatctgatgtaggaatgcattgttgaggttatgaatggtatattgcaagttttagaaaaaccttgctcgtttttcttgaaatttgttaactctgccaggattgctaagctattgctgagtcattgatttatcaactggaacatactagtgcgaaattaaccacccaagtctattttctaaatctgaaattatcaccactttaattacttttggcttcttatttttagttcatttagcttaaaatattatttctcaactctagaattaaggttaagaatttttctcttgaattaattggttactttgtcttatttttacttgtaattttttttttgaattgcttttagttgattttgctatatttagtgaaaagtccaatgtggatacgaactttgattacttatcattgtattacttgtttgtgattgtgtacacttgcgcaattataaatcaatataatttttacaacaattttcaacctgttataaatattaataattatgtggatgttcaaatcttttatttattaccatgaattgtaa

SEQ ID NO: 153154 - DNA, 851 bp, Cannabis sativa
gaggacataaactaacatagtcctataatttggggccatttactataatttcccttatttatagggccaagatacaaaatggtactaaatctaacaattaagcttaagttaataaatgtctctttttataaaaattagcaaaatatctatttagttaaaaatttgatgatgaaattaaaattataaccttgaataattaagtgtttagtatagttattttgcacaatagtatatcgtttttatgtgcaatagtatattaaaaaaaatgaaaggtagtatattagtttaagattgtggtatattattttaatatgctatggtatataatgaatgaaagaagaaaattaaaaattgtagaatattagtttaagtttgaggtatagttatattttattaagaaatattgtctttatgttcattagtatatcacgaaggaaagaaaaagaaaaaaaaaatgtggaatattaaattaagtttttggtatatataattttttttttaatttattatattaatttttcattctagtatttctgcttatgattttagtatatattttggtatgctattatatatcttggagaaaaaatctcatttaatagtatattagtttaagtttgtggtatattcatattggtcttacgtatatcgtttgtatgtgatatgatatatcatgaaggaaagaaagaaaaaaattgaatattagtttaaatttgacgtataaataattttcattacattatatatatattaattttatactatgggacattcatttaatctacaaatatattctttttgtaacaccctaactagcataggcgtgttgacgtgattttaaacgtactgtg

SEQ ID NO: 153155 - DNA, 556 bp, Cannabis sativa
atatatatatatatatatcatctcctgtgaagctctaacccacgaatttcaacctcccatctatgccacgatctcccctatcttccataaatgcattttttttcctcttacagtaattttcttcttctataaataggcaccactaggtcgggttctaagtctccttcatcacctgctaaaaaaatttcaaaaaatactaaaaaacctccttcaaagtcctctaaagttgatcctaaaatgagtttgaaagacattgcgaagaagggaatgcatgggtgatgctgcagagccatctggttctaaaaaaagacctcttccagctaagattgaatctcgtaaggcaaagagaactaaatcttcgaaatctgtcaaagatgtatgttggattctgttgttttttgatttttttttttttagtttttttcttgttgttttgtttttcaattttttcctcataaagtttaggttctcttcgattctgacttcgaggatgaagttcctgatttggaagtgaagcctaaagttaaacccaagggttgtttaccttgaatttttt

SEQ ID NO: 153156 - DNA, 606 bp, Cannabis sativa
gggcataaaacccaacactctattgctatcaagtcatgtcgtttgggctgaagaatgctggggaaccatatcagcgattggtgaacgaaatgttcgcaaaccagatcgggcggaacatggaagtctatgtcgatgttatgttggtgaaatcaataaaaagtggggatcataccacagacctcgcagaatgcttcaaaatattaaagaagtataacatgaagttaaacccaaaaaaatgttcctttggagtctcttcaggaacgtttttgggattcatagttaacgcgaggggtatcaaagcaaatctcgaaaaaatcaaggcattaatagatatgacatcaccgacaaagcctaaggaagtacaagccttgataggaaggatggctgcacttaacagattcatttcgaaatcaattgataagtgtgtaccgctcttcaatgtattgcgaggcaacaagaagtttgaatggacaaaagagtgtgaagaggccttccaaaacataaaatggcatctagcgacgcctctagttttggaaaaaccaataactggagagacgctatttctctatttggctatctcgaaagatgcaattagtgtagctatag

SEQ ID NO: 153157 - DNA, 617 bp, Cannabis sativa
  modified_base (578)..(591): a, c, t, g, unknown or other
aaataaatatgaaaaaaagtttcaagtttcaacaatacaataattagtgggctttaggctggaccttcacatataggacctaaataaatataaaaattagtattttataatatacggtgcggtgcagtttgaatcgcatattaacaattaaaaaccaaaaattgcaacgcactacgcggtttaagaaaaattcaaaccgtaattgcaccgtaaagaatttcaaactgtatttttttgtggtgcggacggtttgagcgatttgatgaacaaccctagtccttcctacagtgagccattggtgactcaaaagactggtggatatggtccgtccagcatatgtctgaggttaggcggatccatctggtccatatagcaaaccaacatctcttggagagtcttggaggatttttgatttttctcaacttgtttcatgtttgccatgtatcacatcattccacatccccaagatgatttttgggataacatttacccccaagtctgtgtggggcttttggtcgtacggggactttttggcttgtctctttgcatagttatgtgtgttggatatattttaccannnnnnnnnnnnnntaccatgtatgtttcattaacatcct

SEQ ID NO: 153158 - DNA, 661 bp, Cannabis sativa
gcttatttgtgaattttgatttgtttttgattaattcagatgttaactctaatcgtgtttgttttccttcaaactagacgagttttatagtgccggatgatttcaaacatgattgtatgatccttgctggaaagttaatgaaagacttcaagattagaatgacaaaagatgttataatgcccgcattagaagaaaaggatgtacaacgactagcacaagtccctgaaaagcattcggaaattgaccttactgattgattggaatttgttgaaagtcgactaagtcctaaatttcaggtacactaattatatttgtaataagataaattcttaaatacaagtacatatatctactgtatttttttgggcattgtaggaattgagtaaggtgcaaagggaacgttcagcaaaaatgcaatccagacatcgaagtggtcggagtggaatggtgaacgtaagggaagatgtggtaagtaattaatgatttctaataatgtgctttaaaatgtaattgtactcatttaattgttataaaataatgtagaaaaaggacctcgtcgttcaagatctcccacgccaccatgtttggatcaaatctcggaccaagagaacaaaacttgtcattgattacgacaagaaaattgccgaaaagatagtaagta

SEQ ID NO: 153159 - DNA, 583 bp, Cannabis sativa
  modified_base (522)..(540): a, c, t, g, unknown or other
agattttattaaactctagatgtattatttgtattatatatgaaatatgcaatttttataatttttactcgttgatgacggaaaatgtgatggatggccatttaaatgacatgggtaagtttagaatctttttcttagtgtaataaatagtggagataaatagaatatcaagtttgagtggggttatggcttttgatcattttacccgcagactttaaattgcttaagttttaggctaaaaatgtattttggtgattttaaatggaggtttaggtggctacatgggagagaagcagctggccactttgtttatttcagcatgggaattaattgattaggtttgatttatcttaggaaaatcaaagaaaaaaaaagaaattaagaaaatcaagaacttccctttctctttcttccttgcttgacaaccacaagaccagcctagacctgggatttttttctggtgttaattgaggagtgctagctgaattcaatgagtgattacttgttgggttttatgccctnnnnnnnnnnnnnnnnnnnataatcagatttacttattaatgtagatcagaaataacattta

SEQ ID NO: 153160 - DNA, 673 bp, Cannabis sativa
tcatttagttgattcattaatcatttcattttggttcttaggcattttgcttggtaattaacttttgcaatagaaattttatttttacagtccttgcggagacgatactcgttacgtatcattgtattacttgtttatgactacgtgcacttgcgtatatctaaatttttcacaacaagcattcatagtcttcgggatagtttaggctcacctttttgatagtcgtaagaagacaacttttgtaatgcaagtattttgcaaacttatgtagattttaacgggatcctgaacttatataaaatatgtttattattaacgtttaagttatttaagaaagttttaattatctctattttttaataaaccctttgattagcaaatgcatgcacaataattatagaaaacaccgtaacacgtctaatctagtagagtgttacaaaatgtcactcaatagggtgtttgttatgtgagtttgagttagagagagtagagttagaaggagtgctttaagggaatatgggaatatgaaactcatatatttaaaagaattaacattattaccattgagtgagctattaccaagttctggtggaggtcaaacaagaataaaggcatacactggctaagctgggacaagctcacgaaacacaagagcaatggtggtatgggattt

SEQ ID NO: 153161 - DNA, 729 bp, Cannabis sativa
  modified_base (244)..(246): a, c, t, g, unknown or other
ttcaccagtttgtcccatcttttcgtcaattgactgaatttgaactttaataccctgggaacctgaaacaagaaaaatcaagcgtaaaaccgctccaaaagaaaccaataaccgaaaaaatacttacttattagacccgtaacataggataaatataacctaacaaaattttcccaaactagattcttactcgccctcgagtgagataaagaaaataaaaactactaactacgctatcagatannnacaatactgctgcctcatgttctgttttcttccttgcgcaaactagaatttcaattccaccaactctaacaattaatttagatgctcaatttataacacaatgcacaaacacaagatgtattcacaatcgaaacaatgttataaaagttttactctttccagctgttccacaacctgatagctcataagcttgcatgcttacctctctccgctaatgttgacaacatcctttcagaatcaataggtctttttgaggtttagaacacatggcttagatatttggaaatcgaaaaacagttttggctaaagatatcataagcacacaaacagaacccacaagcttcttataatttcagacaacccataaagtgttcccacattaaccaagaatgagaaaacactacaagaattatggttaataccaacgccgctattaccaacgcctaaaagtcctcattaaaaatgagggtatcaataacgaca

SEQ ID NO: 153162 - DNA, 530 bp, Cannabis sativa
ccgccccattagggacgggtacccgtaggtacccgaacccgcgggtataattgtcatccctaaattctaatcttaggtgattttatgagcttttttaccaatgataacaacagtgatgcacactcttaaaaattactcataaagatgagtgttaattaatacttcatatgataattttttaattaatttctacgcttgaaattacatgtgattattttttttttataacggtattcgttataattataattgttaaaagattaatacctattctacaagtatctagaattttctatcattgtggtaaaattatagaatttcttagaatcatagagagttaatagtcataagaagtttcaagaatattttagattataataaattgacaatttgctagaacattctagcataataatgtaccattctttgggtaatataaataggggagtaggccctttgatggtgcatggtgagttgagtgtacaagtaaagtgtgtcctagtgtattcaactaagtcccaacaaaactc

SEQ ID NO: 153163 - DNA, 509 bp, Cannabis sativa
tacttcaaattttccaattctttcgtataatgggcccgatgggcccgatgctcatttgatttttttttaaaattttttcatgtttatattttggagtggtccgatgggcccgatattggtccgatgatctgactttttaaaaattcaaaccaagcccaatgggcccgataggggcccgatgcattgctcgatgcccccacttaattttgttttcaaaatttttttctgtttatatttttgcaacatgtatttataaattttgtgtcataatttttttttataaattttgtaacatgtatttttttttttgcaatcttccatagttccacgacttttacttccagtgtctgaacattacactggtcgtgttacttggcgaggcagtagttggtattaccccaaagtaaaagccaaatttgtggaaatgcaattgttggaaagggtaaatgaggaatcccctttcaagaatttttttgagagagagccattagcgttttcgggtgctctta

SEQ ID NO: 153164 - DNA, 559 bp, Cannabis sativa
ttaattatgattcacaacaacccttaaggttaatggttattgagaattcataactaatcattaataatccacaagtcattgataaaaatctaataagttatgttctttagtgattgcttacaatttctaaaacaacatgcatattaaaccattttctcttttaagagttgttggtccattcttaagatgacttattagaacaataagataattattttttagtgattgcattctgtacaataagagttcagctacaataataatttgagacacaaattaaactgtggaatgcaaagaattaaaattacagtacaatatgccatgaatgaagaaataaatatctaaaagaacaatgaagtttatctttagttaatttgcctaatggggtggagaacattaattaagcataggttttttaccaataatatttattaggcaacaatgagaaatataaagatatacaagaatattcattgctaagaagttcattttaaactaagaatcaataacaaaggagatttacattctcacttgtctttataaacgattctattataga

SEQ ID NO: 153165 - DNA, 1574 bp, Cannabis sativa
  modified_base (1329)..(1333): a, c, t, g, unknown or other
agaatatggatcgatgcgtgtaacagtaattacatttaatggaatagctcattaaatgtggaagtgatagagtatatttacaacttgctgactataatgtcctatgcaagacaaagatatacaaattgttgcggcacgtattaacgagaaaccatacgacattggatgcacaaggcaagacatgaacttcgttatgccttggaagacgtacgtgatgcataatgactgtgaaaacacttagagtataatatacaaactaagtacaacttcggatatcttttagtgagtttatagtcttgacaagtcagaagctgacattcaaattatgatgactgctgaagtactctttgttagtaagaactacgattgtcaaaatgaagcgttatgccttcaagcaaagaagcaacgagatgtacatcatcaacctcacaaagataagggaaaagcttcagctcgctatcaaggtcattggtactgagttcgtgctgagacatcccagaatgttatgatttaaaacgtgtttaatacgcgatcattttaacgcaataaaagcagattaatcatagttgtgtgatatttacataataaccgcatttatactatgtgatatgtaatgaaaccccatgattttagggcataattgttgtgaagattacagtcaactctgtaattaactgcctactatgtgattataaataaaggcaagttagactgaaaaggaatggaaaaattcataagagaaaaggccctagaacaatataaaaaatctaataagattgactcgtggactatgcaaaattttaactgcaaaaccacgtaaaaaatccattgtgttcatacttttttctttactatctttatattcggtgcaagtttatcattcaggctcaattttggttaacaaaaatctacgttaataattagaagatcccgagctggcgaacattcgagattatgcaatggttggttggcctaaagacttttcaaactcgaataatggaatgttactatataaagtttgagtttctgttcctaatattgttgaactcaagaaagaaatccttgatgaagctcataccacaccttattcactacatctgggaaccacgaaaatgtattaagatctaaaaccctacttgtggtgctactggatgagaggagatgtggtagattacgtgtccaagtgcttaatctaccagcaaataaaagctgaacatcaaaggctgacagggttattgcaaccattagcccttcctcagtggaagtatgaggacattgcaatggatttcgtaacttgttttcccagaacaacaggaatgtatgattcgnnnnnggtcatagtggacagattcacaaagtcagctcattttctgatagtaaaagttacctatacagtagatcagtatgctgaactgtatgttaaggagatagttcgtctccatggagctctaaaatccattgtttcaaacagagatccaaagtttacatcaaatttttgggttagtattcagagggctatgggtacaaagctgaagtttagtacatctttccaccctcagactgatgggaaatca

SEQ ID NO: 153166 - DNA, 554 bp, Cannabis sativa
ttacatatcacgtaatataaatgcggttaatatttgaatatctcacagctatgattagctcgcttttactgggtcaaagtaaacgtgtattcaacacgttataagtcataatattctgggatgtctcaatggaaactcagtaccaatgaccttgatagcaagctggagctttttccatattttttcgaggttgataatgtaaatctcgtcgcttctactctgaagacataacgctccatctgtcaattgcagttctcgatgacgaggtaaacttcaacaaccaatatcatttgaatgttagcttctatttgagagaactgactcgtcaagactataaatctcactaaaagatgcttgaagctgattggtgaaagcacaaggagggtgctttcctatagcgagatgggcgcctcgctattagttgcttgggtttacccaactgttatacttaatttgtatactatatattatgcgctaagtgtcttcacagtcattatacctcgcttacgtctactcatgcataacgaggttgatgtctcgccttgtgcatccaa

SEQ ID NO: 153167 - DNA, 500 bp, Cannabis sativa
  modified_base (92)..(92): a, c, t, g, unknown or other
tttcaaaaaagaattttttttttcgaaatgacatgtttgcattataccatgtatttccagataaattccggttaatcatacataaatgcccnttaagtaattttaaagagtaaaactttgtgattacttaatataaataattctctttattcataactgaagtttttattttacatcattaatgcgagttacataatttatttattggtagtacggttgcaaatgttccatgttccagtagttctgtattagcgagccgttgagttgagccaatttataaacttcaactccaactactacttcgatgacatatggaccctcccaattcaggttgaacactcctactgatgcatctctagtatttgaaaatactcgccttagcaccaagtctccaatattgaatagtcttttcttgacttttttgttgaagtatcttgtaactcggtgttggtatgttgtattggtgatttacgactcaattcgtttttcctcaagtagat

SEQ ID NO: 153168 - DNA, 710 bp, Cannabis sativa
  modified_base (246)..(255): a, c, t, g, unknown or other
atttaaataaataaaataccaaatttaaaagttagcaaaatatcctatttctatttaaaatatcatgattaaaataatcttattttaaatttcaaatgaggtcattttatttaaaaaaaaatctaaatatctgaacttaaatttaaaaataacataaaataatcaaattttaaaaatataataattaattaagccaaaaaaaattagatttttacatattttcaagcttcaaatttcactaatatnnnnnnnnnntttaaaaaatactagttaatttaattctgataattaaatttgaaatatgaaaaacaaaaatctaaatacaaaactacacaaaaaatttgaaattaattccatgaaaaagcatgaaaaaaataagaaaattgaaaaaattgtaaatggtacagatagtatgcgttgcataccatccgtgcgcgctgcctgggatgcacgaacgagaaaactcagtcagagaggcagaaagcaacctcgtccgcgcgcagaggctagaatttagacaagaggcatgagaccgagaaatctcggatagcctcttgtctgaggcgcgcatgaccgagtgatcactcggatccgcgtgcgtatggggtgacaccacccctatatttttttcaaaacatcaaaaactcataactaatttaaattaaatctaaatcaagttctgtaacaaagtgaattgcttaattttttcc

SEQ ID NO: 153169 - DNA, 515 bp, Cannabis sativa
  modified_base (464)..(464): a, c, t, g, unknown or other
ttttggtgttgcgaaatatcagtaacaacagtatgatattcttttgtggcattctttttcatttcaatggtaagcatcaattaaaatgtactaaaaatgtatcaatgtcatcaagcatccttcatatcatctccattagagatgctctaaggtatcatattgttactgatacaattaaatatcgaatctcacttattttattttgataataattacaaaaaccactaactatttagagcatctccaatggtagcatattttaaggatgctaatgttgggaatattttaccaggatctagatttactgacaagtatattgattaacattataaatatgaatatctctaaaacaataaaattgaacacataagagtttaaaaaatcttacattgattgcaacgaaataatatgattcctaccgctcagatctctaacccttgttcctttttgtcgcagagtattancaagatctgagtctggatctctttttttttccttcgggtttggttaccacc

SEQ ID NO: 153170 - DNA, 625 bp, Cannabis sativa
aaggctgcttccactggaacatccgcccaacttcctcattattccagcaattcaagtggcaagcgtttaggcaacaaccacaagcaaggaaacagaaagaagggaaagtttgtcgaaaagaccggacagaatccccgtgatcatgccaaacacactgcattcactctcttaaatgaagatatagagagtgtgtatatggcaactcagtcattaatttcgtacaggaagcccgagcccatgaagaaagataccaacaaaagggacatgacaaaattttgtcggttccacggagactacgaccacgacaccaatgaatgctacaacttgaagcgggaaatagaacatctgatcaagaaaaacaacccgcacttacggaagtatgtcaaggccaaccaaggtcagaataaccagggtctgttgcctccaccaatagatggacacttgcaagtcattattggaggcccacacatcgctggagataaggggaaagctcgagagagatatgcctgaaccgctaagtacgagcaacaagaagttatcctggtcgtggaagagaggaaacccaaagttccacgagcaggagagccaaccataactttcaacgatgaagatgctgtccagatca

SEQ ID NO: 153171 - DNA, 641 bp, Cannabis sativa
ttatataaattaaaattctgtcttaataataaatttttaaataattaatttttttttttataattacgagagtaagaggagggaagttaatttttaaataataattttttacaattacaattacaattctgtcgtgtttcaaattttttattttatgctcaatcatgatgtttcatatacattatcaagctcgattaattttgtttttaattggataatcttgctgcaccacttttaatattgattatttgggaaaatggagaaaaacgagggatcatcgtaattttggcgagggaaaactcttttttttttttattaatggagaaaatttattttaaattataaagagttttgttataaaaatttaaataatttaactgtaaaaaaatttgctaaaagatctttatttaataataaattgcaaaaaattaattaataattacacttaatttaatattaaaatataattaatattaattaaaattttaaaaggaaataaattaactggttaatatcaagttacatgtcatttttatttatttttatttaattctaaattaaacacaaccaattaatagtgatctaatggctaaaacaaatgtaaccatgatggttacaataaaaatgtaaccattgaaacc

SEQ ID NO: 153172 - DNA, 1056 bp, Cannabis sativa
aaccgtcattcacgtgtgtcaccatgcacactgtctgagtaaccgtttgcatgcatgcccatgcaaagtcacgtccatctaagcccatcacgtagtcaagctcagctaacatcctccaaagttgttgagcgcctatgctgttgctgactgctgccccatggaaggtgcacttcactcatatgccgctatcccacaagctaagcatcgagtgatgtcaaggtccgccgagcgaacccaagttagggtctcacaccaacctacatatcctcatacatattagatatggagaataattttattttaatctcaataaaattgcacatgtataccatcaacaatttatctgtgaataaaacttccactaatatacaaaaaataattagcaattttcagcagtgtaaaaatttggtacatatatctaattatttatattattattgagaactcgttggtacataaaaaaaaacatataagatgaaataacatagcataaagataatgtaaaagaataaaagggagtgatattaaaaggaatgccaaaccaactctttccttttgttgatcattcttgaagaaaaaaaaaaagaaaatagaagaagaaggagataggtcgagagagtgaaagaaataagattgataaaaatataattttaagttatttataattatgtttagcgtcttttgtttttaatatatatagctagcaaaagtttataaattaaaaaatagttatatatacacatgccaaatatcttagctatatattttttaatgttaattaattttttaattaataaaatattaaaaaaaaataaatcaaaataaaatcaaaaaactaagaacgtgtgataatagatttataaaattaataaaaaattaaaaaatgaaataattaagaagagaacaaataagattgaatagagagattctagagtgtcacgtcaccgcctcatttctctcctttatatatctattctatataaagtgtatctatataactaaaattcttggtttatgaaaaatttatgggtcatttttaatttttatttaataaaa

SEQ ID NO: 153173 - DNA, 742 bp, Cannabis sativa
  modified_base (309)..(333): a, c, t, g, unknown or other
cccaaaaaagatgaatttaacctttcattaaataattgttattaattgaataagtccaatattaattgggcctaaataaaactattataggtaatatttaattttagcaacttagtccatttaagtatttagaaataaatgggcttcctatatttatttaagcccaaaagtaaacatataggcacacatatgtcaaattgaattggatgagccctatcatgtttctaggtttatcgtagatgaaagaaattacaaaatttacctattacaaattatttatatgatctattaacaattggactatgattnnnnnnnnnnnnnnnnnnnnnnnnncaagttaatcataacaatttagatcaaataaataataggtttattaaaaaaaattaataaacaatttaaataaataaacaatacacaagtaacaatatgtgattattaattatataattaagttgtcatttaactaactaactaatttaaaaatttagggtagttgaaacaatcttaaatatctttttcaaaaaattcaaaattgaaactaattttaaaatatctagatttatttgaattattttatcaaattaaattaaatatataatcagataaataatttaaaaataaccaaatagatatggttagacaattattattttaagaataaaataataaagaaatgataatttttgaaattatatgtcaaaatctcttaaattaagcctttttcaaatttctacaaaaa

SEQ ID NO: 153174 - DNA, 570 bp, Cannabis sativa
actcttaaatacaagtacatgtatctaatgtatttttttggcattgtaggaattgagtaaggtgcaacgtgaaggttcctcgaaaatccaatacagacattgaagtggtcaaagtggaatggtgaacgtacgggaagctgtggtaagtaatgcttaaattgtaataatgtgtgctataaaatttaattggtactcatttaattgttataaaataatgtagaaaaaggatctcgacgttctaaatcccccccgccaccgtgtttggatcaaatctcgcaccaagagtcgaaaacttgtcactgattatgacaaggaaattgcagagaagataataagtatatatattaatccttaattgatttctactaatgatttagtgtatataattcacatactaatttcttgaatatatgagtgcattaggcttaattagaggagaagcttagtcaacgaaaaaattcaggtccaggacaaaagcgatatcctgacgcaggcgctcgggacacgagagcatcctggacgtgtcagggctgctaggtatgctattacttgaaatgttatttatttagt

SEQ ID NO: 153175 - DNA, 982 bp, Cannabis sativa
tggtaatatcagtaaggggaccgacagtggtaaccttgatcacaaacaaaaggatgatgcttctggaacatcacggggtaatagaaagtttcggggaaacagaggtgaccatcagggtcgcggatcttcattccgatcttatcctgagtgtcaaaaatgcaagaaacaccattagggtgaaagtcgggccaagacttatttccagtgtggcatggtgggccacttcatcagagattgtcctcaggccaagaaggaggagcctaagaaaaatactacttagaacccgggatgactatttaccatgacttacgctgacgctgatgctagtctgtcagtggtgacaagccaattgtctataaatggttgttcctatactatattgtttgattcgggaactacacattcttatgtgtcgagtagagtaattgaaagtttccataaaccatgtgatatatatgcttcagggttcggtaccctactaccttcgggagaccttatagtatcagctaagtggattcgatccttgtctttctcgattgacggttgtgaattaactgccaatctaatataattacaaatttctggttttgatataatcttgggaatggattttctatccaagtatggggcaacgatcgaccgcaaacaaaagatggtggtgtttgagcccaatagtgctaacccaatagtgtttgtgggtaaagttcaggggacatgaataccaagaataacacttttgaaagctaaggacctaatgagcagaggttgtctgggattcatagtcactgtagtggataccagccaacctgtgacatctagaactgagaatacaagattggtgtgcgagttccatgacgtctttccagaaaatttacctggattgccacctacctgggagattgaatttgtaattgagttggttccgggagcggaaccagtatcaaaagcaccgtatctgatggctctagtggaattgaaagaa

SEQ ID NO: 153176 - DNA, 670 bp, Cannabis sativa
ataagtaaaatattataaatcatgtgtttgttattttctctttatttctaaataaaaattggaataattttttattattttatatatataataattttatgagtattcaacaaaaattaataatttaaaataaaaaaaaaatctatttcttttcatttgttaaataacttaaatgattttttttttaatttttaatatttgacaaattttgaaaaatgcaaaagtgcatgtttctttcattttaaaaaaattataagggtgattaagaaattatttttatttattttaaatatatttaaaagaaaattacgataaaaaactcttaagaaaaaacttttcatatgaaatacttgacaaagattaaaaaatataaagaatgtgttttgcattcatttataaaaattacaactaattgtgcatgattaagttcttcaatcacttacataaaaataaataaataaatgatgctaactttgagataaattaaagtgaaaaaatagtgatttatacataacctagatctatatcaccacaatggtttttaaaccatgtgagactttttaaaaataactctcatattctaaagatataaagaaaatatataacaaatgtgaaaaaaagagaaaatacaaaaaaaaaaaaaaaaaaagaattatagcatgtcacctct

SEQ ID NO: 153177 - DNA, 1341 bp, Cannabis sativa
ttgaatcaagtgaagccataacgagaaaaatcatcgataaaagttataaaatacttgtttctgtacaacgtggtagattaaggttcactgatgtcagtgtggataatctctaataaagagtgactacagttagctgtctactttcttagtttagtcaatttttcacaagtacgtacaatcagcacaagtatcccaaacagaatcatcaagaggaggaagaattttagctagaagtaatcgatcaactctttctttagaaatatgacacaatctatcgtgccataataataagaatatttccttaaaaataagaggggatgttaagagagccaatgaaaatttaaaagaccatcaggataaaaaaaaaaaatcactaatctagagtcattcataatgtcaatattatgattggcaaaaggaaaagaatatcattatttaactaaaagcgaaagcaaaattaaattcctcttaaaagtaggaacatatatagaaggtattgttcaaaacaatctgaacactaaactgtaagtcaagaataaatgtgccaacataaataatatcgactctaacatcattaccactttaagctttaactctctctcacttggcttcctgagattcctagcccctggttatgggtgcttctattcatatgttctcaatccttttgttggccttgagttgagaaacatagtgagaagattcatgcttctccttttacagcttgctcctcagctacacactgagaaattaggttaccgacactccatgttttattataagtgttgtagactgtcttaataaagctaaacgggtcagaaagtgtatgaagagcacgatgaataatgtaagagttaggaagaggaatattatgatctttcaacttgtactgaacattcacaattttcaaaataaaacctcgcacttctttgatttatcatgctaaatggttgtcatttcattcataagacatccagctgcggcgttttcactagggtcaaatagtttttctactgttttgaaaaactcattagcatttgtggtgtttggcaaaccactaaataaatattcaggaattaaatttttcatagcaatgagagagactaagacgattgatttgaattttttcattgtgcatgaagagttttctaggcaacagtgctgatatcagtaagatcagcagatttttcttctcgcaggcataagtccaagtctattatgtctaaaatagtttttacacctcgtttccatgtcttaaagttggaagcattcaaaatttagatgaaaacgttattgttgttctcagaaaggagaccaaaaaatttaaaaattaaaacttga

SEQ ID NO: 153178 - DNA, 543 bp, Cannabis sativa
tgcccgggaccctttctgctcaaggcatcagccattacattgtcttttcccggatggtaaaggatctcacaatcataatctttcaactgacgggaggcataggcaataatccgatcgacctgcatcataacacaccccagaccctgtttggatgcatcacaataaaccacaaatttctctttgtcagaaggcagagctaacactggagctgtaattaacccctgcttcagctctagaaaacttgattcacactaatccgtccatacaaaacactgattctttttggtgagttcggttaagggtgtagaaatttagaaaacccttcaatgaaccaacgatagtagccagccagacccaagaaacttctaacttatgtcactgttttcggtcttggccaatccttgacggattctatctttctcagatccactttgatcccatctttactaacaatgtgtccaagaaagacacctgagatagccaaaattcgtacttcttaaatttggcatgtaacttatgttcccgaagtcgttgcagaaccat

SEQ ID NO: 153179 - DNA, 550 bp, Cannabis sativa
  modified_base (239)..(243): a, c, t, g, unknown or other
tctatgtgcaacccatccaattaaaaaaaagaaaatagtactaactcgcccaatgaaattagtggtttggtcagattaacccgtccaaaccgactattaatatattttttcttaatttttacattcaattgttatattttagttaattgtaataatgagacaaatataattcaaatcaaccaccataaaaaaacatattagtttgaactttatatttttttaaatagtcatataaattnnnnnatatataaatatataaaaatcctcttaatcgggttgtttgggttagttccggttgattgttattatttttaaccaacccaatataaagattgggcaggttatattttcgtcagatttttcggtttgtatttttcgtcgagttatctcaatttcatttgagcgaattatttgagttgagcgatttacaaaaagtttatgtccaatctttatatgttttaaaataaaaccaaaatataatatatatatatatatataaataaaaatacttcttaatgggtattaccaatgggtaataaacaaatttaac

SEQ ID NO: 153180 - DNA, 1506 bp, Cannabis sativa
  modified_base (239)..(248): a, c, t, g, unknown or other
  modified_base (930)..(934): a, c, t, g, unknown or other
agagcgttctatataattgatagttcaattcgaagttctatggtggatgcaatgaggtattaataagttagtggatttacttggtaaattctagatttgcttattggaccctcggatatgtaggccgatggtccccatactagttgagataatactgcttgtaagactaagttaattgattttaattaatcaattataatttgaaaatttgactgtgtctagtttatgaattttcactnnnnnnnnnnttaattgtgaagaaaagagattgtaaggtttatttgttaattaagagacgatattaagtctaattaataaatatgttagatgacaattttattagataattaattttaattattaaataattagatttgacatttaagtggttaaattggaaaaatgacatttttcagattataagatgaacaattggaaaaatggcaaaattgcaaagaggggcccactatccatggccggccacttggggagcaattaaccattttattttttttcattattttactgctaaataaatctaacctaacccaaagtggtttcctataaataggtagtgatggcctcaaaggaaaagatgatgcaaactctttccttcagtaaaatttttgagccaccttctctctacctatttcgaaattctctctctctttctctcttcaaaaccgaaaccctagtgtgattagagtaagtgcccacacacattaagtggtactcaagcatagtgtgtaaggctgtgaagaatctagattcaagagaaggaaattcggacttagatcttggtgatactctgcaacagacaggatacaagggttagagatctaagtggaaggagacattaaatttctaatgcaaccactgtaaggtttctgaaactttatatgtgtttctttcatatcgttttagaagttnnnnnttaggatgttaaaaacatactggttagtaaatctagatcccgataaattaatttcaacaactggcctcagagtcatgataattgattaactttcaagaaatttggacttaaaacgatataggtgtggttcgaatgtgattcatgttgatctatgtgtttttttgatgattgtctgatgtttgcaaattttttacaaaaaataattataattttttttctagaattatttttgttggatagtttggaaaaaattaagcaattcacttttttataaaacttaattttgatttaatttgaattagttataaatttttgaaaattagaaaaatctggggtggtgtcaccccacgtacacgcacggatccccttgatttcaggggtgcgtgcgcattcggacaagccctctctgagatttctcagtcaagttgggttgttttgtctaaaaatttccccctgtgccgtgttttctcagccaaggtcccctacgtgctcgcgcggatggtatgcattgcataccatccgcaccaaatacaatttttttttttccatttttcattttttcatgtttttta

SEQ ID NO: 153181 - DNA, 743 bp, Cannabis sativa
ataaggggcatctatcttcattttcccctcattctttttctttcttgcccgatcctcttaaggagctgccttcaaggatgatttttttagaaactcatctgatgtctggttgatttggttggttgtggaggttattaaagcatcaaggtaagtttttggttttgtttccttaaatttcttaggttttaggtttgatattagttgggattttggtgattacgggattgaggtattaaactgagattagaacaggtttcaaggcttaaattagagtttgtttattaatgatttggttacaatcagagctgttagtgttgacttaatggaattttagggttttcaagcttaaactttacttgactatgttattttgattaaatggataaattgttgtgaattgatggttggattatgttgaattagtgatattggattgatctagaggtgttgggcaggtgtggttcagatttggttcaagtttggggagaaaaaactcaagactgctgcactgccagaaccggttgaccagttggttgtggtgcagaaccggtcgaccggtttgcctgttggggaaaaattttcactttcctttagggccagttttagggctcggggtgattttcgtgttcggtatagattgtctagaagttgtaaaacttattttggaactattagaagctaaggtttattggttatgggaattagggttattcccaaaattatggattaaggtatttattgaa

SEQ ID NO: 153182 - DNA, 655 bp, Cannabis sativa
atgcagcagggatatgttttctttgataggaaaccaatggtgatgaagccgtggaatcccattgatgattttacgaaggaagaaattactaatgttcctacatggattcagttgaagggattgcatatcaagtactagggggagactgctctcttcaagattgtaagccaaattggggaaccgttacaagtggataacatcacgaaaaacagagaaaggttacagtatccgaagattctagttcaggttagcctttcacaggactttcctaactcgatttcttttactgatgagtttaaccatgatattgatctggatgttaagtatgaatggatcccccttgtttgctataattgtgctggtattggtcataagagtgataactgcaggaaaaaggagaaagtagaggaaaaggggaagcagatctgggtgccaaagcaacaacagaataaagctgtgaaagaaactgatggtgattgtttcagagggtgactaagggaaaaaaagttgtagtggaggaggaggtggttccaactgtagtagggaacatgtttgattctcttgcagatcaagactttatgggagggggggagatccctctacttccaatggataggttgcttggttggaatgtaagggggattaacagtcaaca

SEQ ID NO: 153183 - DNA, 903 bp, Cannabis sativa
aaattttcatttaacttattcattaattagaccttacaaagtctcttaattaataaataaatcataaatcctcttttcttctccgtaagcccttagtggaaaatttacaaacaagacatagtcttatttcgaattctaattgattaattaaaaccaattaattgagactacaaaataatattatctcaattagtgcggggaccatgactctatgtaatcaagcttccaataagtagatctaaaatttcctaacttattaattcctcctgactccactatagattcaaaattgtactcctaattacagaaagcgctctattaccaaaaaaataaatacgatttaaattacccattgtttcaatccaaatagtcaaacatcatctatagatgatctacatcgagtagggacaaatttatcattctaccgttcaatgtattttatccttaaaacactttagctacttgtaaatgatattcaataagctaatataattactaaaatgagcgctcaatcatttatcgtgttaagccaagcttaaagaaaatcattgtttcacttttaaaagttataaaagctatatattccatatctatgattagcgctcctactcaattgtactaccatgttcccaagatgtaagtattgggaagatccacttggtcaactttaacaaacaagtcgaagaacatgaataatacattttagccataacctaaccatctcagaattaagatctattgacctaagatcaactgagtgatgttgacttaaaaagatataaaagtaagtttatgatatcttatctaatgtcaatatcactccagttagatgtatattccatacattcgatactagcatactttgccaataccctagaaaggacataccacttatccaaggtg

SEQ ID NO: 153184 - DNA, 506 bp, Cannabis sativa
taaaatagtttatgagaaatacataggtcactttttatttatatataataaaataaataaaataaatcccattaagtaaatgctgaataaatccaaggattttgtcaatacgttgcaacatcaccttttaaaaaatgttcatttgaggcctattacatatatctatccgatataaaatgtggctatataacagaattcttggtttatgaaaaattattgggtgactttttttaaaaaaaaaatctattaaatttaagtactctatcgttaactcttaaaaaatataaataaaacctaaatataaattaaacccttaaaatcctgactcaactccaacaatataaactttttttcacccgtgaactactcagaggataaaataattctgaataagcttaatcaagaaaatctgcatatatgtataaataataataaatattaatgggtttcttcacaattccttgattctctatctcaattcatgatcgacttttcaggaaagaaaa

SEQ ID NO: 153185 - DNA, 549 bp, Cannabis sativa
tatgaatgccttggtcggctactgaactggtattcccagtctcttgcacaccaggcaggatatcatccacaggagtcgtcacaccgtaacctgtagttgattggtgtccgggatttagtgttggcagaacccttgtgtttccttggttctgcagtgcaggatccaccacctgcggattcgctggatcaaccacacctctacgagtctgtaccaccatcgtacttgtgattgaattcggaataaagagcgatcttcgagttcagctctcaatgaaagcaccaaaatattgacctcgacaatgagtctaattttgtaagtgacaagtagtttaatatgaacaaaatatagtaaagcaaataaagacacaagaattttataaaggttcagccccgagcagttcggtaattgcctaatcctcgttatttgtattgacttaagaacatggattaatggttcctctttcttagagctcttacaacaatatctctaaatatgaattcttagacaaaatccctcgaccctttgcccagtgagtatgaatcactattt

SEQ ID NO: 153186 - DNA, 730 bp, Cannabis sativa
cttctggacagtgtcctctcttggggcaactcacctttggttatgtattcgatgatggggatcatcaagttgagctcttgttcaactgctgccataatattttcggctttaatgcttggttccgagaggcgttcaacgggtaccaccgcagtttctcaatttcgctgtctgatgctagcttagccaaacagtcagcgtgagcattcttttctctggggattctttccactttgtagtccgtgaactcatggagcagctcccggacaattgctacatacgcgaccattttttctccgcgcatttgatactctcctgacacctagtttactaccagctgtgaatccctgaagacttctactcttgtggcccccacggcttttgctaaccttagccatgcaattaaggcttcgtattcggcctcattgtaagaagctatgaattcgaaacgtagggtcgcctggagtcgaagtccatttggggatatcattgctacccccgctctggatccgttttcattaaaggcaccgtccacaaaaactttccatgctggggtttgtggtgtgggcacgcttgcgctagcttctgcctcatggcactccgttatgaagtctgctagtgcttgtccctttatgaaagtgcacggtatgtaatgtagatcaaactggcttaattccatggcccatttgagaagtctcgtggacgcctccggcttctgtaggacttgtcggag

SEQ ID NO: 153187 - DNA, 555 bp, Cannabis sativa
ccaccatatcagcataggtggggttgtcatcagtagtgatcattaagtcatgtctgatcttcacattcaacgcgtccaggtatttctctttcttgttgaaatcgattggcacgattcttgaggttaaacttgccaagcgatcaaattgagtcatgtattcagtaacactcatgttttctttctgggtcaactgggtgaattcttttctttttgcacttctaactgcctcattgtaatactttcattaaatagttcctggaacttctcccaggtcatcgttgtaacatcctgagtcagggacaccatgtcccaccataccaaagcgtcttcttgaaattgaaatgtggcacatgccactctatcatcaccgatgatgcccataaagtttaagattctggtaatcacacttagccatttctcgtctttcatggcatcaggacctcctaggaaaactggaggtgctcgcttacggaacctttcatacaggggttttattcggttcactgcagctacaggttctgcctgcacaacaggggcaggagctattggtatttc

SEQ ID NO: 153188 - DNA, 567 bp, Cannabis sativa
  modified_base (310)..(314): a, c, t, g, unknown or other
ttatatttttattattaacaaactgcatcaacttagagtgatcttataaactacaatttttttttttttgaaaaaatgataaaaatatttatatcaaatgcatataaatttatactatgtggaaaaaataattaaaataaataaaaattaaaaattttatataaattttcaaaacatctacatttaaaactaaatgtatttcgaaatttacatcaaaaaatgattattaaaataaaataaaatatattctgaaaattatactaatttaagttgattttaaatatcaaaatttccaacttaaatataattnnnnntttaattaaatttattaaaatagatttaaataattaagcatcttgaataaaatcaacttaattattagttctaatttaatatctatgaaaaatattctaatttaagttgctctaaaattaattagaaaaaatttcaacttaaatatgtttttctacttaatttaatttctcgaaatagaaatgaataattaagtattttgaataaaatcaacttaattattaattttaatctaagttctaagaaaaatattct

SEQ ID NO: 153189 - DNA, 600 bp, Cannabis sativa
actccaaaacattttccaccaatgtgtatgattattagagccactcgtctctcttgcttcagccaagttttcggccaaatgaaagccagaattaaccgtatagcagcccgttgttgtgtgatgccaaatgaggcgatcatttgaaggaaagaaactaagtggaatcgtcacaattctatcaacatcaatgggctggaaataggcatttaagagtgaaatgttccactctctctgttcagtgataaaatgtgccacgggtagagttggagggcctgtgtagctgatcgccttgaaatcattatgaccaggaatccatttatcaaaaccagctaaaacattatagccattaccaatcttgtgtcgtaaaccttcaaccaataattcacgtccccaatgtataccttgccaagtaagagatggagaatgcccaagtcgagcgtccaaaaaattattattggaaaagtatctatgtttgagcaaacggctaagcaaagaatgaggaatttcaaagattcgccaagcttgtttcgcaatgagagctttattaaagtgcacaaaagaacggaaacccattccaccttcaaactttgacttacacaa

SEQ ID NO: 153190 - DNA, 513 bp, Cannabis sativa
ttcgagtttggggcctaggtccccaatgtaggtccggatcctaggtcacggtctatgtccaagtttaagttcgggtttggatcctgagtttgggtctgagtcgaggtcctagtatgggttcagattctagtctgggtccgggtcccggtctgagtcctagtcccttttcaatatcgggtctagatcctgatctgggtcctaatcaaagtctaggtaacagaccaggttctgatctgggtttaggtcctgagtctaggtctaggttcgggtctgtatctgggtctgggtttggggcctgggatccaatctcagtatcggtatgggtctatacccgtgtccgggttagggtttaggatttagggttttgggtttagtgtctaaggaatttagggtttaggttttaggggtacgtgtaaaaattttaggatttagggtttaaggtttagggtttagggtttaagggaccgcttcaagtctcggcttcaatttcgggtcacatggtatgatttaagg

SEQ ID NO: 153191 - DNA, 615 bp, Cannabis sativa
agtgaaacaactcaaaaacaactaaaataccaactgaaggaaggctaccaaccactctaactcaaggatgacaaaagtttgatgttttacataaaggtattaaccaaggaaaccaatttcaggtaatattcattatgtgtgtacacattcagcaacacagaatcacaattttttttttggcagctacccaaataaaagtgtgcaataatatgataatgaaagaaaatagcaatcactcagtacactcagatgtataacaacctgacaacaacacagaaataacaactaaacaacttttatctcctttaaggagaggatcaatttcaaaagatattattttagttgatattgatactttgcagctaaatcaaaccatacatcaacaagtaaacaatcaaaagaaaaccccctgtgaagtttttttgtgttatttttgcgacatcttatttcacattgaaaataaaatcaagttattttcatattgttgtaaagtttgttatggattttttatgcactacagtggttgttcaacaattaaagcaaatagagttgtacatgttaaaataaaaatttattttatctcttacattcagacatagaaaataaataatagaa

SEQ ID NO: 153192 - DNA, 538 bp, Cannabis sativa
tgaacctgagaccgtgtcacatgttctgttcaggtgcaattttgcacgttcttgctagaaattttcgtcggctgacactgatggtgctgatgacattgacttcagcagctggttttgtgacttgctgctgcattgcaggaaggcagttgtcgaggaagctgctatgattatttggcggatttggacggctcgaaatgatctcttgtggaataacaaatcaactactgtttcgaaggtgattcgatcggcaaaaactaatcttggcaattggcaaaatgctcaatcaaatggttccacacctttactaaatttgaattttagtaatggtagagagcattggacaaaacctgtttcaacaaagttcaagatcaatgtcgatggggctatccttgcagctgagaattggcttggaataggcttccttcttcgggatacgaattgtaagcttattgaagctttctcaagcagtaaaattggtgtggtttctcctgagattgctgagattatgggggttaaagaggctttaagctggatcaag

SEQ ID NO: 153193 - DNA, 1724 bp, Cannabis sativa
tcatttataggtagctaagttgttatactcgaaattcggctggtacttcaaaaggtgacacatgtcaatatcagggaatatgaaccgtcaaatataaagaaaattatgttattaaataattaaatgaaataactcattaaatgcagaagtcaatagggtatacttataactcacagactgcacagtccctagcaagacaaggatgtacaaactattgacttaagtattaacgagaaaccatttcgtgtctgaaggttaataccaaggaagatgttgaaaatacatagcgaggcatctactttgcgatatgtaaagagacactgacgaggcgagttggctgttaaaacgcttagcgtattatatacattatactaactaagtgtaatagctagaagggcatagataacgaataacgagatatccatctcgctataggaaggcatactcttggtaaactccagctcgctgccagggttattgttgctattgagaactcccaggacatgattgtccagtctgtaaggcttatggtcaaagagcggttcttaagtttgcttagtacatagtgctcatgccagtactagaaagtgtgtacgctaagtccttcgtctatacacaaggcgagacatctcagcgaggtacactctgtagcgtgtcctaatccacatcaacgttgacttccttcaacacgatataaatcacagctgtgtgattttcaaataataactttatttatttacgtgaggcataaattgagcccagaatttcaggacatatcgttagatgatttgaaatcaaatgtaattaactacaaacctatgttattaaaaataggggtagaatatacagaaaaaagggaagaaaaactttagagaaaaaagagaatacactgtttgtgaaagcaccctagttctgtatcaggaaagtctgaataagattgactcgttgtaacgccctgactgtcagggacgccacgtgtgtgttttacaaacttattatcactaatctattagtttaggaaaaggatgtggttaaatttaaaacctttggtttaatttaaactaaaaactttcattataaatagggttgtaatatggggatcccttgaaactatagttcatttacaactagtttacaaaacaattattacaaaatcaaggttacatttctaaaaataaaaagaaagggtcaatcctgcttcccggaagccaagacaccacggttgatatgtacactgctggatgacctctggctcatggctgaacacatttgttatacttcttacctgcaccacaaagcacccgtgagtcacggtgacttagcaagaaaagctactagataaagaaaaatcatggaaggtgatagcagatttcattacaacagattatacataccaataggtcatactctttcaacacacttcttcaattcaacatctatacgaataaacttattacaaaattaagagtattgctaactatacataatcaacatctccagtgtttcattaaacaccttaatcataatttattataaacacttactttaaatgcttcataaagcactctagttcacccattaacatatccacacaatttcagtgcttcataaaacactctaatcaagcatcattaaaaacatgattcttacatcctgggccactgagactggaagaaaagtgaccaatttcataagcaatataacattcattcaatcatactata

SEQ ID NO: 153194 - DNA, 567 bp, Cannabis sativa
  modified_base (434)..(446): a, c, t, g, unknown or other
aataaaatttaatgtaagcccaaataaaaagtctaacaaaattctcatttgtaacaatttgtgaatcacttggagggaagctactagccaagcaacaaaagagcttactcctccaaaatctgtttggcacccaatagggttgtgagtggttaagatccaagaagttatataatataatatccctaaagaattggtctactacaacaaattcctacaatttcgagatttaattgattcatttgttaacgcactaaagtctgattccctcatattttccatataaataacaaatatatattttagagagtcaagatatttctgttcaaaaagataatagttttcttgtacttttcttcgaaattccatataaatataaataaattaagttgcatatcactccctctcttatctcttttcatcaaaattacatattnnnnnnnnnnnnnatttaatttataattaacacaaatacattatatagatcaataatatattgtagatatataaatacatgtgtatatctttatatattaaaagtgactatctaacggcatttcttggtttaac

SEQ ID NO: 153195 - DNA, 556 bp, Cannabis sativa
  modified_base (97)..(136): a, c, t, g, unknown or other
aatcaagggctagagatctgaacaaaatgagtcattatattccactgcactcaatgtaaggtttactaaactccctatgtgtttatttcattgtttnnnnnnnnnnnnnnnnnnnnnnnnnnnnnnnnnnnnnnnntaaatctagatcctggtaaaatttccaacggttgttgcgtagcttttgtatttcttcctttagggctagcgctccctctttatctaatagccttctcttttgttgtactagccagaaattaggatcaatatttagaacgtgcaaaatgatagaaggatcgatttcgaccatatccgcatgtgaccaagcaaaaacgtctaggtttgctctcagaaattttatcaatgttgattttacttcgagcaacaaaccttttctgatctttagctttctggccgggatatctagatcgatcttgatctcttctaattcttctataggtccaacattgctacttgggtccccaagtcgaggatccacatcttcttccccgcattgggaagttccctacttggaaatgttttttcctttgtctgtgct

SEQ ID NO: 153196 - DNA, 724 bp, Cannabis sativa
ttgatattgtgaaattcctctctatatgtttactcctcttagggtgttggattctttactatttggcaactatatatgtgttatcaagaagtaaaactagtagttaatccatgactagaataactccacgaactatatagaacttgccttaggctgaataattgtttagtagccttttgggccactttaatattcagtctcaccggtagagttagagactccagataggtttttacacttctcataaatcactgctccaccccgagagtaatcatcatcccagatttagactttctagcttcaatgtaaatctagaaatctgagtcaatgtattgtaaagggttttaaataatcacccttgtagactaacatataggtccttttttaatcttaagatttattttattgtcttccaatatttctttcctagattaaactaatacctactcataattcccactcaacagtaggtgtatagtctaatgcataccagagcatacatgagaccactcactatcgatgcctaaggaattatttccttggcctttgtcttttttggaatagttgaaactattccttagataaataaattctatgtctaggagtcaaaagacttcctttagagttagccaatgggaaaatgctttagcatcttactagagtaagttgcttgcactaaagtaagtaaattaccaggtataccacaagccataggtttagataa

SEQ ID NO: 153197 - DNA, 508 bp, Cannabis sativa
agagcaccaatgctgtctagcacctccacaaagtgggataatgcttttggtacatgtatcatcctacatattttaaactcgctacatcacatacagttataataaaatttactgaagatggttaaagtagaaaatatgtaacaaacctaaaataaaaacacaacaatcaatttttgttgttcaatactcttttgagggccaaagtaaaaactcacaaggatggatactacatcctcctatgatgttagcaacaagaggaagtagccaagtgtttgttgcaactgttgtaatagtcaatgacacctaattggctaacgtgatatgacaagaaaatgactaggatgtcaaatacaaaaccaacacggaataactatattctgtctacttatattaaacaaatcttcacaaaaaatacagttttgtcattgcccatgcttgatttgaatgaagcaaaatgcatccaacgatttcattacaagagaggagaataacatgcaattaattagaa

SEQ ID NO: 153198 - DNA, 569 bp, Cannabis sativa
atattttgacaattaatttgggaaattaaattgggtaataaatatcaaaatctgaccatatataaaatatcacccaattaatattgtccagattcaatgaatataaaatattcacttatctcaatattaatttttttattttattccataaatatataatattctaatattctcccacttggtcagtatttagactaaaacattcaaattcagtgttcctcattatataataaacatatgaattatagcgatatgtcctcattatatgtcgagtattatcttccatgtattataatatatttaccatataacaatgtacttaagtgaataaaccctaaaccttatatttatttaggtcctctaaatttttttcaaatgtaaaattaagatgcgcataaatatgagaaaataaaataagagtttcattaataataattttatttgtacaaattacaacaggaaaccaagttccatattctctacaggatacttgaatttatgaggtgttaagccttttgtcataggatcgacaattatcaattcagtgctaatgtgttgaatgaccactt

SEQ ID NO: 153199 - DNA, 506 bp, Cannabis sativa
agagatatcattgctgaccagagacgaaacacatcctccactagaaaatccaaaacttaacaagagtttattaatgctacacaatactagctattcataatgaattaatatgttatagtaaatgttgtgttcatttaatgaactggtaattgttatagtgagatttttctcacctacacactcgagaccagactcctatttgaagggcacgtgtactccatttccccgaggaaagatcagatgtcaatgagagactcctcgagttcaaaccttgcctgaactagactcagcaagatgatgcggatatgactaagtctaattgcattcgtctgactcacattatgtaggaccaagggacaaatttaacctgcaaatactaagatatatgtgagtatccccacgatcctgctgtgaaaacatagagatcaattctctatgttgcgagctggtcccgatgacccaacagcctcgataaaccgatgtagactcgcatgtcttggttctat

SEQ ID NO: 153200 - DNA, 539 bp, Cannabis sativa
ctataattatttctctttattttaaatacatacaaaattactaatattttaacagtgttagttagtgtataattcaaacttgtaaccatctcttttcagtattattaagcttatgtatcatctctcattttataaaaattattaaggtattgaagtgtgtatatatatgacataattttatcacaaaaagttaataaataaaatgaaatatggtttggtatttattttctttaagaacaatcacaaatccaatatgctaaattactaaattaataaagagatacaatgttactaaattatgctatttcaagaaataatatactcattgttgtttggttaattattagattacttgttgactacgttattattacatttacatttaatatatatatatatgtgtgactatgtgagcacttatatatatcattcatatggaattttggactcaaaagtaaatgaatcaatgtggattcaaaaatagtgaaaagataacaaaattagagaagcaattttgaatcttaaatgatcaaagttgt

SEQ ID NO: 153201 - DNA, 677 bp, Cannabis sativa
acacggaataggaccgagctcgtgaacctggcacccgaaatggaactagactgggacccgagatcgagattcgaatatggacccagtgcttggacctaacctgtagtcagtctctggatctgggaaccagcaccggactcaaacctagatcaagacccgaacccagacccgaacccgaacccagtcccagatccaaacctggaccttaaccgggacccaagaacaggaccagaaccaagacatcgacctggacctagaacctttaccagagttggacctagacccggaaccatagctagaccaggacctagagtccaacccagacctagacctgaaccgagaaccagacctggatctcaacccagatctggactcggtgccgaccctggacccgaactcagaaccaaacatggaaccagactcgggacacagaaatggggccgggacctaaaaccgcaccccagtctcggtcccgaacccaaactcggacctaggacaggggacctgaaccagaaccagaccgggacacgtgacatggatccagatgtgtgactcagactaggacccgaacccggaccaggaccaggacccgaactgggaccctaacccagactcgggacccaaaacgggaacctaaacaagaactgccagactaggaccctcgaacaagactagga

SEQ ID NO: 153202 - DNA, 594 bp, Cannabis sativa
tctcacaagggttacaaatgtttgctcaaagatggaagggtgtacatctctcaagatgtccttttttatgataacgtgtttcctttttctcaggtttcctcctctcatcctgttcattcttcaatgtcttctctaaatgcttgttgtttatcaaggttattcagaaagcaataaaatatatgtgaaagttgaagaaatagatgagtaataaagaaataacactggagtttttacatggttgaggcgttaacaagtcttagtccacgagtcaatattattacgaaagactagaaaagccttatgagattctaaaccctggatttttcatgagcaattaagaaatgagattctaaacctttccttgaatgtgtgttcttatatttatagcgctagggttcttattcgtttcacttttctcactaacggggtaaatacaaataacatattgacttgggctcaaccccctaagtttaagggagcctgttaatgaacctaagccagctgagctgacatctagtagttaatgtttgttagctcaatatagttagttagatatcgattatatagttagttgttatgttagttacagttttt

SEQ ID NO: 153203 - DNA, 693 bp, Cannabis sativa
tccgccacattcttgaagtattgatgcaaaggcatcaatgccccttgctgaccatgggcacccgaccaggcgcacatccccttttctagatctgtggcacgatttgttgtgggcaggaatgtagcaatcatgttcgccaaggtatccgtcctggtcgagagtccgaaggcgcgcctcagtaaccctagacggagggcttaccaacatggcgcccaaggcacctttccttctatgaggaactgcaatagcaagttcctcacagacgtagtccacgccctcaaccaagacatctccgtcagcatcgactggctccccagccacgttgtactccccatagtttgggggttcaacctctgcctattcctccgcctcggtggaactggcagggcgtacatcttcctgctcctcgatctgctggacctcagcgtccccttcatgatcccctccatctggacggctggatcctattcggcgctgggcaaagttgcgtgcctagccacttgagggtcagatgcgtcagccagacgcgttattttctttgtacgagccatcattctatggttgggtacagggtttggagaatgtccttcactagagggaggtgggctagaacgaagaagaggatgatcctcgtgcaaaagttgaagcaggtcctggtcgatccgatgtccgttctcccaagactcacctgag

SEQ ID NO: 153204 - DNA, 563 bp, Cannabis sativa
ctctaacctttgttcatttttgtcgtagagtaataacaagatctaagcttagatctcctttaagtgttggattcttcacaatcttccacactatgattgagcacttgacttgatatgaatgtggatctactcctatcactatagggacgaaattttgatgaagaaaaagaagagaactcaaaaaattagagagaggagcctctcttttcaattctgtgataaaatagactaatgacgagttatcaagttatgagtctgtcatgttctatttataggctttcatctagggctaggtttaaattatatagattaaaaaaagataaataaatggctaaattactccttaagtggttgaccacttagtgtggactccactagttacagttttgctattttatttcataattcatcttttccttttacaaatatcatattttaattttaaaattttttaaatgccaaatctatttatttaataattaaattaattataaaataaaattttcgtttaacttatgtattaattagaccttacaaagtctcgtaattaacaaataaaccct

SEQ ID NO: 153205 - DNA, 803 bp, Cannabis sativa
gtgaatttgggttttagtggctgtaagggttagagatgtttagggttcaaattatagggttcatttgagttgaatttagttcctagcaactggttttgaggtttggattgggttttgtgtaagtttgagctttgagttcaaagctttgatctctaatggcatgttgagttttaatgagtttttttgtgaaatactggttggaatatgttgtatatgcattgtttaggtactctggaaggtttggtcgcatttggtggaaaattgagcaagaaatagaaagtttggggtgaactggtgcaaactggctagccgaatttaccagtacctctaaaaccttctagccggttttggcagggtccccaaacgctttattttctcgatttttgtccatttcagtgccgtagttgggtgtttccctatttctagagttagagtaacctctagggagtataacagaacctagggttgtgggttcgggtttcccggattagggtttttgatcgtgtgatttacccagtttcattatgtgattagggtccatctagcgtgagactttccgtttaggtcggccagcacacttgaatccagaaagaaggtaagaactgtgtataatgtgtgataccaatatctgagtgtatgtatatgatatgtgtatatgcatgcttaaaatgttaattgcactaccaacacttgtacagttatggtacaaaatgcatcggtatagtgagtattggttaggagtacagtactgtgataccagcacaagtacgggaaagtactgagtgtgtgtggtatatcactca

SEQ ID NO: 153206 - DNA, 596 bp, Cannabis sativa
  modified_base (209)..(211): a, c, t, g, unknown or other
ttagggcacaaaaccaaacagttaggtctatgctgagctattcaactctgtcaacgtcattctggggatatgcaatacagacaactagtgacattttaattgttgttccatttaaagctgtcccaaagacacctctcaaactatggaatggtcgtacacctagtttacgccattataggattttggggtgccttgctcatgtcttaagnnngaaagaaggcaaactagaatcgcgaactgaagtttgcttgtttgtcaaaaattctaaatggacttggggtggactattttatagtaacaaggataacaaagagtttgtttctataaatgctaccttccttgaagattactattaaagacttcaagccaaaaaaacaaagtagtgttagaagaaatgctttcagatataactccttctaatgttccatcatcttctactcatgtagaagacaatcccactccctgggttgaacctttacaagttgatacaaccgagaaatctttcacaaatgttcctgttcataaggtcacgactcctcgtcgtagtgggagggtttctacaaaaccatcttgttatggcttggatggtgaaatca

SEQ ID NO: 153207 - DNA, 742 bp, Cannabis sativa
aacatcattgagttcaacgagagggctcaggtattcgttcgaaaagaggaagcccgaaaagaaatgaatttgttgaaaacaggctcgggaggcaaacctagcaacattttaacaagtacagtttcaacgagaattgacaacttggggccttctggtgcgaagagaaaggacggttgaaggaaccgtcaaaggataaaaagaaacaaaagaagcacgataagtacgtgccagtgtataatatttatatcgagcttaataaaactcatgagaatatttacctcgcacatgagcaaaaggtttccttcgataagcctgagcccatgaggaatacgaggagcaaaagatatcctaataggtattgtaaattccataaggatattgggaacacgaccgacgaatggcgccaactgaaagatgagatagagagtctcatcgctcgaggccactttaaatagtacgtgaaaagacagggccatggatacaaccaaccaaatctgcccaataacccaaacaaccaagggttacaacctcttcctgtggaaggggaggacatcttggttatttcaggagggccacatatcgtaaaggaatgcaataacgcccagaaaagatatgtgaaagagataaataaggagcagtcggctttgccccagaaccttccaagaaggtgaaaatagaggaacctccaattattttcacggaggaagacgagaaaaatgtgagatattctcacattgatcca

SEQ ID NO: 153208 - DNA, 538 bp, Cannabis sativa
ccccgcaatcagccatgaaaatccttagttagaatgcgcgtggattggggaacccaagcgcatttcgtcatctttgtttgcttgtcaaagagcaatctcctcatgtactttttcttatggaaactaagttaggacctaatgttattactagatttcgtaatgctttacatttcaataatgggcttgaagtccctagagtaggattaggaggtggtttgatgttactttggaaaaatgatgttgatgtatctattttaaattataatactagtatatttgactgttatattgcttctcccaaccaaccaagatggcattttactgcattttatggagaaccttgcactcaactccgctctcaaacatggactttattaaaaagacttaaagatgtttcacctctatcaccacggcttgttattggtgacttcaatgagattctttctaatgacaacaagataggaggggcccttcgcaatgagactcaaatggaacaatttcggaatgtactagattgctgtcatttaactgaggttcc

SEQ ID NO: 153209 - DNA, 524 bp, Cannabis sativa
  modified_base (305)..(309): a, c, t, g, unknown or other
  modified_base (451)..(451): a, c, t, g, unknown or other
aaaacttgactaaaataaaacactaaaaatgaacattataacagcataaaaagcatgttccaggaacccctgttataaaaagttttataaaagaactttatacaatgatgcctcaaaaacataaaaccaaaatacacaatagatacagcccaaaacaactcatggcaactcggcacgtaggccgacgtggtcaatctgtacattgctggagaagactgtcacctcatggttgatcaagcttttatttgcctttacctgcaccacatagcacccatgagttacaaggactcaacaagaaaagtaannnnnataatcatatagtttattattcgaatactgtcatttatacacaatcagaatcaaacaaccacgaattgttcataagatgaattccaaatcacgactagcatctgccaagaataaacattagtatacaaatatttggtaatanaaaactattataccaataatagaattcatattcatttaatcatataaattatatatatgtattacctcataag

SEQ ID NO: 153210 - DNA, 1233 bp, Cannabis sativa
taagatcatggtaaaataattccaacagctttgactttcacaaaggaaggctaatgttgcataaaaattcaagctcacacttaattttaaaatatcaaaagaagaaagcaccatggggagtaagacagacttcaagtagtccttccattttaggaaggagggttgaagacgtgccatacccctagtgatctttcttgcacgaaaaacattgtgcatttgagagtaacgttgactttttgtgaggcaagctttggcttccttaaaagaaggtttaagttgcatataaattcaagctcagactttgcttgaaaagatcaaaaggtgaaagcaccacggggagtaagacaaacttcaagtagtccttccatttcaagaaagagtgttgaagacgtgcaatacccctagtgatctttcttgcatgaaaaacaacgtgaaagtgagagtcacgttgaattttaatgaggcaagctttggcttcctcaaaagaaggaagaaattgcataaaaattcaagcttagacttcgcttgaaaagatcaaaaggagaaagtaccatggagagtatgacagactttaagctatccttcctttgtgggaaggagggttgaagacgtgtcatacctccagtgatctttcttgcatgaaaaacatcatgcatgcgggactcacattgaatttttatgaggcaagcttcggcttttgtgaaagaatgctaaagttgcataaaaatttaagcttagacttcgcttaaaaagatcaaaaggagaaagcaccacagggagtaagatagactttcaggctgttcttccattccgggaaagagggttgaggtcataccatacctctagtgatctttctttcacaaaaaaaaaaatagtgcattagagagtcacgttaaatttttatgaggcaagctttggcatccgtaaaataaggcttaagttgcataaaaaattaagcttaaacttcgcttgaaaagatcaaaaggttaaagcaccacgacgagtaagacagacttcaagccgtcctccaattttgggaagaagggttgaagacgtgacgtacccgcagtgatctttcttgcacgaaaaacatcaagcatgcgagagtcacattgaacttttatgaggcaagctttgacttccgagaaagaaggctgaagttgcataaaaattaaagcttaaactttgcttgaaaagatcaaaaggagaaagcaccaaggggagtaaggtaga

SEQ ID NO: 153211 - DNA, 603 bp, Cannabis sativa
tttacttagagctaaatataaataaatatcttaaacaaaattataacaccatttaaaataattataaagtatgattagaatttatttaacaatttaaataatcatataactagtaattaaagctattttttttatatgcttttttacaacaccttttctttttattattagtttaattcaaaacacatatatatatactattttttttttgtttcaatgtaaaaaaaaaaaaaaaaatcactataactatatgttggacactaaataaattaaaaaataaaaaataaaacaaagaaaagaagaatatgaattgtttgtatttaaatttataataattggtttgacaaaaaaattatttaattagataaagttaatagatataatagaaaaacatgataattaaatatgctaaaaaaatttgatgaactaaatggataaaaaaaaattaataataatattatgataactattaaacaattaattggcaatcttttaaattaaaattatgaaaaacaatgtaaatagaacacaataaataaattaaaaaattacaaaatatataaagtaaaatttaaaaaaaaaatgtaataatatttatgtgat

SEQ ID NO: 153212 - DNA, 820 bp, Cannabis sativa
caacaacaacaacaacaacaacaacaacaaaaattataaaaatacagttgtactaaattttaaaattttatttataaaaattacgatttttaatcttttcattatttttatattatacacttgttagttatttgttatttagttgttaattttttattatttgaatattattttttttttttgaataaaaataatttttattaggcaaaagcatccgctaatacaatggactgaagagtaaggggaacatcactctcagtaaaacgacgacctgaccaatagcaaacaccacgtgccatacagtgcgcggctttgttagcagaccgtttaacatgacaaatagaaacattacttaaagaagataaaataaattgacaatcttgaacaaataaaccaaaaatagaaggcatagataccgaactaagaatagcttgaacaactaaaatgcaatccgtctctaaaatgacatgtgacttgttattcctctttatccaactaagtgcctctttgacacttagaacctctgcaatttcgggtcggcaactgacagaagaaatagttgaaaacgcctcaattactcggccatcacagccccgtgcgacaaaaccagtccctacctcatttgtgtcttcaaaaaccgccccatccacattaatttttaactgaccagcagttggcttggaccagtgttctcttgtgtcagtgtgactagaggtcacggaaatcgaatccaacctcttagactgagcacacgtccattgtcgaagagtggtacgagccatccatacaacatcaacagcactacaacttttaccattcc

SEQ ID NO: 153213 - DNA, 1524 bp, Cannabis sativa
  modified_base (1484)..(1494): a, c, t, g, unknown or other
cgaacacgaggtttgggccgacatctttacattttcatagcagatggagatgcacccactcccaaaattattttttgaagcgtacatgaaggcttgtgtgtcgcatccgaaagcaaagagcttgttctcagaatctgacagcgtgaacgacttactcaatgttagccctcgtctgcttctacgagttaaggtaccattcttatcataacaatcgtaggagtagcttttaacaaccttcatagttgcgttctccacattgatcttcagaacctccaatttaccaaacattagtttaggagaaccatcagtagtattagtagtgttgcatgtgagcaagaagtactgatcaatatctttactaatggcgcagttttcgtcgtcgattccgaaggggtatggcacctcaacatctccacattttgtctgacaattgggtgagtttaccatagtaagacctgctgctactgatgatattaatgcccataacaccatcaaaaagagacagcaccacaagtaattattcttcttcagtacttccattaataataacaataatattaataataatgatgaattatgtagcataagattttcttttttcatctcttacatttatatatatatatatatatatatacatagtagtctagttctatctttcttttgtagaaaaatttatataatagaacaaaaattttaaaaaataattacaaaaatatgttgatatggacaaattttcattttttctttttgaatttttttatttataaaaatatattttcagtaaaaataatttattgttgttttataaattctttttgtaacatttatattattgaaattattactattattgtctttctcaacacacctataataagctttcatcgagtacttttcttactatacttttctttggtttgtttagtaacaaagaacaacacaacacaacacaagtggtcaagtagttaaattaatacataaatacatatatatatatatataattactaaaggtaaccttagatttttctaagtcttctaatctggccaaatacatcagttcatgaatatgaaggtcgactaatattacaaaataaatgacctaggaaaagttgtttcattatataggaaaattctatcatagttacattattaattatttttgtccctactgatagtgataggaatgtctctatttgaagagtttaaagagatattttttgtggaaaatattggacaaatttaacatttcctattactgacggctttatatgttattacaaataaaataattagtatttttatttttggacttttgacactagctaatcatgtcccctaaaatataccacttgttaaaaattttctctaaaatataacagttacataattatgtatttgtattaagttttttgctaccgttaaaaaattaacattttattatcccttgaactttgattaatgcaaaaaaaaaaaaaaaannnnnnnnnnnaaaaaaaaaaaatcttttttttaaaaaaaa

SEQ ID NO: 153214 - DNA, 553 bp, Cannabis sativa
  modified_base (50)..(80): a, c, t, g, unknown or other
cttttagtcacaacataggaataaaaattaataattagtcacaatttttnnnnnnnnnnnnnnnnnnnnnnnnnnnnnnnaaagtaagatttttttatagtgatacagtatcgtctccacagaaattgatatagctagcaattaattatgtaaaaatcaatactaaataacttgggtaaaacatacaatattaatttgagctacgctaaaaactaagcatgaaaggaaataaaataaaaaataaaaaatgagcaaagtgatgagctagaacaattaaatctccctgcaaattcaatgtaatttcatagaagatgcattagcaaataaattttgtcaatcaaaaatttataaattaacatataatttttctaaacctatataatatgggctctcaagactaaatttaatatagtgaaaattacatgaaatatgagatttcataacaaagttagaaaaatatggcatttataggtttgccactcttctatatggcaatttttcacatttaagattttttatggtatttgatatgccatatttttataaacttatt

SEQ ID NO: 153215 - DNA, 908 bp, Cannabis sativa
  modified_base (300)..(305): a, c, t, g, unknown or other
attaacggtaattgataactctacaaaatagacttattttactatattttataagtgaaaattggtttagttcttgacttttttaattaatttactaagtttttagggatagtatcatgacttgcaagcttgatgtatcttgctaactatacaaaacctaatatagctttctttatcaatttgttagcaagatttagttctgctccaacatatagacattggaaagggattaagcacatacttcatcatctttaagggtactattgataaatgattgttctattctaataattgtgggtnnnnnnttattggctacgcagatgcaggatatttttctgatccacataaagtcagatctcaaactggctatttgttcacttgcggtgacactgctatatcctggcggtcaacaaagcaaactctggtggctacttcttcaaataacactgagatacttgtaattgacaaggcaagtgaaaaatgtgttttcgttaagatcaatgacacaacatattcgagggacatgtggttaacatctaataaagaagtaccaacaattctctatgaagataatgctgcttgcatcgctcaacttaaaggagtgtacattaaaggagataaaactaaatacatttcaccaaaattcttctttacacacaatctttaagagaatggtgatatcgatgttcaacaaattcgatcaagtgatgataatcttgcaaactcattcacaaagtcattaccaacatcaacttttgagaagatggttcacaagattggaatgcgccaattaaaagatctctatgaatgccgaaatgagggggagtaatttcatactgcactctttttttcttgaccgagttttttcccactggattttctcgacgaggtttttaatgaggcagtta

SEQ ID NO: 153216 - DNA, 724 bp, Cannabis sativa
cttttctgatccatggtcgaaccactacctcccctgctaaaacctgatgcaggaggggtaggagccccgccaagaaccagaattccaccggactcaatcatgaatcctactacatcctcagctcgtagtgctttatctaccatttccacataattggttttgtcgtcagtagtgatcattagattgtgtctgatttttacatttaacccatccaggtacttctccttcttactaaaatcggttggcacaattcccgaggcaaaccttgccaagcaatcaaactaagtcgtgtactcagtaacactcatgttttctttctgagtcaaatgggtgaattcttttctcttctaaccacctcattatagtacttagcattaaacagttcctgcaacttctcccaggtcattgtggtaacgtcatgaatcatggacaccatgtcccaccaaactaaagtgtcttcttgaaattgtaaagtggcacagtaattcaagatcctggtgatcaccgttagccattgctcggctttcataacattggggcctcccaggaaaactggaggtgcctgcttacagaacctttcatacagggattccattcggttcattccaaccactgattcggcctgcacagcaggggcaggtgccactggcatttctggaataggcactgcaggagcaccctgctgtcttaactgccgaagcacttcctcttgttcattgattct

SEQ ID NO: 153217 - DNA, 1304 bp, Cannabis sativa
atggtaaatgcagtgtactttgcttgattctcccggggagcttgctcagttttgccggtgaactttccttcttcccattcccttgcctgttgttgttattggagtgtttaccattcgagcttgaattatttgggtaatgggggagttgggcggacgttacagtggaaggagcttttgacttgccaggatttttctcaccttctgctcgttgaatagcttcttcgagcttgatgaagccttcaacacggtcaagaaaatcactcatttagtctactgggtcgttcttccttatgtccttccaaagttcacccaggacttcaatgccccccagtattgcagacaactttccatcttccgttacccgtgaaactttggtcgcctccgtcatgaatctgctgatgtatgctaggagaggttatcctggtctttgcttgacttcgaccaggtctcccagatgcaacaggagctggcgagaggaggagaattatgcatggaattttgaggagaaggctttccatgagttgaactttccaggggccagctttaaataccattgctgggtggcttctgagagggtagcaggaaagattctacaacacatatctcctcgtatcgcgtgcaaatccatttgcatttcgaaacacttgaggtgggaaagaggatcttatcttcctgtctgcattttctaggttggcattttaaacttatggggcaacgccaagagattgatcttgggagaaaaaggggttccacgtgctcggtccagctcgagatcattgtttctctgtctggccataccttggaacatactctttagttcgtctagctgtggctgcacaactggactaacttgctcgacattttggtcgatttgaatcacgtaagtatctttctgagtgggaatttgagcacgggtactcctcttcttctgttcatatcgctccttaggtcatgagtcgtccccaacctatcgaatacagaaacgcctggctgtctcagtgattgatttgcttggttgataggtggaattgcaccattagcgtggttggaattgtcaggtatgacttctccagatgaaatgctagacaaggtctgctcacctacagctaggcccacaagtggaacttgtgattggggatttggcggctgaccgtttatagtctgggaagtattcatcgttggatcttcgtctgtctcacccagggcgatgacactcgggggttgctgcccgacagtttggtaggctttttgtatcagcgcagtagcttgtcgactacaattttcaatctctgtatgatgagccc

SEQ ID NO: 153218 - DNA, 642 bp, Cannabis sativa
  modified_base (436)..(437): a, c, t, g, unknown or other
  modified_base (469)..(478): a, c, t, g, unknown or other
catcctcgcatggtcgtacacctagcagatacacaaggtccgactctgtagagacgcagcagggaggacgttattaggtacatagaggctatctgcgtgatcacctcaatgtatttttcagagcgctctctcgcgagccccgcaacgaggaaacaccccgtgatccccccatgggcgatcaaggtgtaaacactcacactaaccgcctagcgcaccggtagcgactactggagtcaatatcctagtaaacctcgccgcagtagtcacgactcctgcagtcgcagcagtcccaactcctgtagctggaggaattaaccaaagcatgcttttgcaagctttaaaaatgctcgagcagcagagaaagcccatatacaagctgcatgggacctctcttttcactacgaaagtgcaacaagctcaacttcccaagggattnngactattcgaatccctaaaatataaaggtacnnnnnnnnnnatagattaccttgaaaaatttaatactgtaatggaagtggatcaggtaccacagctcgcaaaatgtcgcgttctcgcgggaacgcttgaggaaaacgcccacggttggtttacccaattgcctgaggcgtcgatattgacatgggagacctttgtcgatttatt

SEQ ID NO: 153219 - DNA, 537 bp, Cannabis sativa
  modified_base (494)..(511): a, c, t, g, unknown or other
attttttcatttaacaaaatagaatgtctaatttataacttttacaaaacataggatccaaaatagtatttatcttttaaaaatacatttctgaataacttataaacataggtgtttcttaataaaaataaacgtaaatattttatttttaaacttatttataaattttattgaaatattgtgataaaaaagttatattagattaataatagtaatgtaaacattaataataattaaatatttaataaatatttatatatttataaaacataaataaaattaatgaatatgtttatatgtatataaattattaattttatattaaattttaataaatatattattttagtaatatatcaaaatataaatattaagaaaatcaattaaaaataattatgagtttttcttaaggaaattaattaaaaataattaacatgttaaagttataaatatttatatttatttatattatataattgtgacagtcagtagtnnnnnnnnnnnnnnnnnnaaataccgggtaagctgtgcaatccc

SEQ ID NO: 153220 - DNA, 562 bp, Cannabis sativa
gatccagtataccctgccattttggcaaggttggagaatgtggagagggggcagattgctttgagggaagggcagactgctctgttaagaggacagacatcgattatggatcagttgaagaccataatgagactcctgcaagatcctggaaggccgacaccagattcacagtcacagccatagccacagccacaatcagaagaagaggctcagtcaccagaaaatgaaatcattctcccaaatgagaagacgaatatcaccagcatcggggatactcaggattctgaggtacaggttttagagacagctctagaactagtgaagaaccgaaagaagagaaagtggcctaggtggttcgatgagtacactgaaatgaaaaagaagtctagggcttcgaagacacttgtgaatgcggacccacttagagtggttgattggaagctgctcaagaattttcacagttgggtactcggtcagattgggaagaagtacctgagagactgcttctccggtagacatgattcggcttggttcctcaaactacatactccgaagacatggc

SEQ ID NO: 153221 - DNA, 505 bp, Cannabis sativa
aatatcagcatagaacctctagttattctcataactccattacttgttttgtattcacatccctcatcatcaagggttccaagggatattaggtttctttttaagtctagtatgtgcctgactttggtgaaagtcttcacagtaccatcgaaacttctaatggcaatagatccaattccagttacttgacacttgtgatcatttcccataactacacttcctccattaatttcctcataatcaatgaaccaatccttgttaggactcatgtggtatgtacacccactgtccaagatccattcatcacagttcttttgctgcagaatgttgcaggcatcaccacttttctgactagtgtagcagtcgtttatcacagcaaaaagatcaccatctgagctatatgtctcatctactacagcatttgagtcatttgacttttctttttcatccttttgtttttttttcttgttcttgatttcccagcaattcttgatcagatgaccaa

SEQ ID NO: 153222 - DNA, 634 bp, Cannabis sativa
  modified_base (360)..(363): a, c, t, g, unknown or other
  modified_base (464)..(466): a, c, t, g, unknown or other
gtaagattagtataatctcatgcatatgtttatccatgtttagcgtacatgttagttgccgtcagaataacatatcagatatatgttaggcaaatctatagccatcatagtagcgtatcaggacaacagtaaggtgtacatagagttgcaccgagatgctatcagatatgctaggctatcagatagtatggactaactgctaccacatcagtgcgattagagtactgagtataggctggattcgcggttagtcatactttgtcaagatcgattctgaatcagttagggttatggttaggtgtatgagggcctgattataacccgggatattagtatgtttattatgttatgcttttcttnnnnagtctgttgactcacagtgctattgctatgtgtaggtaagggcaaagttaaagttgaggagccgtgagagcgtgcagttgaagattgtacatgtcggggcnnntaggcttggagcgtacgatcctcaggacaccagggcttttgttgttttgtcgctaggcgccaagtattttgtaattatgtagcaaacttttgtaacagtattttgtaaacgggatcccggaagtttatcaaagttatatgttatattttaattaaataagcaaaattt

SEQ ID NO: 153223 - DNA, 541 bp, Cannabis sativa
accagtagtcggtgtctagatctgggactatgtctaggaccagaacccagacgaagaactaaacctaaacctagaccaggacctgggacaaaaaattagaacctgaacaagaatcgccaaaccaagacagtagaacaagactaggactatgaccaggaaccggacccagacctataaccgaacacagacctagcctcagacacaaactgagactcgaactcaggcccggacacggttgtgtacccaaacacggtcgtgtacctggacacggtcgtgtagccagaccgaaactgagaccaggacctagacctaaatttgggacccgatccctacacagacttggagatagatagggatctgaataagaacctggactcggaccaagacacgactcggcacaaacccggacacaaactcgaacccgaactcaaacccacagctaacacccaaacccaaacccacagctaacaccggaagttgaccgagactggaactaggacttggacttggcataataattgaaattggacctagatccaga

SEQ ID NO: 153224 - DNA, 910 bp, Cannabis sativa
  modified_base (812)..(819): a, c, t, g, unknown or other
  modified_base (867)..(885): a, c, t, g, unknown or other
cttaaagggaaaatcaaagatgggctttatcaccttggagatgatagctctagtctttctaacactgctctgcaggtgcatcttgccacttcagacatttcatctctgttaaatccgtctaagtgttgtaatcactcttgtactggtgttgattcttcttgtactaaacaaagtaataaagaatcttgttttgactactcttgtgttcccaatcctactgctttactgtctcacactactaatgatattaataattggcacaagaaacttggtcatccatctttccaaacacttagcaaaattttgcacaaagctagtatcccatgttctcttaaaaatttagaattctgtaaggcttgtaaacttggcaaaaatcatagactgccgtaccctttatccaaatctagagctaatcaacctcttgctttggttcacacggatctatggggaccttctcatgttccatataaagaaaactacaaatactatatagtttttgttggtgattatagtaggttttcttggatctttcctctcactatgaaatctcaagcttttgaaactttcattaggtttaaaagtcttgtggaaaaacagtttaatttaccaattaaagttgttcaagctgatgggggaggggagtataggccttttgaaaaatttctaagtgaccaaggaattgtgtttaaacaaccttgtcctcatagtcatgctcaaaatggtagggttgaaagaaaacatagacacatcactgaaactggtttaacccttctagctcaagcattaacttgatcttgttgggttttatgccnnnnnnnnaactcatttcatataatcagattgacttattaataaagatcagaaatnnnnnnnnnnnnnnnnnnnttcacatgatttatttcacgattat

SEQ ID NO: 153225 - DNA, 849 bp, Cannabis sativa
ctggtcacatgaggatatggtcaatattgatcccattataatgtttcacgccctaaacattgacccaaactttcgtcctgtccagtaaaaaagaagactattggacaaagaatgggcacaagcactgcggaagaggtagaaaaactgcgtgaaaacgagtttatcattgaagctttctacccagcctgggtagctaaccccgtactggtacccaagctcaacaaaaaatggcaagcatgtattgattttagagaccgcaacaaggcgtgctccaaggactgttttccacttccaagaactgatcagctcgtggatgcaacagtcgggcttgaaatcatgagcttcatggatgcctattttgggtataatcaaatcagaatgcatccacagaccaagaacatacaagtttctgaacagatatgggtatgtactgttacaaggttatgtcgttcggtctaaaaaatgctagagctgcctaccagaggctaataaataaaatgtttaaagatcagatcggacgaaatatggaggtacacgtggatgatatactcgtcaaatccaggaaggttgggggcacataaaggatctagatgaatgcttcaaaatcagcaaaaaatacaacatgaaactcaatcccttaaagtgttccttcggggtcagctcaggtaagtttcttggtttcattgtcaatgctcggggaatagaagctaatccagagaaaatacaagccctcctggatatgaaatcgccaacaaaaacaaaggaagtccaaagcttaactagccggatagtcgcactcagtagatttgtctcaaagtcgacaaacaagtgtgtccctttctttaacat

SEQ ID NO: 153226 - DNA, 659 bp, Cannabis sativa
tagtttaatataataatttttaaggagtgtcgctagtcaatcgaaacgcgacatgtcgtgaaggtgctaggcaccactggtgcctaatagcaatgctctatagaaaattatgttgatatcactacatgacattgatgctatctcttttaaaaataataaaaaatcaaatataaataagtagtgtgataatatttataattaaaataaataatatattaaataataatatgtgaaattataattataggattattgaagagtgctacatgtttttaaaatcaatagtatcaaaaatgatatgaaaataaaataaaataaaatatttttggatgatatgaagatttttagcacctttaaaaaatacccattgaagatgctcttatgtgctgggggttgcgatttttgtcaaaaataaaactcaaatgggtccaatgaaatggatttagctaattaagtataattacagaaatgattattttggtaaaaaatttacacttttacatttattttttttgtaactttgcagtattttataaaaatacatgaaagtaacaataaaataacaacaagagtacaacataaaaatacatcaaaagaccgtattttataaaaaatatttaaaagtatgtataaccgtatttatatatatatatattttt

SEQ ID NO: 153227 - DNA, 577 bp, Cannabis sativa
  modified_base (288)..(289): a, c, t, g, unknown or other
aaagaagaaaaaaaaattgtatatatattaaaaatatttaattttattttaaattgtatgttaaaaaagaatatataagaatagaaataacattttatctattaagttttgcaatatgattgtattatatgtattaaacttttaaattactattttctttacgttatttgtatatataatttttttaatttttttataaatgtgtggattggattggatcggttacttttacatatcaattaacatccaatccgcacaagtgcggattttgaattttccaatccaatnnaatccgcacaagtgcagatatccgcactttgtgaattggattggattgatcgtacggattattggatcagctattttatgaacagctctaagctttatcctcttaaggttgcagatgtaaaattctgtttatgatgatgtacctgcagcctttttagagttttgttctctgatttatgtatcattgatgtaatgctaatatgattttagtgaggtgttcaccatataatgataaatattttacatttttagagttaataatattcatgtttatgttggaaattatttt

SEQ ID NO: 153228 - DNA, 892 bp, Cannabis sativa
taaatatatttatatatagaacttataatgggtacttttataataatgcacagataataataatggatccatcctctattgttttagcatctagcaagaaaaaaaaattagtccattatttttttttttaatcgtgtgtgttataattatttaaaatatatatcgtaaaattttaaaataattcagaatttacaatatcaaaaatagtgtttaaataatctattttacatagacataaaataaaagagtcatatgtgtaatttatttaaattttatttttagtgtgttaaatttttttgtatcttttaaaatcttacaagttgtcttaaataattataacaaatacaattttgaaaaaaaatatattacatttgtgcaacacatttgtgcaacgcatatatatagaatatatatagaattatatatatatatattattttatagatagtgtagtggacaaatttttaaaggcaagcaaagagcaccattttgaattttgcggggtctgaattaggttatatgaggttgaagtgagacatgttacatgcatttgtacatatttaattcaaatttgagatcattttatatggttataactaactattaggttcggttctcttagccctattaccataatatttatatatataatttaattaacatgacaataacataatcattaagaatttcaatgcattattcatcatcatcaccaccaataatttcaccataacagatttgttttggcaaatattgtttgtgttgttgcttggtgatgtggagatatcgatttgtgatacgaactatgcctaaatggttttatgcgtaagcctcttatatattgtgcaaccctataagatattattatatattaattattctccaaattaat

SEQ ID NO: 153229 - DNA, 525 bp, Cannabis sativa
aactgcttgtctagattggtctttggagtctctgaggataaggtatcttcacatgatgatcaatattgactggtggagactgttgttgttgtgcaggactatcactagtcttcttatctaatgatgcttgagttggtgttgtttgatctttaatctcttcatccactggttgtaccatttcaggcccatcatatttcttaccgctcctcagggtaattgccttgcaattttctttaggattaacttcagttgtactaggcgaatttccttgaggacgggttgctacctgaggtgctagtttccccatttgagtctgcaaatctttaatggaagatctagtttcagtcataaattgtaacaataaatctgtctgcaaaccagaatttccactagagctttattgttgagtatactattggttttgtgtcttgttctgatttctctgttgatagaacccactgttccttcggttacctccttgattgaacccatagttgttgttgttctgagaataatttccaatgg

SEQ ID NO: 153230 - DNA, 524 bp, Cannabis sativa
  modified_base (68)..(83): a, c, t, g, unknown or other
atctttgacatacctcagtattcgtcgtactacttccaaatgtggcttctttggttgctgcatatatnnnnnnnnnnnnnnnnctgcataagaaatatctggtcgagttaatgtaagatagattagacttcccaccagttgtcgatacattgctccatcttgcaagtccttcttagcatgagcacatagcttagcattggcttccataggtgttgagatgggcttacactcaagcattccaaatctttgcagtaaatctttagcatacttttgctgacaaagaaataagccttccttagttcggttaacttctaatccgagaaagtgtttcaattctccaagctccttcatttgaaagcgtactgataggttctcttttgtttgataaatttctgtgttgtcatctccagtgataatgagatcatcaacatataccagagcaattgcaatttttgcttcccttactttgacgaataagcttgaatctgcatgtgccatgaaatattcgctttctactaagaact

SEQ ID NO: 153231 - DNA, 1054 bp, Cannabis sativa
ttttctcaaggatgaagcttggctttgaattaaggcatcatttttagtcatgaactccattatcaacacttcaagtgagcttggttgaaccatttgatgaggctcttcttctatgttgaactcttgaaaatcctccaatttctcatcattttgtacttgagtgtaagtgtcaaaatttggctccaaattgttgtagttgtcctcccaaacatggtcattgttttaacaattacaacaccactcattgtactccgccatgtcttccaccatccaataagcttcatcgattgatagttggtagaaattggtggtaccatctcctctttctacccattctcgtgtgcttgaatttaacccatttaagaagatttctagttgacactctttggacaaaccatggtgaggaaaccatgctagcaaatccttatatctccataatgctctttgtagaggctccgagtcatgttgaacaaaattcgtgagtacttgccaatgtaacatctcaagtaccttgcaagcaaaaccaagacaaacaaacaacgcgtaaaatagaacaaggaaaataaaacgaaacaattgaaaaactaaaaaaaactaaattgatagtaattaagttccacaaacaaaatttcactaaatcaatcctcggcaacggcgccaaaaacttgttgtgaaaattgtatacgcaagtgtacgcaatcgtaacaagtaatatagtgataaatcgagtatcgtctccacagggattgaaaattggaaattaatttataaaactaactactcacaaattggtttaaaaaaaaaataaaattaagtgttaagaatatgtaaaaattaacaaacacaaactttgaagaaaacaggctataattattaaattggcctaaaaatacaaagttgatataatggtgaaaatgagtattgttgtagattgatgatgtcaactaggaattcaaaatatcataatatttttttcaaagtatttatggtttaattctctaattaattaacatattcctatgcccaattaattttaagaatatcaatttaagca

SEQ ID NO: 153232 - DNA, 575 bp, Cannabis sativa
  modified_base (532)..(535): a, c, t, g, unknown or other
ttatatttaattaattaatattataattaattaaatataattaattaattttttttaaaaaaaataaatacttttgccggcgcattcctacgccggtaaaaagtggccaaaattgttggcgccaatactcagatttggcgccaatagttttgccggcgcatagcaccaatagttttgccgacgcactattgcgccggcaaaagcttatcaaagtaggttcatagcagataagggtattttttaaccccggtgcttttttttcaccgacgtgatttctcgccggtaaaatagagttttaccggcaaatttactctacgcgccggtaaaaagtcttttaccgaccaagattcccagataagctttgctagcgcagttgtgcgccggcaaagggttaccggcgcagttagtgtacttttgtcggcgcaaaaatacgccggcaaaagacggttttcttgtagtgtgttattaattgaataggtccaaaaactaaatgaacctaaataaaatctatcagggtgtgacattttatttnnnnacaacctatatgcatctacaacaaaataaacatataggct

SEQ ID NO: 153233 - DNA, 525 bp, Cannabis sativa
  modified_base (26)..(31): a, c, t, g, unknown or other
gtatttttgtaattttttttcctttnnnnnntttttctgtttttttccctataatatatgggatacttagctttatttaattctactaccaatattatgtcaagggttgcagaaatttgttttcaaaattcaaggtccagataaatatgaatttatattacgtcgttaagagtttttcttcaaattcttctcttctattttaactatgtaacatcaatcacccatgtttgaaaaaaccatcaattttccagataacatgtggaatccaccattatcaataggaataggattcaatccgaactaattgaatctaaccaatttaattcaatttaattataaaaaattagatgttcaattgattagattgaattaggtgtcaaaaattaaatttttaattgaattagatatgttattagatgctattctcaaaatctatctattactatataaaaaggagaatgtggctttgggcttcccaaagtaaattataaaattgtccttttttttctatctataacttttata

SEQ ID NO: 153234 - DNA, 1349 bp, Cannabis sativa
ttgggagaggttcaaggatctcactaggaagtgtcctcatcatggtattgagaagtggatgctggtccacaacttctacaacaggctgattggtaatactagaacacttatggatgccgcagctagcggggcatttatgaggaaaagtgcaaatgaggcctatgaactgctagaagagatggccctgaataatcagcaatggccaactaaaagaagtcagacaaagaaggtggctggtatgcatgcggttgatgccataaaaaagtgacagcctaggtagagtccctgacaatactgatagctgtgtaggcaaaacaggctcaagttgtttgtgagctttgtggaggccctcacccctatgaggaatgcctggtagatgtgaatagtttgccaatggatgaagcaaaagccattgggaattactctcaaaacaacaactttgggttcaatcaaggaggtggtcgaatgactagtgggttctatctgcaaagaaatcagaaccaaacgcagaaccaacaacaatcacagcaacaaggctctagtgggagttctagtcttcagacagatttattgctacagtttatgacagagactagatcatccattaaagccttagagactcagatggggcggttggcgactcagatagcaacccgtcctcaggaaaactttcctagtacaacagatgggaatccaaaagaaaattgcaaggcaatcaccttgagaagcaggaagaagtatgaagggtctgatgggggacagccagtggaagaaaagattcaggatcaactggcaccgacatcaacagaaaagaagactactgaaagtctcgcaccaaaataagcatctccaccaatcagtatagatcaccatgtgaagatcccgtacctggagagtctctgaaagactaatctagacaagtagttttcaaaatttctagaggactttaaaaggttgcacatcaacattccttttgctaaagccttggaacaaatgcctagatatgtgaagtttatgaaggagatcttgtcaaagaagagaaaaatggaagactatgaaacaacggcattgatcgagggttgtagcgccatattgcagaagaaactccctcccaaactcagagatcttgggagtttcatcattccttgcaccattgggagaatagaagggatacatgcattgtgtgacttgggagccaccattaacttaatgcctctgtcggtttttagaagattgcagttggttgaggcaaggccaactacagtaaccttgcgattggctgatcgatcactagctcatccatggggagtcattgaggatgtgttagtaaaagttgataagttcatctt

SEQ ID NO: 153235 - DNA, 806 bp, Cannabis sativa
  modified_base (258)..(262): a, c, t, g, unknown or other
  modified_base (357)..(364): a, c, t, g, unknown or other
attttattaaataataaattaagtaaataactaaaaaaaatttgatataaagtatgattaattatttgaattaacatctaatttaaatttaaattaagatttatttataaaaaaattattatctaattttgttgatacttttaaataattatctaaattatattttaataaataaattaaatttagtcttaattttttaaaaaataaataattaattgatggatttaactgtattagttttaaccgattaacgaaaannnnnaaaatcgttaaactaacaattttcattaaatattcacatttaatataaggcaaatataatataatagagataagtttaaataataataataatannnnnnnnaataataataataatacatttttagatatatgcgtttaaatttgaatcacaagattaaatatttttagacatgtatagtaaatttaaatttgaatcacaatgtttaaattaagagcaattacataagcacatttaagagttttggggctgaaccctctcaactatcattccacttacacttaattctctaaattcaaattttagtagtaaaaccctctaaattatttaacggttaataaatttaaagtgtcatctatgtttcacagttaactgcaaacttgagattgaagggtaaagtgtaagtaaaatgataattagaagggtttagccgctaaaaacttgcatatttcatataatagagatataaagaagacatgacaaccaaataattagggtttttaattccaaaaatacatctcacctgatgttgtattggtgggaa

SEQ ID NO: 153236 - DNA, 667 bp, Cannabis sativa
  modified_base (440)..(445): a, c, t, g, unknown or other
atcagcattggagttttgatctcttagaatttgctagattttaaagtaactgaatattccaaagttctttttaaccttctctaaataattagccatttccaggcccttggcctggtattcctcgagaacctgattcataataagctacgagtcactatggcaaatgagatttttgactttcaatgcttcggctatcttcaagccagcgatcaagggttcatattcaacctctttgttcgatgcgtcaaattgaaatctcaaaacataatgaaacttaaaaccttctggtaaaattaatattacccctacacccgagccctacttgttggatgcaccatccacatataacttccaagtgtccggtctcagtggagaggcaaaatttcttctcgagttatacctttattcataagtctaccaaggcttggcccttgatggannnnnnagggtggtatgttatgtcaaactgccctagttcgattgaccattttatcaattttccagaagcatctggttttgataaaacttgtctcaagggctgatcagttaacacttttatggggcttgcctggaagtactgttgtagcttgcgagacgcctggactaggcactaagcgagtttttcgatagggggatatctagactctgcccctagtaaccttttact

SEQ ID NO: 153237 - DNA, 525 bp, Cannabis sativa
caacaagtactatatatagccctccatcgttcacaagttaagtcatttttttcttccctacaaaatttatagatatatgtatagagtaaaaattataagatattaaaatatgtattattggaaaattttaatgttgaatactttattctaatcaagatgtgaaaaattgtaatgtggttcctacaaattaattagcaaatataaaagatttctttattctagtaacgtatttctacctatgtctttccaaccctaaaatcaattttcatttggaatagtactttcaatattgaacctcctacagccagggaaataaattatatgaaaatatgtttggaacgtatttcaatgtacgtcagaagctggatctcccatatctcaataagttcaagtttaaaaataacgtgcatcaatatatgtgtagagtacttcacatcgtaaatacaatatggtgcaattatgtttactcaatatttgaatataatgagataataagatttattttcaaatgtaaactataatttc

SEQ ID NO: 153238 - DNA, 766 bp, Cannabis sativa
tcaagatttgatcctacaactcctcaacggtcttggtcctgaatacgactcaattgtctccggtatcacggcgcgcagtgatgatctcacatatgaagaagttcagtcacttcttcttgctcatgaaagtcgcttagatcatcacaatactgctgctgatcttagtatgaagcttcaggcgaatatcgctgtctctagctcacgacacaatccatatcgcccaccagcaaataagaattacacaagaggaggttattgtgccccaactcagaacaataggccgctgtgtcaacttcgtcttcgatttggacatactgcaccagtatgtcattatcgattcgacaagaactgggttccccctaaaccaggcaccacaaataagcaatccaacacttctcagtctgcccctcgagcctatcttactgagcaagaagttcaatatgatcctcaagcctacgcttccacatttttgcctgactttggcgatgactctggctggtttgtcgacacaggtgccacgaatcatgtcacttctgtcactgaaaatctggaatctgctgccccttacacgggtcatgaaggtttagctgttggagacggtaagaaactatccatctctaatattggatcaacttctttacagtctttcaactccttacctctaaaattatattcagttcttcatgttccctcaattaccaagaatttagtaagtgtgtcacaacttactcatgacaactttgtgtttcttgaatttcataaaaca

SEQ ID NO: 153239 - DNA, 679 bp, Cannabis sativa
ccatatgaaatcgaggacgagatcggctccgggacctacaagctaagaagattggatggaaccatggtgcctagggtcaggaatgttgatcatgtccgaaagtattaccaatagtcagaaaatgtaaacttaggctttgttaagaaattttttaccaaaaagtatatgcaacctccaaatttatgaataaagctgagtgcctcaaaaacaatgttttcatgccactcaggggggtagtaaggcataccacacagacaaatgtaaaacagaccaaaagtaaaagtttagcaaaatcaagcaaaatatgtatttaagcaaaatatatatttagacgcaaatgtaaaagatgttcttacccaaaagcaggtccaaaaaaaaaacattaagggcctggggacgggccttaaaattgtctccccttaaaagataataatttaaattgtctggaaagtgggaaaagacgcagtaaatataaaaagaaaaataaaaggaaagatagtgataaactggttggcttagtcaatgcggggtggaagacgaggccccctacgctcctcgagtaaggcgtcaagtcttttcttcttctccaataagcgaacaaggacttcctcaggcttgggataaaaatcgagcttgatgttctgggcatttgtctgccaagccatgaaaatgccatcgt

SEQ ID NO: 153240 - DNA, 1220 bp, Cannabis sativa
ttgtatcactttcaaataacatagaaaaaaacgagtataaaatttaatataggtgtctcgcacgtaactttttgctagtctatatatatataaaggagaagtatgaagcagtgacatggcattctaaaatcactccaaaactatttttctcttctctccttaattctcttcaattttaatattttattaaaacataaatctacaaattgatattttactattattttaataatttttttattattaaaaaaaaattataaaaaaaagcataaatttactcattagtataaattatttaatgtaaaaaaataattttttaataataaattcatgaaaaatgatgaaaaaactattgtaactttttttctcattctcatgtgatactctctattctttattatatttttatcgttttttatataattatttttaatatttttttcctcaaaaattactttaaattgaactttatatgtataaatgtatacatatagatatattttttctgaaaaaaaggataactttaatttatgttttaattatataattatgattatgatttattttaaatgtatatataattataatttgttttaattatatatataatttttgtttttctcccctaattatagactatgtttcaatacctttatctatttttttttttaattctctaattttttactttatattactttttttttttaaaaaaaaacctacaattaagctaattataataataataaatacaaaaatatctaactaaaagaaattatatcaacatagaacacaatattttttttttccaaatttacatacgtatgtatcttctaagttttacttttttaaaatatatatataataccttaataataaataagaaaattaccacatatactattttttaactttttttttttaattttacggtttgagttgctgcgatggttgctatgtgggttgctatgtaaattttagttgcaatttagattgcttcattagttgctataggaatttctgtgtagcttttcgtaaaaatataaaaaaaaaattgttttgaagtgttaaaataataataaaaaaaaaccctaataaacaatttaagaaaaaaatatactatctattttataattaataattaaaaatatctaatcatacataataactaacaaagcaaagtcaaactatctatttataatttttaaatttatgataat

SEQ ID NO: 153241 - DNA, 606 bp, Cannabis sativa
agggctattatctttttccaataccaactagcatgtattgaagctgagcaactccaccactcttgatccctgatatacacactatgaacccaccatagccacacactttcttgcttgttggagatggcccatatgtacttgcccatggccgctttgttctaatgctctaggttcttgattcccaaacctctagcagatttaggttgacatatgttgctccaagcaatgaatcatgccccatgaaaaatagcctgccatttccaaagaaaatccctacaaatggcttctatggatctcagaacctttcttggtaatatcatcatttggctccagtaagataatattatattcttaatcttataatttaataatttaaatattacaaaaataaataatttaaaaaataagatattttatggtttggatattatcaaatttattaaaaaataaaaaaatatcctaagtttgaaaattttatggttagaaaccctaaaatttctattcaaacctaaattaacaaattttcaaaatttcatgtaactttgccaaaaaaataattttaataaaaaaatatctaataagataaaatgtcaaaactaatatttt

SEQ ID NO: 153242 - DNA, 730 bp, Cannabis sativa
  modified_base (670)..(674): a, c, t, g, unknown or other
ttctaacttaaattcaaatatctaaccaatttttcaaatttgaagtttattcaaaattaaattgattaaatttctaataatataatataatatatatatatatattgaattttaaaaaaatagatatatctaaaattatatattcttagctcttataatttaatcaattaaatattacaaaaataaacaatttgaaaaataagatattttatagttaggatattcccaattttattaaagaaaataaaataagtttgaaaaattttatggttagaaaccctaaaatttctattcaaacctaaactaaccaatttttcaaattttcatgttattttttctaaaattaatttttaattaagaaaatatctaataagataaaatgttaaaactaacatttatcaaatcttataattttaatttaataaaattttttaaaaataacaaatttgaaacaaaatgatatggttagcaaattttaaaatttaaattagattatttttaaaaataatattttaatatcaaaataagatcattcaaatgtaataataaaaataagtaatatgtgatcttataattaaactaattaaaattttaaaattaaccataaggctatatttgttaaaaatcaaattttcaaaattaaaagcctactaatatctaaaactaattnnnnntaattaaaaaattaataaaaattagttttttttttctgataattagatttttaatt

SEQ ID NO: 153243 - DNA, 578 bp, Cannabis sativa
ccacttagctatgaataaaacagtggtaacatatgaaaattatagaatctttaatcaatggttgctaatacgatttactgatgcccgttctttggtgcaagtaatctcagttctgattatggatgtagtatgacatcaaagtgaaggtgctatatataatagataatacatatgacaaggaccgatatgaataaagttatttttattaacatgtcgtttatcataaagacctaattcatatcatcacgatgatcaatagtagatcgacctaaatcctgagtaatcatgaactcttgctcatgttattagtttctttgattcacccgttaaagtttcttagagaagatgattcttacaacttctattttgggaagctaataatgtgaatggttaaacatgatttattatgaatcctgactttcctaacggatctaatgctgattatttaagtgttaattcataaactagaatattgtgcccaaatttagatgggatctaaattatacttccactagtgaactaatggtactaaaggataaagaagtaattagaatggtaaaatggtaatttgaccaaaa

SEQ ID NO: 153244 - DNA, 521 bp, Cannabis sativa
gaaggtgatcacacacgttctgatgaggattcatccgtgcattgatgaaattccttgtcgcttcaaagcgagattgaattgatgccatcccgaatagaaatgcattggtagaaatgcgatctccgactaaaccaaaagaagtccaaagccttacaggtaaggtcgctgctttaaatcgttttatatcacgttcctttgataagtgcaaagaattctttcaaattttaaaaggtaataagaagtttcagtggaccgagaagtgcgaagaggcttttcaagcacttaagtcacatttggggcaacccacaatcctttcgaaaccaatgcccggagaaattttattcatctaccttgcagtgtctgaatacgctattagttcggtactaatccgcgaagaccagggaaaatagtatcgtgtgtattatgttagtaagcgcctgttagacgctgagactcgctacccgcaaatggagaaactggcatttgctctggtgatagcgtcaagaaaattgcgaccttat

SEQ ID NO: 153245 - DNA, 570 bp, Cannabis sativa
  modified_base (147)..(149): a, c, t, g, unknown or other
  modified_base (178)..(179): a, c, t, g, unknown or other
  modified_base (346)..(346): a, c, t, g, unknown or other
  modified_base (508)..(533): a, c, t, g, unknown or other
tgagtcatcaaggaaatccctataacttgggaatcaaattacagagatatggcacgctttccaaatcccacgatcagtgtatactgtatttactatgcaatctttcttcttatatcaattgtaacaagaagggaaatacttcctctnnnagctcgtagccctataaatagtgatgcannttcactgggcaaagggtcaaaaacattttggttgagagattttgtctaagaattcatattcagagatactggtgtaagagctataagaaaaggaacctttctccttgttcttaagttaatacaaataacgaggactaggctattaccgaactgcttggggctgaacntctataaaattcctgtgtctttaaattgctttactatatttcaatcgttataagtacttgttgcttacaaaattagaatcaattacaaaattagactcactatcgttggctaaaagcaaggtcaacaataatcatgattatataaccgagctttcaataagnnnnnnnnnnnnnnnnnnnnnnnnnnctcaacttattaattccgccttgctccactatagatt

SEQ ID NO: 153246 - DNA, 711 bp, Cannabis sativa
atccgggaaggagttgtaaaaagagaaggaatttttgtcggctagacatttcctagctaacaaatttgcacattcattattggttctttttacatgaattatatttacattagtaaagttttccagcattgttttgatcttgtgaatgatggtgctgtcagcagtaaggcttcgattcttgcttgtgatttcttccaccagcagccggcaatcagactggacttcaatgcgactggtctcagttgcagggaggttgtttagagcttcccaaagagcccaggcctcagccgttttgggtgagcagcagctgttcaaatagcgcataccagcagagatcatttggccatcagcccttctccatatgaatctgattcctacaccaggagtattatcaacaactgcagcatcacaattcacacaaatgctaccactagcaggggggatccattgtttctgatgagaatttagatctgcttcatggtttattgcaggaaccgcctctgtataaccatttggataggcagagaagacccagttcaggagttgctgtttattcatacaagggagttgattccacttcctgtttcgattctcccatatttcccataaaatttttatggcatcctcaaaatcctgcctgttaattgtttgctcaagggacttcaaaatatcaaacatagacccctctcccagtttggaagcttgtttgta

SEQ ID NO: 153247 - DNA, 566 bp, Cannabis sativa
tcaaactgacccaactcgacaacccatttaaggagtcgacctgaggcctctggtttcattaatacttgtcataagggctgattagttaagacatggatgggatgtgcttggaagtaaggtcgtagcttccttgacgaatggactaggcaaaaggccagcttctccatggttgggtaacgtgactccgctcccacaaatcgtttgctgatgtaatacactagattctgagtcttctcctcttcacgcaccaatgtcgccctcaatgcatgctcagttacagccaagtataggtacaacacctcccccatgattggttttgacaagatagggggttcagccaggtgtttcttcaatgattgaaatgcttgttcacctcccccatgattggttttgataagtgctttctcccaataagttgaaaaatggtaaacacctatcggtggacttggacacgaaacgattgagtgcagctatgcgtccggtcaggctttagacatccttctttctttttggggaaggcatgtcaattagtgcctttatcttctcagggtttgcctcaatacctc

SEQ ID NO: 153248 - DNA, 552 bp, Cannabis sativa
tggtaaaataattcccaacaatgccttcctatagcgagatggatatctcgcttatcgttatccatgtacttcaaactgttatacttggttagtgtaatgtatattatacgctaagtgttctaacagccaacacgtctcgtcataatttctctacgtattgcgaggtagatgcctcgctacgtatcatcgatgtcctccttacgactgtgtcctctgacgcaaaatgctttcttgtcaacacgcgagtcaatagtttgtatatctttgtctcgttaaagactgtgcagtctgcgagttataaatataccatgtcaactctgcatttaatgagttattccatttaatatcttttaatataatttccattatatttgttgattcgtattccccaaggttaacacttgttatcctctgaagtactagccgaattttgggtataacacctatataatcgaactttcaataagtagatctagaattcaccaagtagattctctaacttattaattccgccttgcaccactatagatttagaattgaatagtactctca

SEQ ID NO: 153249 - DNA, 577 bp, Cannabis sativa
acgctgcgcctcttcctgacagcatctgaggcggcagttttccgtttcataagtaccttctcccatagtctgggcacctccacgattgagctcttaatccctcgttccggagttctggctactcccacgttgagttctccttaagcgtgttgtccgcgcactaggaccaacgtcaggttgggctcttcgggaacgtgtggtccgtgtactagggccaccctcaggatgagtccttctggaacgggtggtccgtcttgaccgtgggttggcggaccttctggagcccatgggctctttcccaaaatgatgattggtttcctcatgtggggtgttaacattttatatatttttagccatgaagaaggtgtttttttttcataagaagggaggatttttttctgagatttttcacagaggctctcaatggaaacaccaaattggtaatgcaaattttcgttaaccaaatttgagcctcatcgtattaatatcacacagaaaaaataaaagctgtaaaaaataaaagcatgaacacaggattttttacgaggttttggagttaaaattctgcatagtccac

SEQ ID NO: 153250 - DNA, 669 bp, Cannabis sativa
gtcaggatctgggtttgagtcctggtccaagtttgagtctgagtcctgtgttcggatctgggtctgggttccaaggtgcaggtcatggtccgggtcctaggtcttgatcttggtccatgttcgggtttgggtcctagtcccagtttttatttcgattcagtgtctgagttcgagtttgtgtccagacctggttggggtctaagccttggtttgagtctaggtccgagtccggttctaggtctgggtctgggtttgggtctgggtcagggtctcagtatggatctaggtccctagtttcgatcccgacctaggtctgggtctgggttcgaatctaggttcgtatcctgatgcctatctaggtccgagtctgggtcttggatcgggtcccaggtctaggtccaggtccggctctcgctcccagtctgggtacacgatcgtgtttgggctcgagtttggttttgctttgggtttggggctaggtctgagttcagttctacgtttaggtcttggtcctggtcacaatcctagtcttgttctagggtcctagttttgcagttcttgttcaagttccagttccgtctcctgggtctgggtcagggtccgcatttggttcctagtccgggttcgggtcctggtttgagtccctgatctggtcccggtcacctgtcc

SEQ ID NO: 153251 - DNA, 855 bp, Cannabis sativa
tgacatgactcacaatctaataaatacaacttactatattagggacaaagtttgttgaggaaaggaagagatagatgacccgaacagcaataagcctcaaaagcgaaaacaacactcgaacaagcaataaaggttggtgaaagtgggtcaagaacatacaagccaccagattcatgtcctttaccaataatcttcttcgtcgtaagatattaaaacaaacaatgatcgggaaagaatgagatgaaacaatttagattgcgaatgagttgactaactaaaagcaaataaaagaacaaattaagtaaatgtaagactgatgacaaagtgagcagaggtgtaagaacaacagtgctagatcgagaacaaaagatggtgatccatcaattaaggtaacaatagaagtgagactatgagactgaaaagtagaaacgagactgaaattacctgtcacatgatctgtatcaccagaatcaatgacccattttgaagatttggaaagaaagcatgtattagagttacctgaatcaacaattgcagttacagaaggagatgaagacataagtgtttcctgatacctcgagaacttgacaaactcatcagtaataataatgactgatttgtcagatgcatcactagtgtttgcaatattagcagtattgttgtcgattttagaactgtaatttttgacactcaaacttggtgtgacctggtttcttacaatagttgcctatgatgctccaaaatctggtgttcgattatcaggtccttgttaatttcttcctttgaatccacttggagtagagttttttcccggtacagaattgttacgagtcaccaaggagctattaagaggag

SEQ ID NO: 153252 - DNA, 516 bp, Cannabis sativa
actttctatctcatctttcaactagcagcgtttgtcagttttgtgcccaattttcttatggtatttgtaatacctggtgggatctctctttctccttgcatgcctcatgggctcgggcttgccaaaggcaaccttttgctcatgtgtgaggtagatattttcccgagtttcattaagcttggtataaattgtatacattggcacgtacttatcgtgattttctgtttctttttatcctttgacgattccttagaatcctcctttctctttgagtcagaggcactagagttatcaactcttgttgagacggtacttgttgaaacattactaggtttgcctcccgagcccgttttcaaaatattcatttcttttcgagcttcctcttttcggacgaaaaccggagccctttcgttgaactcaatgttgttctttactggacgaccctgtaggtcgtccaacagtttgcccccagcggttgatggatcagtagaaatccccgcctgaagggctgtaagt

SEQ ID NO: 153253 - DNA, 775 bp, Cannabis sativa
ttataataaattagttacttaaaaaagttatattatgatatgtcatattatataaactacatttgaataattttaaagtttattttcgaaactaattgtcatataatataataagttactatttttatttaccaattattttatatactttttttcttactttgaaacttatgtgtttatttttacattatattatttttttttaaaatacttttacgttatctttttattttacttttgtaaaaatatttatatcacttttaagtctatttaataaactaataagttacaataaagttaaaaaataattataactaattggtacaattggtaaatatttaaattgctaattagttatttcaaagttatatttttagttacctttcaattttactgtagaaactaattaggttgcatatcgtataacaaataagcataaatatgcaataatttttttaatatactaatatttaaataaactattcgtttatcctttcatatttttttattatgtatattgattaatatatataaaaaaattacaaattacttttttttgaataaaaatcataagatttattaattaataaattcgttcaaaacaatagaatgtatttcagatgaacagtcctccaactaaagcacacgacctgtagagaatcaagagtctcttgccaaggaatgagccaacttatttgcagattattttacaaaatacaaatcaacaaaagataaagccaaaagtaaatttcgaacatcttgaacaataagacca

SEQ ID NO: 153254 - DNA, 749 bp, Cannabis sativa
tctgaaatacttctttacccaaagagacctgaatatgagacaaagacgctggctagaactggtgcaggattatgagtgtgagatcctttaccaccctggtaaggccaacgtggtggccgatgccttgagtagaaaggggcagagtcagataaatactgtgaaacaaatctcccaacaactagcaaatgagatgacccgagctaaaattgagttggttgtagggcaattagctaatattaccctgcaatctactcttttggagcgaatcaaaaaggcatagttgcaagattcagagttagtgaaatcccgagataaggtttcggctccaaaggctggtgactttatagtggatgaaacgggaatgttgcgatttatgaatcgtgtttgtgtgcctatggataatggtattaaaagagagattatgaatgaatctcatacaactccttactcagtgcatccagggtcaacaaagatgtatcaagacctcaaggccatattctggtgcccaggcatgaagaatgatatcgatgagtattttgctaagtgtcttacttgtcagcaagtgaaagctgaatatcagaggcttgcagggttgttgcagccattgaatattccagagtggaaatgggaagacattgctatggacttcgtggtgggattacctagaaccacgggagaatacgactatgtgtgggtcatagtggacaggtttacaaagtctgctcactttttacctgttcggacgaatt

SEQ ID NO: 153255 - DNA, 617 bp, Cannabis sativa
cctaagcacgggcctagcccgcctgtgcctagggccggccctgactatgaagctccacaaacctccagctggtattggaggaaagaaaattgtgatgaccaagaaagaatttgattagaagcaaaatagctttgagggagttcactagcttacgttttagcatcacaaatatttgatccaagctttggccaagggacaacacgaggaaatagtttttcttcatttgggataggctaagtgctccaatataaaaattgattacttagttggcttgttggaacagaatccaaatcatggatcgtttgttcaagtttggcttaatcactaatgctaattgtttattttgtgatgaggagttggagacacactaccatctcttctttgagtgtaagtacagtacacaaattcttgtgaagggtttgtgattgagctagtttaaatacccatcaaaatgatttagatggttgcttgattttgggtgaaaaattgtagaagatcaaagttttgaatgctatggtctataatatttctgtgacagtcactagtcccgtgatccgtaaggggaaatatcgggtaagctgtgcaatcccacactgcctggggaaggtcaagtggga

SEQ ID NO: 153256 - DNA, 550 bp, Cannabis sativa
ctgattatggcattcagtcctctcacatatttctatttcttggtgaaatctgtgggcaccagatcactaacaagcttagacagctgatcaaactccatggtgtattccgccactaacatctttccctaagtaagcttcacaaagtcctccatgtgtgaatttctcacagcgatgttgtaaaacttttcttcaaagagatttttaaactcttcccaggtcattaaactgacatcctgggtctgacccacaatatcccaccaaacgcgagcatggtcttgcaacatgaaggctgcacagttcactctctctgttcccgtcactcccatattatcgaggatataggtaatagtacacatccaatgctcggcctttattatatcagtacctcccagaaaagtcggaggttgcaccttcacgaaccgctcaaatattgagtctctatgcggcattaaaaactcctggttacccaccactgacacaggtgctggtggtaacacttgattaaaaggggttgccggtgtcggttgccttaatcgtcgcaactcttctt

SEQ ID NO: 153257 - DNA, 666 bp, Cannabis sativa
ttactccatatgaatggttttaaaccatagttctcttggcttcttagatagttctcttggcttcttagttccttattcttggcttcttagttccttattctgactatccattacttgtttaaaataagaatggattttatcacgagtgtcttgtcttccaagtcgtaacataacagggagagttccttgaaaccctcccactactacgacatggtactgtgactttctgtctaagaacctacatggtattgtcctctttagttgtgtcaagacaacagaagcaatgggaccatcttatatagaataagatggaaaaaacaatttggaatcaagaaaaaaattatctcctctactttactactttgtttttagacttcgtcattttcttagaaatctagtatttgttgaaacaaacactttcttatctaaatgaccataggatggtccacccctaatcacttagtatagctatcaaacatgcaaaccttggttaacagttttagctttcttaagttcacaatcaggacatccatgaatctagtaatagtttacactaagtacacaatcattctatcattctaaaattttccaatcacgagggtattccctcgaaggacataggaaacagctagtaactaatcataaccttatactatcatcaatatg

SEQ ID NO: 153258 - DNA, 894 bp, Cannabis sativa
aaaatttgagttcagagtcctatttgtacacttttggaaaatatagggtctattttgtcatttgacaaaatagagggcccaattagtaacatttgcaaaacacagagtccaaatggtatttaccctttttatatacaaaataaaacacataaaaaatattttttaatgtaccttatagaaaaaaattaaaaattgaacaatactcaaaagaatatagatataaaacaaaaaagaagatcataaatttattgaaaactcatcatataattcaaaatatctgtcattaccgtatcttacttatagtcaccactacatttaaagttaatatcatcactgtattgccacatcattactttatgactcagctttatatagatatatagatagaaaaatatagctaacttaaaatttttattaaaaaatatctctaaccgaaaattaaaaaatataagtgatattagaacatagttctaaaaattaaaaaaaaaataatttttttatatatatattaatatatattacattatatatgtaatatatacataaaatacatatattaatatatgtgacatttgtttatttaaatttttcttaatcaattaatcaattaatattcatatatttacgttaattttaaccgaatatactattatttaataaaatattttttttattaattttataattttatgatatatatttaaaaaatataaattatatagatgctttaataaaaattatgtagagatatttacacgtacatatttttttgcatttatatttaattagtttatataagtaagtacaaatggtattaactaaggtggcgtttggtaatatttttttaatcagttttttgtttttaaaagtagaaaagtgaaaatattttttaaa

SEQ ID NO: 153259 - DNA, 642 bp, Cannabis sativa
tcccctccggcgaagaaatccaaaggcggtgagactccgtccaaagagaaggcaccagctagagaggtcattgatctttttgaggaacgacctgccatggagcttcctatcccgaaaattactatatctaaaggttcttgaggagggagttcggagaatctaagcaagcaaagggaggatccgagctgattagaagcgggtctaaacaagttaaggctcctaccccacctctaatattgccccaggagacgaaaagaggaagagatatgatcacccactatgtgagttggtcggtccctaaggtgaacgaacagttggctagggcagacaacgacttgtcctttgagctggtcatgggaggagttttgaaagagctttcactggtaagtcttttctaacatttccctttcacttctctttaactagtttggattgtaatatcttctttttgcacagactggttagaagatggcttatgcctattcccgagctaagtcggttgctactaagaaccttgccatttccaacacaatgcgaacgaaagtggacttggccaagaaggatgccaaggatgcccgggttcaacatggagctgtgcggatagagctgggagaagtcaacaagaaactcctagcagctgag

SEQ ID NO: 153260 - DNA, 814 bp, Cannabis sativa
ttgtagttgtcactattgtattttccaaatctatatcttaatcttagattttatctcgaattttatatatatatttttttaacatttttaagataatatataaaattcattattttattctgttattattaattaatatatttttaaaagtgattattattttttcaatatcttaattaaaaaaaataaaaaaaaataaaaaaatgtgatattttaattatgagaaatgctaaaaggcaaccttcttggtatcattattagtataattaagtagcatgtctcatataacttaaaaaaaaaaatagaaaatatcgttaaccaatcgtaaagtgtcacatatgaaaggtgtaagacatcactcatgcccaataacaatgctctttagtttataattatgtgatacttgacattaaaatcatcatttaaaaaaaacgtaaagtaagcttttgttaaaaattaattaatattttttaatgaaaaatttaaacgtggtaaaaagcaattgaaatattatttcaagtattacgtacaactgattcttttattattattattatatctttttttaaagaaaagccaaaaacgtacatattagaattatcatttttaaattattattatttaaaaaaaaataataaaaaatgttaaggttgtatattgtattattattactataatttcaattttatggagttatttttggtagaattaaaattaaaaaagtgagagaattaaggagaaaagagaaaaataatttttaaacaattttatatgaattaaaaattaaaagaaatgagaaaattaaagagagaaa

SEQ ID NO: 153261 - DNA, 688 bp, Cannabis sativa
tcttcgtagggaacctgccccaatttcaactggtatcatagcctcgcatccataagagagcgagaaaggagtctcaccagacgtagtttggggggtcgtgttgtatgaccataagacttgtgaaagctcgtctggccatacccccttacgctcttcgagttttcctttgatggtgtgctttattatcttgttgacggcttcagttttcccgttactccgcggataggcgactactgagaatgctttttaatccccaattcttcgcataactgtcgcatctccttacagtcaaattgcttccgttatctgaaatgagcttataagggatgccaaatcgatagattatggagttgtagacaaactcgcgcagtttagctgctgtgatggttgctagtgctttggcctcagcccattttgtaaaatagttgaccgcgactacaacgtacttgactccaccttttccttttggtagttcacctatcaagtcgatgccccacactgcaaagggtcaagggcttgtgatagaatgcaagtggctcggaggttgatgggcatacgtggctattcgatgacatttgtcacatttctttgtgaagttgaaagcgtcttgccgtagggtaggctagtaatacccctgtcgcatgaattctacatgctaatggtagaataaaactctttacaatctgat

SEQ ID NO: 153262 - DNA, 767 bp, Cannabis sativa
attacactgaaatagagttttatttacagcacaaaacccaacaaactcccatgcactaacataaaacaatcagtacatctcaattaatcctagatttagtcagtgcttttcaaatgtagttaaggtcaaaattttggtgaatggatcagttaagttgtcttcggtatcaactttctccactagtacgtgccctcttgcctacatattccttgatgatgtggtacttcctctcaatgtatttgcttctcttgtggcttcgaggctctttactgtttgctatagcaccagtgttgtcacaaagtaaaaccaatggtttttccattccaagaacaacaccaagttttgtgaagaattttcttagccagatcagttccttagcagcttcagtagcagctatgtattcgaccaccatggtagagtttgatattgcggattacttgacatttctccaaacaactagtccacccccaacactaaataccatcccaaatgtagacttcctgtcatcaagaatagcttagaaatctgagttagtatagcctatgggattagaagcaccacccttgtagactaacacataatgccttgtatatttcaaatattttaaaatatgcttaactacagttcaatgttcctctcttgggtttgtttaatacctgctcacaattcctactgtatagcaaatatctggtctagtgcagaatgttacgtgcgtgctaagatggcacgttacaagctgagtgatgcccacaagttggccaagtagt

SEQ ID NO: 153263 - DNA, 568 bp, Cannabis sativa
  modified_base (511)..(514): a, c, t, g, unknown or other
gatggttggaaggctgaccttggcttagagaagtcaaggtgccgcacgggtgttccgctgcctgaaaaggtgagcccgtgacactgagctaggaaggaaagaagggagtctcctcgtcccgttaagaattttaatctccatccccacctattccccatcagagatagagtggagaattccctaataaaaaaattataatttataaaaatatacacactaattattattcaataaactaattattattcaaaacaaaacttataattcatcgtcccatttaatatttgagaactacaaaaaatattgtttccatctccgccctattaagcgggtccctacgtacaggcccatccctataaaaaaaaaatgcatccctacgttcaaggatagtaggcactactcatgctctttcaaaaatatatacatatacaatttaagcgtttcatagttattatttatttgaaaattatgttaaatgtgtatagtattagtatctttatatattaaaagnnnntatctaacggcatttcttggtttaacattcttagtttaacagaatatacttaaa

SEQ ID NO: 153264 - DNA, 628 bp, Cannabis sativa
gtccacgtattttggacaaaatcatgggcaacatttaccccccaagccttgtttggtaaaaaagtaaacaaggcttgcttagatgtctccggttgcctggggcacttggggatgcatttatgaccgtcattagtgcagttattagctttttgcagacaacgattcgttttctgcccatttattgatacggcgcattaaatgggtgtcagtcgagtactcaaacgttttctaccgccttgatgaacgctcgtctcaaccgttggatttgtagaatgtgaatcgattgctatcctgaccgtaagatggtggtcgatcacagctatctcacacctgttctggcctataaaagccagccttctcacttcatttggttactttcaccatttcaccaaattttctcagagtttttagagagaaaaaaaatttcagacaccatagattacttgcttctcttcctttgccgttgccagtcttcactctaccagcgatcaacaccaacctccagcctccaaacttcatgtaagttcttcatataccttatacttgcttactgttcgtttatatagcatgttttatgatttctgggttggatgtcgaacttctgggaatgagtttgcctgagtttact

SEQ ID NO: 153265 - DNA, 532 bp, Cannabis sativa
aaaaaaaaaaaaaaaacagaaaagggtacaaacgacactgtgtgaaaaagcagatcgaacaatcctcgtctagatctaaaacaataccaaattgctatgagtatggaggatatttgtcgttttccagtctcacatttgggttttgggaccctctatctctctcctctgtatttacgttagatctcaatcatctgatatagctatatatatatatacatacacatatattacatctctgatctaatatctcactatctgtctcaaatctgaacaaggtatgtactttctgtactcgacattgatgattgttttgagcccccatttgttttctccacatccattttctttaattccaataaagattgaaactttttcaaaaccccatttttgtattactaagatccatacacaaagtttcgaatttgaaactcaattgacatttctaaaccaaaccccagttccaatttcagtaagcaatgccctttttaatggttattttcattagttgggtctcatcatcaatatattcaat

SEQ ID NO: 153266 - DNA, 506 bp, Cannabis sativa
gaattcaaggagttgtttaactctaaatactacaatgaagctgtctgcagtggtaagcggaaagagttcactgagttagtataaaccgaggggatgtcggttacagggtatactactaagtttgaccgtctggccaagctcgttgtgggaatcgtgccaactggttttaacaagaaacaaaagtatttggtcggtttgagtgcgaagattaggcacgatttggtgattactaccattgaagcaacctcatatgctgaaatggtcgaaaaggctttgagagccgagggtgcgatgaaattccttcaggagccccgagtgactccgagtgttggtggaacccccacttttcctactcatgtttatggtagggatggtggtgattccaccacagatcagaaaaggaaagttaccccagcatctggtggttctagacaaagtaagcggttttgtggaaaccaaggcagaggtggacgccagggttactcctaccctgagtgtcctcgttg

SEQ ID NO: 153267 - DNA, 709 bp, Cannabis sativa
  modified_base (49)..(52): a, c, t, g, unknown or other
ttctctaattttcttacagctctagaatcttataatattttattggttnnnnaaaacctcggtcaacaataatatacataatcatcatcaatcaaaagaaactttgctatagtttatttttcgtacatactagtcacaaaaaaaatcgtggtttatttctttattttggctcttggtactgtaatgaaatcccgaaagctaacttatcatttgaatttcaaaatattttcagttaacctatctatgggtcaataattgtttacattgtcgttctaaaaatctttatctatttgagcttcaatttacatatatttccaactccaagagtgacaatccttcctcttttcaaatatttcaatacctatgagaatttggagttgagactttttactttaaagatttttcaatattatctgtgttatggattaaaacaaataaaatgagttgaagcacacacaaaaaatttggaattatatatattgtaaatttttatgtagtattttctaaagtttacaccaatattttattttgtttcgattaagtagaattagttttgatttgttcatcttggtaatattttgttatccggttgaattggtagggactagcaataagctagttgggggttgtgttaaatgccaaaatattacatatttcatagtataaaaatacaaagttaattaaattttaaataatattttcataaaat

SEQ ID NO: 153268 - DNA, 710 bp, Cannabis sativa
tcttaggaataaaaatcctacagtccatttaagcaagctctacccatatacactccaaaatataaatgtaatgtattatagtattttatatactatatatatatatatatatatatatatcgaaaatttctatgaaaggaaccttattttgtcttcattgaggacattttctcaatatagtagacttttgaaattacaaatgacttattgtatgtacacaattaaaattttaattaaaaaaaaattgaagtgcattagtactataaaaagttgataaattttatatatatatttcttccacttgtcaaactatatggactcatgctattaatttttgacaataaatttattttattttttttgtatacaattaatatattctactacatattttttttctttggttttaatagtttctttttttcaaaaaaataaaaatagttttctttttataattttatttttcctttatgtatagtctattattttcttactacttttttttgtctcctttatactccaagaatattttattttgtatattattttcttttttttattattattatcttgtttatatttgaaatcttttcttatttccttattttttttcttatatatatttaatattttattcgtttattctttatctgaggtaaaaaaaaatacacatttattgcacagacaacatttttttttatttttttttt

SEQ ID NO: 153269 - DNA, 619 bp, Cannabis sativa
tggtgtttcttcatttcctcttttggctgcacaggtatgtatagcttaactaatggtttctttacactaataagatatgtcatatagtttaggttacaagaaatgtaaccctaaacataataaattaaacaactgttacatcaatataatcattaattaaaagatttgaatcgaactaaatctcgaatataagagcattctaattagctactcttctttatactttaaaatagctcaacattatcatacattaaattctttacatttaaacttttattaattaaatagtagaaaattaacaataataataaagaatatttacagcgaaatctccttaatattttataattattacacatatgaccttaataaaagaaaataacattaaaagtactatatcttacgattttattacagtcatatttttttttactttactgttaagtgtcaattaagcttcttaagtgttagcttaaaaacacataaccatatatttctttaacttatttaatacgtgatccaataatatatcactacatgtttctaagcatacacttaacgaccgaaaaaaatagtaaattgttaatcaaaataggtaaattgtttttttttttttttt

SEQ ID NO: 153270 - DNA, 554 bp, Cannabis sativa
  modified_base (396)..(396): a, c, t, g, unknown or other
gctaagttctaaacatcaccaatcgtttctttcaattttctcataaaataggtccaagaattgtggttttcactgtcaactatagtgaaagctattggaaagatatagctccctgcatccagtgtcactgcacacaatatttgtccaccatacctagtcttcaagaaagacccatcaatgcatacaacaggtcggcaaaacctaaacccacggatacaaggacccagagagaagaaacaatacttgaagcgaccatcctctaccacgaaattcgtgatggtacctggatttctcaactttagcatgtgcaagtaaccaggtaatttcgagtatgaatcttcaggtgtaccacgagcgaggtgtagtgccttctctctgcacctccatgtcttttcntaactcatttggatcctgtaatccttgtgcatatttttccttatatcaaaggctaaatgatcctagtcgtcaattgcgaacttatccttaattagatgggcaactatcaaaggtgatgcttgacggttatcttttcttcaaagatcaagggaacatgt

SEQ ID NO: 153271 - DNA, 855 bp, Cannabis sativa
  modified_base (485)..(485): a, c, t, g, unknown or other
gcaaaattaggggcaacaattaccaattaattgaaattattgcttctttttcacaaataagcgtaacagtaggaaaatagcaagcaaattattaaaaaccaagaaaaaatctaaatgtagttggttatagagaaatgagtttgtgacagtgatataggagattgcatcgaagtagaaaattcacataatgttaagttgggacaaattgaaaccctaatttttaaaatttttctataaaggaggaagatatgtcaagcggttgttgcaaaataataattagacgtaatttttaaaaatcaataaagtattcaaaaatttattttagaaggggtggatgtctgaattttgtaaaaaatataattttattgtaaatattatagttaaatagtttaaatgttaaaaatattataatagggacttaaatataaaataaaattatttataaatattaaatgctaaaaagggtcttattaaatatttaaatnaaaattaattattttaggaaaattgttaattatgattaatttaattctaaaaaagaatttttacctattggtaacttgctattacagatcaaaaaaatataatcatcatggttacaataaaaatgtatctattgagtaatcacccattgctataatataaataacaaatttactaaatttgtctttatatatatactaatttaaagttacgtgcaatgcacgtatatttagttatatattaattgaaagcttttatttaaagggccaagatgcaaaatggccctaaatctaacaattaagttaataaatgtcccttttaataaaaaattaacagaatgtccattctgttaaaagtttgatgataaaatta

SEQ ID NO: 153272 - DNA, 574 bp, Cannabis sativa
ttacttcaaatttgttatatatatattaatttttttattttgaaaaaattatattattatttttaatattaattgattaattatttatgattttttatattactttaattatacttttgtatatttatttttcaagcacttttgatttataatttttttaatattaaatctttattatttaaatactaaaatattacataattattttaaaatattatttttattataattaactttttgagtaattaatatattcttattctaattttttagagaaattttaaaaaatattacataattaattatttaacaaacttataattttgtaactatccccaattctaaaaaaaattaaaaaatttaaaagcttaacatttttaacaaattaaaaaaattataatcctataaaatacatttattactatatacacttaaaatctaaacttttacaaatttacacatttaaaatttttgagcaatatatcaatatatatatatatatatatataaaggaaagcatcaaaagatttaggtggcattctctatcttttttattctattttttctaattttt

SEQ ID NO: 153273 - DNA, 656 bp, Cannabis sativa
cggggcctgacagaatgatactagtatttttccaaaaatattggtcgctggttaatcgagatgtcatacacatggtacgtaatttttttagctctggaaatcttcctgtgggtttaaataaaactaatttggttttaatacttaagaagaaacaatctatggatatgggtgacttaagacctattgcgctttgtaatactctttataagattgtttcaaaagtcattgctaataggcttaaagtggttatgccttccattatatcggatactcaaaagtgcgtttcttcaaggtcgtctaatatccgataatattatgatctcctatgagataatgcatcatttgaaaaggaaaagaaggggccgtgatggtattattgcgctcaagcttagacataagtaaggcttacgaccctttgaatggggatatcttcgggccatgctcgagaggatgggctttgatggaagatggatcaatttagttatgtcttgtgtgggtaccgtttcttacatgatttcccatgggggtaaggagttaggtcctattactgcacaaagagtccttcgtcaaggtgatcccctttcactgtatctttttatcctctgtgctgaggggttctcaagtctattgcgtagctatgaacaaagtggtttaat

SEQ ID NO: 153274 - DNA, 675 bp, Cannabis sativa
aaatgataagataactatcaataataaagtttttattaatattatattataatattattattgatattatattattatatatataaatgaaacttatcagtttttatatgttttaaaaatataactgaaaaatgaacgacagaaaccctcatcctcctatatctattttatttgatgtttaacccgaaacctagcgatctaagctctggtagtagcgggatagcaaatccttgaataggaaaagcttaaggtatggtttaattacgtttaatgcaaaaaatgattggttttatatagtggctttgtgatttaaagtggttatgaagattttgacttcgtagaattattctttggtagctatgggactagtttcgatgcttacttgttgaatttgaggtgattttgagttagaaattgagtttggaaatttttaaagcttagtccaaacattaatggtgtttttcatttaagggctcgattttaatttttgttatgtaaggattgtaatatttgtggtaaatatgtgccctgtgaagtttggagtgatttggataagttttggtaatgtatcgataagtgcaaaattaaagattttcgagtttcaccgtttttagaaattcctaggagatcaaaaatcgtagttttgccataacttttcacttgggtatccatttt

SEQ ID NO: 153275 - DNA, 784 bp, Cannabis sativa
caacattctagccagaggtagaagtagtcgcctcgggttcaccataagccacttgagaagcacaatactcaagatacatgtctttggcctcgcccaagtaatccaaatttgcctaggggttcgccttccaaaagtcataaaaaatcttgagactggctgtctctaatgcatgtactttctcttcagcctcgccacttccaatttatgcttctcgacctcagaagtaagctcctcctccttagtcttattctcttcttccagccgacggaagacacttcgaagaactcccctttcctcttgaaggctattcacttctactgacagggtgccgatggtagcttcaagctggtcggaagcctcgaggtccttagtcaactcgactattttcctctcagcagtaaaaagcttcttgttgacctcacccaactccatccgaacaactccgagttccaccctggcatcatcagcatccttcctagcaaagtccacctccgccctcatggtgttggatatagcagtatttttggagacaacagatttagctcgggaataggtgtaagccaacttcagaccagcctacacagagaaaaactttagagtctgagccaaataaaaaggattaaaggaaactgtcaagaaagacttacccttatgaattccctcaatcaagcaagaatccttcctcctcccatcagcagctctagggaagactcgttgtcagggacggctagctgcttacttatctcaggaaccaaccggttcatgtaatgggcgagcatcagct

SEQ ID NO: 153276 - DNA, 834 bp, Cannabis sativa
  modified_base (43)..(66): a, c, t, g, unknown or other
taatttatcgttttagaaagttcttatttaggatgttaataannnnnnnnnnnnnnnnnnnnnnnntcctggtaaaataatttccatcacggacctgggcgtggacccgcatcccagacccggacccggacctcggacccggacccagaccccggccctggaccgagaccccgacccgaaccccagacctagacacagaccaggacccggagcccggaccttggaccctggacccagacccgggctcgggcctggacccgcatcccggacctggaccccgactccggaccctggaccaagacccggacctcggcccaaaacccagactcggacccagacccggaccccaacccaaaccccgactccagactcagactcggacccaggacgtggacccggacctggtacccgggactcgaactcgtatttggtgttgggatcgagtgtattaaaaatatattataactttacacaataagttaatacaagtcaataccaaacttttattgaattgaataatactaatacaatataatacaacacaattcaacacaatacaatacaatacattacaatacggtgtaccaaacgagccctaagataatatagaatgacatcataagaggatgatctataaaccattcatctaatgatatattatttaaacaaattcgaaatgaataagctaagaggaaaaattaggataatttcgattataataagaatcgaataatgtcccgataagtgagagtcaaagttattcttattttacacgaaatttacaactacaattaataacaaaaaataacatagttcaatataaattcacacaca

SEQ ID NO: 153277 - DNA, 1018 bp, Cannabis sativa
  modified_base (910)..(919): a, c, t, g, unknown or other
aaaataatttccataaataaaatattctaataaggattgcataagagcaacacaatctgtgattaaaagcccgatcggagacaacaaccgcttcttctgttgcatgaaccgcttcttctgttgcatggcttgcaccagcagtagcgagtttgactccataaccacaccagcaggctcacccccctccacccacttccccttcacctaactgagcgcctccttcaacgccataacttcagccaaaaacgggtcgggttgaccataaattttaaccgccaaagcatcaatgaataaaccattatgatcccgagcaatccaccccaaaccgagactattgccatccttaaagacagcagcatcacaattaacctttatttcaccaaaacaaggtttagcccattactcacacccagttgtattcggaccataaactggcgaaacaactctattttccaactgagcattcttccaagaatcaaggtaagtaattgcagcattcaccatcctctctaacaacaaagccttattactccaaatcaagttattacgagctccccaaactccccaaagaagcatagtaagcctctcaatacgatccataggttgaaccttacaaacattatcaaaccagctgccaaacacagcaacttcacctcctccaaccgtccctcccagccccctgtcaagacaaatcttagtaaaagagcagctaactattatataaaaaattgtctcatcctcccgattatacatcagacacaatccgctcacgtgcaccctttctactaataactcgtgaaaacttaaatcaaataaaaaaataaatccaaatagcaagcaatacttttattttatttactctccaaatataacatcgaataatgttaaataatgttaattccatttttgnnnnnnnnnnttgacaaaaatattttattatttcctattaatttcggctggtatgtgcttaatatggtttcctattttgtgtattaaaacttggaaggaaagttgtcta

SEQ ID NO: 153278 - DNA, 506 bp, Cannabis sativa
atctaaaatagattagatattctgattgtatcaagatacaatcgaaatcaataaggaaaaggcaataatcaaagtttccttagaaaagacaagtttccttaaaaaagacaactttccataagagaattgcttctcttgcaggaagtttccaaacaaaggaaagtccagctgaaaagtgcaactttcctaagaaggaaaagagcaactaaaaccgaaaacacaaggtaagaattcaggaatgtatgcaagagaatcttaccataaatgaaaaagtattttgtcaactaactttctaaaaaaggactttacaaaagagctctttgtgatttgggagctagtattaatctcatgcctatgtctatttttaagaagttgggaattggagaaacaaagccaaccaccatcactttgtaattagcggatcgttccatggctcatctagaggggagaattgaagatgtgttggtacaagtggataagttcatttttccagccgatttcattat

SEQ ID NO: 153279 - DNA, 1314 bp, Cannabis sativa
cacttcatccgagaaaaggtccaataaggttctctctagctgatgcacgtctcctctcacaaaaacctagctgacatattcaccaaggctcttcttctctctcagtttaacaatcttgtatccaagatgggtgttaacatttacactccatcttgaggggggctattagaattgattagtcgaattggttagttagttgttaggagtttaagtcagttagttaattaattaagttagttaggttcttcccctaactaacttcacttcacctactacctatataaactcctccgcctatagtattcagcatacacaatattttgagtaataaagattgtcttcttcatcttttgtcctgttattcttctcatatgatatgtataacttctatttgagcatctccaatgagagttgttcattggagcagtctttccatacatgtaaagtggtccaatttttaagactaaattaataattttatgtgaagtgctgctccatatagataatggtcatatgactttttttttctttaatttgtttattagaacaaaattattttttactttaaaactttattaatttaatgtgatgtgagactaactattgaagtatattttataagaaaatgtgacaaatctcacgaagaggagagaaaaaaaataaaaaaataataatattttataataaaataaatattttgacaactacaaatgttgtccatatttgaggaactctaaagaatttctttccaaatttcaagaaaaaaaaggtaaattgcggcataaatacctaatgttttagattttatacacttaaatacattatctttatttttagaggcaaaaatactcaatgttacaattctcttacacccgttactactacttccgttaactcataaatatggatacgtgaaaggtccagatgcattacatttatttatttttattttaaagcttaatattcttaatatcaaaaactaaatgctacttgttttaaaaaaatccagttctcataataatattcacatatactgcactgattcactcacttataataatttagttttgtctctctcttttttttttttagaaacaagtagcattgtaaaactggttacccgaactttgcagcagggggtgaaaaccgatttttcagcttgtcgtttcgtgtcagtttcaggtttcaggttggttgattttctgctagtttgggatattaccatattaagttgcagtagatagggttgtggttgtaaaccttagtcccggttgtgatttagtgagtcagttatgcgtgttgttatcgatgtga

SEQ ID NO: 153280 - DNA, 543 bp, Cannabis sativa
cttggacatttttcacttacccaacgtccaggttgacgtcagaggtcaacctgggcgctgggtcatgaactgccttcagtaaaacgcccataattcactcaatatcgatccgattgacgcgattcaaattaaattttgatcaatgctctatcaagtcatgtctgacagtccagtcaaaattttgaagctatggtcgtcaaaattcaccccaagagagttatgaaaataagtttcaagttacccataacgggaccccctgggctccaaatattggccatcaccaataggagctaatttttacctttagatcatcatcaatagtgaaaaacatcttatttgtatttttttctcctatttttgtgggcctccttcacctataaatgagagctcccctagctcatttttcacattcaaaaaactacaagtttagagcttctctctctagaattcggatcttctgacacttagcctattgttgttatacatctcgtgagaaataaaaactcaaagtagacatagctccattactgttgtgatacaggg

SEQ ID NO: 153281 - DNA, 827 bp, Cannabis sativa
atgctcatcatataatataaacagtaatgccattcaaatctgtctgtttgtgacacagacatgcatgttaggctcacatgcctatttatgtttgcgtgacgtaaacctacgtattgctctcacacgtctatttatgtctacgtggtgtagaccaacgtgttgctctcacacgtctatatacaataaggccttagaatggttcatgtcggttatggttaccgagtccaacccgattatgccttgagcgcataatccttaaatctcattacacttaacatggcatggcctttacacacatatatcactagggtaataacccggcctattctattaaaccgctcatattagggtaataaacctagtcctggttactatatattcatacatatcattttcaatataagcgccactgcgcatactctacatgctaactagtgtcttacctattgtcccacaatagaagagattccaaatccctgggtgctcctgatcaggtgccagtaatcctagtcacacaatctgggattttcacaaatagggttaacccctgatttcaaactcgtaaaatatattcatggaatttaaaactcagataatcacatagagctcggaacgagctttccaacagtatatagaactcccaaatcagagttcggaatcaaaacatatgcattaccaaagtttgaactcaaaactgcccataaactcgagggcgggtcgccgcatgcccaagccatgccgcgacacctgaggcaaaatcccaagttcaaccaacaggggcgggccgcggcatgctcagaccatgccgcggcacctgggttgaaaac

SEQ ID NO: 153282 - DNA, 1057 bp, Cannabis sativa
tctctcttcctcctcctcgacttctctcaactacgatcgccattcgccaccgcccacctaccctcccccaaccagaagctcattgaattcgtatatatttaagacattacatagtggtggagggtatgattttttggccaaaatgtgattatcaatgggttatcgataatttatcgatggttttgtctgcgctcaataaatgtaaatttgacaaacctgtgttacatagatataaaccattgataaactatcgataacctatcgataatcacgttttggccagaaaacaccataaccacaaccatctaaggtctgaaacaaacacaaatccaataaaaaaacaaataaacacgaagataaagatgaagacggagatagaggttcgggcctctgggttttttaatgcttgagtgctatggaggtctaaccggtcttgggcctgggttttgcatggtttttgggtagatgaggaggttcgattgtggaggaaaggaggtttggagttggtggttgggtggtctcggtgcctaggtctagttggtcttggtggtgcaaggaagaggaagagagagtgagaaagagaaggagaccattagagaaggaaaatgaaagggagggtattttgggtagaaattgaaaacaatagcatttaaatatataaattaattagtagtctagattttgttagagggtattttattaagcatttaaaatgaaatttcccttctaaaataactaaattttcaacttaaataacttttaaaatttaattaaatatcaaattaagtatcttgaactaatcactttaatttgaaaaaaaaaatatccctattaagattatctataattaacaaatttttaacttaaaaatatttttaaagaatatctgaataactaatttcctataattattaatttttaaaaaaaattctaatttgagttgatccaaaattaatttggaaaattaattttcaacttaaatatattttctaagaaaattcaaataattaagtatctagaaaaatctaattagttattcaattaaatacagaaaaat

SEQ ID NO: 153283 - DNA, 1226 bp, Cannabis sativa
tttttcttactcttacactcgatactattctcttaaaatctcaccctacacatctcaaaaaatagtaaaatttcacaaggacgaagccaagaacattgtgcatcacttttttattgaaaacattgagagaaaaagtagttctcaagtactaataattactttaatcgaaatagtgaaaatctcacattttcgatagtggtacccctttgtgaaatgtggcccgaccccatctcaaaatatttttctccatctagtcacaatgatttcatactactaagacgtaaatatgaagcttattttcgagttaaatttggttaaaataacccgataactaaaaaattgaaaacattctacttttcagggtaaattttaacaagaaaaaatcgttagtgttctcttaaaatctcaccctacacatctcgaaaaataatgaaattttacaaggatgaagcctagagcgttgtgcatcacttttctattagaaacattgagagaaaaagtagttttcgagcactaacaatcattttaatcgaattagtgaaaatctcacaattctgatagtggtaaccctttgtgaaatgtagcccggacccatctcagaatattttttcccacaagtcacaatgatttcatactactaagacgtgaatatgaagatagttttcacgttaaatttagttaaaatgaccccctaattaaaaaattaaaaacattctaatttttagggtaaattttaataagtttttccttactcttacactcgttattgttctcttaaaatctcaccctactcgtctcgaaaaatcgtgaaatttcaattgggcatcaattttatattggaaacattgagagaagaaatagttttcaagcactaacaatcattttaatcaaaatagtgaaaatctcacatttctgaaagtggtacccctttgtgaaatgtggcccggacccatctcaaaatatttctccccactagtcacaatgattttatactactaagacgtgaatattaagattgttttcacattaaatttggttaaaatgaccccctaattaaaaaattgaaaacaatctacttttcaggattaattttaacaagtttttcctaactcttacactcttgagttggatgaaactaagagcgttgtgcatcaattttctattagaaacattgagagaagaagtagttttaaagcactaacaattattttaatcgaaatagtgaa

SEQ ID NO: 153284 - DNA, 652 bp, Cannabis sativa
agagctgtcaaaacaaacaaaacattggttagaaacttgaaaaataaagattgatataaatgagaaagaagagaacaaacacttacgaagtttgcgaaaagtggttctgccgatgggggaaagaccagaaatctagaagaagttgttcttgaaggatacttatttggcaggtccacaataatcttaggctcgctagaatgagtatcgaggtagtagaagcccctgcggtgttcttccttgacgaaacgcccttaactgagtaaagatactcaatctctactggtgtgggacacccccatttcagaagtttgtataagactttcaaactagcgagaatcctgtaggagatgggagtcagctggaatggggcaactgcaatttgatttatatagtccttgaagtagtctcgaaaaggaagcatggcccctgcactgatatgctcaaggcttcaggcgcccataccaatcgaaccactggtccccgggttactgcttgaaaaattcacaggggggtaacaacttaactcaccctcctgtactgatctaacttggcatgatttcctaagttcgatcccgtaggtcttcagcatctcgcctgtgtagcctgagatagaccgcaccttcgattttatcaactcagcctcaaaggtgac

SEQ ID NO: 153285 - DNA, 570 bp, Cannabis sativa
cagtaggcgagtttttctattaacagatatcggccctcggcctcaatgagtctttaactgatgtaatagactgggtgttgtatatcattctcttctctgattagcagtgcactcacggcatgttccgaaatagctaagtatattcccagttccttgctgtccagaggttttgagagtacgagaggttttggcaagttgtgcgtttagtccttggaaagctttttcacactcctctgtccactcaaactacttgtttcctcgtaagatgttgaagaatgggacatacttgtctgttgattttgaaacaaatctgctgagcacggcgatcggaccagttaagctttgcacttctttagtttttattggcgagttcatatccaggagggcttgaatcttttctggattagcttttattcctcgggcattgatgatgaagcctaaaaactttccggaactgactccgaaggtacactttaagggatttagtttcatgttgtattttctgaggactttgaagcattcgtccatgtcgtctatgtgccccccaacctttctggattttacgagcat

SEQ ID NO: 153286 - DNA, 621 bp, Cannabis sativa
aagtccttttttggcaatttagatgccaaaatattttttatttatggtgcgattttttggcttttataaaatcgattttctcaccttatttaaatgtttttattgctcttttctgtcataagaaagactctatttcatctgtccttttctttgtatggaaacttcttgtaagagaagaaattctcttatgaaaagtttgctttttatggaaactttggctaatcttatttctccttaatgagttcaattttgtcttgataagatcatatcaaacacactgtttttggcaggtatcaagtccaaatacatgatcggacacgtttttggcaagtttccttttctggtttggtttgctgcagcagaacctgtctctaatgctgcaaaataggattttcttttaggaatttgtacagctgtagaatcgactttgtggctatctctagagtttctatgttctataaatagatatagagagcagccatttgattcatctcttatagctttcatttttggcattttctcatttgtgaagagagagttctttttgtgagaacctagttgttcatctaggttagtgtttatatatctgttcttattctggtcttagggttggtaagaaca

SEQ ID NO: 153287 - DNA, 681 bp, Cannabis sativa
tgttggtcgctctgcgcggattgctgatcgttttgcttcgagcatgcatacgagcaggggcggaggcaggatcaaacaacaggggggccgtttacttttaatatttttttcaattgtttttcactttatttttgttaattccagtttttattttaatttatatatttatctttgttctagtaaattttttatataattgtttttttaatatttaaaatatattttatttttaaatatgtattcataatgtataactaaaaatgtaatttacggcaaaaaaaaattaagtagatttattttagcttgtataattaatatatcactttcaagaaactttaagtgaaaaataaaattttaattttaaaatggacttatcattaaaactaaataatttaaatatatatctatatatatatatgacactagtatcaaatgataattaagcatatcgaaaaggttttttttagaacaaattattaacctattcttaatcaagtaaaaatataaaatagacacagataaataatagtggcgtagaaatttttattagtccactataactttgacaactcttaggtgtcgtttagttgaaggtaatgaaataaaatggaatagaaagaaaacaatcttcattctattcccttatttggttgcatagtaaagtattagaatgtcattcca

SEQ ID NO: 153288 - DNA, 599 bp, Cannabis sativa
tggctgggacattaacaagttccaatgaaacaggaaaaaataaggctaaaatagatatgcacctacctattactgagattgcttctggtcttatggatactcataatccaaatcaactcaatcgtaggagtcagaggggtgttcataacaatgggctctctattaatccctccatttcaacatcaaaggaagtctctccttcactggttactggaaaaaataagatcccatcaattcctaatcctttaccatcttccccaaatgaaagtgatttgtctgaaatttttatgcctcagattggaccaccactgggatacattgcaacatacccgcctgacacaaccaactccaacattatcaacactgctcccaaattggctgcttcaccagtttatgctcccatcatatccgattccaccatctgtatgactactgctgtcccatatggtaaagaaaaccagtcaccaaatcgctcttcaaagaggctacctgaaagcatatcaatgagaaaggctttaaagcgttgtaggggtctttcacttgctacctcaaattcagaattgtccactgatgctgagttgaaccggatttcttctgaa

SEQ ID NO: 153289 - DNA, 826 bp, Cannabis sativa
  modified_base (142)..(147): a, c, t, g, unknown or other
gttttcctactgggctttataagctcaccccctattttctcccattccaagaactcaatttgatgctagtggatgagaatggtactgttgaggaagatagtcgttattagtttagttttattctactttttaatcttctaannnnnntgattttgtatttaagctgaaatgtatggtctggatgacttaaagtatctatgtactagttcgaaatgaggaataattggtgctaggtattattttagtattttattgacttattaaatctatctataaggtgattacataactgtggggatattattgttattttatattgatgagtggtcctgattttgttactaatattttcttattaatataggagttaatcattacttttaaattagtattttgtgatataaattaaaggatcatttataagatttatcttcctacaagggtcaaagtgtgacctttgactatctaagttatggatattacatatgtgccacgacctagggctagagtcgtgatagaaaaatggtatcaaagcaccaggtttaattacctcggagtgtgtcaccaaatattttagatttattttaaataataatagtattaagtatcttagtatttatatgtataaggaatatttatatttaagcatccaatcctcactaactgattagcttttggttcttagacctaagaaaatgcctccaaaaggaaggaagacagggagaacagttggagaagacgcccctgaagccaatgtccaacctccacaagctgaattccctatgaacgcccttctcgaagccttaagagctattcccgctcaaca

SEQ ID NO: 153290 - DNA, 706 bp, Cannabis sativa
tatggcatcttattttacgtaagtaagggcgttacacaaatatataattaaatttaaatttttagataataattatatttctgaaactttcgtatgtagataattattgaatgtcaagtcaatgacaattaagactgttaaaaattaaactcaaatacttttttttttttaaagaaaaattaaactttattaaccttcaaattctgtcaccaaaataggcaacagctcagtagggatatttcccatactgaaagtacaatcaggataaaataaagacgcccttgcaaactcatgagcgactctattagctgaccgtttaacgaaacaaaaataaacattgcttaagttagccaacatggctttacattcctgaatcacacaaccaaaataagaagtcaaactagtcgagctccttaaagcttgaatgaccagaaggcagtcggtctccacccatacgggatatgattggtgatctttgatccaacttaaggcttcccgaaagctcaaagccttcgctacagaaggagcaatgttgccttggtgcaatttagtatggccttcaattaaaaaaccattatgatctctaataacaatagcacccccaaaccgattttgtccttcaaatatagccgcatccacgttgatcttgatactattattctgtggtttaatccatcgctccgtcccatcatagtcttgaagatca

SEQ ID NO: 153291 - DNA, 677 bp, Cannabis sativa
ttataacgttaactaaggttaagtcaacagttaactttcatcccataattaatattatattttctctctctcagaattataaaagtctcattttaattcaatatcaatatctttcaaagtaattaatttttcatacaaacaactttcattttttttatcttcctactatagaataggggtgtacgtcggtcagtttggtcgggttatagcatatttttattaactcaatataaatattgggttacaaatatttaatcgtaacccgcccaatgaaaatttaaaaaaagttcaacccacccaatgattttgtcagtttggtcgggttaacccgtccaaaccgtttttttttatacatataattgttattgttagtttttagaactcaagtaattaaattttaaaaaataaaaatatattatttatatttcaagctaaaaaatgttataatttaaattaattttaagaactttaatataagataaatataattgagtaacataaaataataataataaaaaaaaagtgatagtatggtatagattttaaactttaacttcaataaccaaatacactaaaacttattagggcttttttcataaatatacaacaaaaacaacataattacaaaaaatgtgcaaaaaaatattattttaaaaacttatacattttgaaaactt

SEQ ID NO: 153292 - DNA, 521 bp, Cannabis sativa
  modified_base (31)..(31): a, c, t, g, unknown or other
  modified_base (58)..(58): a, c, t, g, unknown or other
  modified_base (84)..(84): a, c, t, g, unknown or other
atgtgcggttagtttgaaaaaatagttaaangtttgaaaaaatagttaaaaaccgcangaaaaaatagttaaaaaccgcaccanccgcaccgcgaacacccctaatgataaccatcgtggtaactatttcagtagaaggaagtgtttttggttttttaggttaattttctaacagagtattaattctaattatttaataaaatattttttatttattttataatattattatatattttaaaataaaaattatatattttatataaaaaaattaatttaattatatatatatttaaaaataaagattatctttatatataatcacatctatacataaaatatatatttaaactttaatttcacgataattttttgtttaaaaataattaatgatatgcatatacttctaataatttgtgcattttattattgtaaagtccttttttggaaagttagttgaaaaaatattttttcttttatggtaagatttttgtgcattcataaccgatttcttaccttgt

SEQ ID NO: 153293 - DNA, 710 bp, Cannabis sativa
tgagaaaattggatttgaaaaattagtttggtagtactttttaggggtacgttacaatgtaatgacaagacagggctgagaacttcaacaacacaactaaggatgcaagaggcttctcgattactgctactataacattcctgaggtccaaagtccaaaagtggtttgcttcacgaaaagaaaaaactgacaagtggacgaaacccctagcaccagaaatggaggaggacttggcattgtactttgaaaaatctcggtatttgaacgttgactcatgtgaaccttacacgttgcaggttcaccctggaagaacagttcagaccggtggcgtagtggacttgcaggaacagacttgcacttgcggcttgttccagtgcataaagtttctttgtccttatgcatgtgctgcatctcagaagcgaattattagcgtgtacgcactatgctcgccatattacacaacaaaatattagacatatgaaggtataattatgccaattggtgacgaggatgattgaaaattacctgatgacataaagaacatgacagttgaagtgtctgttgagaaacaaccattagagcgacccaagaaacaaaaggtctgaagaattaagaacaaccgaactgcttgtaatggtgaaaggattatcaaatcacgaaattgtagcaagtgcgatgccaagggacacaacagaaacacttgcacctac

SEQ ID NO: 153294 - DNA, 831 bp, Cannabis sativa
  modified_base (262)..(264): a, c, t, g, unknown or other
  modified_base (784)..(791): a, c, t, g, unknown or other
gcctttccttttctaagaatctatatattcaatgaatgaatgtgtcgatttcaacaaacctcataaaagacattaatggaactcttcaaagaatcgatttcctcgaatcatggatgagtcgatttcaaaatgccacagtttttggaattccggttcttcaaaaggagaaagactaatcaagcttatcccaaacgtaggcatggttaggaagttgcggttggaagggctttaagggtttaatttcaatttgtttgaagttaannngagagttaacagaactgttaaattctacagaatagaaaataaaataccgttaaaccaagaattttcgttaaatagacacttttaatatataaagataaagatatttattctcatattcaatggttacattaaaaaggtaattatgatgattacatttgtatatgacttgctataacaggtaaaaattctatttttaaactcaaaataattataattaagggtatttttatttttacactttaaaataacttttttttttgtatttttacgaaaattcacatagaaacccatatagcaacccaaattgtaaatttgaaaagaaaaattaaaaaaatagtatatgagataattctcctcataataaattatctacttaaaataaattattttttaattaaaatatttaataagatatttttcacaacaaaaaatttataaatatttttaattttttatttataagaaaataaataaaaaatctggttaatatcaagttacaggtaatttattaattattttnnnnnnnnttttaaattaatcacaatcgtttaacaatgatccaacaac

SEQ ID NO: 153295 - DNA, 809 bp, Cannabis sativa
gatttataattatgtattagagtataataataaagttgatgaaaaatatcacaaaattattatttgtgccaaatatagatcaacttttgcatttcccattgaagatggtcttaggtggtatttagttggagataataaaatagaatgaaatgaaatgaaattaatttttatttaatttatttgttttgttacattttatgacatgtttacttaaagggaatggaaattaaaggtatggtattgatttcatacaattgtttactagattttgaaaagggagaaagtagtggtgaccacacaaattagggagaaaataaaggaaaaggttctcccccatttttatagagaatacctttctcttttcaaacttagtttattttaattttaattttattaattaaaaatgaaaaagataaatatgccctttaaaaatctataaacaaaaaataattacatgttctaataatggcaatcttgtcaacttaaagcattctgattacctttcctagttatataaataaaataatatgattctggttttttttggatagtttaatattgtttccgattattttttattttaaacccattcatttctcccatagattattctgattccatttaaaatttagtaaacgagccattaaagtattggaataagattttagaattattacatgaaaaatacaaattcacactttattaataaaaatacatgtataaggtgtagacaatatttatacattttatgtgcttttaattactaaaatacctattacactatcacttacacaatcagacgaaggttg

SEQ ID NO: 153296 - DNA, 576 bp, Cannabis sativa
caatttgatagtgttataaattctataaataaaatattaattatttttttaaaataattgtgcctaaatgagctacacgtgcgaagcacgtgagactccactagtatataaaaaaacttatatgtattttattggccaagataaaggtttcatgattgaagtaaattattactttagttattttcgtttcttataatttatctcaaatgtatttgtaacctcatctagcaatgcaagagaacatattttatgtgcaaacttaatttattatttatgatctttgtgcttatataaggtaattatataatcaaagcataataaacattctgttttaataattaatatacataaaacattatttattaaacaaaaaaaaactagcatacgtgcatgcactgcacgtaacttcaatctagtatatataaaatgtggctatataacagaattcttggtttaatgttattatttatttaattttctgtcaaaatgttaacagaatattctgattagaaaacgttaattataattgattaattttagctaaataatcctaccaaaatttaatctaacaaattt

SEQ ID NO: 153297 - DNA, 1060 bp, Cannabis sativa
acaacatttaaaatgccattagccgtctgtattgcatatccccagaaggacgttgatagagttgaatagctcagtatagacctaaccatttctaaaagtgtgcattttcttctttctgctattccattttgctgtggagtgctaggggcagtatactgtgatttaattccaagttcaattaaatgatttttgaactgcatatccatatactctccacctcctatcagttcgtaagatctttaatgttttacctagctggttttgagccaaagcatgaaaatcctgaaacttctcaaacgtttcaaatttcttttgcattaggtaaagaaaactacatctagagaaatcgtcaatgaaagtgacaaaatacttataacctcctctagattttacatttagaggtccacaaacatccgaatgcattaacccaagaggttctttagcacgctctgcctttgcagagaaagaacgcttagtcatttttccttccaagattcacaaactggtaattcacctaatacgacatttttcaatggaccatctttggttcacctgtgaagtctgtcatagcatatatgacctagtcgtaaatgccatagatatgtttcatcattattatcaatctcttttcttttatggtttctaggtttagcaatattaaaaagttcgttattaagcacaattcgtatatccggtctcaaaacataaagccctcgttccgtgtaagtaacacataattgaaatccattacgagaaatagtgcaaatagaactcgaaaaattcaattgataaaaccgtgtttgtaaacatgaaacactaatcaagtttctactaaatttcggaataagcaaaacattgtctaaaactaaaaatttcttttgaaacttgaggcgacttttcccttagcttggaccgatactaattcgccatttccaactttgagctttaactcccctggatttaaataatcccaagtttcaagcagctggaatgaagaacaaacatgattagtaccagaatcaacaatccaaaggatttgtcattctctaaaacacatgat

SEQ ID NO: 153298 - DNA, 925 bp, Cannabis sativa
  modified_base (283)..(286): a, c, t, g, unknown or other
ccattccccggcccactcctattcccatcccattcctcgacccattcccattcccattatcattcccattcccattccaattccaattcccattaccatacccattccctagcccattccaattcccatccccatccccattcccattcccattcccattccccggcccattctcattcccattcccattccctggcccattcccattccctagccaattcacattcccattcccattttcattcgcattcgcattcgcattcccattcctattctcattccnnnncccattcccattcccattcctcgacccattcctatttctattctgattcccattccccgaccaattcccattcccattccccagcccattcccatttccaattcccattcccattcccccacccatgcacattcccattccccaaaccattcccattcccattccccaaaccccaaaccccgaatcccaaacccaaaacccaaaccctaaaaccccaaaccccaaaatcccaaaaccctaaaccctaaaacccaaacaccaaaccccacacttaaaacctcaaaccctaaatactaggtccaagatcctaaactctaaaccctagtcataaaaccacaaaccctaaacctcaaaccaaaaaaaccccaaaagccaaagaccctaaacaccaaaccccaaacccctaatcccaaaccccacacctcaaaccccaaacccctaaatccaaaacctaaaaaaccaaaatcccaaacccaaaccccaaacacctaatgtacaataacttaacccaaaaccctaaacccaaaaacccaaaaccccaaaccccaaatcctaaacccaaaacactcaacctcgaaccccaaaccccaaatcgtaaaaccccgaaccccaaaccccaaacccagaccccaatagaaa

SEQ ID NO: 153299 - DNA, 641 bp, Cannabis sativa
cggaaagatcaataacctccccagaaggtctcttttcctttgaagaggacccctcaccgtccttagacttcttggccggaggagaggcgctagaggttccgcccattctgttcctcagagcgtcgattatctgccgagacatgtctgcacagaacaaaaattgtatggttagaagacagccttcagaaacacaaggcatgaaaatcaagaagctcaagaacaagataaagtaaaatgcaaggtgaccacccgcacaagactcagaagtccatcatcacctgacatcgatcttatctcaaacataagagctttcccttttccgaacacgggaggagatggccgagcaggtgaaatgggctcccttatgcgaatcgcatgttcaataggcctgggtgaggccgggagtttcttcttcctcttcagtggagtcacctgctcttcctcagcttcatcttcaggattcaaaggctcctgagcatatagcttggcccttgcacctcccttcaacttagcctcgcgctttagttgaatgagttcatcctccttatgaactagttcggtccgaccagcgtcagatttcctcttcttccccgccacgaacttaggagtaaagtcctcgggatagagcccgtacctcacaa

SEQ ID NO: 153300 - DNA, 536 bp, Cannabis sativa
tttaattttttttaattaggtaaatgtattatttttttgaaaaaattgaaataggattcgagattttgatttttgaaaaaaaaaattagctattgcgactaaaataatgtattatttgtatgtgattatatatatgtatatattttatatgtataataaaacgcaagtaagatatcatgattaattattgtgtgcccgaatgagcaaaatattattttagaaagcaataatttataaattacattttacatttattaatatagtcttgatatgtctcttttgtgaaagtaatttataaattacatttatattgatttagaaattaattattatgaagctagttgtatatacatagtagtagtgaattattaattaaacttttttactaatatatatacttattcttaatgatttgataatttgtattggtacctagtttggattaatggaatgtgtatattattacaatatatatatatataactttatatattaaaagtgtctatctaacggccattcttggtttaacgattctt

SEQ ID NO: 153301 - DNA, 512 bp, Cannabis sativa
aaatatttaaaaaaaaaagaactattatgtgatgtactatatgttttgtttgatgtaatttaattaagttgaaatgtactctagactcgatatttaatctaatggtatagtgatcattggtgaccacgggaccatgttatgacttttgtgttttgtaagagtacttatatattattttaaattttgtgatatgtaaaagttattagttggactatttattttgttaaatgataagtaatagaccttgaagtcagttttttgtatgaataaatgtttaaaaaaaaaaaaacaactagctagtttagtcataatacctcaaggtcaaagtattattgtaacgtccccgcttcaagcctccattgggcccatacacccacggaataatgactcttacacacgagtacgccactatggctgtttcctggattgacgactgaccctacagaccaacacgagtatttccagcgtgctttgtcctcactcgcacacttcctgggaaaactttccaggag

SEQ ID NO: 153302 - DNA, 933 bp, Cannabis sativa
  modified_base (26)..(31): a, c, t, g, unknown or other
ttaaataacatacttgttagtaaatnnnnnntcctggtaaaataattccaaccattcctgcaccggatagttgatctgtggccgacccgtccacatgtagcttctaagtcgacttgttttcactattactcggctgaggtatttgtactggctctaggttattttctgaaatgctctcttctttacccgtacattcaactacaaaatctgccaaggcctaacccttaatcgctgtttggggttgaaagataatctcttactggcccaaactccactgccaatttgagcaaccttccagaggcatctggtatttgcaatatttggcgtaatggttggtcagtgtatacccgaataggatgagcctaaaagtagggccttagctttctcgttgctaggattaggcaataagtgagcttttctatcaatggataccgaccttcagcctcaatgagtctttcactgatgtgatagaccaggtgttggatgttgttttcttctctgatcagtacggcacttacaccatgttctgtgacagccaggtatattcctaattcttctcggtctaaaggttttaagagcacatgaggttttgcgagttgcatttttagctcctgaaaagcttttccgcattcctccgtccattcaaattgcttatttcctcgcagaatgttaaagaatgggacacacttgcctgttgactttgaaataaatctgctaagtgcggcaatccaactagtcaaactttgaacttccttggtttttgttggcaatttcatatccaggagggcttgaatcttttttggattggcttaaattcctcgggcattgatgataaagcctcgaaacttacctgagtagactccaaaggagcactttaggggattgagtttcatgttgtatttcccgagaaccttgaagcattcgtccaagtca

SEQ ID NO: 153303 - DNA, 609 bp, Cannabis sativa
agagagagagagagagtttgaaaaatgagaggagtattttgggtttaatgtaaactgaatctatttttaaaattttgaaatacataagtttagagaattaatttcccccattattttttgggttcataaaaaaaaagcattaaattaaaattattccttataatttgggttcataaaaaaagcattaaattaaaaatatattaaatctttaatttttggggtcctctgtagtagctagcttgcacaactatagggttggctctgatagtagattattttcactatttagggattgaattttattttcctgttagagccattacgctgctaaaatctacttgtaatcttcacaaaaggattatcaaaaaactcacttgatcataatcttgtgatcttggtatttgtaagagtagtacaataaaaaaggagtagattattattaaaatttaggaacttctataaatctgtcatttattgttcttagtaattatgatttatcaaaaaacttatttatcattttattgactaaacgtcgttgataaaaaaatggagatcaacaataatataaccaatgtgctatactctacctcaccaaaaaaaaaaaaaaaa

SEQ ID NO: 153304 - DNA, 637 bp, Cannabis sativa
attggatatctttacttttgtaattttattgaatttgaaagaggaaattacacttaatataatatttttaaactttcttcgaaaaatatgacagttttatgtttgcccactttttatgggcttggttattttttatttttattttatggtatttattatgctattttttgtaattattaatttgaaatatcatattttattaatttttctctctcattcaaccctaattgtcgaaattgtttttctctcttaatcactctaactcccttctctttcgattgccagtcgtggttttcaattcgctcaccctccctcttcctctctcattttactttcctcaaccttgtcctcgtgaccgttgctcgctccaacagagctatttttgccattaataagtgttcaacatgtcaccataacaaggacatttgattgtgattcgtagtcatttattgttcatccctctgttttgattttattgcaaaatacagtcactaaaacattgtatattttgaaaggaaattttttttttaggacacagtggattgggtaggcccaaaacagatattagctcacacaacaaaaaatcttaattttagtcacaataaaagttatgatcaaaagtaaaaaagttgtgact

SEQ ID NO: 153305 - DNA, 798 bp, Cannabis sativa
  modified_base (602)..(602): a, c, t, g, unknown or other
gctatgagcttggagaggaagtattttccttctcgttacaattgatataagcagaaagattgtatagtaaatacagaatatgttgatcatgggattcggatagcttgccatatctctgtaatctgatcctaacattatagggatttccttgatgactcacgatgtgaaagccaaattcgctaagtgtttgcgttctgtgcgaattgcccactgctcggtttaaaggacttcgtccgagcgaatgcacgaagtgtcttgttcgtctcgtgccttgcaagtagatacctgaagtcgattccacgtgtcaccatcgagtgatgccacgtcagagtacagaaattgggataacaaataataataatattaataatattaataaaaactttattattagtagttatcttattatttcttagccacttagaaatttatattttaagggtatttggccaacttcgagtatctcaaaatactttggtatttctaaaattaacttatcctaataattttatcaatatttctaactaaaaccgttgtgacatttttacctctaatcgggtctccagggtcgccgaatctgaaaatatttttatttcacaaanaactcatattatatccacatatttaaaataaatctccgtaattgataaattacgcttatatactcacttatagcaaaatttaaattttatgctgagaaaaagggaaatttgaaattccatgcttacaataccctaaaaaaattttcctaaatccataattattaaaattggtcatatatgaccacattactaattt

SEQ ID NO: 153306 - DNA, 654 bp, Cannabis sativa
ggaccctagaacaagactacgaccatgacaaggacacggacccagacctagaaccgaagacagaactagcttcaaacccaaactgaaattggaactcgggtccggacatggtcgtgtacctattccggaactaagacccggacctggaccaaaatctgggacccaatcccaaacatagacttggacctagatagggatcgaaatgctggacatagatctggaccgagatcctgacctagacccaaacttggacgggcactcgggacccgaacatggacctggacccgaaacttgacctagatcggggtccaaacctggacacaaacccggacataaactcgtacccgaactcaaacacccacacctagaatgagacccaaagctacaccgagattcggacctaaactcgaacctagaccaagatcaaaaccaaggacttagacccagaactgaatccacactcagatcgagattggaacttgggactcggaaacaacctagaccaagatccaggaggcgaacccacacccggagcttgatatggatctacactaaaatcgagacccgaacccaaactcagaccaggactcgaactccaacccgaactcaaccccaaactcgaactcagaattgcaaatggaactagaaccgaac

SEQ ID NO: 153307 - DNA, 600 bp, Cannabis sativa
  modified_base (546)..(560): a, c, t, g, unknown or other
tctccatttctcactctaacttctattgtattgtgtctctcttgtgtttgacttattctcttattccttattacgaaatgagaggagtagttctctttatatagctaagggacccaatatgtaagctgtccttttcgatagttaagttagttaaagactaactaactaaccgaatcttggttgttgggggttaaaagaataataccacaaattccaccttatttcttcaagccccaacaagctaagcatatttgtccaatggaggtggtaatgctttcatgtgtagctacttagcaactaaggttgagtaagtccaagaaatgcttgaacttactaacaggtaacaccttagtgccaatatcagcagggttctcttctgacttcactttctccagctcgattacttcttcttctatcttctttcttatccaaaacaatcgaatttcaatgtgttttgtcttctcgtgataaattagattcttgcacaaataaattgaggattggctacctgaatattgttggaaatatattttaccaggaacttannnnnnnnnnnnnnnatgttgatttaacaacctaaaattgaacttctaaaacgat

SEQ ID NO: 153308 - DNA, 562 bp, Cannabis sativa
gcttaaaatgaatgtggatgctgcaacaaactccaagaatctgacattaggaattggtgcggtggtacacaattacaaaggagaagtcattcctgcactttccaaacaagttcagggttgctttcgaagtgatgaaatggaagcaaaggcgctctttcatagtctaaattgggcttcacaataccaattgtcaatcactattgtggaaacaggcgcactaagagttttctctgctttaaattctaatcataatgacttgtcatgttttaatgatctaatcactgatgtacattgtcttttatcctctttccctagagttactgttactcatgcttgtaggcaggctaaccaagctgcccatggcttggcaaagtacgctctagagttggatgaagacgtatcttggataagagaaattccttattctattgtctctattattgtaaatgactgttgatttataataatattgaaaatttctcaaaaaacaaaaatgacttaccactaatacataaatggtttttctcgacgtttttaaacagtcgtttaaagtattcccgtc

SEQ ID NO: 153309 - DNA, 694 bp, Cannabis sativa
gatgagctacctcaagtactctggactcacagaaccaccgagaagacggcaacgggacacactcctttctcgctagcatttggctcagaagcaatgcttcctatctaagtgaacaatcgactcatagaagagagttttataatcaagaagaaaaccaggaacttctaaaattgtccttggatctacttgatgaaaaacgagttgagtcgcaaattaccaacacatcgtatcaacaccgagttacaagatatttcaacaaaagagtcaagaaaagactattcaatgttggagacttagtgctaaggtgagtatttgcaaatacaagagatgcatatgtaggagtgttcaacccgaactgggagggtccatatgtcatcgaaacagtagtcggaattggagtttataaattggctcgactcaatggatcgctaataaagaactactggggaatttatgtatgattaacaagaatttatgtggaaatacatggtataatgcaaacccatcatttaaaaaataaaaaaaataacatttaaaggttctcgactaaacctctttgacgagagagaagtcgagatgttataacttcctgaccaaagctttttgacgagagaggggtcgaattatgataacatcttgatcaaacctttttgacaaagaagggatcaaacaactataatttttgattaaaaac

SEQ ID NO: 153310 - DNA, 875 bp, Cannabis sativa
  modified_base (345)..(346): a, c, t, g, unknown or other
  modified_base (528)..(556): a, c, t, g, unknown or other
  modified_base (649)..(656): a, c, t, g, unknown or other
aaattatttcggatgctaaaacagataggggtgcatcaatatatctattttaaaagggtacattgtagaattttccataaatatttaagtaataataatgcagaatacaaaattatgttatcaaaaaagaaaaaatatgtgacttggaattcattttgaaaaggatgtagatttcaatactaaaatattctcttattaatttttttttttgatagaactaaaagttcgtcttattagtttttaatgagaatacatctttttatagaatgagatcattcaattattaaaaaattccgattattatactgtatatataaatgtatggaaaattctacaatgcacccnnttaaaatggatatattgatgcacatttgtctgttttagcacctgaaataattttttagtcaaattttttctcatggttatgtacgttataattatttaagacatactgtaaaattttaaaaattttggaaaagtttaacacgccaaaaactacgttctaacagtgtgttgcacgcgtgactnnnnnnnnnnnnnnnnnnnnnnnnnnnnntgtttgaacattgttttttatattgtaaattattcagaattcctcaaaattttataagttatcttaaatagttataacgtacatgaatatgannnnnnnntagactaaaaaattcttctggatgccgaaacaagtcaaggtgtatcaatacatcccttttaaagggtgcattatagaatcaccctaaatgtataatattaataagttataaaaagaagaaaaaaaaaaataggtgattctacaatgtaccccttaaaagggatgtactgatacacccttaacttgtttcggcctcgagaaaatttttttagtctaattt

SEQ ID NO: 153311 - DNA, 843 bp, Cannabis sativa
  modified_base (549)..(549): a, c, t, g, unknown or other
gacaaggagtacgaggagatgtttgttgcagaatttttcttgccaccctctctgaagctgcctaaccatggtatttcaagttggcacttgggaagttcaattcatgaaaggctttctcctcagagttccatgcacaattttcctcctctcgctaacttccgttgcacctaggagatctggtcgaagtaaagcaaataccaggagaacctctccgagcttacatgagcagattcatgacagaggcgaccaaggtttcacgagtaactgaggacggaaagttgtccgcgatacgtgggggcattgacgtccttggtgagatttggaaggacataaggaagaacggaccagttgactcgatgagtgattttcttgaccgtacataaagttttatcaaacttgaagaggctattcagcgagctaaaggtgaacaaaaaccttgcaagttaaaagctccttctactgggacatccgtccagctcccccattacccaagcaattcaagctcaaatggtaaacggtctagcaacaataataggcaagggaatgggnaaaagggaaagttcactggcaagactgaacaaggtccccgggagaatcctgctaagtatactgcatttaccttcctgacggaggacatagaaattgtttacatggccactcagccactagccccgtacaagaagcccgcacccatgaaaaaagatgttagcaagcgaggcatgaccaagttttgtcgatttcgtggagactacagccacgacaccaatgaatgcaacaatctaaagcgagaaatcgaattcttgataaggaaaaacaacccacacgtacagaagtatgtcaagg

SEQ ID NO: 153312 - DNA, 737 bp, Cannabis sativa
tacgatgcaaataaccaattgtttctgattgcctttgcaattgttgatagtgagaatcatgactcttggaagtatttcttgcagaagttaagggtagcgattggcgaggttgaaaatttagtgtttgtatcgaataggcaccaaagcattgaacatgttgtagaggttattttccccgaagcatgccactgtgcatgctacaaacatatttctatgaatgtcacctacaagttcaagactgatgtatgtcacacgcaaatatggctggccgattacgcatggtcgaagagggaatgtgatagacatttgcaagtgcttcgacagatggatcctgccatcgcttcttatgttgagagtataggattggaaaagtgggctcgtccttattgtctaggagataggtacaacatcatgacaaacaacactgcagaaagccttaacaacgtaacagaagaattctgggcatatccaataactactctagttgagttcataaggttcacactgcaaaattggttcactaaccgtctcaaaaaggcaagtaagtgcgttacccctttggcaactcattttgaggaagatttgataaagcaacgcgaggatagtagacgtagaagtgtcctacgtaacggtgcacaattgtttaacgttggaagagattctgatggttctaactttgagaaaggtggtgatgtgaacttagttgagagaacatgcacatgcggcatgttccaatt

SEQ ID NO: 153313 - DNA, 885 bp, Cannabis sativa
  modified_base (649)..(649): a, c, t, g, unknown or other
atatttgttaaacaatattatgtttcgttgaaatagtcactgacgtcggaaaagtccctggtattgaacaagtggctgaaaaagctattactgacggaaaaattaccgaaaaagtcaccgtccccaaaaaaagtcatcagaagtagatgtctcatataaaaataaaaaagaacgaattttataacataatgaataaaaataaataactaaaacatgttaaaattgaaatataactggttttgtaacataatgaataacacaaaataactcaaacaagttataattaaaatagaacttgttctatagcagtgttataatgaataaaacaaatcacacgatataattcaaaccaatgataactaaaatagaaccggttatataaaataatgaatacaaacaacgtaataactcaaacagattacaattaaaaataaagaggaaatcatttcttaaaacactaaaacataacttaaaaaccaaactagtttcacaacaaaatatctcataacagatactacttcataaaatcggttataatttttttttaaaaaaaaaaagtggggatcaattctaaaaaatattgaggcataaatatgaaaagaactagttccataacaaaataaaaaacacaaataataacacacaatanctcaaatataatataaagaaactgattatatctatgaactagttaaaaatttgagacaacaaaaaaattggttgcgtaaagcaactaagattaaaactcacacagaaaaatagttaaataaaaggaataattacataaggcaccattttttgtaaagtatttacatttttacgttcaaagaattttttttttttacatttttacagttttccaaaaaaaataacacgaaaacaaca

SEQ ID NO: 153314 - DNA, 682 bp, Cannabis sativa
aaaggaaaccgagcaaaaaaaaaaaaattgaatctggaaacctctcttcattttttttttttgtattttcttagtcgctatagtctaaaggcttgttttccaaatccccacacaagtgttccaattttaatcatttatttttctttagttttcatcagtgttcgtttagtttttttggttggaatttctgcttgaatcctctcttgtactgtttgattagtctttaaagaacttaaagaagaatatgagtggaaaaggcagaggtgtgagcttagttgagggtaaaagccatcgaatttgagtgaaaacacgagtgaattgagtgaaattatttttttttagtttttttgagtgaaacacgtgagggagtgtggtgagatctttctttatctgttctaacttttttttgtagaattcaatcatgttaaaagctccagaagaaaatacttgtaatgaaactacaccacctacggttcgaaatttataacttcaagatttgatgggggagatgaggaagatgatgcgagagaagtatgaacaaatacatgccaggttagatagagtagaagaggaaacccaacggaggcaacagaggaatagggttcaccaaagggatgataatgaattagatggggaagggataattattgatgaagagtttgatgggataccagcaggtaac

SEQ ID NO: 153315 - DNA, 581 bp, Cannabis sativa
tcaacaaataacagttaaataaaatagtatattataatataattaaaatgaataacatcataattaagtgtatcaattaaattaaaggttaaacctataaacaaattaatacaaattgtttttgatagtttggctcagctgctcctacacgaggtccaaaccctattatcttttttggccatttttattgcattatattatcagttataagaggaatagaatttacatcttttttttatataaaaagagatatctacataaaaataaatcattaattatttagctaaagactatcctaaaatacatacaaatatttattaattatgatatatgactatatttgactaatacagcaggtgcttactgtataatttttattattattatgattaccatgtgtatcatatctgtatagagttataattactatatatattttttctacacgaggtccaagttgcatagtcaaaaagggtcaaactaagattctttctatcaattagttcagcccaacaagagatgagataagcccaatacacaaacaaacaaagaaaccctaatgccataaccctaatataaaa

SEQ ID NO: 153316 - DNA, 567 bp, Cannabis sativa
aaaaaaaataataataatactaaaaaaaatatatttatactaatacttgatgtagaaattaaaaatataataatagttattttttactgtactaaaagatataaacaaattaaaacgaaattataatattcaatatcccatcatgcaagatacatgggaaattaattagaaaaaagtttacaaaaatataaaagcatcgtttcttaaaaatatgttgctctttagcgcatacaaccaaaaccaaacacattaatttctaaatcattaatccatgtacagtagcttcaaccttcttggaagacttttgaatattttcttgtacactttaaatgtatgcaactcacttcattctaccaaaggaattagggatgtacataaattttaataaaccgcccaactcgaataacccacccaaactaaaccgagataacccgacgaaaaatgcaaactgaaaaacctgacaaaaatataacccgttcaacctttatattgggcgggttgaaaataataccaactcgaattaacccgaccaacccgattaagaggatttttttatatatatttata

SEQ ID NO: 153317 - DNA, 893 bp, Cannabis sativa
  modified_base (64)..(67): a, c, t, g, unknown or other
agacagcgagagaggagggcgatggtgcggaggtgtgggtggggttttggagagttaagatttnnnntttagggtgtgggaaatggagaataaataggtgagaagatgtaggtgggcatgtgggaaatagaaaaaaagtaggtgggcacgtgggaaatgtggcaagaagtaggtgataatcttttaatggacccttataggtgactgttttaaaccgtcgcctataaaggtccattaaaaaattacattttattaaaaaaatgtcgtctattttgttaactacaattttaaaccgtcgggaatactaaatttttcccgacggttttaaatagttacttaatttttttagcgacaatcccctaaaaaaatcgtttttaagaccgtcacgaattacgatatttgtagtagtgtcattataccaataataggaatcatattcattaaaaaatataaagtacccatcttcattacatcacattgcctaatcaggcaagtcgatgctttaatctgataatcctgtattgtgtttcctaatcagacgagcccgtacctacgctcggtacttatcatatgtcactaacgcctatctctacacgtcgctaggagaaaaccctacaacgttttcattctatgccataacttggcaattttcatatcactgacgtcgtatctacacgtcgccaggagtgtctcatcacctaatcaggtgagtctgtacctatgctcggtactaatatgtcactgacgcccgtacctgtgcctgatacgtcgctaggaaaatcgcatcacctaatcaggtgagtatatacctacactcggtactcatatgtcattgacgcccgtacctatgcctgctacgtcgctaggagtattgcaccacctaatcaggtgag

SEQ ID NO: 153318 - DNA, 1324 bp, Cannabis sativa
  modified_base (1072)..(1080): a, c, t, g, unknown or other
ttatttatatgtagtttatgagacccatgccacaatatcataatttgcattagatattaactttgtgctaggtggtaagaaaaatggctaatgtatgcaaactaattccctaacatgcaatttggaaatttagtaaatacatctgatggtcagaatgaaaaacatgctcatcgatagcagtgaagtattaaacaataatttgagcttgagaatatagtcacaaatagagaatctaactttcttgagaatctgcaatagtatttgtagtttagatacatgagctcttgcaagatctactagtcggcatcaatggctcatgtatttgtagaattaatatagtaaatttaaagtattcttttaaactaatgtgttaaaatgtatattaactcaattaatatatattttaaacaaaatatattaaatatataaaattataaatgcacttccttaacaaaaaaagttaattaggatttttatccgacatgtaatgaatcatgtccttggactttttaaggtagttaaaaatattccgttggatttaaggacttttgtttaatttttgtaaaaaaaaactaacatggatgaaagtttagagggcatgatttaataaatgtcaaagttcgagaggcgtgatttggtagatatcaaagtctagggaacataatttaatacataaacaatcattgaaatagtaaaattgaatgaaattagaaaaaagttcttaaatctaacaatctcaatagtccaaggagaatttttaacgactagaaaagttcaggggcatgaattggtaaatcttaaagtttagggggcaaaaatcataattagcctataaaaatataccaatatatttcttatctcttttggtattcaaggttgactttaatgtcttcaaggtactcttggcatgtgggattttgtgcaagagtactattttaattttttgcgaaaattgggtataacaaatatacctattaaataaatatatttataaatattatgataatttttttttaaaaaaaataaaaaaaatatagacatgagtgagaaaaatatgaaaataaaatcaaannnnnnnnngaaattaatataaaataatatgaagaattttttttttaaaaaaatattaagagtaatttttaaaatttatttaaatttatatattttttttaatattatgtacatttattattttataaaatgcaaataaaactctcaaaaaaaatatttttgaaaataaaaaacataaaaactgtttttaattttttttttaccaaaagttgctgttttaaaaactgaaaataatttttaggctaattagcaa

SEQ ID NO: 153319 - DNA, 903 bp, Cannabis sativa
agcctttaatattttcatgtatatatcatcgtaggttataaggtaaaatgagcatattttgccccaacatcaagaaaaatatatctagagtgatgggcaggcctaaatttaaaacaagaccatttctctgtttacaaaaataaaaacaaatattatttaaatttttaatattaattggttttaacttttttatcttcatataacaaatacttattttttactaattaaactaactagacaatataatatttaattactaagagtatttctattgaactgctaaatattttagcatttttgtcatagaattatctctaatatatttttgacatgcataatcaatatatattttttttatgaatcaagtatgtgtattgttcaaaaaggatttatacaacctaatagcattctccaagtaagagaatctaaatatctgtaaaactttacaaggtagcaaaccattctttctcacttttggttgctttttttggccatatacatgtaattctctttttcactatgtttttcacttttacaattacaatctctacatttgtattggaattctaccaaaaatattatttcttgtacgccatatttcgtaaacaagagctgctatgacaacaactaaaattgaattctttaccttgcttatctttggcctccttaaccaccttataattatttccatacattttatataggagttttttcatttttataattaaaattatttttttttatttttacagaaatccataccgcaactcacatagccactacaaaaaatgctacttttagtgaaatttttttgtcacaacataatttttttgtgacaacaaaatgttacttgtgactaaaacatagtatttggttacacttttagtcacaacatatgaatca

SEQ ID NO: 153320 - DNA, 538 bp, Cannabis sativa
atttatgtctatgtgacatagacccacgtgttacgctcacacgtctaattacaatatggtcttagaacttcatctcgcttctaattactaagtccaaccaaattatgccttaaatgcataattctttacttcaacatatatagcatggtatagcatttcaaatcatttaaatcactagggtaataaccgtaggcaaaacaactgctcactttaaggtaataaccctaatcttggttctcaattaatcacaattataatattaaacatgagcaccaccgcgcttaactctacgtgctaactattttcttacccggtatcccaagtatgtggagattttaaatccctgggtgttcctaagcaagcgtcggtagtcctagtcaaacattcccgagatttcacaaatagggttaatccaaaaattaacttttagtaatcacataattagaattctatttacaaattaacatatagagctcgaaacgtgctttctaatgatataaagaacgtctaaaatggagtcccgagtcaaaacttatgg

SEQ ID NO: 153321 - DNA, 571 bp, Cannabis sativa
gacctccacaaaactgacctacataataacaataaataaaactttattaccacaaaatttaatgaaaaaaataggtaatatgaataaagatggtaaaacaatccatattataatattaagacttgaaatacttatttgtcaaatctgaaaagtcatttgtagaagacatgagtacaaaacgaagtatttttcttactcattaaccataccacacatctactctaaataattaggggcaaatcataaaaaatagcacaaaaaccataaaaacaagcatcaaaaccataaaaatatagtgcaaaaatccaacatggtcttattatcagatatacttaaaactatacttataacatgtaaggggaataaaataatttacgactaaattaattatgagaaaacaatttaaaaatgtagatttgatggaaaaaaaaattatattttgggcaagtaccaaattttatttctttgtggtcaagctatctatatatataaaagagaagtatgaggcggtgacgtggcggtgtaaaatctctccaaagctattttttttttctccttaattttctcaatt

SEQ ID NO: 153322 - DNA, 594 bp, Cannabis sativa
tttttttttttttttctatcctgctatccaaaatctcattataccattaaagcaaacatttggggcagtcacaaaaactctcataaaaataaaagaaaactcttcccattttgaagcaaaattagaatatgtaacgcaatcgtgcaagtatagcaacaaacaagccaagaagatttaatcgaatattaactaagataaatgaattcttctaagatttacctcaatttcagcaagaaaacatcagaactagtctcatgattgctcgagaacaatcctataaggtaagaacctttataactattctaatttgaaaaattcctatacaaaactaattattttaaatttaaaactgaattaaaccttaccttaagctttcatgttttgagaattttctatcccgctactatcagggcttgatcgctaagttttggattgaaaaaccggaaagaaaatgaatataaaaaggagacagttttgatagaaaacgagggtttcgtttcatttacgtttactgttataaacttataatataatgtatatataataaacttatctgataagtttatataaaatatataatattataataataat

SEQ ID NO: 153323 - DNA, 688 bp, Cannabis sativa
  modified_base (184)..(185): a, c, t, g, unknown or other
  modified_base (216)..(217): a, c, t, g, unknown or other
  modified_base (356)..(362): a, c, t, g, unknown or other
tgaatttttggcaaaaaaaaaaaataaataaaaaagatgagtttgacttaaatatttttttatataactacattttttatatagtgtaaaatgaggtacttttttttttaataagtaactaaattaaacatagaaattcaaatttctcttttattattagccatcagatcaaaatttaatagtnngccatcagatcaaaatttaatagtttaatanntttaaaattaatatttatagttacctttatttagtagccattaatggataatactcattgacaagtgttccaaaactaaattagtgacaacttgtaactaaagactatattttagtcataagtaatattttgttgtgannnnnnntcacatttagtcacaaaaaaaatatattgtgactaaaaaattgtcactaaaagtaataattttttgtagtgaaataatttttaagctactaaggtaccataatttttctagtaattattagttacttttgttgtattttcagtacatggataaatatataatccattttgtttaccaatcataattgagaagtgttccatatagttatataaaacatcatacaattttttaatgataaatttactgtaatatccactcaagagtgttattcatgttctataatttgttagttaagcctactttttggtcagggtgatatgtacatt

SEQ ID NO: 153324 - DNA, 547 bp, Cannabis sativa
catgcactcaatataccatcgtactagtgtaggtagggtatggaccgtaccttgaatactgttaagtgcaccttgagtactgttaagtgttgtaccatagacaccttgtacttcctgtacaagtgctggtaacaccacgatgtactttcagacatcgtacactttaccaatgcactctgcaccgcaaccgtacaagtgttagtagtgtatgaatcacaacatataagcatgcatatacacttaacatatacatacactctcatattcatattacacattatatacagttcttaccttctttctagattcaagtgtgctggctgacctgaacggaaagtctcgtgctagatggatgccttaagcacataatgaaaccgagtaaatcacatgataaaaaaacctaatccgagaaacccaaacccatcgctttaggctctgctagattctctagggattacactaactcaggaaatagggaaacacccaactacgacactgaaatggacgagaattgagaaaatggagcattcgggtaccctgccaaaac

SEQ ID NO: 153325 - DNA, 589 bp, Cannabis sativa
aataagcatgaattgtcataattgcccttgtgagtgtaaaagcttgatatttggccctaggggcaaaatggtcttttgacctttattttcttaatttaataaaagtggatttttgagataatgaataggaaaattctgcctttgcttcccctctcacctgaaccctctctctctctctcttaagcttctttgttttcaattttgattttgggagaaattggtgtgatctctagcttggttgaagctttgaaattgaagaactttaagcttgggaaattgaggtagttctttcctgaatttgatggatttctagttgattatattttatggaaaaacatgttttggggttgtgttgttcttgagtgtatgctataagaattgatgtttaactttgttgagtctgagtgtgaatagcatgatattgttgtgatatatgttggattgtgtttgggtaagctttgattgtaattctaggactttttcccatgtttgaacctagttttatttgatgttgagctgctgaaagatattgataatatgtgggtttgaagctcaagtttgagagcttgaagttgtgagttttaagcat

SEQ ID NO: 153326 - DNA, 606 bp, Cannabis sativa
atctattcactatcatcattaattatttttttaaaaatatatgtttggacataatatataaaagggcaaattacattaaattaggttttaaaaaaaaaaaaatacaaaaatatggtatttataggttggtcttcttaccgtaggaccaggttgaggatttgttccttgtgccgccctagccgttgcaggctctctttccaactcaacgtttcgtcggttagatttggctaagcgttgtcggagttgtctattctctaattctacctatggtacatacctagttgggtcataagcatcttcacttctaggcacgtatttggtaaaattattggcatctttattccttctttctgaatttcgatcaccaccaccattgtttttccttgaacgtgatgttccagtggtatggggtcttttagatcccattagctcttttccagggcgacgtgtagtttcttcaggacgatttctatcattttgattgttattaaccattgaatatggatagatttctatttgtaagtagggatttttctgagttgtatcactaagcttctcaatgaaagcaccaaactgttaacgtagattttcgttaactaaaattaa

SEQ ID NO: 153327 - DNA, 602 bp, Cannabis sativa
  modified_base (85)..(97): a, c, t, g, unknown or other
cggatgctgccttatatcacaaagacttagcaaataattcaagcattaagacgttttgatccacgtgtccctgtccggttggtcnnnnnnnnnnnnncaaaatcaggggcaacaatatcaatgtaatgttttttttattaaaatagtcgcacaaaaaacgactatattacctagtttaaagtaaataaaaaaaataagacaattaaagagatgataaatagatgtatttgaaacaattttagactgtaatgttaccgtctcatacctcaactatataagtagactcaaaaatagataaaattaatatatttagactactacatcattgccttatagatatatgtatatagattatacacggaaacttcactaacgcttggtatttattttttataccaactttaataatcatcccaaaaatatgtttctatcatttttgcttctcgtacaatttctaaaagggagttctatatgcaccccaaaaatttataaatacactctctttcaataaattttattttaaataaaatttatatatttaattatatcaatttttttttttaattttttcccaattcatattcttaaaagatatacctatc

SEQ ID NO: 153328 - DNA, 732 bp, Cannabis sativa
  modified_base (32)..(63): a, c, t, g, unknown or other
tttagaaagttcttatttaggatgttaataannnnnnnnnnnnnnnnnnnnnnnnnnnnnnnnaaataatttccaacaagaatttctcaagaaaagagagtctgatgcatatgaccacacaagctacgcccctattgtggagttagaaaattgacaactcagtcaaaggctcgcagaatccaactgacgaaatgaggagttaaaatgagcaatggctgcagtgagattgactcaaaactttgttaggtctgctagtgttaaggggaagttctttgagttccttggttagaccaactcccaagtagtttccccaaaataagggtcaatgtcaactttttcttgggcgtacgttcaagtggctttaggtgtcgtctttgtcttctctatagtttggactctggaagtcttcattgtctctttgtcttttacgagagaggcctttctcgtcctcctaattccatagatgtagatgaggtcttgttcgtcccctctaaaacaatagtaacagatgaggtcttcttggagagtgatacaaagtgttataacacttgtaggtagttccgtgatcaaggagacaaccgataccagctaccattgggaacttgacagataagtggtacactgatgagatagcttgaaggtcgtatagtgtaatgccctaatctatagggacgccacgtgtgtgattttataaactagtttaatactaatagattaattaactattaaaaa

SEQ ID NO: 153329 - DNA, 599 bp, Cannabis sativa
agaattacgattgaagtgtgagacatgacttcatagaacactgacatagcttcaaaacacaagttgaatcacgtcaatcagatcaatattgagtgacttatggtcattttactaacagttattctgggcctagtgtcgaggttggcatgtgatgtcaacctggacactgggtgagtgtaagaacgcaccaatgatgtatttttttgatgcgtaagtgatattttgacatcacttagtccatttctatgttctggcgaagctggtcaccagttctcagagatattattgttctgtaggaacacaagactcgaaactgccctgtttccgagtaaatcaccttgtcaaaaaaggaaaaatatgaagttgtgaatttgactcttccgacttcatgacacttagttattgtgaaaaaaataaacaaacggtcaagacataattagaattggataagcaaaacccagcgcaccaggccatttgtcaacctgggcgttgggtgcttatttcgaagctttcaggattttgttttggcataggttcttgaacttgaagacaaggtctcctaccccaattttgatcattttggagagaatgcttggagc

SEQ ID NO: 153330 - DNA, 646 bp, Cannabis sativa
ggccaaaccctcagtaggaggtgccaatggtagatctaccgtgggtggtagagtctggtcattgggactaaccgggttggcagtgtcaacctgacaaggtttattggtcaagtttgttgtgcctgtcgagttgacagggttggccacatccatcggatttgtggatattctagtggtggctggaacatgaacatcaggattaacaatcatggtgtcttgaggaaaacctgatgaggtagcagttgtagctggagttttccttattacatccatggtgatagagcagaccaatcgacaatgctctcaatgaaagcacaaaattgttgaccatagatttagaatacgatagtggagtcttatttatgactgatatcaccacgtgtacacaataagaataagaaagtaaagagacatagtatttttatagaggtttccccccttaataaggaggtaatgatgtactccccttttggttgaattaataccagagatattaacactcatatctcaagtgttgtggattttgaagtggctctcttaagattacaataatgaaaatcaagaggcaaatgtcaagtaagcaagatgagagagacttagtatcttctacaatgcttggggcatgtaggagagagagagagagaga

SEQ ID NO: 153331 - DNA, 1055 bp, Cannabis sativa
  modified_base (324)..(329): a, c, t, g, unknown or other
  modified_base (745)..(754): a, c, t, g, unknown or other
tagcttaaagtatgttttatgcatgaattttggtgtttaagttgctataggttttggggtggtttgatttcgtgtcttgggattagattaggttcatgttgtttgatttgagttaatttggtaagttctgataagatttggctaaggtttgagtttatgaactcgagccatgcctttaatggtggattgaatttctgagattgttgttgagttttactgcttgaatatgtttcattatagtgcttacaggtattctaaagagtttggtgaagtttgggattgttttggaattaggggagcaatttttgggttcccagcacagannnnnnattccggttctgggggacctgtagcaaccggtcgaccggttggttcccacaaccggacttccggttgggaaccggttggccagttggggctttttcccaaaccctagtttttctctttttgcgtaatttagggtattagcatcctatctatcgatagggttatccttggtttcgattttaaatccccgataagagttttagcgtgtctctcattgaattttgaatgctatggtttagggccctgtaaagcgtcgagctgcgtttccactcaggctgaccgacacacttgagcacgggacgaggtaagatagcatgaatattacatatatgtgaatgaatgcttgtttggatgtttgcactactaatacgaatatcagtagggttacggtgttaccaacacgagtaccagggggtannnnnnnnnngtggtacaacacttagtaaatctcaggagtacattaatggctctatcaacacaagtacagagttggtactttggtgcatttggtacagaggacgtacttccttaagaacgttcttatctatttggtgaactcaattattgagctcagggcggcttaaacaagaagctgatattgcacagcttatatatttgtctttcttatcttcctgagtctgttaactcatcagtttgctaccttgtgtaggtaaaggaaaagctaagctggaggaacagtgagatggagcttggcagtgattgtacat

SEQ ID NO: 153332 - DNA, 781 bp, Cannabis sativa
  modified_base (147)..(147): a, c, t, g, unknown or other
ttaatttaatatttataaaattataccctaggatgatttgaaaataaaatttattttccaaccatagtattaattttccaataaatattatgaaaattacctaatttaagttggtccaaaattaattgaataattaattttcaactnaaatttaattttctataaatacataactaattgaattcgaaatccaatgcatttaaaaatatattttcgaaataatcattaaaataaaactggaaaaattattataatttatgttgatctaaaattaaataaattaatttttcagcataaatataatttttctatttaattaaatctattactaaaaatatcaaatatttaagtgtcttgaataaaatcaactcaaatattaactttctaatttaattaaatatatctagaaatataccaaaaagtcgacatagaaaatatctatctaaataattcataaaataaattactaattttctaattaaaatagtatattttagtctatttgatttcattaaatcattaatgaaaattacttaatttaagttgatctaaaattaattaatagattaattttcaacttaatctaattttcaaaattgaaaaatttcaaaatatttgcatctaaaataaatgaattttgaaattaatggggaaaatggaataaaatatattctgaaaattattctaatttaagttcatctgtaattaaaaaaaatccaacttaaatataattttttatttaattaaattcattaaaatagaaataattaagtatctagaa

SEQ ID NO: 153333 - DNA, 907 bp, Cannabis sativa
aacggtatatagaacgtccaaaacagacacccgagtgaaaagttatgaccaaaatacgattcccgagttctcgaggctgcccgaaatggtaagccggttggccagaactagttgaccagtttacaaaccggttgaccggtttatcaggggcaaaaatagaatttttttcaagtttacgcactcatcgaaacgcttccggaacctgtctaaaccaccccaaacttcatagggcacatatataccatatatactaccaaatttacgtaatcaaatctaaaatcgagcccgtaatcagcaaacgccattagtgttcggacttaagttataaaaagttctaaactcaatttctaattcaaaatcacctcaattttagcaagaaaacatcagaactagtctcatgactacccgagaacaatcctataaggtcagaaccttcataactattctaattcgcaaaaactctatacgaaactaattgttttacacttaaaacggaattaaatcttaccttaagcttttctgccaggagaattttctatcctgccactaccggagcttagatcgctaaattttggattgaaaatcgaagaaaatagatataaaaggagagagaatttgttgacgaaggaggagggtttcgttttcgttagaaatgtataacgtataatatatatatatacttatcagtaaaactgataagttttatataataaaataatataataataatataatattaataatataataataaaaactttattatttataattatcttatcattttttaatcactaagaaatcaatacttctagggcgctaagttaaatctcacatactcctaattaccccaatatctatattattaacttatcataatatttccataaattctatcaattaaacc

SEQ ID NO: 153334 - DNA, 614 bp, Cannabis sativa
ggtgggatccccgagtcagagctgaggcccggagtatcaattcttctgggtttcttggtagcctcagtcgctaccatcttgcctttgcatttctggtacagcgaggaaagaatctcgccctcttcctcctcttcaacctcctcatcctcgtcaatcaagacaatttttcctaaggggacgcttgaagaggacctcccaggggtcaccatctggtccggtgcctgaggcaagacggggtcgggactgtaggtttgggcaagagttgccaaaagctcgtccattggcctagctgcttcaagaaacaaacaaataagtgttagaacagtgatgagaaattacgcacacaagaacaaagcagtaaaactaatcctacccagaaaatctaattcaaccctcgcaaagtcctgtactataatgctggcttcgtcatccccaagaaagctgtccgaggggagaaaccagctggaagacagataagcttaatgatccagaaggataggcgcgggaggcccagacccatccgagagcgacctagaaaatgacctaagttggaaaaataaaagcccttggcatgatcaccccaccgggtagggggcattctaaatctaaggaga

SEQ ID NO: 153335 - DNA, 748 bp, Cannabis sativa
  modified_base (128)..(155): a, c, t, g, unknown or other
  modified_base (206)..(218): a, c, t, g, unknown or other
tgtgaagaatccaaacaacagaaggagttttgggctcagatcttggtgatactctgctagagaaaggatacaaaggttagagatatgagctgaaggagtcatttatttccgctgcaaccaatgtaagnnnnnnnnnnnnnnnnnnnnnnnnnnnntatatcgttttagaagttcatgttgaagatgttaaaaacatacttgttagnnnnnnnnnnnnntggtaaaatatattccaacagttattaggtataactccacccgctgagcggtcaagtaagatctgcccgtctaccgcttggcccacatgttggacctgtggccgaggattggaccgctgtccattatgagcttgggaggtatgcccagtagcatactcctctgtaccgctcaatgggatactggatgaagtagctggttgctgattagcaacttggtaggccctccgtatcagtacggtggcctgccttgtgcaatcatcgatggctgcttgctaagccttcaatgtttccatctcatttaccctccactatatgaactggcgtcgctgctcatcgaatgcgacatttatagcagcacggagatcctcctaatcatgatgccaagcattattatggccttgcatgagtccaagggctgtacgaagattttgaatctcaatatcatctcccaccgtcctctgagcattggtggtggacgagactccagtgttgggagtggattggtgggctgcagaactggtattcccagt

SEQ ID NO: 153336 - DNA, 525 bp, Cannabis sativa
aacccaaaggcagaccccgatcttggacccaaaattggacccagacttggaaccgaacccgggcccaaacccaaactcggacctggacccatacacggaccaaaagcagaccttgaactgaactcggacccagttcctaaaccctaaaccctagactggacccggacccagacccagtccccgaaccccaaaccggacccggacccagacccagtccccgaaccccaaaccggacccggaccttgaccccgacctggatcccagaccaggacctgaacctagacctgaacccagacccctaaccggactcgaacccatattcggaccctatattttgacctcggtgctggacctggactctgaatccaaaccccaaccccaacgccgtatcgaacccgaactaggctccggtctcagcctcggacccaaactcgaacccgacttatataaaatcaacaaataaaaataaaatgaaatttatagaacacacttttgtttattgttttaaaaattttatttttgaaa

SEQ ID NO: 153337 - DNA, 748 bp, Cannabis sativa
agtccaaaacaggtgttgcacaacttgatattgtctttccatcctggaaatacaatccattactcaaccttcctcttaacacagtttatgtgccttgtgtaattttcattacaccttccttaattttaacaacataccccaatttatcaaacataccaatagagagaagatttcttttgagatctagaacatacatgacctgctgcaaggtcaacatgacttcatcatgattctttaacaagattgttcccacacctttgatctcacacgctttgttgtttctaagaagaactgtgccccaatgactctctgaacaagtcctaaacagtcctttgtttggtgtcatgtgaaatgaacaccctgaatctagaatctaatctccacctgaatctgatgtagacatcaaaagaacatcaaatgacactgtaagtgcatcagacgacccataaccatcagctaaatcagcaactccatgcttcctagacttgtgatgattttccctcttcagtttaaccttcaaagctaaacactcatatctaaagtggccctccttcttgcaataataacattgcttttctacagctctattagagcttggccctcctgaggagtttctaaaattagatcttgaatggttagctctgtagccattagagttctgatttcccttgaattccctcttggggaattttcccttaacaatgagtaatccttccccattgacctcatctttctcatctcccttctt

SEQ ID NO: 153338 - DNA, 727 bp, Cannabis sativa
attataaaattggagaaacaattatgaatcttaaaaagcaaaatggtgaaacaaaattgatgaaaaaataattttgttaattttagactaatcttattgagaagataaccataaaattaaataagtaattttattattattataattttgtgttatctattaacaaaatttaagtataattttgttaatagagaataaaataaagaggttttattttaaagtgatatggtattttcactttatggtaaaatgtgggggtgagatttaaatttaattaaatttgttgagaaattattgattatatatatgtgattttgaatttaataatctaattaatattttgctacgtgcatatgtgaaattttgacatatttagtgttaaaatttggtagtaattatttcaaaaaggaaattaaatctaaaatggttagagacaaagtgatcttatatatttttaaatcaagatacaaatattatattgtcaatgaaatgtgaaagtatggggtgcatactcctatatgagaagtttagacatgtttggtgtctaaaactaaaaatgagtatatttgagccatcagccatgcttggtatcttaaataaagtgtaactttgacatatttagtgcctaaggttaggtgtgtaattaaacatatttgatgtctaaattagtgtttaattttgatatgctttgtattcagtgacagactcagaatttttactttgtggg

SEQ ID NO: 153339 - DNA, 1067 bp, Cannabis sativa
attcgaaaacttctaaaaaaaattatttagttgtttgtttgaatatgtgtagtaaatagttagttaaattaattaccacacatatataatttttagtgaaatttatgcattcttagtgaaatttatcctaattctaccaaaattttggcagtctaacggatgtaattagacgttctcaaaaattttaaatatgaaaaaaataatagataaaacatataaaataatacaaaataacaaaaaatattaacatacaaaaattatccatccattggaccgcaatacatatgtattcgcaaaacctacggttgaatataaggaacatctaacatgcatattccacccattcgattgctatacaattaatcgctgaaacctatgtgacgccctgaatctcagggacgccacgtgtgtacttttacaatcttattatcactaacctattagtttaggaaaagtgtggtttaattaaaatctataattaaaattaaaataaaaactttctttaaaaatactgtcgtaatttggggatcccctgctaataaaatttctatataacaaatttcaaaatcattattaccaaaaataaagttacgtttccaaacataaaagaaaagaagtcgatcccgcttcccggaagccaagacaccacggctgatatgtacactgttggaagacctcttgctcatggttgaacacaacttttaaccttttacctgcaccatgaagcacccgtgagtcataatgactcaacaagaaaagctattaatcaaaaccaataaaaacacaaatattcctatcatatcatagcatacatactcgtttttcattatctactcagcctgcatatatagtattaacgtctatactaaccgtatattatacaatataaagataacatagcatcttaccgtgaatacctttataattacactaatcaaatattcattcagtcagactataacaaaatgtattgattacaactcatcacctaataacatgcttagttcatttcaaaatatcgtaatcacacaatcctggtactttataaagtacccttaccactcgtt

SEQ ID NO: 153340 - DNA, 921 bp, Cannabis sativa
  modified_base (580)..(582): a, c, t, g, unknown or other
ccttcacccgtggtaggtagttggatgtttggttgttcaagattggtggctggtgggacccttgcattctctaaagtctgcagtgcgggatctgccaccagtggatccacttcatcgactacgcctctacgagtttgtaccaccatagtgtttctgatcaaactataagcaaaaagcaaacttagattattgctctcaattagagcaccaaaatgttgacctcgcttttagccaacgacaatgagttaaatagtaagtgatagaaaatgtaattaacatatagtataagcgaataaataataaagaacacaaggttttaaagaggttcaaccccgtcagttcggtaatagtctactccccttgatttttattaagtcaaaaacaaagaatatagtgtttcttctcttgaagctctcacaataaaatctctgagtatgctctcttagatttctctaaagtaattctttcgacccctctaccagtgagactatttatagggctaaatgcttctgggaaggcttccctttttcttacaatgtcaataattggtaagaacatatattacatatttagattacannnattgtgggatttggacagctttccgtatctctgtgatacaatcctagactaatagggattgcttttatgcttcacgatgcaagttctataattcctaagtgttgatgcgctgctcggattgtctactgctcgactgggaagacattatccgtgcaagtgtatgctgagctatgttctgaacatctcttcagctagatctagggaattaggttcatgtgtcaccagcatgtgctgccacgtcatagtgtaaaaaatggcatcactaaagtaatcaagattgtgtgattaaatgtattgtgtgacttatcagtacatagggtttaactgataggataatct

SEQ ID NO: 153341 - DNA, 571 bp, Cannabis sativa
gaaagacgtcaaaagaatcttaataaacaacatggaggagttcctacagcgagctaatggcttcataaagttgtaagaagctgtccggcaagcccaaacagaagggcaggtcaatgaaaaacaaacacagggcctcatagcaccctaagcactatccaacatgtcgaccaacaaacaatctctgttgattccaaacaatgagaatggtggaggcaagtgcaacaacgacggctttgaccaacataatgacaaaagagggaaattcaacgattcacttatgccatgaagcctaaggaaataggaggggaagggtgcatgcctcagtctcctaccgaaaatcccaaagaaaatcatgcctagacgtcccagtagggcaagtcagcagtccaagggtcggcctctatctttgaaggctggcctccatctacaaaggttggcctccatctcttgccaagcgcacaggcaggtgccaacaactccgcccaaacctccagtggcaggacacttaggggtcattattggcagaccccatattacaggcaagaccagcaaagctagggaacgctatgct

SEQ ID NO: 153342 - DNA, 537 bp, Cannabis sativa
taaaataaacacgacataagtatatatgagtatcttttcagggttcatatgcttcaccatcttttgttaatatctatgtcactattgtcttcttgccatggcgatgaaggacttgctctcttgttgccacttgttgatacagtaggtttgttgttgacaggtggagttatacacagtcgtcccctacatatttcttcatcaaagaagattcattattgagtgagaatggacagttacaagcaatgtttgggtattgggaatcttggaagattggatcattatagtcaacatcgttttcctcagcatagtgttttttttataatgattcatatatcttcttctagtttttggagatacttgagcgaataatattcccatggtgcgtcatctttgagttttagccagatggcatatagaatcaccatgttaatggcaaataggtgcttttccagctgtcttgcttctaggcttcctatcacgacaagtgggtgttcacttgacgtaaatgataagtctggattgacatgtagcctgagt

SEQ ID NO: 153343 - DNA, 516 bp, Cannabis sativa
cgggtgaggtacaaaatatgttggataaagcccgtactccacaaagttggcctctaaggtgaacaaggtgatattctgagcatcattcgacagttgaacaatcttttgagctatgtccctaagagctagcatgaggggtggacagtaatatatagggatctgctgaaaccgagtataagtggtgcccatgccttccaccatgaaatactcgtcaacgaaattcccaatttttctcacgaccttttccattgtgccggtcaaaaacttgaagtctggctgagagaagtagaagtaccccaacctgcctttcttaggggtagacttcaggtcaaaaaactaactaatcttgtgcgaagaaggcacgccccacttttggatggtgtagaggacgaacagggtagacagatacttaatgccctttggagtaaactcaatcggacagaggcgaaagtaatttgccatcttcctgaagtacaggtgcaaaggcagcattgccctttgtttggtatgagcacc

SEQ ID NO: 153344 - DNA, 630 bp, Cannabis sativa
agaaattaataatagtgttgaattaaattctcatcatgattttaatcaaattaacttttgttttgctccaaagactttgactagccatttttaatattacattacatattaaattaaaatatgtaaaatttaatattaaataattgtacgaggatttggagtcctatatatatgttaggtagtgtgggcatatatatgaatccataattaaatataattaataatctattattatattactttcttcaatatgatcaaagttatacttttgttgttgctagccacgatcagtagtaatcaagtatggagtagtaattgcatagagaaggagagacaagctcttctcgacttgaagaaaggctttgtcgatgatgacaatcttctatcctcctggacaagtagtagctcagattgttgtgcatggaaaggtatcagctgtcataacttaactcatcatgttatcactcttgatcttaaatactcctactacaaaagttccctaggtggtgaaattggtccttctttgcttgaattacaacatttgaggtacctcgattttagttacaatcattttactaaaattcctgagtttattggttctttaactagactcacatatctcaactttga

SEQ ID NO: 153345 - DNA, 910 bp, Cannabis sativa
agctttcttatctctattattgagcagacaactggtgggaatggccgagatagctggttttctaataatcttaaccgtgcacatcttgactactactatgggctgcttgctgtactaagtgcagtagcgttcgctctctacttatattttgcaagattttacatttatactagaactcattttgtataagctctacactgccttagtgtccttagaaaaagtggcactcctgaggtggaacttaaaactactgtattctgtaatgtgtaattcttgtttataattttcctcgtgaaaattaataaatgaaaaggattggatgaggaaacactataaaggctataaagctttaatgtgtcaaaatgaattgttctagtagatgtgtgttttgatttgtaatactaaactaaaatgatatttatgaaccaaggacagcatgagttctatgcttacaatctcttttccataattcactcatgaattattgtaagctatcaagtcccttgattaacatgtacatgtagaaggatggccgtcatgtggcacatgtatagaagcattgctataaagcaccagtagtgtctagtaccattcataagtggtgtcttgcaattggttagcgatatttcatagaagttattttattaaattatataggattccatatttaattgtaccaacaacaatataatatgttggagagtattagaaactacgagtccgtttggtacacaggattagattggattggactgaaaaatattagattggattggacaagattgaattaaacttaaagtaattctatgtttgatttaagattagactattttatttattttcttttaaaaaaacttaaactaaaataaaaatatataataataaataataaaaataattaaattataaa

SEQ ID NO: 153346 - DNA, 1148 bp, Cannabis sativa
aagttgttaaacactggctcgggaagaaaacacagcactgtctcgacaagtaccatctcaacaaaggctgacaatccaggaggctgtaagaggaaagatgcctctaaggaatcagccaaagacaagaaaaaatagaagaagcacaacaagtacgtgccaatacacaattttataccgagcttaatgaaactcgagaaaatatctatctcgcacatgagcacagggtcacattccctaaacctgagtccatgaggcatgcgagacacaaaagagatgcaacaaaattttgtaaatttcacaaggacattgggcatacgacagaagaatattgtcaattaaaagacaagatagaaagccttatctcgcgaggttactttcggcaatatgtgaaacgacaaggcggtggagaaaatcagccaaatttgcccaataacccaggcaaccagagattacaacctcctcctctttaaggataggacattttggttatcttgagagggccacatcttgctggagagagtaataatgcccaaaagagataggtcaaggaagttaagaacgagcagtcagtttttgctctagaatcttctaagaaagctaatgaggaacctccaattgtgttctaggaggaagatacgaagcatgtgagatatcctcatgttgacccactagtgattaccatccagctcgccaaaaaaaaggataaagagggtgttggtggataacataaatttagtaaatatcctatacaaaaatacactgaagaaaatgggggtagaaagagcaaagttaaaaaaccttgcatggaaaaaatctattgcggatttacaggcgacagtgtcgccactcaaggaagaattgagctctcattaaccgtgggcgaagcgcctttatccactaccataatgcaagactttttagttgttgacctgccatcggcttacaatatattgctgggtcagcaagcgttaattggactaggggcaattagttctatgaagcacctatccctgaagtttcagacactgacatatgtaggagtggtgcgaggtgaccaacttctggctcgagaatgctactgttgggaatattctaccaggatctagatttactaacaagtatgttaaattaacatcctaaatatgaat

SEQ ID NO: 153347 - DNA, 533 bp, Cannabis sativa
attccgtgtttgaatggtttgtgaggctgcaacctccaacttttctgggaggtactgacataattcaggtcgagaaatggatgagcacaatcacccgtatcctcgataatatgggagtgggaactgagagagtgaattgtacagctttcatgttgcaagatcatgcccgcgtctggtgggatattgtggggtagactcgagacgtcagtgtaatgacctgggaggaatttaagagtctatttgaggaaaaattttatgacattgctctgaggacttcacatatggaagactttgtgaaattaacccaggggaaaatgtctggggtcgaatacactcttgagtttgattggctgtccaagtttgctggtgatctggtgcctacagatttcaccaggaaatagaaatatgtgagatggctaaatgcaacaatgagtcgggacttgaaaattaccacttcacatgacactttgtacaagaaagttgtagagctagccttaattagcgaggaggctgagcaacatgtaatcaaagag

SEQ ID NO: 153348 - DNA, 1511 bp, Cannabis sativa
ttagacaattgttcccaagagttgattgaatgatgagtaaatttgttgaactagctactcgctgctccaactagcgaagtggggaacaaaatacaacgtagattgttcgtaacattactgactcggataatagtattgaaattatttaaatgcaagactggatctgtggtcccatcatacgacgagacgtgagggttcttgaatccttatgggaatgcagtattcgtgatgtctggatggaaaggctcgagctcctcatccaagtcatatccagattgctttccttgctccctgacttgatacctcctgaatttatcctccaactcatctattcgtaattggataggatcctcttgctttggaccgagctgttgtgatcaggttttttttagttcaattgattacgaagatctggttgttgctggttatagttgctaatgaaccttgtcatactcatggactttttcctactcatggacctcgtccttgagtaactttcagttttacttgtgcctatactttctcaatcattattgcgatgagttctttcccctcctcgtgttgatcgactatgggttcttgtgtgtcccgaggtaacattcgcctcttcacgtcccgtccttcttccttgggtccttgggtatgggttattgcgtgccccctgctgaggtttgtacgtgccccttccctgttggttcgagaaggacgttggcgatgtctcgttggtgacccacgtgtcccaggttaggtcctaggatttccctcgttctcacgggggatttcatgttccctgggttggtgccttctgttctcatttttgtgagagggctctggttgatcatttggttgttcattcttaggggggaccctcagtttccccaggttgttcttcctgagcgttctgaggattctcttgagtcgtctcctacctcctagttcgtgagccatgaggtctgcctcgtggtcttctcactccaggatcaggttgattttgtgcgttgttctcctgtgccgccctgactgcggcagcctcccgttccaactcagcattttgtcagttttcctcctccaagcagtgcctgagacggtgattctccaactcgataattggcacaaatcttgtgggatcataggcaccttcattatcatattccataggttaggcaccccccagattgggttcttcatctccttcttatgggttctggccattctcatgctgagtcctccttgaacgtgtggaccgtgtacttaggactttttaggttgggtccttctggaacgagtggtccgtgtagatcgtgaatcgggagacctccgtgagcccattggctcctttctaggacggtgagtggtctcttcaggatgagtatcaacgttttctccgttatcaaccatggagaaagagttttcttttgatcaggagggtttgttctaagattttttcacgtaggctcttaatgaaagcactaagttgttaacagttattcgttaacgatattaaagcctat

SEQ ID NO: 153349 - DNA, 508 bp, Cannabis sativa
gggaatgccttctagacctggtatccgtctatatatggaacaatgtcccacttatcctcaagatatagaggacatgagaaaggttcctcatacttcagtaattggaagtctaatgtatgctatgttatacactagaccagacattttctatgcagtaggaattgtaagcaggtatcagacaaaccctggagaggaacattggactgcagttaagcatattctgcaatatttgaaaagtacaaggcataatgtgttagtctacaagggtggtgctttaaatcccgtaggctatatcgattcaaatttctaggcttgtcttgatgataagaagtctacatttgggatggaatttactcttgtggtggagaagttatttggagaagtgctaagcaaactgcaacatcagactctaccatggaggtcgaatacatagctaccgctgaggctgctaaggaactagtctggctaaaaaatttcttctcataacttggtgttgttcttggaaata

SEQ ID NO: 153350 - DNA, 575 bp, Cannabis sativa
  modified_base (197)..(199): a, c, t, g, unknown or other
  modified_base (341)..(359): a, c, t, g, unknown or other
actaatataatcactaaaatgagctctctatcatttatttctatttagcctagcacgaatgaaattatcatttcacttttatgtccggatagaagctatagattccgtatctatgatcagcgctcccactcaattgtactattgtgttcccaaaatgtacgtatcaccctgaccaaatagtaggcttaactaacaannnaaagaacacaaataacactctcgagatcgaaccaaactatgtcaggattaagatcatttgatctaggatcaactaggtgtaattgaattgaatatatattacggtaaatttatcatctctaatccaagttcaatatcggtcnnnnnnnnnnnnnnnnnnntacatctgatactggtaaactttggcaacaccttggaaaggagataacacttatccaaggtgtaaatatacctatcgctgattatcatgccagtctaattcagtgaacttactaatcagggaattaaacttttgaacatgtaatcatgattatattccgctgtgttggcaacactataataatgaacaaatacatatgttttggacttaataaaat

SEQ ID NO: 153351 - DNA, 696 bp, Cannabis sativa
  modified_base (230)..(239): a, c, t, g, unknown or other
tcattgtcgttggctaaaagcgaagtcaacacacctcttaaaagaagtgtttaaaattaagtttggggtgtgccaccccttgtaaaaaaaagagcatgattttttttagaaattggaactcccaggtgttatagcattgcttcagcaatctagagcagagacgcagaaaaaaaatgctatgctaagacgtttctataactcctgggagcatgttattttggaaaattttnnnnnnnnnnataatggcaatattaatactcaaattttttgtgggatattaagaggaagtaagtgtgaggtctcattttagtcttaggaaaattaaggtgcttttagctgatttgagccaaaaatgacttctcttaactaccttcacctaagccttatattacaagcttgaaaaagtccttttgatctttggttttgtgtttgtctacattagtggagagacagatgaacaataaacctatgagactttgtcattttagagattttgtgcttaattcatatttacataaattgatctaaatcacaagcaaacttctgagaaaaggaatttcccacacacacttggagtaataagaattagaatgaaacttgttcttgaatttttcacaatcattggacaatctttatattttttctctaagctatgttcattaatcaaccttcaagggaaatgtggagatcaccaat

SEQ ID NO: 153352 - DNA, 560 bp, Cannabis sativa
  modified_base (393)..(412): a, c, t, g, unknown or other
  modified_base (498)..(499): a, c, t, g, unknown or other
tcatccatggctttattccattccttagagttctttctattagctgccttgttataagtcttcggttccatatcatccatttccaaatcttttagaagagcataagccaactcttcactctaaatgttgtagctgtactttctgattatggttcggagtcctcttagtcatatcccttgtcaattgataatttgtaaggtcctcttcggtgtcttcatccctaatctcttgttgagcatcgaatcctcccccttgaccattgttcacgggctactggttttggtttggttccacctgaaccatacccggtgtgtctccattttgttccacctgatttgaacttattttaacttctaagtttgtacctgcagggttagtatcttccattcctgnnnnnnnnnnnnnnnnnnnnaaacaaggaaaaatattttcttggaatataacatatatactattcatagttttaaatccccctttttcctttacccaaagtctatnnccttttaccccttcagggtaccctaagaaaacacactttaaagccctaggttcaagttttc

SEQ ID NO: 153353 - DNA, 625 bp, Cannabis sativa
aggatctgataggtcaaggtgtacaagatctggcaggtcactatagctctgtcaagaggaggccagagtcgtggcgcctattgtggtgataggattcaccacatctatagtgttcattgggattcaagctgtgacaggaacctgcgtatttggatctacagtctgtgggttttgagggagacccaaagatgcatatggtgcgataggagttcttctcatgttaaccatgggatttgatcagatacgatatctacgctatcaaagaaagcaccaaacagttgacctcaaaaaatgatcaaccgacagcggggtcgtatggatctgatgcttgccacgtgttacacaaacaagaatgaaaaacaataaacatagagatttgttatagaggttcgaccccctgtgatagcgggtcatgacctactccccttttagttgtattgatatctagagataatactattcagatcgctataggctggatcttatatagctctttataaggatacagaacatgaatcaagtaggaatatctttaataagagagatgaacaaccttagaggtgtgtgagaaatgaagtgagaagagagaaagagagccctgttgggcgtgtacaagagagagaga

SEQ ID NO: 153354 - DNA, 558 bp, Cannabis sativa
agataccaaattaacttagttgctaataattcttgattaagtctctacttagttaatggattcaagctaagtaaaaatcatcacgtgacagaacatttcaattattataagagtaatttgcggcaaaaataagtttaaactattatcacatgacaatttacttaacacttaacagctaggtaactacaaaagttccaaaactataatttaagtattattaccgccaaaaattaaacttatatatttatctataaccgggaattaaaataaagcatttataccacaaattactcttattttaaatatggtaacaatacctttaaatcttgtttaactaatctaatagggagagtaaaggcaatgcaatgcattatgaaatctcaaagtccattcttttcttttgtccaaattaattaatgatgtcataattgggtaagtaagattgattattggcatataaaacattaaatatgatcttcttgtgctctatggtggcatattcagtcaagggtttttgctatagttcaagaacaaaacataaaatttaaagctatatat

SEQ ID NO: 153355 - DNA, 918 bp, Cannabis sativa
tccaatggtcaggtggtagtggaacctcgtcactgctcgctatgtcacggtgcagggcacaacagagctacatgcaaagctcgagtttgaaccgtttatctaatatctaaatgaatatgtgttgtattactggttgttgtttaacaggactatagcttgaatatttaacaatatgcatggatattttaaaagtgtgtgcaacattatgcgacattattgcgattcttgtgcgattttctctcatatttgtaattgttgtttgtgcgcgatttgtatgcaatgtgtgtgcgacattgtgcgattttattttaatttttttttggattcatatgcaatttctggccacatttaacgatgtctatgcgatgtgtgtgcgacatttttgttttagcgaactaagcaagttattatttcaactttgataatacttgcgatttctatgcgatagttgagcgatttcatatttcacagtataatataatacaattacaaaagcttatgtgtataagaataacattacaaaaacctacaaaaaactaccatgtcaagttcttgtaaaataagtccacacacaagtgcaataaaaagcttcgacctctcctttctctctcttccatggcgaagaaaagaaggaccgttcgaaagccagttgctcgtgggttggatcctgaaccgattgatgatgcagacgatggagaaacggagaagacaacggtgggagttactactgaacttgataagatcgctgagatgttgaagactgatgagatttttcaagcatagaaaacctctgggttcattaaccaggttgttgaacaggggaattcgaactgggcaaaggaggtggaggatgaaattgctgatgaaacggatcagactcacttccaagaatcagcaagaagtcattggaagtcattt

SEQ ID NO: 153356 - DNA, 878 bp, Cannabis sativa
tctctctctctctctctcgtcggtgacacactcacgtgagccccacctgacacctcacccatgtgagccttgcctgcccaatcaaagtcttagctctgaaatctctaaatcaatttttaggcgtgattttaacactatttctcacagtaaacggtacggttaagctcatgaactattggagaacaaaacccctctaaaagttgagcttgaagctcatcgaaatcaaatattgatgttcgccgaaatttatggaatctgagatattccactccgatccagtggcttttttacctcctattgacaaatagactctagattcgtgacttctcgatctaacgtttcattacccatttcatcattgttgaatttgggcagcaccgcacacgttggttcgacggtcgttctccgatgatgggcctgatgtcgagtaagctatcaatctctctctctctctctctctctcacttggatctagatttcaaattttctcttttgatctaagatttttctcttatggattttaaatggttttattttgtttttgtgggatatttggatgtgagattgtggcagatgtttaatgtttaaatttttttaattgtgtttgtatctgaaaagtggggttgtggtggaggtgcgatagttgtgattgtttcggatctgaaaaaaatattgagatactagtggtgacaggcaattatggtttcagttgaggtggatggtggtggtggtaatatttttgatgaagaatgagggtgtaaaaaaaacttgatggaacaaaaaatatgaaatgaaagaaagatcgtggaagaaagaaaaaaattaattgttttaatttttttgtaatttatttttatttaaaaatatttttaggtggg

SEQ ID NO: 153357 - DNA, 636 bp, Cannabis sativa
atcttctacctttcagatgagcgatctgtcggatagccaaatgctcgactcaggaggcaacgcatttgatggagaccaggaagacagcttcatcccgacctcgttcttagaagaagaggtcgtaactaccggtgatacagaatcgggtccgctgtcctctgcagacatcgaaaggatggtgcaggagctcgccgaaccaggaaccatcgagattcaagacagcgagtctacggtgtcagcgcgtgatcatctcgttcattctaggcacgctcctgacgtcaaggtcgaggagatggataatgacttgacggccccagttcgggaatcagacgaggaagaagacgcagagggaagtgggactgattcagtggacaatactcaattggatgaacccttttcgtgaaagaacttggtctcgcgagttaccaaatcagatcttaccaccttcacgaggttaaacctactgtggcttgcctctttacgtccttggcctacccagagagcgcacctctcttttaccaaccctgcgatcatacctacagaggatgtggtagtctcaatacccattcttcgatgtcgagtatggatcccctttcatcctttcattactgctattctcaagcagtatgacgtgtc

SEQ ID NO: 153358 - DNA, 894 bp, Cannabis sativa
ggctcacgggtgctctactgtgcaggaaagggtaagactattgctgatcagccatgagtgcaggagctggatgaagaatgtacatgtctgggccatattagaccaagagggttgcagtctaccagtgttgtgttttcgatactctattttgccgcttaggccggctgaaaaaaaaggacttgtaataatattttgtaaatgtttttgggatcccaagatctgtaacttttagtttataaagtttaaagtattacgagtttattttcattcttattgttattaaagtttcaattcttcgccatttttattagtaatcccatttaggggattagggtttaataagtgacttgggtagcatgcttaattatttagggcgttacaaaaaccaaggttactgatgatgtaaagatcgcttagctttaatttaaaaattagcagataattagggtttaattatggaaattatttattaattttgaattattaatttacgataatttatttgaattcagaatgcattttatatgtgtcatattttgaaatttcataattttacatgttttatgcccgacaacattggaacgcggtgtttggctattaaaatcacatcttagtatttttagtatagcggggtaatatagttagacattaggaatgtcaggaatagtcgagattttaaaatttcccaaaatgcccctaagtaccgtttatgacttagtgtgggagggggaaaatggtcattttgccccattagcttttttgtcattttgtgagtttatttaagttaattaaatcaattttttttattaatgttaagctgagatgattttaataaaacaagtattttttcccattttctcgaaatatcaaaaaattagacataaacacattttt

SEQ ID NO: 153359 - DNA, 706 bp, Cannabis sativa
actatattattatatagtatgtctgtgttgtcttttcaagtgtgttctgacaggttggcgcggtatagtcacaaccgcgtatttcaggctgaattgggttcgggcctgaaatgcaattggattgaattaattggcattttaattgatatctgataatctgaaatttaattgggatttaaacatgttaggaatgacaaaaatacccttgtgagggtgaatatgtgtgttttggccctaagggcattttggtcatttgacctttattttccatgtttaataaaattgatattttgagataatgaaaagagaaaatctgggttttctctctctccctcacccgaactctttctccctctctagcctcttgaaagtttcaagttcttatggtgaatttgcttgagtttcgcttgaaaattgaagtggaatattggggaaattattgtgcttaaccttgcaagaatttgaggattaccggcacctggtcaggagcacccgagaatttggaatctctgcctttccaggacaacaggtaagacagtggttagcacgtagtatgcgcggtggcgcttatgttgaaaatgatatatgtgagtaaatggtaatcaggattatggttattaccctaacatgagcggttaatagcctagggttattaccctagtgatatgagttatataaatgctatgccatgctatgtgtatgaata

SEQ ID NO: 153360 - DNA, 565 bp, Cannabis sativa
  modified_base (505)..(505): a, c, t, g, unknown or other
tctttacatattggtggtcgtagattatgtttctaaatgggtggaagcaatagctagtccaataaatgatgccaaggtggtgatgaaatttttgcatcggaatgtcttcacaagatttgggacaccgagagcattgattagtgatgaagggacacactttgtgaacaaagtattggctgcccttttagttaagtatagggaattcttgaaaaagtggtgaatcctagcagaaaagattggtcccagagattagatgactcactttgggcctaccgtaccgcattaaaaactcctctaggcatatctccttatcgcctagtttatgggaaggcatgtcatcttcccatggagttggaactcaaggcattttgggcattaaagaacctgaattttgatctttcagctgcgggaaaggcccaaaaattgcaattaaatgagttagatgagttgcgcttgtttgcctataaaaataccaagttgtacaaggaaaagatgaagaagtggnatgatagtaggatcaaagagagagtttttgtgaaaaatcagcaagtgttgttgtttaact

SEQ ID NO: 153361 - DNA, 537 bp, Cannabis sativa
taatctaattaaccttatatatcaaattctagtaaaattattataagacactaatacttaacaatttaatgcaggcacatctgggagagcataaagcatttgagaaaaatctttaagttttacgacccaaagcctctcacattgaatggtattaacgatgaagacaagagtcagtcttttgacaatgcagcaagatgattggctacgtggttatcctcgatgaataataaccacaaaatgttctttattccttggaatatcgggtaaatattatttaattttttagtgctaattgttcatttctatattataaattgaaattatttttaaactatcttacttatatttcaatataattttctagtgcgcattggatgctagaggtcgttgcgcaaaggaaaattatccatttagaccttattatccaagacaacctaaaaatcaagaatgtggttatgttttgaaatacattactcacattgtcgcacgtgcaaaccccaaccgttacatacaagatcaaaaagctgtaagttttaa

SEQ ID NO: 153362 - DNA, 600 bp, Cannabis sativa
ctagttaaatgtgtattattatggaattatattattatataatttattataagtgaattaacttgatatatgacatgttaagaacccgttagtgagccaggacattttagtaattttgacctaagaagggtaaaactgtgaatttaatttaattgcgtgcttatggactatattattatatagtatgcttgttttttcctttttcaggtgtgttttgacaagttggcgcggtattgtcataatcaggtatttcaggctgaaccgtgttcggggccgaaatacaattttgggatgatttattggtattttatttatgtgtgattaatttgaatttattttgggtagatatgtgaagttaaatgacataattgcccttgaaagtttgtgtatgtgaaatatggccctaaggacaatttggtaattttgcatattttgattatttacaataaaagataattttaattggaatgaaaatcattttctggtttcttacaccccaaaaccgacccccctctctctctctccctattttcatctttgcgacttgtgaatttgttgagaaatagcttgggttcaagcttgatttgtgggaattctttg

SEQ ID NO: 153363 - DNA, 507 bp, Cannabis sativa
cgaattgatcctggtttgccttcaaaaaactttttagctgctatttgagctgctcgtccaggttattcccgatgtatacacaccttgtgggatatcctgggtcgagaataacctcttcccgatgtatacacaccttaatttggccttttcgagccccattttccgtagagtctccttataaaggatatttaccgagctcctattatctactaaaaccctcttgatccttttattggtgagttgaatggtaatcaccaatggatcgacgtgaggatacctcacgtttttctcgtcttcctccatgaatacaatgggaggttcctcgattttcaccttcttggaaggttctggggcaaatgtcgactactcgttctttatctctttcacatatctattctgggcgttatttctttcccctgcgatatgtggccctcccaaaataaccaggatgtcctctccttcaataggaagaggttgtaatccctggttgtttgggttactgggcag

SEQ ID NO: 153364 - DNA, 502 bp, Cannabis sativa
cttattctatcagagttttagagagatttcaaagtaactcgaggatagaccactggaaagatacaaacaaggtttatgaggtactttcagggtactaagaattacaaacttatgtttaaatgaaccgacaatctagaagtagtcggctactcagattcaaattttgctagttgtgtcgattcacgtaaatcaacgtctagttacgtgtttatgtttgctagtggagctgtatcatggaagactaacaaacaaaccaagactgctacctctactatggaggttgagttagtttcatgttttgagactacatctcatggtgtatggctatagagtttcatttcaagccttagagatatcaagatcataaagaatgttctgtgataattcaaatgttatttttttggctaataacaacaaaagtagaagctgaagaaagaatatctacattaagtacttagctattggagaacatgttaaaaaataaagtggtcattcaacacat

SEQ ID NO: 153365 - DNA, 535 bp, Cannabis sativa
ttgtccccaaatcaaacatggactctaagaactaatggtgttctagtagtagacaagattaatatttataggatttttcttaggtgagagcactacttttgctcgctcttagctataagagcattttatttcagttttaattggtttaaaatgagggtgtgtataaaattaaaatgaattttgtgaaacatgtaattaattattttattattatctttaattagcttttaaaacagtttttattgtaacataatatatgccaattgaagaaaaaaaaaaaaaactctttgtgaggattggttatatttttcatatgtatttctattaataaaataaataaaaattattaatcatatatgagataccccacataactaaataaattactactaaatcaaaggttataaaaatgttctcacctaattccaaagcttcgacctatcctttctctctcttccatggcgaagaaaagaaggaccgttcgaaagccagttactcgtgggttggatcctgacccgattgatgatgcagacga

SEQ ID NO: 153366 - DNA, 610 bp, Cannabis sativa
taaaaagtatttatagaaatataaataactttaatgtacctttaaacatattttgtaactttaatttataaacttataattgatttattatagggataatttaaaaaaaaaaaaacaaaacacacaaaataataaaaaaaattacaaaaatgcagttatatagaattttaaatatttttacgattttataattttatttacagaaaatatgagtttttgatgtatttttatattatacttctattaatttgttgttgattttttgttatttgtatattattttttattgttattttaatattgtttagatattattttgggataatttcaattataaccaaaaaaaaaagtaatattattatagaaatacttccagctggccaaataaataaatatataagttaaataaaaaaattttacacaaataccacttacacacacccttaactcaggatccatgcttactgggcaactatcacgcaaccatcgcgcaatcatcgtgcaactatccagcaacctaatgcaaccgaaatgaaaattcaaccaaaaagagaaccaccattaattctagcgacttcacctgagaagatgaccagaatcaatcaaaata

SEQ ID NO: 153367 - DNA, 528 bp, Cannabis sativa
gatataacactcatgatgatgggtgggcctgcacaccaagcccacctgtgaatcgttttttgacccaacaaccccactaaccatcatagccgaactcccctcctcaccaatagcaatcccagcccgcccagtacgcctcctttttctttccatcaacataaccaaatcctcctcattactagtatcttcctcagatgccatgaattgagaatccccctcactaccaggttgtctattacccttcccactttccataataacctcctttattttatttcctaaactcatgggatcatgatcaccaacatggtcaacacaatcaacattcatgatttttaggagagcattaactccatgaccggcactattcgaacgcccaccaccacggcctgcagctgctccgccaccatcattcccagcccgaagccactgtgcaccaactaaataattcttctttttcgaatccgcacgcaaagacgcaccatacggtttggttaattgttctataggttggtcaaaacgttttgg

SEQ ID NO: 153368 - DNA, 1081 bp, Cannabis sativa
  modified_base (369)..(374): a, c, t, g, unknown or other
  modified_base (638)..(639): a, c, t, g, unknown or other
aagaaagatggttccctcagaatgtgtattaactatcgggaattaaaaaagttgatgatcaagaacaagtatatgttacccagaatcgacgatttgtttgatcagctttaaggaaagacggtatttttaaagattgacctacgatccggttatcatcaactcagaatacgggaagatgatataccaaagactgcgttccgaaccagatatgggcactacaagtttttggtaatgtcattcagattgactaatgctcctgcggcctttattgatctcatgattagggcattcaaggatttcctcaataactgcatcatagtgtttatcgatgacatccttgtataatctcagtcagaagaggagcatgannnnnntcttcgaatggtattgcaacgacttagggatcacaagctgtatgcaaagttcaaaaagtgtgaattctggttgtcagaggtatcttttctggggcatattatcggaaagaatgggattatggttgatccaagcaagatccagtcagtgaaaaactggtcgaggccaaaatcagcgacagaagttcgaagtttcctcggtttagcagggtattatcgacattccgtcgagggattctctaaaatctctatgccactgaccgagtnnactaagaaaaattagcgattcgtgtggtcagacaaatgtgaagcaagttttctggagttgaaacaacgtttgataacagctccagtgttagctttgccattagatcaagagaaatatgttgtttattgtgatgcatccagacagggtttgggatttgttcggatgcaagctacaaagtcatagcctatgcctctcatcactagaaggattataagcagcgctacccaactcatgacctagagcttgctgctgtagtttttgctcgacattatctttatggtgagaaatgtgagatttatactggatcgtaaagtctcaaagttatttttttcacccagaaagacttaaacatgaggcagagaaggtggctagaactggttaaagattaattatggcagtgagattttgtatcaccccgggaaagccaatgttgtggccgatg

SEQ ID NO: 153369 - DNA, 540 bp, Cannabis sativa
caacaccttccatcatagtagtggcgaaatgggtatttctttgtatgacttgaaggttatcggtggtttgcccattttaggagttccttatgaagaatttatccctcttaatgaaaaacttgtgagcagtgatccatgttattctactactgcagagcttgtaaggatccatgctcacatttgtgattacttaaagagcaggggtgtatatagccgttctaagggtatggatgtctcctggaagcaatggattgaattcatttacaggggtctaattgtctttgaacgattaaagatgaacccgactgctaagactcaaagaaaagttagccagcagaatactaatgaaggttatgatctacgttctattcccttgaatgtaacaaaggagggtggtcttgcagcattcttgtccttatggctaagccatttcatttttcccgccccaagtcagaacattaggcctgaatccttttatatggcttcggtaatggcacatggggtcagagtttcacttgcaccttctattttgggctatat

SEQ ID NO: 153370 - DNA, 1126 bp, Cannabis sativa
ttattaaatttgcgtcggtttctatctctcacaattatatttcacgtcatttttaaaactttgcaagcacaatagtcgactattaccaactgacaaaaaataaaaaacaagttttaaaatttttactttatttcgtcggtttcttttttatcatcatttaatcaaacgacgcaaatagtatataattaatgacgtttttaaacagacgggtccgattatttagacactattcacgtcggtcaacactatgaatagtagcgttgactgatgtgaatagtgtaatttgtagtagtgctcggtcccagacccggacacaaacacaaacacgaacatagacatggactgggacccaagatctgaatcagaacgagaccgggacccaagattgggatcaagatcttgaccgatgacccacggcttggacctaacccgtagtcggtgtctggatttttgaatcgtaccaagaccccaacctggaaccatttctagaccaggatccaaaactaaactcagacccgggactcaaaatcagaacaagaaccgaaatcaggaccttggaacaggaattggacctcaacccagaacaagatctagacgcagaaccaaacatggacctagacctagactagggatcgatacccaaacccaaacccgaacccggacccagacttgcgccaggacctgcgacccagaacctggaacccaggactcctgacccaggacctggaccaaaacctaaacccgtactagaacccagacccagaactagacccaaaccaagactcggacctagacccagacccggaccgaaaccccaacccagaccaagacggggactcaaactcggacctagagccggactcgtaccagaaattagacttgaacccaggactcagactcaaacctgggaatcggacccagaccgtgatcaagactgggacccagaccgagactaggactgagccctaaacctggattgggactagaactagaattgagattgggacctgggtcctgggacccaagactcggacctgggacttgagaaccgaaccgtgacctagatgggggacttgggccccaaaccccaacctagacccaaacctaaaccaaggatctcgaccta

SEQ ID NO: 153371 - DNA, 1497 bp, Cannabis sativa
atccttagcagcttgctctttaatgacatgttgctctgcctcttcagcaatcaaggctaactcaaccactttcttgtataatgtgtcatgaccaatggtaattttcaagtcccgattgatagtagcattcagtcctcttacatacttttgtttctaggtgaagtccgttggtaccaggtcaccagcaaacttagacaaaggatcaaactccagggtatacttgaccactgtcttcttcccttgagtcaacttcacaaagtcttccatatgagaagttttgatggcgatgttataaaatttttcttcaaacagggtcttaaactcttcccaagacatggtactaacatctcgggtctaacacaatatcccaccagacgtgggcgtgatcttgtaacatgaatgcatcacaattaacttgttctgtccccgtcacccccatgttatctaggatgcgggtaatagtgctcatccactgttcaaccttgataataccagtactttatcaagacaacctacaacacttataataaaaattgagtgtcagcgacccaatttcttagtgtgtagctgagaaagcaagttgaaaaagaagaagaatgaatcttctcgttatgtttatcaactcaagcccaacaaaagatagagaaaatatgaaaagaagcaagcacaaccaggcgctaaagaatttcaggtcaggaagtccagtgaagtgagaggagagggagttgagttaaagcttaaagtgggcaatgatgttggatttgatgttatttaagttggcacatttttggttgaattacaatttagagttaagattgtcttgagaaatatgttttatgttcctaccttttaagaggaatttagttttgctttcgcatttagttaaacattgactttattttcattttgccaatcatgatgttgacattatgtttgactctaaataattggaaactatttttttttttattctgatggtctttacaaattgtcattaacttccttagctttctttttaatgttatgaataatatgggtaagagatcttgtattaaggtaacatccttattattatggcataaaagattaggtcaaatttttgaagcaaggtttgatcgattaattagagctgaaattctttctcctcttgatgtttcgggttgcaatacttgtgctaattgcacttgtggaaaattgactcaaataagaaagacgactcctaattgtagtcaatctttatcggaaattatccacactgacatcagtggaccttataccactatgttatgcagaaataagtattttataacattcatagatgatttttctagcttcacctacttgaccaaagaaaagtcttgatgctcttgatatactcaaaatatttttaaaaatgaggttgagaaacaattaggaagagtcattcagattgtggagaagaatattatggccgttatacagaatcttgttaagaattttttaccacgatctagattt

SEQ ID NO: 153372 - DNA, 542 bp, Cannabis sativa
  modified_base (60)..(66): a, c, t, g, unknown or other
atttcatagaagtaattaaatattacacaaatattgtaaaattagtccaagtattaacannnnnnnaaatctaactacaagttaacctaaaaaaaaccgacagaagaaaaattcttgggcctttcagcatcaatcgtcatcatgaatcactgccatcaaccattctatccactgtcgctgtattggtaacaatttagtttttggattgtattaccacttatccccaaactgttaaaagcagtaaaaatttatattagtttatatatatatgtatattatttgttattataataaatactatattcaataattgaaacttacagctttttgatcttgtgacgatgtcagtcatgtatttcaaaacataaaaaccacattcttggttttcaggttgtcttggacaatttgctaatgaaattccttgccacgggccaagatactcatatttcccctatatatctgaatgcactgtttgaaatattatattagcatttcaattcattagttaattaaaatttgttacataaatagtcattaaatta

SEQ ID NO: 153373 - DNA, 525 bp, Cannabis sativa
gtccaatacacacgcccgtagcatttcttcaagtatctaaatagttctcacagattgaacattagtctgaggatgaaaagttgtactgaactttaacttagtacccattgctcattgtaaactctcccaaaacttgggtgcaaactttggatctcgatcttagatgattgattttggagcaccatgaagatgaattatttccttaacatatatatcagcatgttgatctactgtatacgtagtctgcaccgataaaaagtgcgctgactttgtatattgatccacaattatccagatggaatcatagaacccatccaaccacaaagtccatggttatatcctctcatttccactcagaaatctttagaggttgaagtaatcctgctggtctttcatgttttgccttaacttgttgacaagttagacattttaaccgtattccactatatcacccttcatacctggccactagtacagtaattttgttgggttttatgccctaaataaaactctgtttcaatgtaa

SEQ ID NO: 153374 - DNA, 622 bp, Cannabis sativa
tatattgggaaaactttttgtaactaatcacaatatttttttttttatgtcaaaatagaatatttattaaacactataataagcaatattaaatattaatcaaagcaccacaaacaataaaaaatacataaatcaatcataaaaataggataccaaaatttttatgtggaaacctaatgtgagaaaaaccacacggattgtaatacgcttaaatcatctactatcatcaatgtttaataataggattacaaagtcttctctagtataactagagactcacagcaacatcaagaataaacaatcttgaatcaccaatttaatcatcatcatcatctcaaaagatagatacacaaataaaaaaaatgtttggctctcaccacccaaaatttgagctaaaatagatgagaatcaacctcttaatcttcaatgcaaagtagcacaatccactttctttctctagctttcttctcttcttttcctcttttttttttccttcttcttttttctctgctggttcttattctccacgacacacaccaactcctttcttttcttttctttctttctttttttccctttttaatcgctctttttaatttagagatcttgaacagaaggaatc

SEQ ID NO: 153375 - DNA, 570 bp, Cannabis sativa
tttttttttgaataactaaacatataaggtattttttttttttgaatataataaccaattttattgaaacatacaaggtatttgaatatacatatttgcttttaaatgggagatatttctttttgtaatttcttaattaattaaaggctattttagtaaatcaatagtagaagcccataaacattctcatttttattaaggttatagaagaaaaatgatttttcaaatattttaattaacaaaatagttttcttttcaacgtttgtggccgaggatgtgtgttggaggtcctgggttcgagtccaaaattatgcattgtgtaatatataaatgcttaaattaaaaaaaaaagatataataattaatttaataaatacaattaatattaatttttctttatcataaaaaaaaaaaaattagttggactctcatgacttctcttcatcttcatctttaattgagtttttcattaccatctgagtttttatcttcatcttcatactactactcaagtatttcatcttcaatggtattcattcacatttaacctaaaaaaattcaagaaaccct

SEQ ID NO: 153376 - DNA, 798 bp, Cannabis sativa
ttattattttttttgttttttattactttatgtattttttttattatcttactgttatctttatagaataccgtaaaaatatataaaaaaaattaaacgtaaaaatgtaaaaatttataaaaatagtatttgggtttttttttttatttttacacatcaatatatatattttgtatttttacagaatttcacatagaaatctcataacaattaatagagcaacttaaatcgcaactaaaatatacataacaattcatatagaaactattggaaaaatcactaaagcaactcaaactataaattttaaaataaaaaatagaaaaatggtatatgaaataatttactttatgtaattattcttaaaaaattattaaaataaaacaaattttaaaattacttttttttcatttcccaaccaaaattaattaaaataaaaaataaaaaccaaataattcaaaattcaaacccaaaaacggaaattaagaaaaatactaaaaggcttcagtagtgtttagcaccttcctatgtgttattatcgttatttattcaattaagtatcgggttttatatagtttaatataataatttttagaaagtattgttagccaattgcaagacgacatatttaagagtgctcggaaattaaacattgaaaataattattttttagaagtaagaggagaaggagcagcggttgttagagtaggctccgacgacgaattgagagaatgaatgaatgtgagctctgactttgttgtcagttcaaatttattaaattaaataacgaaaacaacataa

SEQ ID NO: 153377 - DNA, 633 bp, Cannabis sativa
  modified_base (26)..(27): a, c, t, g, unknown or other
tatgaatatctctaaaacaatgaaannaaacacataagagtttaagaaaactttatattggttgcagcgaaatattatgactccttcctctcagatttttaatccttgctccttcctgtcgcagagtattatcaagatctgagcctggatctctttctctccttcgggggtttggtgaccaccgtcttactcgctatgattggatacttgacttgctatgtgtgtgcatgacactctatcactcaaggtttgaatataatgaataatgaaggagggtttgaatcactatagaaggtatctctcatctactagttgtcagagaatgaaaactagatttggtaggttgaatagtcaagttgacaaagtggatgagatgagagcatcgtgttccttttatagtattttaactagagcttagggttgaattatatagatcaaaaaagtataaaatattgagcaaaaattgttaggttgtttttagtattatttttagattaatttttagtgtatttttattttagttctattcttgtttggagcaattttatgttttttttttatattttattattgcacatttaaaatagaagaatattagaaaatatcaaaggaataagatggaaaaaagataaa

SEQ ID NO: 153378 - DNA, 753 bp, Cannabis sativa
  modified_base (693)..(702): a, c, t, g, unknown or other
cgatcgtggaattagaaaatcgccatcttaggcattgattggaggaagcaaaccagcgtaatgctgagttggagcgtgaaatacttgctgtaaaggcagcgctgggagatggtacccaaaaacaacctgacctggagaaaagagatttgtgaggcaaacctcacggatcacaagtcaagggtaggagataacccagagatatgctcagaactctcagaagatgcaacctgaggaagctgaggaaagtcgggcaggagataacccagagatatgctcatatggaccaagaattatgcctaagtctttcgaatagacattgcaaggtttcctcttatccttataattttgataatttattactatccatgttaatggttagattaactttgtttagttttttttttttaaagttcctttcttgaacatattattgtaagttatcaccagtatcatcaaaataataacgagttagaaaaatcttcccactaagataatcagctggttagtgcctttgaccctgactcccacaaggggctgcccaagctcttgcaaagggcttctgcgaaggatacttccatgtagggtgaggacatggggaacatctgcgatccatgatatctcccaatcccaggaggtgaagccaaatgggttggattatattttaccaagatctagattcactaacaagtatgnnnnnnnnnncctaaatatgaacttctaaaataatgaaaaacacatataaagtatgaaaaa

SEQ ID NO: 153379 - DNA, 702 bp, Cannabis sativa
tggtaaaataatttccaatatttctatcttaagagatagagaaaaatgaagattgattcttagacaggaagactacattgagaaaatcctagacaagttttctatgagggatgctaaggttgttaagcaaccaattactagtcaatacactctatctaaagagcaaagccctaaaatagaaaaagaagttgagctatgaaagatgtaccctattcaaatgctgtagggtcaatcatgtatcttatggtaagtacaagacctgatttaggctatgctatgagtgtacttagtaaatacatggcaaatccaggaaaagttcactggttggccatgaaatgggcgtttagatatttacttgcgacaactaaagtggaattagtctacaagagacagaatgctagcactataatagaaggatgcagtgattcagactatatatgcgggggacagagataataagagatctacatctgcctattttttcttgtttgggggaaattgtgttagctggaaattccaactacaacctgttgtggcactctcaacaacagaggctgaatatgttgccacaacaaaagctataaaggaagctatatgactaaaaggactattgaatgagcttaaactacttaaaggagttcctacagtgtactcagacagccaaagctgcatatttctatgcaaaaaccctatgttccatga

SEQ ID NO: 153380 - DNA, 512 bp, Cannabis sativa
ttttttttaataattaacatatttgtcccctcaatttttattaaaaattttccttaacatacaatagcacttttgttagattatttctctatcgttaagtattagtatttttacctcttgaatttaactaatcaaaaattttgtctttttttattaaaaaaattaataaaaattattaaaaacttaataaaaatgtgaagtgtactataacaactttattttgtttataaagaggtatcttaaaatatcaaaagaaaattattaaaaatccaataaataatttaaacaaattaaaaaaattttgaagaaaaaatcaaacttatttatatttataaactcatataagtgtcactgcgcatactctacatgctaatcactgtcttacctgttgtcccgctatgtcagagattctaaatccccgggtactcctgatcaggtgccagtaatcctagtcacacaattcggaattttcacacatagggttaacccctgatttcaaactcatataatat

SEQ ID NO: 153381 - DNA, 1056 bp, Cannabis sativa
  modified_base (536)..(548): a, c, t, g, unknown or other
gggttgtggtggatagattcacgacgtctgctcattttctgccagttaaaacaacctattcagttgatcaattagtagaattgtacgttaaagaaatagtaaggcttcatggggtaccaaagtttatagttttaaatagatatccgaagttcacctccaagttttggcagagtttacaacaagccatgggtacgaaactaaaatttagtacagcattccatcctcaaacagatgggcagttcgaaaggatgattcagatattgtaggatatgctaagagcctgtgttatggacttcgaaggctcttggagtaaatatctacccttgatcgagttttcttataataacagttatcagagtactaatgggatggctccccatgaactgttatatgatagaaagtgtagatctcccatccattgggatgagacaggggagagaaaatacctaggtccagaatcagtgcaacgcaccaatgaggcaattgagaagattaaagctagaattgttgcctctcagagtaggcaaaagagttannnnnnnnnnnnncgcagagatgttgagttccaagtgggggatcatgtgtttctacgagtgtctccaatgaaggggattaaatgtttcgggaaaagaggcaagttgtgccctttcgagattcttgagaaggttggacaagtggcatatcggttagctttgcctccagctctctcagcagttcataacgtattccatgtatctatgttgagaaaatatgtttcagactctactcatatacttagttatgagaaccttgagctgtagccagacatgtcatatgaggagcagccagtaggatatagtccttcggaataagaccatatctttggtcaaagtactctggagaaacagcaaagtggaggaagccacctgggagttacaatcagacatgagaacctaatatccagagttattcaggttagatttcggggacgaaatccttttaagggggagatagttgtaaagaccgcttagtttaaatttggaagcagataattagggttttattatgaaaattatt

SEQ ID NO: 153382 - DNA, 527 bp, Cannabis sativa
aaatataataaaatctagtatattgttataaaataatataaaatatataagaaaaaaagaagaagaaaaatatgaagagagaaagagaaactgaataaaaaaatttcagttttttattctaattgggcgaacccctatacaaaaatatgactaaaagaatgagaaactaaatcaatgtaataaaaaaaaatacaaccaagcattaatagtgataattaatttggtaatttggacatccataaataatatttcataatactcccatttggatgtccaaaaaactatctcattaaaaaccttactggaaaaacttggccaaaagaaaaagagtgcagtatgaattaactccccctcatttaggcattcgtggagatcttctaatcgactaattccaatcttgtatgtcgtcttttcaaatgttgatactagtaataactttgtgaataagtctgcaagattgacacttgattgaatttgttgaacactaatatgcattttcttgaaatgtataaagaagaatttggtga

SEQ ID NO: 153383 - DNA, 577 bp, Cannabis sativa
acatcaagtgggtttgactccatgccccgaaaccgccgtagttatggttaggcgtttcttcatctctcggaaggtgatgaaaaaccctaaccatggaaggcttgatcccagcaacagtgataatcttctccaattggtgggcacatgtcagggtcgagtgtagctcatctgcctcccagccattggaccggcaggtaaatttctcatagaccaccaggcctttcatcacttcttctaaagtggccagtttcttaggcaccttatctgaagattttgctccagttgaggtggggacagacatggcctaaacttggtgtagttccaagatttcttagtcaaagccgaaaaaaccgtggtcatgaagatcgtgaagaactcactcatctaaaaaagaaatccagtcgttagcccccaaaccaaaccctaagataaaagaggagaatgggggtcccctaaccgctggaaagaggccccttccggatgcctaccaaagataggaaatctaaagattctcctaggcaaacatcgggtgcaaacatccaaaaaacagaaataagtgttgcgatattttgcacac

SEQ ID NO: 153384 - DNA, 610 bp, Cannabis sativa
  modified_base (584)..(585): a, c, t, g, unknown or other
ggaagtatttttttttttttggaagaaatagcaattttattaaatttaacattccgaatataagatatccaacatagtagttgtagcgttagactcataaatgctacgatcacagtagactcaagctagcctaacaacggtatgtattagtcggtttgctgactgttttacaaaacgaattttaacactatatatattgatagcaaagttggtaaatatttgtttttttttttaaaataagtacctatataaaaaaaattaaactaatttttttaaaaataataataatttaaattaaaaattaataattttttataaatattgatattattttttaaaataaatatatcattaaatattattataatatataaagttttaattgcatacaagcagtcttatcgtaagagtatacaccttatattataataactacacgatttaaaatcaatggttaaaaaaagtaccctaccggtaggaaacttttgttaggtcctaccatagtgttgccctatatagatatatatgggtatactcttaatgggtattacccatgtacgggtattttattcttgaccattganncaaatatctaatggttgatatttat

SEQ ID NO: 153385 - DNA, 557 bp, Cannabis sativa
ctcaagtaagattagataaatagacattggagtctcctttgacaatgaagacactgaactcgaacccgagtctcctttgcccaaatctgctccagcacctcctcaagcatcttcagcaaccaaggcatctgcggctgccaagggcaagcagcctatgaagagttcatcacctggtaatatctctccatctcaagctgtcaattccagattttactttcgtgataatgagcgtaattggaatatttatgctatccgaaagtttgaaagtgaaaggaattatgatttgcatgctcatagggtctatggtattgttaagtttgtttaataccatcaatgggaaaatactctcactggttttgaagggtatattgaaaatattgtcaaagaattttatgccaatttgactaatgacatgcttgacgagaattctgatatttttggtaaagtttatgtttgggggcattggtttcttttactgtcaaggacattgcagtggctttgcaattacccgaaggtgtgcctaatgcgatcatgtctatggatcgccatttgatgct

SEQ ID NO: 153386 - DNA, 548 bp, Cannabis sativa
attttttgtagtacttttatcaatattgtgagcaaagaatttaattgtttgtgaaacataatttatttttaaattttttttatatatatatattaaaataccagataattgggataaatatatgccagcacactaatgccattctgctatgtatgtttttccttttaaaaatctcattcgagatagattagagagagcactacaacaatttaaaatattaagagcgacacatttaagggctacaaaaaatcgcccctaatagaataagtattatgggtgacaaaagagtgtcacctttaaagaaacttaaattttttcagtacagtattagaggtgacaaatgtcacccctaaaagtattagacgcaacaagctactattagaagcgactctaataaattgaaaattatccattgcccaaaggtaggaattttcctgcttatactataggggcgaaaaaagtcacttctaatactctaccacctgacacattcaaaagtcacccctaatggtcgctcctaataattttgcatttaaagctcaaatctc

SEQ ID NO: 153387 - DNA, 532 bp, Cannabis sativa
ctgaaccgctcttttttatttgcgtcattttcaaaacgacgcaaaaaacaattttcgacatttataaaccgacgctaaataattacttttctatttattttatgcgtcggataaaaaatgacgctaaatgtttcatgacattttaaaactgtcacaaaaaacttattacgtcggtttaaaaatgtcatatatattacgaaaatactttttttttacctattgcgtcgcttataaagtgaagcacaaatgtaggtaaggaaaaattacaaattttcatgcaatttttcccacctgcattatcaaattttaaaataattctatataatagtaaatacataacacaaaaaaaaaaaattaaaatatcatttttaaaactaatataacattagtaatcgattctattaactaatcacttaatactaccaagaaatgaacctttagttaatctatcaccaattattaaaatacatcaaagatataacaactaagcaggagagaaaagcgccacgagaaaaattaaaatcaactagta

SEQ ID NO: 153388 - DNA, 615 bp, Cannabis sativa
  modified_base (251)..(253): a, c, t, g, unknown or other
tactaaataatcactcatataacatattacagtgtgctcataagaacatttattgagtgtaataaccctgactcatgtcttcatttaattaataatattaccatacatcgtcgctttcttaccttcataatattctagggtaataatcctagactgcatttaattaaactcaaggtactagtttaacgagtctaggttatttatgccttaaatacacaattcataatctcaatatacatacatatatcatnnnatatcaatacttattaacaattcactagggtaataaccctaggccaattaaccgcttgctttagagtaataactctaatccttatttctagttactcatatatatcatattctatataagcaccaccgtgcataactctacatgctagctactgtcttacctgatgtcccgcaaatatggagattcaaaatccccaggtgctcctgaccaactgccagtaatcctagtcacaatcccgggatgcacaagtgtagggttaatccctaatccatttccacaaagtataaaatcggcatttaaattatagatattcacatagagctcggaacgagctttctaatgatataaagaacgtcccaaac

SEQ ID NO: 153389 - DNA, 1013 bp, Cannabis sativa
ttttatgaatgttttatgaataattttatgaatttttatgaaacttaatgtgctaaataaaatattcaacctatcttaatgtttgaatatttttctaaaaatatcgagcattatatatagaatttatgtataataattaaatcatacaactataaattaattgtactaataataaatttgccaaataaatacaaattaataaaattattttatgataattaattaaatgcaaatttctaaatatgtaattaatgacagcttttttaaaatttcttaatttaggcgtacaataaattacataaattttgtaatatataattaaatgcacaattataaaaattaacacaattattacatgcctaaataaatcatgtaataaattactaaattaaaactttttccacttttaatttatacttaataacacattaattctaaatatatgtattaaataaaaataaaaaaattgaataaatacaatttattgactaaattaacacaacacaaattaagaaaattattatattctaaataaataaaaaaattggaatttttccttttttttttttggaaaaaaaaccactaccagaaaagacatgtcgtttttgctatatgcaaaacaacacctcgtatgtcaacaacaaaggttgccaaagacatgaaaaatgacacatcgtttggagctttttcttcagccagtcgagtcaaaattgactcgttttttcctcgtgggtttgacggacgtgacctgaaaccggactggaaaaatgaatttcgacaatcaaatcatgtgttttcaaatctaaaatgttctaaatagaatagtaaagagatccatatagattttatgcaagaaaattacgtaaaaatgtgaactttcatatcacaaagttaagtcgagtccgaaaaagtttttatagagaattttttacatttttatgtttttcaaaagattttctcatgcttagatcgatctataatactatacgaatatagtaatgtatatagaattc

SEQ ID NO: 153390 - DNA, 638 bp, Cannabis sativa
  modified_base (603)..(607): a, c, t, g, unknown or other
tgatggaggaatcaaaaaagtttcctttattagtaacattcaaggttgaatcttctccatttacttccatattctccttgatattaccatatccctcattttgtggctgattatgagtaattgtagagccttgaaatttgccaactaattcccccattaccttcgaatttctaggaattagaatcgttggaggaggatcaactttgctaggttggccttcacgtcgtgattcatctcgtatcgctgcttccgaccggagccactgcgccccaaaggtcgaatgtctttgttgtgttgatgcctttaattccaaactgtaaggcttttcatgaaggtgtagcgacttcaagaacaaccgcgggcaaaacttttccgaatgtcctataatgccgcatatgaagcagaaagtaggcagcctctcttacttaaaattcacctagtaccacgaagagtcctcattgataatcttcatacgacgcttgattggtttgataacatctatccgaacccggacacgtaaatagtccctctaaacacccacaaagttatttggatccgattcgacaaacgatccaatatagtttctgttgggttttatgcccnnnnnaaaactctatttcaatgtaatccagattatt

SEQ ID NO: 153391 - DNA, 1480 bp, Cannabis sativa
tttactattgtagtgattgtttatgtactaaatcatactccccatactttaatatctaccaaatcacgcccctggaactttgacatgtgtcaaatcatgccctttaagtttcatctatgttagactatccttactgtggggtagattttttttttcaaaaatacagtgtaagttttcattgttatttcactattattttttagttataaaactgttatttttaattgttctgtttttttattttatggttattttataaaaagattgtattttggtaaaaaaaaaaacgtgtggcagtaaaattataaatttttgtctaaaatctaatattttttgtaaaaagccctaattagaatacaaaaaactcaaaacaaagcacgaggcccaacctttaaaagggattttgttgcaaaatccaaaattgctaccatggatcgagtcaattgaatcttcacttttataagggatataattttccttgaacttctgtgtaaaagacatcactctctctaattgaacttttgtgtcctgacccaggaattttgttgcaaaatccaaaattgctaccatgtattcaaaatgtcattattaacagtattacaatattaaaattagcatggataaatttataaatgcatggtgtaaactttaaaattaacacaaaaaagttatcagaatacatgggaaaatgggagaaatattttgaaactacctgaatcccaattctaaagtgacatgtgattacactcttaaaatgagaaataatatacaaaaacataagatctgcacattttccttgttggagctcattgcaacttctatgattttcaagcctaattcttctatatttttaataaatgctggttttcataatgctggttagtccaagtaaaacatgaagatttacaaatagtttttttttttttttttacttttagtaaatcagtaataactcaaagaataattagtatttttgcccccaaattttgacactacctgatcttctcccttaaaatatatggcttgttaaaaattctccctagaacataacagttacataattatgccccttctattatgttttgtttcttttaccattaaaaattagtttttttaccccttaaactttgcctaatacaaaatttttccctttttttttaattaaaaacgttaactttaaaaattataatgttctactaatattgaaaaaaatgataagaattgttagaacacctgataaaaatattaaattaattaaaaaataaattgtttacttaaaaaatctaaattattcctaaaaaaatatttttaaactttattttatttatacacacgtattttaaaaaatcaaatcaaaattattgaaaaattaataaataaattaaataaactaagattttttgaagaagaaatcaaacttatttatatttataaactcatattttaaaaaataaagaaaaaataattaaaaattcaataa

SEQ ID NO: 153392 - DNA, 576 bp, Cannabis sativa
tacccttctaattactttttttttatcatttagtactgttaattcactagtaaaagtataatttagatctaatttaaatttgtgcacaactctttagctctagaatgagcacttaaaggaagcaacattctatccgtaaggaaaaattaggattccataattgtagatcatattctaagccatccacattattagatttccaaaataaaagttgtgagaatcatcttctctgagaaactttaatgaatgaataaaaaaaactaataacatgaccacgagttcatgattacccaagattcaggacaatctaatattgattatctttattatataaattagatctttatagtaaatgtcatgtttgataaagacaacttaattacatataggtccatgtcatactacatcagcaatctgaatcgagattgcttgcaccgaataatgagaatcagtgaactgtactagtaactgttgattaaaaagtctataactttaatgtgttgccgactattttattcatggctaagtgatcttaattattagtacaatacaagtcacaacttcatgtatgaataa

SEQ ID NO: 153393 - DNA, 1058 bp, Cannabis sativa
aatagactatttgaattctattttcaacgtattaaatatttttaaatttcttaaaattttacaagatgttttaaataactacaacttacacaatcattaaaaaaaatagactaatttttttttttaaaatactgaaatagataaaggtacagtacaccatttctagaagggtacattgtaaaattttgtttatatataaatatatatttttttggaactaattaattaaatctttattattattattatttatagtggcaaagggtggaacaaaaaaggagtgattaattgtggaaaagagagaagaccagtaaatggatcaagatacccaggtggatcaccaagagcatcaaatgtattgaaacaagtgttgaaacaaataaagaaaccatttcattttctagacataacaacattgtcacaacttagaaaagatgggcatcctagtaagtatagtggtcttaggggaatggattgcacacattggtgtattgctggtgttcaagacacttggaatcaacttttatatcaagccctcactacatagttaaatccaagaaaaaaaaaataagagtaaaatttaatgtatacaaaaatttcattatatatttatttgattttttttttttgttttgtaaaaaataaggttgtattttatttttattaattaaaaagaaaattttgttaaaaaaaaaggctatcacacatgttcatgtagtaaatctagatataaattaattagaaaatatctttgaaagttgaatatttgaacttgcctgccttaagtaaagaaatattattgggcctttaattcaaacatatgtggtatttttgaaatttaatgaaaaaaaaatatgtatttttgaaaggattttttttaccactaaatgagtgcaggcctagtccactttagcccaggatcaattaaccctgattggctttccaaacgcaccttaggctacaatgtaattgaatttgtgtgtaattggaggtaattacacaatttggcatgtttgtttgaccatgtaattacactgtaactgtgtaattggaagtaa

SEQ ID NO: 153394 - DNA, 790 bp, Cannabis sativa
  modified_base (27)..(46): a, c, t, g, unknown or other
  modified_base (750)..(752): a, c, t, g, unknown or other
gcacttagtgcggattggatgttgttnnnnnnnnnnnnnnnnnnnnggatcggatgaacacccctatctgccgcgatcacggggattctgaggaatttaatttccttgactgcctccggtctcaatcctattaccctgactccttgtatatcgctaagcgtccatttaataggacttagcctgcgaacccataagtcaggcaggtcagacagggatcataaaacttaatatcgctcttatgaattttaaggcaatgcattaaaataaataatctataaactaatatgcttcctaacatgctttgataatcacatacaatgctaaacaaataaaggcttactgaaccgtgacccgagcttttctctgatgatgattgtacatgtcttggtgatcttcggtagaataacctaacagctctgataccaaaattgtaacgccctaaaacttaggcacgctacagtgatttttcaattacagtgctatctttgctaatcaaagaaattttcttgaaaatcgtgttaaattaaaactttaaatttaattactaaattttataaactttattcagttatttacaaaaaccgagatcccatattaaaacttttataaaatatttaaaatacatttagttaggtcgcacaacgactataaaataaaaccccagatgtcccgagaccgaacactctaggtgacgccgccatgacatgtacaacatcatcctagctcgaagctcactcctgttcagccttnnnctttcctttacctacacatgaaactagaactgtgagtc

SEQ ID NO: 153395 - DNA, 804 bp, Cannabis sativa
aattatatattaatgttagaaaaaagacaaacaaataaaattaagggtgagaaaggaatatgattaacttggccatttctccttacattaacactaacttggggaggaataaaaaaaaatagaaatatgaatgggaataagaattagaatagaaataaataaaatttaaaatgcataaaaaaattgataaaaaaattattaaattttttcaaatcttacattggaatggtctttttttttattttaaaatggaataattattccaccaaaatgattgaaagatcattctatcggaatggtattctgatagttttaaatgcaaccaaataaagaaatgaaatgaaaattgtttcctttccattccattccgtttcaccaaccaaacgccacctaacatttaggctccaaaccatgccaagtttctggctttcatcgccatttccatgatcataacaaccgttatggcttctaaaggcaatgaaagttatcacaacaacaagaaaggatatggaccaggaaactagtcgcaagagttaccaaaaagagttgcctcacttcctattagatatttacatattttgtttatatatagtatatatatttttttttttttgcatgtactgtattctgtgatcgtgatataatcatatttataaagctccttgtatattatatatatgaaatagaatacatagatactgggagaaaataaatcatattgataccataaaataatgtcaaataatctccatctagaccttaattaagtgtttagctactcatgtttatgaaagcaaaatcaca

SEQ ID NO: 153396 - DNA, 945 bp, Cannabis sativa
  modified_base (819)..(832): a, c, t, g, unknown or other
aacttcaccaagcaccttagaataaaataaggaatcaaaatctacaaaaatatctaagaaaaacacctcaaaaatgctcagaacgtggtcgccggggttctcgtcggtatcgtcgctgcaaagtgtaactttgtctccgattgctcttgaagcgtcctttcgattggggaggctctccacagtgctcaggacctccaaacgataaagaacaacccaagaaaagaggttcgagaaggcagattagagtggtctccttcgttggcggtgtaccgtctttaatggaatcaaaatattggtccttcgttttggacattaaaacttcgtttttttacgtcaaaaacaatccttagggtcccatgcacttatatgtaacctcccttgacccaagaacaagcttaaacacgttcgaattcgcgtctgtttcaagccacaccttcgaagcttcaagaatggcaaaactcgaaacgaggacccctgccccttatacctcgttaaaaagcttccttaggtcgtatataagtgatcccaaacccccactttcacccaggttgcagtccacttgaagaacaaaaaatttttgacatcgtataccccgtatacgttctctctctctcgttcgttctctactttggtgtacgaaattagaactcaaaaacctaatttctatcgtttttaaacccgagcaaaaagatcgctttgaaccgaagtgaaatgattctcattccacaaaaatctcggtcctccgaactgtgcgtatatacactcgtatatacaacaacaacaacaacgataacaagaataataataataataacaatnnnnnnnnnnnnnntaataataataatattaatgttaaatataccatttaacactataataatatttaccaatattattatactaaaaaataataatcacaattattattatactattataagttaa

SEQ ID NO: 153397 - DNA, 575 bp, Cannabis sativa
gttgtttaaatatgagtttaaaagcttatgtaatttaattttgtggataagttgattctatattggtagtttgagaaaaatatgattggtttaattttgattaattgtcctaattagatttaagaagttaattaattatatttttaagtttttataatttttttaataattattatttatttaaataatatttagatatttatttaaactaatatagacggaccaataaaaatatgacacgtgttactttaatgaacacactcaatatttaaaagaataatagtaacagaaataaatagaaactaacatttggtatttaatccgctagaaaaaatatattatttaagtgaaaataaaaaacacaacatatttatactgtaaatttccttaaaataattaatgaaatgcgattcgaatgagcaatctttttctattacttgtactattttcatttctagaaagttattgaatcaagcacatgcataagaaatcagtaaaataataggaaaattctataatacactctcttaaaagggatacatcgatatatctttatctgttttagtatccgaaat

SEQ ID NO: 153398 - DNA, 631 bp, Cannabis sativa
gtaaaataatttccaacagtacaccatgccgcatggcattgttctcacctcggtccccgcggacgaagagaggcaactactgcgaattgccaaacacaactacgccctggacgagttcagtcggcgacatgctgaggtggaagccctgaagaagatcttgcgggaggagcaacagaacaccttgcgtgaggatgccttcagaaatccctgggacctgaacatggatcccctgacggactggttcaaccactttgtcagtcctactctctccccctttgcctctgagatgaccagccagtttgtctcccatctgactcaattcccggccaagcgatacgcatcctgtgtcttagtgaactctgtttaccaggttcaggatatcagcgctgccctggctgcggtaagttcttgcgattcattcctctctttttgcttatattttgtcttaagtcatctgatctcattcttgcttcttttttcagatcactgtagagacccgccgcctctcaaagaccctgatcgatcacgggtacgtcatgtccgaatttaggggtatggacaaagccgtgaagagtctgcgggacttgtcagctgagaggagggcattccgggaggaggcccagcagaggga

SEQ ID NO: 153399 - DNA, 768 bp, Cannabis sativa
  modified_base (165)..(166): a, c, t, g, unknown or other
caaccttcttggtgtggtctcccaccattcttcagcggtggcctcttctttgttaagccacgtaaccgtagccactgtgatttcaaaagtagacactaagctataagcttttgttacatgttagatcgaccgtgtctaaaccacttgctcacaagattaacttcnnaaagttactctttcagttccacatgcgtactatagaaaccaccccaaggaagaagagcaagtctgtgaaacttggtgaatagcaagtgagcaagagacttgcctgcatggtcgcttgaggggtgcccataccgtacaacacaatgaattggcataaagaacttatgtagagaacttttaaggcttaaaataagctactataactgcctctaagtcgtgtaggcatacttcgacttgacaaagtaaatctggatccttacctgtcaaggccataaaaagacagctaggacgatcatatgtctgtcatagatggatttaaggaaaaataatagtagtgttagaaaatagaggggctataggccaaagcaagaacatgaaagccctaaggttagatatgagatcggtttgcatgcatgaggtcgaggccctgctagaaccgcataacaagaaaagaactggacaaagtaggggccacataccaggctaaggctaaggtagagacccttataggattcaagccacgtgaagtcttaagttgaacattcaactacaatagactcaccattaagcttcatacatagtttccaaggaaaccacgtatga

SEQ ID NO: 153400 - DNA, 549 bp, Cannabis sativa
  modified_base (194)..(195): a, c, t, g, unknown or other
tttccaccgccttgatgacgatccaatccaaccgttggatcctgggaattcgaatcgtgtgccttcccaaccgttcgattggtagctgatcacgcctgtttcacatgcgttttggcctataaaagccaccattctcactttatttggttactttaagaattttaccaaattttctcaagttttccagagagaannaagaaaccctcgaacagaaaccctcaaacaccatagatttcttattgatcttccttcgccgctgccaatcaactctttaccgtcgatcaacaacaacgcccagcgctccagctttatgtaagttctttgcatctcgtacttcagtttattgttagtgtacatcgcatgctttactgttcatctgttttttttgggtttgatgtttgagttttctaggaatttctgtctcgagtttctgtgtaacacgttagattcctcttttctggtgttcgagttgtttctattctacgtatattttttttaaggacccatcttttcttcaagtgatgaccttcaagggttcagagaggactt

SEQ ID NO: 153401 - DNA, 736 bp, Cannabis sativa
  modified_base (709)..(710): a, c, t, g, unknown or other
tgttaattatatatttaattaaccataatttttctatgtgtttttttcttataaatacttggttttggtgtggctaatcaagaattttcaacattgtcagcttattgcatagtaaattaaatgtttgacattcaaacactattaataattaaaaaataaaatgatgatgacatttttttggtacgtactacctagtaaacaaagtcatatttattaacttttactttgaattgaatgtatataggataattaatcattctagaaagatgatggctaggaatataattttttttttactttcagtgacaacataatttgtaactaaaagtacaaaagttgtgactaattataaattatcattcttatattatgattaaaaaatttgtggctaaaagtattagtcacaaaaattataatctactgtgattaaatatatttttaatcacaatatttattgtgattaaaattaaattagtaaataattagtggatggagtgttaacgatgtttaattaatattaataatatctttttaacaattttcttcttgagaaagttccaagttttaaacagatgttatcatcctaatgttgtaattagtgaatattaatttaaaagaataaagtcatgtctgtatatttccttttttttttttttgaaagccatgtctatattcaaagaatacataaatatatctttatatattaaanntgcctatctaacggcaattcttggtt

SEQ ID NO: 153402 - DNA, 579 bp, Cannabis sativa
  modified_base (87)..(94): a, c, t, g, unknown or other
aataaagctgaaacttcaagcctgaattcgactatcttttgatttggttttggaaaaaactcaaaatataaaagttctagatctctnnnnnnnntttccggaacatcttgaatcgtctgattccgagtaatatcgatagagttatggccaaaatactatcagtcgacgtatcaaaaaaatcaccgtcgaaacgaagccatctggtgaaactccaacacgggccgcggcccagcccttgtggggccgcggcccgccccctaaactacccaaaaattgtcatttttctctcacgtgggttttggtagtttcctaattcgaataggcatttaacatgtgcatttttatatcttttagtccctgaaagcctatataaagggtgaactagagttgatttaagtcaagcaatttagagggaaaaaggagtacgaatttcagagacagaagtcactactggaggcaatctgaagagggttttcaacattattttattctctatcttcttctctttcttaaagttaatatgtgtgatttttcttccatgaacatgtgtagctgaacactttattagggttagatgga

SEQ ID NO: 153403 - DNA, 600 bp, Cannabis sativa
ctaacttttaccagcgcatttatatgctgggaaaagtcatctttgccagcgcttttcattttatgctggcaaaagttccaatacccacattgatttgccaacacaggacaagtaaattctattttaccagcgcaatactaacttttgccagcacaaagtgacatttcttgtagtgagacggcggtgaggggtaagaaagttttttttagtaagggtgatgttgagagacaaccgagagagatagaggaagagagagagagagagttgaggtttgaaaatgagaggggtatttttaggtttatcataaagtggtcatatatttcagattatgaaatgtattagtttaggcataaaatattaggattttttatgcatagtttttcaaattttccaaatatacatgaaatcgtttattcgttacaccttgtagtatgacattgatatttaaagtagtggatctgaatttagataaatacaagggataagttaaaaaatacctcttttttgtatctattaatcaaaaatacttttatattatttttttattaaaatatacctacttttttgagtgaattgtctaagggaaatttgattttctat

SEQ ID NO: 153404 - DNA, 533 bp, Cannabis sativa
aatttaatatcctttttcctattgaatctatcattaatgattaatcttcaactgctgccacaaatacaccagaaaataattctgctgtcaacaataaaccagcaaaatgatctgcagatcaccctactgttgcagacaccaagtctgcaaccactccagatccatctgcaacacctattcttggcctcccaatcaccacagcaaccacctctcctcctgaacatcccacatctgcaccagcagttcatgacagcatcttactgtcaccaaaataggtcgacacatttccaaaccgattcatctcaaagattacatatgcaattcttcaactgctcaccctcttgctgaattcctcagatatgaaagaattcataaatcttttaaaaatgccgtgttacaagcttatatagagttggaacctaaaagggaatttgaaattccatgctttaaataccctataatttttcccctaaatgtataatcattaaaattggtcatatatgaccactttaatgattttcctaaactacccc

SEQ ID NO: 153405 - DNA, 502 bp, Cannabis sativa
  modified_base (458)..(477): a, c, t, g, unknown or other
ttcacttgtaaatacttatagaagctatagattctatatctatgattagcactccaactcaattatactatcatgttcccaagatgtaagtattaggtcctccgagatttaacgaacaactctaaaaagataaataacacaattgagatcgaacctaaccatatcaggattaagatctattcacctaagaccaactaactgatattgacttcgatagatacaatggtaagtttatgatatattatgaaagtttaatatcggtccagtccaatgtatactcgatatatctgatcctagcatactttgccaataccctaaacaaggacataatctatcgctaattatcacattagtgtaaattcggtgcattgataaatcatgggacataaacttttaaatatataatcatgataatattccactgtgttgagagcactataatcatgaataactatatnnnnnnnnnnnnnnnnnnnntatacattaaacatataatcatgaa

SEQ ID NO: 153406 - DNA, 648 bp, Cannabis sativa
tttggtgctcatttgagagagagatgaagtttttctatcaagaaagcacattgctagaaaatcttaaggcttgataattcccaaagctatttcctagagagtgcttagagatagggggcactactacaaaattagcttttcccaacggtttataactgtcatttatattatttcccaacggtttctaaaaccgttggctatgtgggtgtcataaaaatacagaattttaaaagacggtttataactgttgggaaatatcactttaaatgacagtttataactgttgagaaaaatcactttaaatgactctttacaactattggtaaaaatatttctttttttatttttttaattgctgctattatatttaccttctatttaatctgaatttatattattaataatatattattatttttttaaaatagtaattaacataaagagagttcattcatcaattaaattttaacaaaaaaaaatatgaattttattcacattaaatctgaatagtaattaacataaaatctgaataatgttatttacaataaaaaacatatacatttactttaacctaaaaagaaaatataaataagcttttggacaaaggtataataccttgttcaagtcatggtgatccccactaatcta

SEQ ID NO: 153407 - DNA, 653 bp, Cannabis sativa
  modified_base (485)..(486): a, c, t, g, unknown or other
  modified_base (605)..(610): a, c, t, g, unknown or other
ttggaatgatgatacacactggatattagtggtagttgacagacatagctggacaatattgatttatgactcgatttcagatcactggatctctatagaggcaatgaaaaaaggctgtggagccacttgcaacatattttccttttttacttaaaaatagttgccatattgagagcctccatcatcagtgtagtgatctcatgaatataaaagtagcacctacaaatactgttcttctgaacaagagaacgtaagttttatttaatatgtccacctttaaatccaaactgttaatattaatgctaacgtagttaaatttatctttataacggagattgtggtatattcatccttaagacaatggaaatacacattgctggtaagtgcaacaagtcagctacaatgttgctcaacaacgacaacatagatacaatgttacactatgcgaccatcatggtcttttatgttcttcaacaaactttaannaacttaaatttgctttgaacgaccttgaatttatactatgcgaccatcatggtcttttatgttcttcaacaaattttaaagaacttgaattcgctcttgttgcccctgattttgcccannnnnngtggaccaaccagacagggacacgtggaccaaaagatcttaac

SEQ ID NO: 153408 - DNA, 759 bp, Cannabis sativa
accccaagagtaaccaccatctctgatcctttatgagttggtgtagatataaggacttctaatatatatatatccctattatctaacatataggtcactttcataaatctttcttgactttatccttatgttccttgtttggttacatcttagatggctcccactcagcagtaggactttggttaaatttatacatagaagtacatttaacttcttactattgtttccagggatatcttgttgtgacatattattttagtctgaaactgtaagttccatctagactaagtcatcaacatagcaatctagtattgacattaatgtaaaatacttgcttaagattaagtaatcatcagagataccataaaatatttcatgaggattaagaattttttgcctaactcattcgaatagactatgcaagaattctactatcttattctcaaagttttgagaagttaattctatccatatgaatggttagatttactttctcaattttattaaaagttcatattacaagtgttatccaaatgaagatgggtttagaattgaaaattctctcactcaaataaggtactgtgatacaatgtcaaagaacttttattagtatcaacttctattacaacagtaaatattaattggaccataaattaatttgatcaagaatatactctgataatttgctaatttattatattacatccatgtttaattaaaatatgtgtgccatagagtactgtggtgtattgagtatag

SEQ ID NO: 153409 - DNA, 651 bp, Cannabis sativa
ctcggacctagacccgaacccaaatccaaataaaaacctatatcgagacccaaactcgagccgtgactaggaccaaaaccggaacctagaccgggacctaaacctagaccagaaccaagatagggacctgggcaacggaactaggatcgggacacaagacacgaccccatgcccggacttgaacctatgacctagctcgtgacttggcactaaacccggggcttcgactaaacccatagtcgatgttaggatttgggacccatcccgggatgaagacccaaaatccaaccaaaaccttcccaaattgggacccagacccggatcccaacccaaacctagactcgggacctgaacatggacccaaacttagacaaaaacttggacctaggacccgggtgctgaaccagaacaagacaaggacacttaacagggatccagatctgggactcagacgaggatccaaacccggaccaagacccaaacccagaccctaacccagagttgggacccgaaactagaacctaaacaagaaccaccagaccatgaccctcgaacaagactaggattgtgaccaggtgccagacccaaacctagaatcgaactcaaacttagcccctgacccaaactgagactgaaactcgggcctagaca

SEQ ID NO: 153410 - DNA, 619 bp, Cannabis sativa
  modified_base (347)..(348): a, c, t, g, unknown or other
aggtcctcggaaatcaatgacctcttcagaaggtctcttttccaaggacccctcaccgcccttagacttcttggccagcggagaggggctagagctttcgcccattctctttcttagagcatcgatcatctgccgagacatgtctgcacagaacaaaaatagtatggttagaaaacagccatcagaaataccaggcatgaaattcaagaagctcaaaagtaaagtaaaatgcaaggtgaccgccctcacagagactcaaacgtccatcatcacctgacatcgatcttatctcacacatgacagccttccctttttcggcaaaggggggagatggccgaacaggtganntgggctcccttatgcgaattgcttattcaacaggcccgggcgtggccgaaagtttcttcttcctcttcagtggggtcacctgctcgtcctcggcctcatcttcaggattcaaaggctcttgagcatactgcttggccctgacacctcccttcaacttatcctcacgcttaatttgaatcagctcagtctccttatgagctcattcaggtcggccagcatcagacttcctcttcttccccgccatggacttaggagaaaagtgttgggtttt

SEQ ID NO: 153411 - DNA, 908 bp, Cannabis sativa
tattcttcactccaaatttctttcataccaaaccttcaaattatgtttggaagtttaattttaacagagaacaaaaaaaaaaataaacaaaatgtaatgaaaaaatatattcttttttggtatgggaaagtttattgaatcaatttttttcaataaaatttttctttaacaaaacatgagaaattattaattttcttacactttttttcttgagatttttacatcacatactgaaagttttaattcttttactgcgaggtagattttttttaaaaaaatactgttttttttaaatactgtataagttttatattatgtacaatgttaagtttttacggttgttttaattgttttgttttgttgttttatggttgttttttttaaaaaaacaatatttttataaaaattttgtgtgatagtaaaattataaatttttgcctaaaatctaatattattgtaaaaatctttttttcttctatatttttctttctatattttttcactattaaaaattaattttcaaacatagccttattatgttttttttcaacttttctctcttatatttattttcctcactttttatcaattgcaaacatatggtacgtaaggctgttcaaaaaaattaacaaaccatccaactcgaataaaccgctcaaaccaaaccgaataaacggacaaaaaatacaacccgaataactttacgaaaaactcaatccactcaatgaatatattaggcgggttggatattattctcacctacccaaataacccgaataaaccgatttacatatttcttacttaaattatttataacataatatataaattacatttaatagttaaactattttacatttaaagtttgtattttatagtgtttattttaaaatttagaatttatagtt

SEQ ID NO: 153412 - DNA, 625 bp, Cannabis sativa
  modified_base (193)..(201): a, c, t, g, unknown or other
  modified_base (260)..(263): a, c, t, g, unknown or other
  modified_base (386)..(387): a, c, t, g, unknown or other
ggtcagacaccatttgcaatggctatggttatgaagctatgctgcccgtcgaaatcaagccaccttcccacagaagattgacgttgacgtacaatcaaggtaccaattacatactccttcctgaatcacttgatgaaattgaggaaagacgagcaactgcaaatttatagttgatggcccatcaacaaaaagnnnnnnnnnatttcaacaaacaagtgaaagctgaaaaattcttcgtgggagatatggtcctaagaagnnnnttcctaaacaccaaagacagcacgacaggtgtactagggcctaactgggaaggaccatatcaagtggtcaaagttctcgactctggagcatacaaataaggtaagtatgacgaaaaaatgcanntcattctagtaccacggtacttgaatggagaacatttaagaaaatactaccaatagagtaccaggtcaggtgaccactttaagtactaaatgaacatttactcttaagtgaatggccttcttgacggactatgcccaaaggtttcgataaaagaaacagagtactcatgtcgggtgaccacgctaaagtacagtttcttatgtctgcaatttgttttatttcatgttaagctaaaaga

SEQ ID NO: 153413 - DNA, 640 bp, Cannabis sativa
  modified_base (81)..(88): a, c, t, g, unknown or other
  modified_base (262)..(263): a, c, t, g, unknown or other
cttaaatatttgatatatttttttaagagatttatttaaataggaaaattttatttatgttgaaaattaatttatttaatnnnnnnnnaacataaattagaataattttttccatttctattttattttactttcataatgaatttcgaaaaatatatttttatacattggatttcgaattcagttatatatttattgaaaattaaatttgagttaaaaattatttatttaattttggagcaacttaaattaagtaattttnntaatatttattgaaaaaattaatacttaggatggaaaataagttattttttattttttcgaatcttccgaaagtataactttataaatattaaattaaaatttatatttacagttatctaaattagaagttttaatcaaataagtatatattaaaataaatagattaaaataagtatcgaatgaaaatacaactctttaaaataatgagccttagttataaggatattcgatctccattgttggtcctacatagttcatttgttttttataaaatttcgagatgctagacttcgtccccccaatggataaaattttgagacgctagacttcgtcctacatagttaacactgtaacgatctcgaaagataagtatttt

SEQ ID NO: 153414 - DNA, 534 bp, Cannabis sativa
aataaaaaaatttacataagaaactgatttcttagaaaccggtcttcaatttttccggcgacaatgctaatttcgacaaattttccggcgccggcagcaactcaacgacttttccgtcaccgacaaaataataaatattaaaaccaatttccaacacaagctaaaaaataaaaactataaatatgggtaaaacagggatactaagaatatattctacaaataaaacttcaatgaaaaataaaaaaaaataacacataatgaaaatgcctaaaaataaacaaacaaagaacacaaaagagccctaaaaaccaaaactacctaaagcaacaatgaaaacacaacttaaaaaccagtttctacctaaaaccaacacaaatcataaccaaaacaaaaaagtaaaaaaaaaaatacaacaacaacaacctcatgcttaccaaaaattaaaaaattaagaccaaaaaccaaaaaccaagtgcatgtttggcatcataactaaaaaactgttttttgtttttaaaaacaaaaaattgtttt

SEQ ID NO: 153415 - DNA, 785 bp, Cannabis sativa
atttcacctcagttagtagaagacatggtcagataaagcatcaagtttgttgtaggcaaacttcataacttgacgctgcaatctgatctattggaataaattaaagctgctcaattagttgatccgaaataagtgaagatccaagaaaaggattggtctggtcaagccaaagattttacaatgttagatagtgggatgttgttgtttaagaccagggtttgtgttccaagtagtgtggaacttggaaatgaaattcttaaggaggctcataccactccatattcattgcatcctggcactaacaagatgtaccaagatcttaaaccctacttctggtggagcaggatgaagaagaatgttgtagaatttgtatcctgatgccttacttgtcaatagattaaggctgaacatcggagaccggtaggtttattctagccattgacacttcgtgagttgaagtgggaggatatcaccatggactttgtggttggattacctagaaccacaggattgtacaattcaattttggttgtggtagatcgattcatgaagtctgcacaatttctaccggtaaaaacaacctttacagtggatcagtatgcagatttgtacgtgaaagagatagtaagattacatggcattccaaaatctattatctcagatagagatctgaagtttacttctaggttctggcatagtcttcagcaggctatgggtaccaaactaaaatttattatagctttccatcctaagactgatggatagtccgaaaggacaattcagat

SEQ ID NO: 153416 - DNA, 575 bp, Cannabis sativa
  modified_base (27)..(30): a, c, t, g, unknown or other
actaatcagattgtaaagagttttatnnnnggcataaaacccaacattaatattataggagcgtaaatgtcggctagcgcttggatcaattgatcacattgttgcattagcattacaagtggagacaacggaatccactattcatacattgccgctagccggattatattgtcgattgataatcaaacatgctctgaatccagtggcttaaatacctaaagctatctccgaagcagaagtttttactgttgtttaggctattggtttgcctatatcttaaccgaagaacttgatcatatatggtgattggactgacgaggtaaacttatacttatattacattcaattttactaaatatatgtactaatcaaataatctttgtcatgctttattgaaattttactaagcaacccaaatcaaacaaaaaaaaaagtaaatcaaaacgttctatgacacaacctaaaactcaaattcaatcacgagaaaaatgtcccaagaaaggatctcttacacagaatatgttggaaatattttaccaggatcttagattcactaacaagtatgttgtttaaca

SEQ ID NO: 153417 - DNA, 553 bp, Cannabis sativa
tttatgtaaatttttattagcaaatatatatagtcgcatatcaagaattatactatgcgaccacagaacaactattataatcacaaaataattataaatttacactgtatgaccatcatgatcattgtatagagtaaattaagtaaggttattttgtgaattttaatatttcatattgttagttcaacaaatttcacagaataactatgtatagtcacacaaataattaaaaattatattgtgcgaccataaaactattaaatttatattgtgcaacctaccatcatgatcgtatagagtaaattaaataaggtatcttgcgaattttattatttcacgttgttagttcgcaaatttcacgaaataaataaggtttttttttattattatttttatattttaaaataagtttttttttttaacatttttatgaaaatccacatatcaactcagatagataacagaacaacttaaatcgcaactaaaatttacataaaaaccgatatagaaactatagagcaaccaaaaccttaattttttcaaaaaaaaaaaa

SEQ ID NO: 153418 - DNA, 1361 bp, Cannabis sativa
  modified_base (456)..(457): a, c, t, g, unknown or other
gtggtttgtgggttatctttttttgtatttcaagagagagaagaagagaaagatagatagatagacagagagagagagagacgattaatgggggttactgtttctttttgttttaattttttttaaatacatatatatatattatttaattttttattatatatatatacactcggcttgattcggtcaaaccgagtcttcacatattttttgtgttttgttcagatggaatatgattcctctaacaaggatacaatgaaatatgttgttaaagattcaagtgttgactctaagaagaaacttcatctaattaaaattaaaattcttaggaaggttattcacaagaaaaaagaaaaaagtaaatatgatgcaaattttaaggattcatctttggtatatatatatatatatatatatatttttgaaatatattaatttgttttaatttatcttctnntgaatgttcaattttttagttggttgtactaaataattggttttcgtatttaattgttggtatgttattttacgtaattgaggtttaagtttcattttttcttttgttattttaggaaactggttttactgtgtcagatttacgtaatttacttgctttatgtaattagtttttctgtgtcaatttttaattatttgtttaacataactagtttcagtaatttaaatttatttatatgttaagaattctcttgtggtatgtttaaattttttttaattaactagctatttcatgttttaatgtattattttattgttttaggctttttatgtttttgtttctatattaattgttagttttatttagttagctatctaatgtaactggtttcagcagcttaattgttatttttttaagaactggtttttatatttcaaactatctaaagtaactggtttcaacaatttaattattagttttaatttgttgttttttttttaaagaaaactagtttttatgtttcaatttatcttttgattattttaggttgtattggtaactgatttccctttttagttattatttttgttgttttgcgtagctctaatattttagtttttgattcggttggtttaaataattggtttctcaattatagttttaactagttgattattgtttcagtatatcaaattctaatgtctaacaccagtgacaactccaatgtctaacaatggtgattttccagtaatgaagacaactccgacgaattttttgatgataatctgacaacgagaacaacttcaacgaatattctcattctattttctactttttttttggctaatattttattttagtggataatgactattttggatagtgtactgggttgatgattaag

SEQ ID NO: 153419 - DNA, 549 bp, Cannabis sativa
gatcctggttctagtttcttgaaccattcttccacggatccgcttagagtaagcgggaagcacaaacacttggcgtcgttgctgactctcatgatagtcatgactcggttgaactgtgataggtgatcgcttgggtctgagttctcagtataagcttccatttggggcatcttaaaatttttgggaagctctgcttctagcatgtgcttggcacatggctcccggtcttcacagtcagagtcggagtcatcgcctttttgtcttcttgaaactcaggcaatggctttttggagtatggcaagctctaccatgattccttcgtttaacgttcccgtaaagactatgggtccgtatttcttttggtccaggtgatcccgaagatcaccatggttcccattaatctgatttctcagatcaatgggaggacattcctggccccgtcttcctctccctccgggcttttggtgcacgaaaacactctttcggtcctctcgatcctgagggctaagactccctttttggagtttgcctctctgcggacctttccct

SEQ ID NO: 153420 - DNA, 549 bp, Cannabis sativa
ttgtttattttccgcatttcatatcatatatatgatgtatttcatatactatattatagtttaatagttggttacagagcggttttaatctctgccttgactttggttgagtttcatatctatatatatatattcgtatatacagtgttcatatatatatttgttttcgttagtgtatatatatatatattcatattcatacaatcccaattatatatattttcatacgtatatatatacatttattcatacgttgatatatatataatatactttatacgatacggtataatatatttttgttcggtacatatttatatatatgtgtatatatattgtacattatatatatattttatcgcataataatattcataatactcattttgatttttttatgtgatatatacatgcatatatataacatgaagttaatcagcctaaagtttagtttttttcattttttcggtgtttatttcgaattctatatatattactatatttgtatagtattatagatcgatttaagcattgaaaatcctttgaaaa

SEQ ID NO: 153421 - DNA, 611 bp, Cannabis sativa
ctatagacaccttattactctgaactttattttaataacaattaactcaaagtcaatgtgcctttgaccttatagagttcatgttgttactaaaatacaacgtgattgatttgttgtcacaacatatatctttaatagctttcaataccatttctaattttgcagccatatgcaacaaaaaatctcataattaaaagctttataagatcagaatcaaaaatcttaatgatctccaatattttctgttttctgatttttgataagtgaacatatagtattttgttctccttaaattccttatagcccatttggatgcataccaaaagttccttttatggttacttaaacatctatccaacattcttaatatgtattagtacaaatatatacatgcttgagcatatattagattccaatgtaaattaagaatcttctatatttcttgaattctaaggttgcttttagggcaatgatttagacaacttattttctttagctacaagcctatcaccttgtatagtatctttcatcccaaaaattttgaatactttattgatatatctcttttgttataattcaagaatatctcaagaacattctcaacatatctt

SEQ ID NO: 153422 - DNA, 594 bp, Cannabis sativa
  modified_base (564)..(568): a, c, t, g, unknown or other
agtcgacagactcagtaagaaaagcataaacaataatatagcataaacccacattataatcaggcagcgatagacccaatcataaccctatccttgtgtccaacatgttgctgagtcaataacattcctacgacaatactattgatcataatgtcaccctatactcagtatgctggtcatactccagccatactgatgtgacaacatcgatcagaatctgagccatacatacatctatcaatattcaatataactctatgtatactaataccactatcaatgtaatctaacaggcataaataatatgtacgctaaatatgtaaacatgtaagaatatcattatagtaatcttaccttgtttctaaattcaggtgtgccggccaacttgagtggaatagatgctcgacgaaatacaggctcataaaatcacattattcgtaaaactggtgagtgacacgctaaactacttgtcggggacctaaacttggaactaaaaatttctctatcgatgaatagcatgacaataccctaattattgataactctatggtatagagttaattnnnnngcttttaaactaaagtattgtgagga

SEQ ID NO: 153423 - DNA, 590 bp, Cannabis sativa
taatttttttatttatttatttatgcgtttatgcactactctaataaagtctcaacaaaaagtggatattactatattttagcacacctaaaaaaaattataagtgttcgaaaaagtgtattaaatttaacataagctaaaagttgtgttaaatttggcacaagatatatcattgtgccaaatttaactcataataaatgttacttttttatttattataatgttattaatgattatgattcattgacttttattaaattttatttaccatattaccattatttaaataataaaagaataaaaaataataataaattttgtatattctcaaaaaaaaatatgaaatgtgaccattaatataatcaattggttttttttttcttattttacatcttgtgcattgaagcacaattataaatagtgggctaaatataacacaaactcattttctgcactaaatttaacacaaattttaaatcttctattagagattgtctaaatcacagtaattagtagcttcttttttcctttaataacttctactaatactagttaaccagttaatattatcctctctttggtaaattaga

SEQ ID NO: 153424 - DNA, 1164 bp, Cannabis sativa
tcggctgaggtacttgtactggctctaggtttctttttgaaatgctttcttctttaaacgtaagttcaactacaaaatttgctaaggcttgacctttaatcactgtccggggctgaaaggtaatttcatactagcctagctccactacccatttgagcaaccatctagaggcatctggtttttgcaatacttagcgtaatttttggtcagtgtatacccgaacaggatgagcctgaaagtagggccttagctttctcgttgttaggattatgcaataagtgagcttttctatcaatgggtactggctttcagcttcgatgagtcttttactgatgtagtaaaccgggtgttggatattgttctcttctttgatcagtacgacacttaccgcatgttccgtgacagccatgtatattcctaattcttctccgtccaaagcttttgagagcacaggaggtttttcgagttgcatttttagctcttgaaaggattttttgcattcctccatccattcaaattgcttatttcctcgcaggatgttgaagaataggacacacttgtctgttgattttgaaacaaatctgctgagtgtggcaatctgaccagtcaaactttgaacttccttggtttttgttggaaaattcatatccaggagggcttgaatattctctggattagcttcaattcctcgggcattgacgataaagccaataaatttacccgagctgactccgaaggagcactttaagggattgaatttcatgttgaggactttgaagcattcgtccaagtcatctatatgccccccaaacatcctagatttgacgagcatgtcatccacgtacacttcaatatttcgtccaatatggtctatgaaaattttgtttaccaatatttggtatgtagctccggcattcttgagaccaaatggcatgactttataacagtacagacccatatctattcggaaacttgtatattcttagtcttgtggatgcatcttgattttattgtaccctgaataggcatccatggagcttaataactcgtgtcctgctattgcaaccacaagttgatctattcgtggaagtgaaaagcagtcttttgggcacgccttgttgaggttggcgaaatcaatacacactcaccattttttgttcggct

SEQ ID NO: 153425 - DNA, 596 bp, Cannabis sativa
  modified_base (295)..(307): a, c, t, g, unknown or other
agccgaacaagaaatggcgagtctgtattgacttcacagacctcaacaaagcatgtcccaaagactatttgccacttccgaggattgatcagcttgtagatgtaacagcagggcaggaaatattaagcttcatggacgcttattcaagctacaatcaaatcaaaatgcatccactagaccaagaacatacaagtttccgaacagtatgggtctatatcgctacaaagtaatgtcgtttggtctaaaaaatactggagcaacataccaaagattggtaaacaaaatctttaaagannnnnnnnnnnnnaatatggaagtgtacgtggatgagctcgtcaaatccaggaaggctggggggcacattgacgacctggacgaatgcttcaaagtcctcaaaaaatacaatatgaatctaaatccctcaaagtattcctttggagtcagcttaggaaaatttatgggtttcatcgtcgatgcccgaggaattgaagccaatctagagaagattcaagccctcttggatatgaagtcgccaactaaaaccaaagaagtgcaaagtttgactggtcggtttgccgcactcagcaggtttgttt

SEQ ID NO: 153426 - DNA, 664 bp, Cannabis sativa
  modified_base (52)..(63): a, c, t, g, unknown or other
ttatgagagtgtttatacagagaatgttctcagtttctctctctctctctcnnnnnnnnnnnntctctctctctcttctttactcccttcgattctttaactgatccattgaccccttttccattctgtctttggggtatttatagtgtttttcgagagaatctctagaaagggatcacttgtctttaagtgttagccccttaggggcacaaattcctagcagatacaaaataggaaatacatgacatatgccgtaggtattttaagggattaggtgaatataatcttttatcctcccttgattgatgtaagtcttcataatggagtcgtcactagactcgtcgattatcgtgtaatcaccgtaaaagaggcttacgccatctgtcaaatcctcttatggagattctgatacgttttccccatgcagcgttaaatgcaaagtgactgttcgaacaatctctttccctctcagagatgccttgttacatttccagcctcccggagagtaaaggcgtgttttatgctcctctctgggaggctcgctctgtgagatgcacctttatgtctatgacttaaccaatttttatgagtggtgttctttaagatctacgtgtcgcaggcaggtgctgccacatattttgggaaaaatctgaggcaacattta

SEQ ID NO: 153427 - DNA, 1067 bp, Cannabis sativa
  modified_base (682)..(685): a, c, t, g, unknown or other
aatatttatgtaagaattgaaaaaagaatttacattcatactattttttttttttttcaattttactgttataaaaaaaatatatattttttttttttgaatactatgtacaattttcttatatttttttttttacttttgagctacaacccaatcactatatatatatatataaatatatatataaataaataaacagaaatttaaatacttaaagtaatgttgtcactatactgccacaaaagtgaaagttttttttctcttttctttccttgaaatattagtttattttaatttttttttttttaaatatgggcaagcccacgtgatccaactttttgctgagttttatgccctaaataaaagtcatttcaatataatcagggataaaatatatttacactttgaataagtgttatgtcatttctagggcattggtatgctagtatcgaatgtatggggtgtacatcagattagaccgatattgaacttaaataagatatcataaacttactgttacatctttctaagtcaatatcaccgattgattttaggttaatagatcttaatcctgagatgtttaggttcgatctcaattgtattatttatgttcttagagttgtttgtgaaagctaaccaatagttcgagctaattaatacttacatcttgggaacatgatannnnaattgagtaggagcgctaaccatagatatggaatctatagtttctataagtatttagaagtgaaacaatgatttcctttgagcttggcttaatagagataaatgactgagatctcattttaataattaaattagtttaatgaaatatcatttataggtagctaagtgttttaaggatgaaatacattgaagggtagaacggtaaatttgcccctattcgatgtagatcatctatggaggatctttgactatttggattagaaagatggataattcatagtgtatctatatcttggtacatataaagtgttctttatagttaatagtgcaatttcgaatctattattgtaaatagacgtgtaagcgtaacacgtaggtctatg

SEQ ID NO: 153428 - DNA, 785 bp, Cannabis sativa
atactatctcaaatttaaatttaagttggtcaattaaaatttaagatagtttttaggatatttattttataattcaatttctatttgaattatataatggacacatgatatttagggacacgattttgtcttgttaatgtatttaggggtatatattccgtaatgtaccctgaccgttagatagataatatgagggcaagggttaatataggggtatttggaaagaaataaatgggtatccaattcactttttgtaataaaaaatagtaaaattgacatgaccaccattagtcatatcacccttaaccgtcctcctctcttcttcttcttccttcttccttcttcactcatcaccctcttcatttttcagttttcttttagattagggcaaaactctttagtttctattttcgttttagattaagtaaaactctcactttgtattttcgtttcgtgtacatactctgagggaggaagtgttagtagttcattgtggtgtacattgttcataatgtgacattgatttggttctcacagtcgtgggtctcgacagctatttctacgagtaagtttgtccaattcttcttttcatgcttttcgttcttcactgtgggtaataaaaaatcatatcttttttgaaagaaatgtagtgtagtccattttcgtgtactccattgatacaagtggtgcagtttgattaagttggtttttctctcagttatcgacgattttatctccggtagttaccgtttctctattgaggtctctttctctctctctctctc

SEQ ID NO: 153429 - DNA, 502 bp, Cannabis sativa
ttttcaaattcttttccatgatcactcctaatattgaaaaatcttaccaatgttacaatctttttcaactattaattttaaacacaaagattagaaagcctcaaaagtgtcagactattctcccaaaaaatctacctatgaaaaatgagaaaatcaacacacataaaaatatacctcttatcattcaagctttaaacctcaattggacccattagatccatgtgaaaaagctcaaggactctggaagtattcacatcaggaacacttttgtgagaaatttttaattgtttaccaagctgacatggtctacatttttccatagattcttcacctaatttaggtaatactcaaacaaattcttgcatttgaaaatcttttaaaatttttgaaatgaatatttcgaagtttttcatgccataaatcagcagtgttatcattggcagaatgacaattagtatacgtagtgagagtgtaacatttatcactaaatttgagcccttgc

SEQ ID NO: 153430 - DNA, 506 bp, Cannabis sativa
agcaataatatgattctatttccaatagtacaacactccatgatgcattaagatatatataatttaactaattaataataaaagtgttctttattagtaacttttgggtaaagaaacgaacataattaactgtcataactgtcaagtcaataaccgttaatagaagaaaggaaatggtatatgtacacttaatcaagattctaataattaagctatgatgacaaaaagaaaatatattattaggtttcagtgatgtttagtaatggttgattagtaattttgtataatatataattattaaattaaattataagacaccaaatattattgtaataaatgacagtgttagatggtactgccctttagcctttctctaattataattgctaaaaaaagagattattttaaaaaaaaatacaaaaacaacaaaaaaagaattacaaaagtacggtttgtatagagtttttaatattttttacggttatttagattttatttacataaaa

SEQ ID NO: 153431 - DNA, 534 bp, Cannabis sativa
ttttgctcaatctcgctggaattaatagttgttttccggctgtcctgatgttggtgtggtggttctgtctatgagtgtggaagatggaggcttcatattttttttggtgtttacagtataaaataaaaaagggggaggacagtataaatgtaatttctaccgtgtgatagtaaaattaaaaaattttacccaaaatatagtatttttgtaaaaaccccaaaaataaaagaaaagctacccaaaatatgagaaaattttaagagtttacttttttatagcataaataaataaagctaagtggttatgggtttttttattttctttttacatttatatggttttttttttgccatatttttgtaaaaaaaagtagaaatcccatatttgtaaaacaacaataaattttaccggaaaactcgccgacatcgaaaaagtcactggaaaagtcacaggcgccgaaaaagtcaccggaaaagtcaatgtggccggaaagtcaacgaaaaagtcaacatcgctagaaaagtcactggaaaa

SEQ ID NO: 153432 - DNA, 622 bp, Cannabis sativa
  modified_base (593)..(596): a, c, t, g, unknown or other
gtccccacttcaagcctccatttggccccttacacccacagaataatggctcttatacatgagtgtatcactttagctgcttcctggactgacaactaaccctagagaccaaactaagcaattctaacgtgcttttctctaactcggatgcttcatggtgaaactccccaaatgaaatcactctaggtcaaaaatacttagccatggagtttcttcatgacgggctaccaaaacaagatgtgtcttgctaatataggtggtcccaagcaatccattcaagtcctcaaccattatgtagttccacgcatacataatctctcaatcactacatacgacccttcccccaagcgacgtgggattgtacagttcttggtctttccttcgtagatcacagggctctgattgtcacaacttgactcatgcctcttgtagtgaatagatccacccatacaatcgccaccttcaattcatctagggtgtcaaacaatactcataaattgtcccacttatactaacactagatcacttttattcaaaaaattccattctacaaatcaattagatggatatcttgttaggttttatgccctaannnnaactccatttcaatgtaatctatttt

SEQ ID NO: 153433 - DNA, 524 bp, Cannabis sativa
gggattctttcaaatgtcatgtttagcttatggtttcttaaaggtcgttcgttatacccacacttttcaagcccaaacgtgaggatggtgtattagagttagtcctacattgctaatctgtgtaaataaattgtcatatataagatgaatgagttactcctcccattgtcaattaattttgcgataaaacatcattcatcttatcataaattctaacaatgtaaaagtaaactcttctacattttcttatatatatgaaaaaaccccaaataaataacgtatgcaaaacttatttattctttcttcttccgaatttgctaaatagtagcgttcgaaacacaatttgaatggtttgattgtgtatttagtattatttggacacgttgagaaatcaaaaattgttcacccatgtataattttttttaaacaacaacccatatataaattatgagggaaaattctacaatacacccccttacaatggatatattgatgtacccctatctgttttagcatccgaaata

SEQ ID NO: 153434 - DNA, 962 bp, Cannabis sativa
aacttggaaggggatcattcctccacttgccatttttcttcacaaacttgactctggtagtactttgttagataataagacgaattttggagagaatacttaaatggaaaaagctatattttatatctcaacatgtgtaatttttgacttggtacaaaatgataggattacatctctatttatacgactctatggactaatcaagaaacattattaaatgactagcttctatatttttctacataattcccactactaacacaagtgaaagataattctagaaaattcaagagtaaacaaacaagaaaactctagacaatttagtaaataagaatattctaaaaactttattaacagcaaaaaaaaaaaattagaaattaattatattaaatcaagtttaatattttaacaatgaataactaaagccttaagattaaataaccgtggactttcctaagcacttgtttaatatctatctcatggtaaaattagaaaatatacttattaatatccaattctttgatacaaacccctcggtcaggcttccatagagcagccaaagtctgctacatcgatggaaaatcccaccctatcattgataaactagccaaccagagatcatcatgcataaaaaaataatctcctcactaattgtgttgccaatcataggaagctcatcatcctcatcttccaacgtgatatcaacaatattcttaattgaagaacatctcaacgccatgcccaccaataaaacaaagaaaaaccaaactcagacctataagaaaaaataaaacttttgataaaacaccgtaacgatattaatttattataaagtactccttgattgaaatttatataaaaaaatatatactaagaattttttgtaaaatctatatatatatatatatatatttgtatatatactagcaaaaaactacgtgcgaggcacgtatattaaattt

SEQ ID NO: 153435 - DNA, 650 bp, Cannabis sativa
ctgaaacgtattttctcaacatagagacatgaaatacgttatgaacgctcaccagagctcaccacccccaactcaaaattagaaaatgtcctcaatgtcacaaattatgaaatgaaaaagatagggaacagagtacacctgactggcgatatgcatggggcgagagcggagataacttgataatggcaactcaaaacaacatagaaaaacaaaaacataaaataaaaacataaagataaaataaatactatagcatatataggaaaaacaaacattcagactgtataatctaggtcctcaagaaggacctcctcaacaaagctcatactctcaatgtaatttttcagtctctagccattgacttgaaaagtcctcccatcggttgggtcctcgacctcgaccagtccacctggatctcaacttaccacgtggagatgcaaacgagaatcgtacaaatgtactttctgatttggctcaaaatgttttctcaggatctgtttatcgtgagcaactttcaacttttctttgtagatcctggaattatcgtaagcatcattttttaactcctcaatttcagataattggagttttcgattcatacctgccgcacttagatcgaagttcagggccttgatagcccaataagcttt

SEQ ID NO: 153436 - DNA, 540 bp, Cannabis sativa
aaaaaaaattctttaagtgaaaaaaaaaattacaataagtaattacacttagtagaataaaatgtcattttttttatttgccttgtttataatatataatgcattatctcagtactctaagtgttctcaaaaaaataagaaaaaaaatcctgtttcaagttttgaagttttgaaaggaaaaatctcttatagagctgaaagtgaagcccattggactacaagcctataacactttcaggggccgttagtggtggcccatgtcccagattgtattggaaatacactgtaatgaataatgattgacctcctacgcagtccactatgcataatccaaaaaagagaaaagaataattatttttctttttttttttctacacataataacttaatattaattttataatataaataagtataatataaatataggaatatgattttgtcccgacatgagatggatcttctgctttttaatcctaattacccttaaatcaatctcagccttcagatcaaatcacttcctcatctgacggctgccgt

SEQ ID NO: 153437 - DNA, 543 bp, Cannabis sativa
gcccaagatgcgtgacttattcgcaggttgcgactttagttggactccttgaaatggtgggtgtctcctcgtcacctcagggtcatgccgaaagacatatgtcgctgaggttaccaggacactctttaccatttttgggatgtttttctattcgcatatttagtattcgctctactcgcatattgatggggtggtcagtattcgcgaggatgcggaccattctctcaatgcgattttttagtttatatgcgggcgagatcacttattttgttttttacacattcaccacgctaaaaagatcttctatctttcagatgagcaacctctcggatagtcagctgcttggctcgggaggcgatgcatttgacggtgacgaggaccagagggaggatagctttatcccgacttcaatcttagaagaggagaccgcacctgtcgtaggtatagaattaggtccgatgtctttcgcagacatcgagaaaatggtgcaggagctcgctgaaccaggggccatcgaggttcgagacaacgagtctatggtgt

SEQ ID NO: 153438 - DNA, 558 bp, Cannabis sativa
atcaaatttgtcagaattaatagattagattataacaacacaagcatagaaagtgtctccacaaaatagcaagcaaagtaggcgtctccacaagtatatatagttatgcgagaccatgtcgtgaaccatggttagttatgataggttcacatagaaaacaatgcatatagataaattttagctaaaaaataattctctaccacaaaactaattgaatcaaccaatgacaaaaatcaatagcatactcaaaacccactaattgtttttgaaattaagcaacaaaatctcatttcagatattaaacccaaaaccaatttgaaaaattaaatcccaaaacctaataaaagctaagaataaattttctcaaacaaaaatcctaaaatcaaaataaaatacaagaaaaaatcatacctgtaatagtaaagatatctttcacactaagaaaccattctcatgtcatgctattctcattttttcattttcaaatctgagtgaagaaataagagaaaatttgagaaataaggagaaagagaggcgatatatatatatatatataga

SEQ ID NO: 153439 - DNA, 654 bp, Cannabis sativa
gtcgacaattagagtggtaatttctcgtatgaacaattatcttatatacatttatagggctcgtttggtacaccgtattgtattgtattttattgtgttggatcgggttgtattgtattgtattgtattagtattaattatttaatacaatacaatgtttggtattgacttgtattagttgattgtgtaaagctataatatattttcaatacactcgatcccaactacgggttcgggttcaggtccgggtcttggtcccgagtcccaggtccgggtccgggtcccgggtctgggtctgggtctgggtctgggttcgggtccgggtccgggtcgaagattgatgttgatcctacattctttgtaaatattataatataagctaatacagaccatttattatgtattaaacaatacaacatacattgtattaaaaaatttggtcgtaataattaatacaatatattactttatccaaacataatgttatttattatttaatacaacatgacctttatacggcgtactaaacgagcccataatgtattgcaattgtattattatacgaatcaatatatatatatggatgatttcttaatgggtaatacccattaatgggtattaaaaaaattgatgaggtggcaatttagtgacttg

SEQ ID NO: 153440 - DNA, 521 bp, Cannabis sativa
gtagttgaacttttattgtacatactgtaatcactaaaaaccactgatccttttgttctaataagtcatcttaaggatgaaccaacaaactttcttaaaggacgaatggttcaatatatatgttgtttagcaattgtaagcaattactaaataacataacttattagaattttatcaatgacttgtggattattaatgattatttatggattctcaataaccattaaatgtaacggttgttgtgatcataattaatctaatactttgggtagaagtttgataaaacaaatgatcttttttagagactagattcctagatcgatcactcccactgatcaagttaatattcttaattccacaattctagtgttgtgagatggataataaagtatgttacccttataccttataccatttacgatgaaatgatcatttatggtatttgggcccagttctttcatttggaaattgtactctaactgtatatgggtatttttaaaatgtgtacatatcataaagtc

SEQ ID NO: 153441 - DNA, 646 bp, Cannabis sativa
ttgcttctctcactagatgaaccattaaatgtatcatgatgtcgaaaaaagatggcagaaaaaactttttgaggttgcacaatgttttgcatgttcatataatgcatctaagttatccatttctaattccttcctacacaacttattaaagaaaatgcaaacatgtgtcaaacactctcgaacattttttgacaagactgatcttatggcgattgaagcagatattgcattaacacatgacaattatgtgatttcatacccattagtttcaattcagcctcatttaacaagtttttgatgtcagatgagtaaccattaggtactttcatatttgaaaatgatttgcaaaccatttattttcctttttagacaaagtgaaacaagcaagaggcaaatataatcgttcacctttcttttcaggtgccagagattttcatatacccatttcagcgagatataaaacaactatttaaaccatccttagttttgctacgaatatcaagttaggtaccgacaatactctcacacacatttttttcaatatacatgacatccaaacaatatcgaatcagtaaacttttccaatatggaagacaaaaaaagattgactttctttataaacaaccatttgttttcttatttattt

SEQ ID NO: 153442 - DNA, 612 bp, Cannabis sativa
  modified_base (70)..(78): a, c, t, g, unknown or other
gatagattaacatataatcaacattaagcaataatctaaatgtcacaaaggctatgcaaatactttcgtnnnnnnnnnaaacctagtttatccaattttagcgttcccaattcttactttttcagattttgaattgggattataaagcatgtaaaaggtgatcaatttttaacatgtaattaaacacaaatttggataaattcacaatcaataaaggagaaataacaattatcattaactaaaactaatttcaatcaacattcatcatctctccaaatagaagtttagttcataaaatccataataacatacatagtcaaaactaaaatagaaattaacatataaattaagagtttaagaaagaattagttggtgattgcatttcggatcgccaccattgcttcttctgcctcctgtccttctaaaacacgagcctcttaaatagaaattagggttgctacatctgaaaaagtcaaaaactggccaaaaatttcgtgtttcgcccctggtcgcgactatgtagtcgcgaccataggcaaaatataaaaataaactagctgcctggcctcctagtcgcgaccatgaaaaagggtcgcgaccatggaaagtggt

SEQ ID NO: 153443 - DNA, 571 bp, Cannabis sativa
  modified_base (137)..(143): a, c, t, g, unknown or other
aaaagttcataatcaattcataccgcatacgatacgaccatatccataaccgaaattcttaagtggtgtttggttgggaggaatgaaaatatagaaatatgaatgtgaataggaataggaatgaaataaaatttaannnnnnnaaaaaaaaattgataaaaaaaatcttaaattttttcccatcatctattaaaatggtctttccttctagttcaagatggaatagtcattcgaccaaaatggtgaaaaagttattctattgaaaatacattcttatactttaatgacatatttagtttgttgtaatgggaatcgtaatgaaatcaatttaccattacaatgtttgctttgcttttaaaaatgatgtaatgggattacattgtaatcataattacagaagaagattttcagttgggaaaacaagttcctctctaaagcggggaaagaggtgttgatcaagtctgtggctcaggctctttcaagctatgctatgagtgtgtttctcttaaccaaagaaatttgctctagtctagaaggtttaatggctaaattttggtggaatactcaagct

SEQ ID NO: 153444 - DNA, 727 bp, Cannabis sativa
tgtttgtacgaaaagaggaagcaatgaaatagataaagttgttaaagactggctcgggaaataaacccagcactgtctcaacaagcactgtctcgatgaaggctgacaattgaggaggctttagcactaagagaaaagatgaccctaagaaatcagccaaagataacaaaaaacagaagaagcacgataagtacgtgtcaatttacactatttacaccaagtttaatgaaactcgagaaaatatgttcttcacacatgatcacagggttgcatttcgcaagcctgagcccatgaggtacatgcgaggcacaaacgagatgtaacaaaattttgtagatttcacaaggacatagggcgtacaacggatgaatttcgtcaattgaaagacaagatagagagccttatctcgcgtggttactttcaacagtatgtaaagcgacaaggtaatggacaaaactagccaaatctgcccaataacccaagcaaccaaatattacaacctcctccaattgaaggagagaacattttggttatcttgggagggccacatctcgcttgagaaagtagcaacgcccaaaagaggtatgtcaaggaaatcaagaacgagaagtcagctttcgctcaagaacctccaattttgtttttggaagaagaaacaaagcacgtgagatacccacacgtcgacgcactcgtgattacaatctagctcgccaacaagagaataaaa

SEQ ID NO: 153445 - DNA, 538 bp, Cannabis sativa
  modified_base (502)..(511): a, c, t, g, unknown or other
gtaaaaaattatttttgttttgtaaaaaaatgacaaaattaaagttagtatactatgtaaatttcccgagataaatctaaggcaacgcatcctgagataagcccaaaaggctcaaattcgagataagccaagaccataaattaaccgatatggctaaaaagtcttccaacggaagaagcatgagtcagatcagaggaatgacgaatacccagaacaacactactcaagtcgggggaaaggaaaatttgctcaaaaccaagataggacaggctcaaccttacgtcgaaaaaagccgaggacgatctcggattaaagaagggaaagcctaacccttagacgagataaaatgttccattcgaaaaaagaccgccttaaacagagaactacatcgaataagacaataacatggtctaaaaaggaaataaacaaaattcagataatcaatcacagctaggaaggacgcgtgtgttgggttttgtgctctaaataaaactcatttcannnnnnnnnnatttactagttaataaagatcataaat

SEQ ID NO: 153446 - DNA, 587 bp, Cannabis sativa
tcaccatacattcccgtcatccgccaatgaccttgatcaaaaccacacatgaccacatcaatgtaagacaccccatactctagaacttggacatcctcctcatcccgccacaaaagagcaaccccaccactcttcccttgacaatctacggccaaagctccctcaaacccaatcgccacccgaaccttctccaccacctctttcttagcaagtgtttcacataaaaataaaaaattgggcttcttttggaccacaagatccttcaagaattgttgagcccatgggttcccaagcccatggcatttccaagagataacactcatgatgatgggtgggcctgcacaccaaggcccacctgtgaatcgttttttgtcccaacaagcccatcatctccacttacactcttagccgaagctaccccttcaccatgcagtgccacgtcaccatgcactacacccatccttgtacgtcgcctcttgctctccaacaaaacaaccaaatcttcatcatcattactctcctcatcagaagccaaactttccatacatattactttcttcttttgcccactttccatacatatttct

SEQ ID NO: 153447 - DNA, 1692 bp, Cannabis sativa
caatttttttaagtataacataaaattttttgattaaatattatttttcgttataataaaaaattatttgtaacaaaaatattattttttaatataaattataattaataattaagttattgcaaattgtaagttttataatttatatttttagctaaagattttttaataataatataagaatattgataatttataattatttgtaacactttttctgtttttagtgataagtatattttgacaaaataattttttttgtagtaacttttatttcgtacgaattatgtttatattttgaattccatatcaatatattactggcagtggcattttatataggtgtgtattgaccttcatatgtaatgtataaatatattagtattccagtattaaggaatctcatttatataaacgtattttttttatgaaattatatagatattgttaatctcaaacacaaattatgagtatttgaaacacaaaagattgtacactaatttttatcactcataatcatcaaaccaagatccaagtatttatttagagcattcaaaatatataataagacatatctcccattggtgcatccatgtgagccatctagctaagtctaagaatctccaacaagaatcaatccaatctcaagactagagaggagcacaatgtggagctgtcccctcttctctacctattaccattaacctcttctttacataagacatatatatatatatctcatacccttataaccctaaagggttattcactaattgggcttaagtggcgcaataatgatatactataatattatgggtcaattatagttttaagggtgctctcatgtgcctctaacataatatacaattattaaccatctcattatggtagaaaatgaatattgggcacatagttaatgattgtgtttatggtattaagttcatgattatattagtccacaataataattctaacattctcccacttggacaatataatcaaccaccataacattgtctatcacacatataaggtaaccaattaagacgtacataatatcatatcgacatgatacatatatatattatgtatgaattgaccttgaagacatttatccattaaaaatcaaactaaacatgcatgaggtacaacaaaattaagactatgcgcattcatctccttttatacctgtcacttcaataaacaacacatatatgcatacatatgtcaacaataactagaagtgactacaatatcattatgcatgttcaaaacacaaatcataagcattccatacaagatactagaatatctgatacataataataaaactcccactgagctcaacaagctaggctccgaacaatcccatttgagcaacgtgttagtgggtctgctaacatgccagtgctaggcgtgtattcaatagaaataagagactttgtaactttttctttgacaaaatagtactttttgtcaatgtgtttagagcgggaagtacttctgatatttttagagaaaactactgctgcggaattatcacaatacaatttcagcggtctcgagatagagtccataacacccaatgcggaaatgaagttccgaatccatattgcttgacatgtagccttataacacgccatgtactctgcctccattgttgaggatgttgtgagtgtctgtttgacactt

SEQ ID NO: 153448 - DNA, 967 bp, Cannabis sativa
  modified_base (612)..(615): a, c, t, g, unknown or other
aatataagcaccaccgcgcataattctacgtgctaactactgtcttacctgatgtcctgcaattaaagagattccaaatccccagttgctcctgactagatgtcgataatcctagtcaaaaattctgagattttcacacatagggctaaaccctgcattccacattcattaaatatattccattttcatttacttaaaatccactctttaatcaattatcaaataaaggtcaaaagaccaaattgccccctaaggccaaataaagcctatacataaatcaagggaaaaaatatcctttcacacccattaaaactcaaatatattttcagattatacatcaataaataaaatgccaataattcaattccaattacattttgggcccgaacccagttcggcccgaaatacccgattgtgactatattgcgccaacgtgtcagaacacacctgaaaaagacaacacaggcatactatataataatatagtcccataggcacgttaataaattaatttcattattttacccttctcgggtcaaaattattaaaatgaccctagctcaccaacggggtcttaacatagcataactcatataaattctcatatattannnnatataataatataattcctcaatattacataattatctaattagggttttgctaatccatttcttaaacttagggtattacaattaccccctccttatagaaattttgtcccgaaatttacctgaacaactccagatatttctgctgcatatccgtctcgagttccaaggttgcctcttccactttactatttctccattatacttttactagtgcaatcatcttgtttctcaagactttctctattctatcaagcatcttcactggtggttcctcatatgacaaatttggctgaagttccaatgcttcataacttaggatatgggatgagtctgagacatacttccgaagc

SEQ ID NO: 153449 - DNA, 528 bp, Cannabis sativa
tatgtctgccatagtccacccaattgctcttttatgtttcttcaacacttctagcaacaaaccttcagcttcagcttctaaccatgataaaataattactggcagcatttcattctcccccaaataggcatatttgaggtgacttggcaagggtttcagctctaactttggtggttcttggatggaatgttttggaggcttgaaatggctttccttcaactctaaaggttcaaaaggtctcttgaatttagggaaaggctccattggctcaacccacacaacttgggtttcttcatcttcactcaaagcttcaagctcttcaagagaacttatcaccctttcatccttccacacttccttgtgaaaacttttagccacaatggaatcagttacactcaaacgcgaccattcttcaatctcatccacgaatctcatagcattgaacacattaaaagtgactttttgatcattcaccctcatagtgagttccccattttgcacatcgatcaaggttcttccggtagcaag

SEQ ID NO: 153450 - DNA, 507 bp, Cannabis sativa
ttgtatcactttcaaataacatagaaaaaactagtataaaatataaaatttagtatacgtgccttgcacgtagtttttgctagtatatatatatatatctattgaggcccctgatttttggttgtatactctaagtccatattgttctctaactcagtcaattttttcttagaaatttatttatttggggaaaagttagatgtataaatgtgtgttgagttataaaataaataattcaaatatatgtgatctattttagaataaagtttatgattgtcatgattttaatatgtggatactattgagataatttctgatttgataaagggctaaattagaaatagtaaaaaaaaataataagtgtttttttagttattaataaataggtattgatcctatccaagctatccggagccgctcacctcttttcttgggaatttggttcaagattgtatttcacttatgctttctttgccttttgttaaaatccgttttgttaaacgatca

SEQ ID NO: 153451 - DNA, 736 bp, Cannabis sativa
attaaatttatacaataacaaataaatatatataataaatataaaagtatataaataaataaatgtatttctaccgagctcggagagagagaaagggagagagagggagacggatgggtagtggtggtttgacgtatgcgacggagagtagagggagaccgacgggaggaggagtggttggaaattgatggacgagagagatgagaagaaagggagatcgagagagggaggaagacggctagagaggaggaggatggtgcggatgcctgtgtggagtttcggagacttaagattttaatttttgggtgtgggaaatgaagaagatataggtgggcatgtgggaaatagaaaaaagtaggtgggcacgtgggaaatgtggcgagaagtaggtgacgattttttaatggatccttataggtaacggttataagggtccattaaaaaattacattttattaaaaaatatcgcctattttgtttacaacgattttaaatcgtcgggaatactatatttttcccgacagttttaaataattcactactgcaaaaaaacccctttaaaggcagtttttaagccctttcagcgtcggttttggcaaaattcgctaccgacgctgatcagggcgacgctaaatggttatagacaaccgacgccataggtggcgtagtaaccgacaccatatatgagcgtttttcagtttttttaatttaaataaattatatatttattaattta

SEQ ID NO: 153452 - DNA, 845 bp, Cannabis sativa
tccatatatggacttaagcaagcttctcattcttagaataaacaatttgatgaaataatcaagacctacggctctcaccaaaacgatgatgaaccgtgtgtttaccaacacaaggacaatcaagtgatagtatttctggtcctttatgttgatgacattttgattattggtaacaatataaagaaaatcactgagatcaaggaatgtcttgaccttcaattcaaaatgaaagatctgggtgaagctgcttatgttcttggtattcagattatcaggaagttgaagaacgaatcccttgctctctctcaaatagcttacattgctaaggtgttagagagattctcagtgacaaatgccaaaggggcacaaatgccttctagatttggtagcagtctatctaaggaacagtgtcccactgatccccaagagatagaggacatgagaagggttccttatgcttcggcatttgggagtctaatatatgcaatgttatgcacgagacctgacatatgctatgcagtaggaattgtgagcaagtattagacaaaccaaggacaggaacattggactgcagttaagcatattctgaaatatttgaaaagtactaggcattatgtgttagtctacaagggttgtgctttaaatctcgtaggctataccgactcaaatttttaggcttgtcttgatgacagaaagtctacatctgggatggtttttaatcttgggcgtggaatagttgtttgaagaagcgctaagtaaactgaaatatcagactctaccatgaaggccgagtacatagctgccgctgaggttgctaaggaacttgtttggctaagaaagttctt

SEQ ID NO: 153453 - DNA, 551 bp, Cannabis sativa
tagatttatgatttagggttttctatattaaagcactttaggaatatgtttagatctgtgatttatatatttcttaagtgttttataaaccctatcagctaacaccctacaaaagttacttattggaaggtgttcaaaattatcaagattgcgggagttgctgccaaaactcatctcacttgagaagcttgtgattaaggattgtccaaaattgttgtctcttcctgatgggatggaaggcctcacttccctcacacatttggagattgaagattgtgatgcattacaggaagcatgcaaaaaaaaagtaggcccgaattggcataagattgctcatgttcccaaccgtattattggtaaagctgattgatcatcatgaggagaaggaaggaagatgtatgcatctacttttgttgttgatgtatacatacatatatacattacatacatttcacaaatccatggcagaaagaaaacagagagaatagaaggaaaagagactgaatctgttattttattgatcagctatgaaaacagatacaattaagcta

SEQ ID NO: 153454 - DNA, 798 bp, Cannabis sativa
  modified_base (401)..(411): a, c, t, g, unknown or other
ccatttatttggatgttgtcttttagtgggatattgtagaataatctcacatatttttatttgtggagctagaataagaaaaatgaaattaggagtttattttatgaataattagcaattttgttccctaaacattcgacaatactgattttggcccctaaaatatacgacttgttaagaatcctccttgaccttttacatttagagaaatttagtccttcagttaggttctgtcctattattctatttaaatgatgacgtgtttttgtcaattagcaattttgtccactaaattttgacaactatcaaatcatatccccttaaaataaaaatgggaaagatttaatattttttttcagtaaatcttaaaaaattaatatagattttttttttaaaaaaannnnnnnnnnntgaatgattgagaaaattaaaaaataaattaaaattttaaaactaattaagcaatataaaaaattatttatttttattagaaaattcatttagacattaaaaaaatatattaaaaatttaatttttgtaagaactaaattttatgggaacaaaattgagtatattttgtttttatcaaaaaaaaaaaagatttgttttaaaaaaatatatttattttagtttgatttataacttttttttttcaaaataatattatatttttttgttaaatttttaattattttttagatatgagtatatgaatataaataagtttgattttttctttaaaaaatcttagtttatttaaattatttattagaatctcaataattttagtttgatttt

SEQ ID NO: 153455 - DNA, 694 bp, Cannabis sativa
tgttgctgatttttgagtaacagcaggaccagttgcaggtgtttgaatctcagcagtagtcattgctagtgtgggaatagcatcaggagttgttgctgatttttgagtaacagcatggtcagttgcaggtttttgaatatcagcagtagtggaagctgctgtgtgagtgtcaaaaaccacagttgctggtttattaatgtcaacaggagccattgttgggggattggatgactttgaagaaaataaatagtatccaagtgatcgagattaagagatcccttgagtggaaaaatttgctcataaaagacaacatctcgagaatggaaaattttctttgtggcaaggtcgagaagtgtataggctttcattccatttgaatacccaatgaatatgcaggcatgtgcacgtggagaaaacttgtgtcttgaactggctagagatgaagcataggcaaggcacccaaaatttctaaggtggtcatatgtaggaggcttattatgcagcaattgaaaggaagttagatgctgcaataatgtagtaggcgttcgatttataaggtatacagtagtgtttctgagatatggaagattgaaaagccaaggccctagcaacatttaaaatgtgttgatgttttcgctcaacaactgagttttgttgaggcctttcaacccatgaattatacacttgaatacct

SEQ ID NO: 153456 - DNA, 779 bp, Cannabis sativa
cttatggtatttttgacaaatgttgctcaagctgtgttgtgtttgtgatagtttaattatttagtgatactccaaatcgcaaaaatcatgtaaaccacaccgcaccattttttgcggtgcggtttttgcagtttttaagtttcgcggtgcgggtgcagttcggaaaattaaaaatctgtatgtgcgaggtggtttgaaaaaatagtcaaaaactgcactacctgcaccgcaaacaccctatagggttactgaaagcttacaaattaaatatgaacttctaaattaagttttttaaaagtatgacaaaataaatatcataaaaaatatcataaaaaatcataaaaaataataaaaaagatagaaatgccataaaatatgcacaaacaaagttataccacatttatgaaaacaattatttaaaatctcatagtgtaatttctacttaaataaattataaatttatggtaaatgttatttttgtaaagtttgtgtttttaatctattttgaaccctttttttccataaatactcatcaacgatcctttattttttagtgtccaaacaaaaaaaaaaaacccataatttttaatattctcaattaaactaaaattttattattttttaaaatttagtgtaacttaaatttcatgtttatctatattaatatatggatttttaaaattttagtatagatatatttataattaaaataaataatatattaaataataatgtgggagatagtatttttgaaaaataattttattattattaaataa

SEQ ID NO: 153457 - DNA, 811 bp, Cannabis sativa
taacactacgtagtatatatatatgtatatataagtgtttattaaattgttatatttttttatcacttgttataacaaatttataatgggtaaaaattttatttttaaatttaaattaattataattagttatatagttaaaataaattaattttttaattgaaatatttaataagtctatttaataattaatatttataaatatttttattttttaaaaaataaattactattaaattctggtaatttattaattatgtttaaattaattatagccgttaataataatagaacgataaaaaaatgaatggttgttttctaacaaaatatttacgagaatcatttaatatattattttttttataatttaaatttatttttacgtaaatttaggttacgatttaaactatgttaataattatgtatatttcataaaaacttccaacatttatgaggagtaatgagtgtgagcaagagagcaacatggatagaaggatggcatgttaggacgcgcgtattggagcgtgtgtaaagtacaaatatgcttatttctttcttggtctccgtagacgaaagaaacttggggttgatttgcttgttcaaagtccttggcttttccactgcctcactcacctcactttataagcaactctttaggcgttgatatcataactaaaaagttacttttattttgaaaaacaaaaaattattttttggtcttgtttgatcttgttttttgaaaacattttttagaaatctaagtgcatgtttggcatcataactagaaaactgttttttatttttaaaaaca

SEQ ID NO: 153458 - DNA, 500 bp, Cannabis sativa
  modified_base (439)..(442): a, c, t, g, unknown or other
tcaacatcggaatgatgaacgttctgttgtctgggggtagaacaccacttgtggatgtcatcaatcgcggagtaggtcaaggtaatgtcagacctctcaacctattccttaaaattgctggcccacaggtcggagaaacatctacaccagcagccacaacgaggcactttccacctttcactccgacggtggtgtcggagggtatcgtccaactaacaaccgattagtatactacaatccaggaccagctgtgcgccctgcaggacgaggtggatggacagaacagagcctaacgtcctcctcgagcacccactgctcgcacagaaaaccctcatgtaacccactctagatgtcgtaataaccgtattcgcagggaacgaaggaccaatctcaaaggaatcgacctgaatcaaccaacctcgagagaccaatctgcgannnntcccaaccaggagacacagatcgaggaagaccccgaacgatgcaatcctcgcagcaga

SEQ ID NO: 153459 - DNA, 574 bp, Cannabis sativa
atgaggcttttataattcacacagctgtgagtatcccacttttattgggccgagatgaatgcgtaattaaagatctacggtaaaccttatcccatagggatgtcttgatgaaaattgaaccaacttgactttgaaggcgagcagttgcttgtcatctgacttcccgaaactaatattgttttaactatgataaatatattttctaaggtggagatgatcttcctcgcatgcacgccatcttctagcaagataaacgcctcgatgtatgttatcttgactcgccaaactatctacacttagattgtataccgtgtaatatacgctaagtgtttttattgttatcttttctcttccacacagcgaggttgaggcctcgtcatgtacacgtgcacccacttggtttctcgtcaatacataagttaacagttcgtacgtttctatcttgtagaaggctattcaaccacgcgagttataaacatactttgcgaattatgtttccaacgagttgttccttgctaagtgtactttcgtttgcgtgtttgagttcttcgttcttcccagctcgacatgtgtc

SEQ ID NO: 153460 - DNA, 726 bp, Cannabis sativa
gaatcaaacaaaaattcataactcaaccattcaaccccaaactcaatgaaaccttctagacctgttctaaacatcgcaataaacaaattcaaggtggcaaaacacaacaacatgcactgaaacaaaacttgccattaaagagccaagcttgagttctaaaactcaaagcttcctcaaacctaataacagcccacaattcaagcttaattcaacataatctagcataatcaaacctttaaaaacaatactaaataactacagcaaccacagcagcaaaaacactaattcatgaaaaatttcattttcttaaaacccaagaaactaaagagaaggatacaagaaattcaccaagagcttaagatctcctaacacctgctggaaaaaacttaaaatgcaaaaagacaacccaaaccctagctggttctaggtgggttcgaaggagagagagaacttgagaaaaaatttgatttttgcttaactttgatattttgtaaaattaaatgaaataatattgattttacttaataactatcagcttgaaacacataaaatcagattttaacaaaataactcaggtctcactaaaggacaaaataaagaattgtaaaatgactattttgcccctccatactaatagccactaaaggtcactaagatgtaatttgggaaattctaatatcctaacaattctcgacattcccaatgtctaactatatcgccccgcta

SEQ ID NO: 153461 - DNA, 862 bp, Cannabis sativa
  modified_base (543)..(552): a, c, t, g, unknown or other
agggggtactccacatatggcttcttccctttgtagttattggacttcgtcttgtttctcttgtcggcttcgttgtgttggttacttggaggtttccttttgctatcaccacctccattactggcatttctggcctcccacctagccgtatacgactttcacacaacttagcttctagggctttttccagtacctcagcatacatggttgcccttacccctaacatcgttatgtcccgacttattcgggagtcgagcccttcagtaaagcgatgaatcctcagaaactcaggaggaaccatatatgtggcaaactttgctaatttgtcaaattggtgagcatactctgtagctgtagacttaccctgcctcagcttcatgaactcattaactctagttgagcgtattgcttcacggtagtatttttttgttaaaaacttgtacaaagtcagccaaggtcattgcgaccacatcccatgtttatttaataacgtcccaccagatgtgagcatcctttttcaataaactagcagcacaagctacnnnnnnnnnnttaccgagccgcatgtactcaacaataccttccattgttcttaaccattcctcagcttccattgattctgagctttggtgggtgttgcttgcggaacctttcatatattggttcccatcgaccctccggcacaggcatgtattgcaccggcaaaaatcgatgttgtccttgatcgggttgttccttacggttgtgaagctcttcatctcgcttcttaagttcttccatgagacgagcaacttcttgcaccaaatcttcttgttgtggtggcaccactacaggggcgttttggtgttcttgaccaactacc

SEQ ID NO: 153462 - DNA, 528 bp, Cannabis sativa
  modified_base (50)..(57): a, c, t, g, unknown or other
ccctacccatttgctatatggggggttgacctaattggggcattacccannnnnnnnggaggagctaagtatgcgatagtagcagtcgacttcttcactaaatggaccgaggccgagccccccatttccataacctgcaagaaagtccttgactttgtcgtcaagaacattatctgtaggttttgaattcccatgaagatagtatccgataatagaacccaatttgatgggcgacttgttcactgaattcggcgagaggaataaaattatcaaaagcttctcgtcagtatctagacctcaagcaaatggacaagtggaagctgttaataaaaccctaaaggatactatcaagaagaagctagatgcttccaaaggcaaatgggttgacgagctacctcaggtgctctgggcccacataactactgagtagattgctacggtacacactcctttctcgctagcatttggctcggaagcaatgctgcctgttgaagtgaacatattgactcacagaagagagttttataa

SEQ ID NO: 153463 - DNA, 823 bp, Cannabis sativa
gtttattgttttcaaagaagccctttttttttcttcttgcttcacttctgagaatttttatatacaactctaatttatatatttgtatttttttttattttcgtcagattgttgacgattgtggctgttcgggggggggatttgggctatttggagtggtcggcgattgaagattcttgaacttttgggattttgataattttatgatattttgttattcttttcgtagcttttttcttgggtttgtattaaattgactactatgtatttgtcaatgttttttattatcattattggttattttttataatagaaaaaatctgtacattgaaatacatattattatttttggtttaatttggtgtacaattcaattgtataggtaattattttgtgtattgtatttataaataatatgaatctattcatatagcttaaatttttttcatatattatcataatttatatctattaaaattaatattaatattcatttaaattatataaataaaatattattaaataaaagaatatttggaaaataattttaaaagtaaaaatagatatagtgacactttaggagagtggctattatctttagagtctgacaatttgggactctaaaagtctacagtgacgcgcattgagaatctctaaaaagttatagtgactgtgttgaagtgtcactaaatattacttttacagtcacccacattagtgacgcgcagtgaagtgtcactaaaaatctatagagtcacttgaagtgggtcactgaaacccatttttgtagtagtgtgtataaaaacctcatttatttagcttg

SEQ ID NO: 153464 - DNA, 713 bp, Cannabis sativa
ggctcaaaaccaattgggtaagacattaaagatcttgcgaactgataaaggtggagatatatgaatatgtagttcaaagatcatttaattgaacttggaattaaatcccaatatgctaccctgggcactccacaacaaaatggagttgtagaaagaagaaatcacactcttttagaaatggttaggtctatgcttaaatattcaagtctgtcaacatccttctaggattatgctattcagatagctaatgacattttaaatatcgttccatctaaatcaatccccaagacacatgtagaattatagaatggtcgtatacctagtttacgctattacagaatctgggggtgccctgctcatgtcttacataagaaagaaggcaagctagaagcgtgaactgaggtttgcatgtttctaggaaattttaaagagactaggggtgggctattttatagtcacaaggacaataaagtgtttgtttctacaaatgccactttccttgagaatgactatattaaaaactctaagccacaaagcaaagtagtattggaggagatgctttcagaattaactctaacaaatgttccatcatcttctactcaaataaaggatgatcccactccctcgattgaacctatgcaagttgacacaattgaggaaactaccactaatgttcctgttcagaaggtcacaactgttggatattattttac

SEQ ID NO: 153465 - DNA, 624 bp, Cannabis sativa
  modified_base (99)..(103): a, c, t, g, unknown or other
actgtcacaatcacccccttacggggtccgacgtcctcgtcgaccacacttctggctgggtcaaggctctgataccatttgtaacgtcctcgcttcaannnnncattgggcccttacacccacaaaagttgacttgatacttaacggctaggtacctacgaaagtttcagaaatataacttaggtattactactattaaaaattaaacttaagtatagagtcaaacttatgtattatgtcacaaattactctttttctttcaatatatattagtaaacaatcacttaaaaattcatcttctatcttttcacaaaatgtagttttcactatattcatagtgttgaatagataaatattctatatgcatagtgtctgaacgagcctgtgatgtgcctccaaacacggttttgtctaagcacgcgcgcgcggagaggcttcttgtccgagttgctggtgcgagagagagcaccatgctcgacaccacttagactatatttttcaaatcaacatatctctctaattttttatcagaatttagttccgtaaaaataaaagttgcttgacttttcacaaggaatccaaataaaatatttttaaaacgaaaataaaattattttcttggaa

SEQ ID NO: 153466 - DNA, 665 bp, Cannabis sativa
  modified_base (27)..(43): a, c, t, g, unknown or other
atccaacccaaaaaaaaaaaaaaaaannnnnnnnnnnnnnnnnaaaaaaagccaccaaaaattcaaaaactgatcgaagagccaaaagtcaaaaatgctacttgtgattcggtgatagtgagccaaagaaaaagagccaccaaaaatttaaaaatactgatccaaaaagtagagcaaaagaggcaattgtgaacagagatagtgtaccaaaaaagagtcgcttatgatcgagttgtccaagatggtgagcataaaataggcaccatacttaatgttacaattctcttacaccgttactaccacttccgttattaactcataaatatagacacgtggatacatttatttttattttattttaaaacttaatattcttaacatcagaaacattaggtatttatgccgcaatttaccctagaatatataagaggaatggactactcttcccattgccaattaattttaagatggaaacctcatttatcttattcccaaattttaacacttagtttgtagatgaagaacatattatttttgtagtgataatgtagttcctatcgtagtaaattgtactgagctagatttgttttaattacaatattaattaattaagttaacgtgttaatatatagtgtgatgaaaaatttagacatcatcatactaaa

SEQ ID NO: 153467 - DNA, 507 bp, Cannabis sativa
tccttggaagtattcaaagtaattttcctaagagtatttatgaaatactgggaaggacactgaatgacatggtcaaagaggtatgttttatttattaatttacattaatattttattaaaaaaattaaaaaaaaatatacatatctctattttatataaaatatggctatataacaaaatttttagtttatgaaaaattattgggtgactttttttaaataaaaaaaaaataacaaattattagatgttgtcacgtaaagcgtccgcatatatgtagttagttaaacctaaatataattaatctgtgttgcaataataataaattaattttaataattatcactatattaaatattatttattttaaaattatgatacaaaaaattaaaaactaaaataaattaacgtgacttgacttgttacatctatctagtatatatctttatatattaaaagtgtctatctaacggcattttttggtttaacattcttggtttaacagaatat

SEQ ID NO: 153468 - DNA, 661 bp, Cannabis sativa
  modified_base (34)..(45): a, c, t, g, unknown or other
  modified_base (534)..(542): a, c, t, g, unknown or other
tattaatttaaaatatgatatttaagttcaaatnnnnnnnnnnnnaatattttattttaaatttggggtttgaagatcggaaaaatccctagaaaatcgggtttgggagtgtgctgcccaggaggttgcacgtgcaacctcaagaggctgcaaatctcccattgctcgcgcggaagtgagggacagtagggtcccgtgtgcgtgaaatctcagcgttgggaggcttcgtgtgggcggatgcatgtgcagcatctcctcgggtggacacacgggttcagacaatgggttgtctgaagctaagcgcgcgtgtgtgcctggtgcactcgatgcaaccacttgacagccatgtcacccaattttccaaaattcataactttcttaatttttatcggaatcgagttccgtaaaaaagaaaattgcttaatttttcacaacgaatctaaataatatattttcaaaaaataaaaaaaaaatatttttcatggaaccaggttctgtacaacacatacattcatcatataacacataaaccannnnnnnnnatccaaatcaacacatatcatcgttttagtccatattacatgatagtaaatcattaccatggctctgaggccagttgttggaaataatttaccaggacctgtaacgtccccgcttcaag

SEQ ID NO: 153469 - DNA, 547 bp, Cannabis sativa
gggcttggacccaacccctagtgggcgtctagatcttggaatcgtaccaagacccgaacttggaagcacttccaaactacgacccaaatccaaacttggatccgagaatcgaaataagaataagaactggaataaggatcgtggaatcggaattagacctggacctaaactgaatctagacgcagaaccgaacaatgagccggacccatgctgggatcaatacccagacccagccccgaacccaaacctagacttgcaccaggacctgcgacgcaaatcccgtaacctaagacccgtgacccaggatttggtccagaatcgagacctgtaccagaacccaaacgcaaacccaaacctagacccagactgagacccggacccagacacagactgaaagttggacccagacccagactcggactcgtacaagaactcgtactcgaacccgggatggggacctagaccgatatcaggtatgggacctagacccaaactaggaccaagacctgaaccaggactaggactagaacccggattgggaatggga

SEQ ID NO: 153470 - DNA, 518 bp, Cannabis sativa
  modified_base (153)..(153): a, c, t, g, unknown or other
ctaagctaccaaaagccaagtgatggtgaaagatacatctttttgggcaatggacaattggtagatgtggaagcaattggacattttagattgttattgagaactagtttttatttgattttaaaagacacttttgttgtaccgtcttttagncggaatttagtttttgtttctttgtttgataaatttggatattgttattcatttggaaacaatcagtttactttgtctttaaattcaaatgttattggaactggttatttaaatgcttatgacaatctttctttgctagaaacaattgcatcctctaatgaaaccttgcatgtggaatcacgaggtactaaacgcaaattaaataaagaaaattcaacgtcattatggcataaacgcttaggtcatatctcaataggtagaattgagcatcttgtatctaatgacattttagagtctcttgacttcatagatcttaatgtctgtgtaggttgtgtcaaggaaaacataccaaaactaagagatta

SEQ ID NO: 153471 - DNA, 505 bp, Cannabis sativa
aaaatcccacgggcaggagagcccaccataacattcaacgacgaagatgctgtcaagataaggtttccgcacaacgactcgctggtcgtggaggtccagatatccaacaagatggtggccagaaccatgatagataatggagcctcttctaacatcttattcaagactgcatatgaaaagatggggctccagctcaaagatctaaccccctgtctcctgcctgtgtatggtttgtccggtcaaggagtcgcacctctagggccaattcgcccaccccgcactgttgggcaagctccgacgagcataactataatggcacaatttctggtattggacgtttcatcagccttcaacgtcatgctaggccggccaaccttctatgacttaaaggcggttacgtcaatattccattcatgctgaaatttccaacaaagaatggggtatggtgtctgagaggaaaccaacagattgctaaggaatgttataaccttgcagtggccaaggc

SEQ ID NO: 153472 - DNA, 715 bp, Cannabis sativa
  modified_base (50)..(66): a, c, t, g, unknown or other
ctttatatgtgtttaaattacattcttttagaaattcatatttaggatgnnnnnnnnnnnnnnnnntagtaaatctagatcctggtacaataatccccaacataccttagggcgcacaagaacccttagtcgatcgacacgaggaggagaaagtactcgtcgcaataataatcgagagagtacaggcacaagtaaaacaaaaagttactcaaggacaaggtccatgagcaggacgacgtccatgagtaggagaaaagccatgagtacgtaggacacggtccgctagcaattataaccaaccagatctacacaatcacttgaacaagaaaaaacctgatctttgccaacaactcggtccaaagcaagaggatcctatccaattgcgaacagatgagtcgacaaataagttaaggaggtatcaagttggggaacaaggaaagtagtctggatatgactcggatgaagaactcgagcgatttcatccagacatcatgattactccattcccctagggattcaaaaaccctcacgtctcgttatgaacagtgatgttacgaacaatctacgctgtattttgttccccacattgcttgttggagcaacaagtgttgggttttatgcccttaataaaactccattgcaaagtaatctttatcctttaaatatcaataaagaaacagaagtatttttcacttatttgtgtgtcatttggttc

SEQ ID NO: 153473 - DNA, 729 bp, Cannabis sativa
ctctctctctctatctatctctctctctctctctcgattgcatttaattttgacggcacaatcttttctgcatttaatgtactctcagtctttatatttctccctctttcttcatcgaatctagagagatacaccaaccgcagtttcctctctcacaagccttcccatcaccataatcattatcttcctccatcagacaacttctgtaggaatcgaagagttcgttcagaggacgattcaatcttcgagatggcccttctgctccaggtattctctttccttgtttctcttactgcttatttattttcaccatcatttccacttcctatcatcccagcttcctctcttccagatattccaacctatccttcccttccttctttcaatggcttcttcttctcgtacaccaaattcctttactgcgcttgaggatgaggaaagtctcattcgtgactttgaccacatctccttgaatcacccacctgattccaactcctttctcttgttcttcaaattccttacccaaaaatctgtcaagccttcctggattgaaaaggccatgtccgatgcttggactctacgcttcccttttcaaatctctgagtatcactcaggtctttttctttctaccttccagtgtgatggtgaccgtcgtcgtgttcttgaagaacaaccatggaactttgataagtttcttatggtcttcacacaccctgatgtttctccaac

SEQ ID NO: 153474 - DNA, 540 bp, Cannabis sativa
  modified_base (42)..(44): a, c, t, g, unknown or other
gcacaacgactacaaaataatattcccagatgtcccgagacnnnacactccaggtcgcgctgctttgacatgtacaacttcatctcagctcaagctcactcctgttcaactttcaactttcctttacctacacatggaagcataaatgtgagtcgacagactccaaaagaaaagcatataacatatcatataattttcgacttgtatttagccccccatacacctattttcaaagcttaatagatgagtaagaacgttcattactagggtatagccattataccacatacactacgtacctcattgcacgagtgttggtagggtttatttcgtaccctgagtaccattgagtgatatcccacaaacaccctgtacttctcgtacttgtgctggtatcactgtaatgtactctcaaacaatacttactataccaatgcactatgtaccttagctgtacaaatgttgatagtacaactaaaccataagcatgcatatacacttaacacatatacacactcagatattcatattacacattat

SEQ ID NO: 153475 - DNA, 615 bp, Cannabis sativa
  modified_base (280)..(281): a, c, t, g, unknown or other
acctaacctaattaattaactatattgtgtagtaactattcatgggtaatacctattaagaagtattatataacgaataacgaataatgaaatcacaaatttaaatttatatgcttaatttaactgcttaattaaaaaaatatcaaaaaatatctctttttacactatatcaaaaatatgtttatacaaaaatatataactcaaactcaactatttctcttcttatttttctttctaaaaacttttttgtttaaatttttttttttttaccgatggaacnntctcagcccatatgatataaaaaagaaataattttttaattagataaaaaaattaagcataaaaattcaaaaatttttaattttacccattcataggtaagagtgcaccatatatatacttgacagtgtataacataattaatgaagatctccaacaaattatgtgaaaattctaataatttaggatgttgattgaaacgactttgcataaaggacttttgtacatttatatatgtgtatatgatttcaataattttttattttatttttttataaatttcaatcacacatatactatttatttaattactaaaatttaatcctaagattaaaa

SEQ ID NO: 153476 - DNA, 654 bp, Cannabis sativa
  modified_base (65)..(68): a, c, t, g, unknown or other
tagtcacaacataagaatcatgatctataattagtcacaattttttcacttttagtcacaagttnnnntgtgactaaaaataagattttttgtagtgcattattctattatataataatatatacaacttttttttttttttgaataaataatatatacaacttaatatataacaacaatagacacgaagtctattcaattttttttttttaatttattttaatattatgttacattcttaatgcagaagaagaggtggcactttgtgtgagaatctgtgagaaaaaatgcaatatatctaaagaagacggactcagaagttaaattgagagatacatatatttttatgtaagagaggggatagtttttattttgtaaaagaaggggagcttactttatttttctacatgcaataatatatgttaaaaattgatataaccatatatcttaataatatgaaatatttttaagtaaaaaaaaaaataacaagaaaatttgggttcaataattaaggtacttataataaatacatgtctaattatgaaatctaatattttgtaaagaaatattacctttaattacaaatatatatatgttataattaattaaaatataatttttaattttccattttttttgaagaatgccatctct

SEQ ID NO: 153477 - DNA, 762 bp, Cannabis sativa
aaaacatcaaatacaaaattaaaagctcattttaaattgaacttttattcaattcaacaattaaaagtctatcatgtaaaagaagggtataaatatcactattaaaaaatatatcatagatatcaaaaaagtttaatcatattattcaaaataagaagaaaatagtcttttaattgtagattttttttaattactgtagtagtaattaacttaatttcttttatatataagttataatgaataaaataataaaatttgaaattcataatttatctgagtaaagaacaaatttaaaatttaaaatttatgacataccttagttttgtattgtatgtagagtgcaggctgacgagtggatctttcatgtcaattcaaaattataatcaattaataaattatatatatacacacactatttttagtatgcatataaataatagaataacaaaaaaaaaaaaaaaaattcaatgcaaataccttttactgcagaatagtatcttgctgcaaaaattttgaattgctaaatgtgaaagggaattcaaaaaataacctaaagattaatctaatttttttgttgtcactttttgtttcttgtttacctaatgaaaagataaaaatagttgactttgaatataaatggtaatagttaaataaatataatattaaatagtaaatagttatttaaaaagaaaggaaaaaaaaagtaacttctcttttaattatatagtttgacttttttaaaagtgggtccacaaaaaaatc

SEQ ID NO: 153478 - DNA, 826 bp, Cannabis sativa
gtactttattgtttgtgttcattgcatgcttcactgttcgtctgctttttctgggtttgatgttgaattttctgggaattttcgtcttgagtttctgcgtgatacgttagattctccttttttggtgtttgagttacttttattatgcgtagtacatttttccaagggcccatcttttcttttacgtaatggccttcaagggttcagagaagacgttgtctttcttgattttcacccttttctttttcttttcttggcttattcgtaatgtcaccatttgtgggattcttgcacccgacgtttgtccaggaaaaccttctaaggctttctaattgataaccgtccggagggggcctctttccagcggttagaggacccccattcccttttttgacttagggtttggtttggggcctgactgctgaaattttcaatctttttcaaaatcaaaatgtctgcatccggttccaagtcttctcagaaaggaggaaaacgcctggccaccatggaggagatgatgaagggtcccgtggcccaggaagggtataagcctcgtgccacggggtgggaagcggccgagcttcactctaccctcacttgcccccaccatctggagcacattgtgctggtggcaggcatcaagcccgcgacttccgggacttaccaccggccgccccgggacgcggagacgcccaaccacaattatggaggcttcggagcttggagtcaaacgtacttgatgtccggggccatgcttccccttcaggattactttataaattttcttgtatttgtcggccttgcgccataccaacttattcctcaa

SEQ ID NO: 153479 - DNA, 538 bp, Cannabis sativa
ataaaaggttgctaaaatggtgtccattttagataagctgactgttctattcaatgaatgttatctttgactctcacctaaacgggacactgtataagatggttggaaaccttggaaatcatttaagattgtttgtttttttattttcacatgtcactcctacttgcttaatgcttaataatttctaaatgtgtgattttgtattaacccttatttgatttctatttattaataattgtacttttaatatgactatgaacaactcaattgtgtcactgttggctgacaacaagctctttggagctaactttgtcaaatggaaagagaatattgatattgctctcataggtaaaaactccctatgtctgttaattgaagaagctcctgagcaaccaggtgagaatgagaaaaaggcagttaaggaaaagtttgagcgttgctagaattctaaaaataaagcttgatactttatgttgtctagcgtggttcataccttgaaaacaaggttcgccaacactctcacagccgcagaaatcat

SEQ ID NO: 153480 - DNA, 730 bp, Cannabis sativa
agaactgggaaaacaggtttgcagaaatgcaaactaaaatcaatgaacaagaagaagtgattcgacagttaagacaacagggtgttcctgcgatgactattccagaaataccagtggcacctgcccctgctgtgcaagccgaaccgatggttgcaatgaaccggatggaacccatgtatgaaagcttctgcaagcaggcacctccaatttttctgggaggtccagatgttatgaaagtcgagcaatgtctaactatgatcaccaggatattgaatttcatgggcgtctctagaaatgatagagtggtctatgccacttttcaatttcaagaagatgctttagtttggtgggacatggtgtccatgatgcatgacgttaccacaatgacctgggagaagttccaggaactgtttaatgccaagtattataatgaggcagtcagaagtgccaagagaaaagaattcacccatttgacccagaaggaaaacatgagtgttactgagtataccactcaatctgatcgcttggcaaggttggcctcgggaattgtgccaaccaattttagtaaaaaagaaaaagatcaggatgggttaaatgtgaatattcgacatgatttgatcattacaactgacgacagaaccacctatgctgaaatggtggataaggcactgcgagctgagggcgcagtgggatgcatgatagagtctggtgggactccagctgttggcgg

SEQ ID NO: 153481 - DNA, 506 bp, Cannabis sativa
tgcagatagacaatatgcatgggcgtagactgagatcaagactgagctagtttgtggcatgttatgggcatgctttatgtttatgggaacactggtgctgtatgggacattatatgctgaatggttcagagaacatataccgatgggagtaagactttgtgttatcaagtttgttaaaatttagcgagttatcagaggatgcagggttgattttgagagatggacttgtgacacagtgttagtgagccgacacgagcaagagccagaaggcaaactcgtggttttgggtgattggtagatcattgcccacgtgaaaaaagcttagaggagcaagtatgcagtgggtaagtggggccttttgcatgaagtcgtggtgtgcgatagggtcggagggccaatatggaaaacttcgcaaagtgattatgtgcaagagtgcacttggtgttgtattaggtgcagttggcttgtgagtctcatccaggtgggacacatcaaattttaccctg

SEQ ID NO: 153482 - DNA, 594 bp, Cannabis sativa
  modified_base (541)..(541): a, c, t, g, unknown or other
aattcggtaactaattgtagattattttataaacaatatgttttatgaaagtaaacttgttaagaatgtcataattgtgtatatgaacctataacgtatacattgttattcaaatgttataattgggatttcaacccatcccgctatacatctctcaaatgttattgtgtttgtaaagatgtcagagacaaagttcacttacattgaaagaacaggaatgtctgatgttccccatcgcattctgaagaagcagatcaaagaaagaagaaacaagaacagagtatgttcaaaacagagagatattcaggaaaagttcaattttcattaatgaccaactgagagtttatatacactctgaattacaacagaaccaaacaaaactaacaagataaaatcaacaaactaagtaacagaaaataactaacacaactgacacaactaaccaactgtcaaaacagttagttagttaacacattcataaaagaaaaaagaaaagtaaataaacgtgtcagtatccatttaggcattttgctaaaacaancagcatgatcatcataaagagaagaagaatttatacataagtatatagatata

SEQ ID NO: 153483 - DNA, 925 bp, Cannabis sativa
  modified_base (465)..(471): a, c, t, g, unknown or other
tctgagaaggagattccagaggacattggagtttcctcagacagtgaggaaactgaactcgagccagagcctcctttgaccaaatctgcctcagctcctgctcgatccttttcagcagccaaggcttttgctgctgccaaaggcaagcagccaatgaaggaatcatctcctggtaacattcctacatctctctcctattgtcttcgtttctaatatcgtgataatgagcgtgattggaatttatatgctacccgaaagtttgagagtgaaaggaactatgatttgcatcatagagtgtatggaattgttaagttcattcaataccatcaatgggagaacactctcactagtttcaaagggtacattgcaaatattgtcaaagatttctatgctaatttatctgatgattttcttgatgataattctagactttttagaaaagtgtatgttagaggacattggttnnnnnnntctgaaaaagacatttctcaagccttgcaacttccagagaatgtcccaaatgccataatgtctatggatcgccaattgatgctcattgaactcactagtgcacgggctgaactaaaatcgggggagagtcttcgcattacacatctcacatttgctcatgcatctctcatgcgatttgctcttagcaattgggttccaaactccaacaagactatggtgtctcaagatgtggcctcattcctataccgtatcaccttcggagcatctattgacttggcctcccacattttgaaccaaattgtctcatttcgaagaggtaaaaagtcaacttttaagcttgtgttttcaaatttaatctttaaggttttgtcctcttagaaaaatgtggcccaatctcatgaaactcttgagccttcattgactggaacaccattccaaccctcggagtattttg

SEQ ID NO: 153484 - DNA, 567 bp, Cannabis sativa
  modified_base (301)..(304): a, c, t, g, unknown or other
ggtcgtgtacccagaccagaattgtgacgcggacctggacctaaatcttggacttgatcccaaacacagacatgacctagatagggatccggataagaaccttgactgggaccaagtcctagactgggatcgaaatgctgaacctagatctggaccgagatcctgcccatacccaagcttggacttgcacgcgggacatgaacttggacttggacacgaacctagaccaacatcggggtctagacctcggcacaaacccaggcacaaactcggacccaaactcaaacacccacacctagannnngacccaaagctagactcggacccgtacctaaacttgaactcagaccaggatcacaaccaaggacatagaccaagaactgaatctagacttagatcggtattataactttggactcagacccaacctagaccaagacccaggacgggaacccacacgcggagcctgatctggacctagattgaaatcggatcgaaaaccaaactcagaccaggactcgaactccgacctgaactaaaacccaaactcgaactcagaatcgcaaa

SEQ ID NO: 153485 - DNA, 557 bp, Cannabis sativa
aaacgatgcgtaaggtcaacacgttcgaccctcacgtggcccaacacaccacattacccagcaccgaacaagatccgcccgtccaggaggagggggatcttgagggagatgctgaagtccaggagataaaggaactgtacgatgtctgtcctagcagcccttccgaggcggaggaagaggaggaggctgcacctccaaattttgggggatacaacgaggctagggagccagcaaatgcagacgctgatgtcctggttgagggagtggactacctcactgaagagcttactggtgtagttcctcatagggaggcaaggtgccttaggtgccaggtgggtgagccctccgtccaaagtcattgcggcacgcttaagtgacttggaccaatctggcgatctgagcgaattggaatgttatgtctcttcctcaaaccaccgagctacaaacccaaataaggggatgtgtgcctggtcggtgctcattccaaacaaggggcgatgctgcctttgcaccctactttaggaaggtggcagacttcttctgtctttgtccgaccc

SEQ ID NO: 153486 - DNA, 772 bp, Cannabis sativa
ccagttgctcactgacctcaagaaacagccggttcatgtagtgggccaacatctccttgccctttttggcctttggaaaccctggcaaaggtggagttggtgcctgcacccgttcaggatcgctcctgactagttcagacccagctgttggtggtccagactccttggacttggcagacttaggggtagagaggtttgcagcagtcagctcctcggaaagatcaatgacctctttgaaaagactcttttcctttgaagaggaccctcaccgcccttagacttcttggccggaggtgaggagctagagtttttgcccattctcttcctcagagcatcgatcatctgccgagacatgtctgcacagaacaaaaaaattttggttagaaaacagccatcagaaaacacaaagcatgaaaatcaagaagctcaagaacaaaagaaagtaaaatgcaaggtgaccgcccgcaagagattcagaagtccatcatcacttgacatcgatcttatctcagacatgacgactttcccttttctagagaaggggggagatgtccgaacaggtgaaatgggctcccttatgcgaattgcatgttcaataggcctgggggaggccgtgagtttcttcttcctcttcagtgaagtcacctgctcgtcctcgacgtcatcttcaggatttgaaggctcctgagcatactgtttggccctggcacctcctttcaacttagcctcccccttaagttgaataagctcatcctgtaacaccctaactagc

SEQ ID NO: 153487 - DNA, 844 bp, Cannabis sativa
atatctataaaaatatctagattaatttcaaatttattaattatttaattctataagataattttaatataataattcaaattaaaaggataagtctatcttttaatttaaaatatacctatttaaccttgtaattaaataatatataaatattaaaaaaaattaacaaaattttaaaatctgaccataaataaaaataaaataattaatttaataataatctattagaatattaaatattattaatttgtaaattgatatttaaattcaaatatattaaaaataatattttatttagatttttagagttgaaatgcaaaaaattcgaaaaacattggaaaaatcccaaaaaatttgaaattttggtgaaggtgcacctacagccctcctgcgcgtgcgagagagggatttgtagggtcctccccgagtttcctcaacacctacaaggtcctgcgtgggtgagctacaacctgggtgaggcatgctcccctccttgtttgcggaacctggtgcaattgagcaccacctcgacaccacatggacctaaaacttcaaacgttcataacttttctatttttcatcggaattgagttccgtaaaaaccaaaatttcttaatttttcacaagaaatccaaataaaatattttcagaacgaaagtaaaattattttcatggaaaattttcgaaattcacatacattcatcaaataacacataaaccaacgtgaacacattcatatcaacacaataacaatattcatcgttttaaatccatattacatgaaagtaaattattaccatggctctgagccagtagttgaaaatattttacctgaatctagatt

SEQ ID NO: 153488 - DNA, 538 bp, Cannabis sativa
ggcccacgagtggaactcatgactggggattgggcaactgaccatttgcagtctgggaagtgttcatcgttggatcctcatccgtctttcccaggggaatgacattcggtgattgccaacctacagtttggtaggctcttcgtatcagcacggtagcttgccgactacgatcttcaatctctgcatggtgagcacttaatgcctccatctctctatctctccattcggcgaacatacgcctttgttcatcgaatgcgagatttactgcagcgcgtagtttgtcttgatcatgatgtagggtattattatgaccctacatgagtccgagtgcgtcacagacattttgtaattcagtggcatctccaatagtcgtctgggcgttggttccaggcgaaacagttgtgttatgaatgccctggttgggtgcagaactgttattctgagtctcttgcacaccaggcgcaatttcatctataggaactgtttcaccattccccacgttcgccggctgtccaggattaacagcaggcggaaccct

SEQ ID NO: 153489 - DNA, 596 bp, Cannabis sativa
caagtttcaattcaaccctaagaaccaaccttaacttcagtttataccccaactcagaattcattaaaacttttaccaaaatctaaactaaactcaagaagaaatcaaaggaagagtaggaagatcatacctccacttagctagcttctagggttaagattaactcaaaaatttgatgaaatggaatgaattttccttggttcctagctgcatctaaggttcggcaaaaggagaagaaaagaaaagtttgagaaaagttattttcttattttccttgccttggaagctttcttttataataggtttaaaaaaaaaataataatagactgccctagaaaggtaaaaaaagcaaaaggctagtttacccccaatgaaaaaaataaactttaaaataacctagggcatttttgtaattttgctaattccattaaaccgacattctaaaattcctaccctagttcggaatattcttaaaagaattcttccataaatgttgtgacatttctaaccaaaatcgccgggcccaatattttttaaataaattctcaataattatcccaatataatctccgtattaataaattacgctatttatt

SEQ ID NO: 153490 - DNA, 575 bp, Cannabis sativa
  modified_base (548)..(549): a, c, t, g, unknown or other
ttgaaaaaaaaaattaaaaaaaagtatatggagtaattccccttaattttattaatttttttttcttttaattatattcttaaaaatatatgtatcaaatgaaaataaattatattttaaatattatgataaaaataaaaataaaaaattatgtaaattttttttaaaaaaaaaattaaacgaatatatataattttaaaatatatatatatatatgaaaataaaattaaaataagtattgaaataaacataaaataatgtgaggaaaaaaatttaaaaaatatatattaagagtaatttttttaaaaaaaaaacatcagtttgttttattttaataataaaatgtacttatcattttatgtggtgcaaatataacttttttataatgatttatgtgtgtatgtgtttgggaatagatatttataagtataaattatatgaaatatgggaaattttaaagatttatttttttatagcataattaaataatactggattttttattttgtttacattttatggttttttatgttgggttttatgccctnnataaaactctttacaatctgattagt

SEQ ID NO: 153491 - DNA, 903 bp, Cannabis sativa
gtacagagcaaaacggaactagggtttagatagttatgccgccaaaatgtcaatttttgtggttaactgttacaaactgtaaagttcaagtggtatagctgccaatatccctattattatatatttaattatttatattatatataataaaaactaaaaagtaaaaaaaaaatccaaaatcgggttggtcgggtcattcggtttaattgggtgggttgaacctattttcaacccgcgcaattaacagattgggcagtttgtaatttttttgggttatttcggtttgtaatttttatccattttttcggtttggtttgggcgggtgacgaatttttttgtatagccttagtggcttgtagctgtacagagaactaagatcacttagttatgaataaatagttaacaacacattaaagttataaaatctttaatcaatagttgctagtacgattcattgattcacgttcttcggtgcaagtactctcgattcagattagtgatgtagtatgacattaaagtgaaggtgttgtatacaatagagattatatatgacaaggactgatatgaataaagctgattttatttaacatgacatttactataggatcgatagtatatcagcctaaatcttgagtaatcatgaacgcttgttcatgttattagtttttttgattcactcgctaaagtttctcatagaaaatgattcttacaatttctattttgagaatctaataatgtggatggctggaaacatgatctacaagtatggaatcttgactttcttataggatcgaatgttggttccctttaagtgttaattctagaactggaaaattgtgcacaaatttagatgggatctaaattatacttccactagtgaattaatggtactaaaggaagcat

SEQ ID NO: 153492 - DNA, 561 bp, Cannabis sativa
  modified_base (267)..(273): a, c, t, g, unknown or other
gatcctgccttgcagaatccaggaaacacaagggtttcgctagctgttaatcctggacagacggcgaacgtgggcaatggtgtaacacttcctatagatgaaactgggcctgatgtgcaagagactgggaataacagttctgcacccaaccagggcattcataatacgactgttttgcctggaaccaatgccctgacgactatcggagatgccactgaattacaaaatctccgtgatgctcttggactcatgcagaatcataacaannnnnnncatcatgatcaggacgaactgcatgctgcagtaaatatcgcattcgacgaataaaggagcattttcaccgaatggagggatagagagatggaggcattaagggctcaccatgaagagatcgaaaaccgtagttggtaggcttccgtgctgatacgaaaagcctatcaaactataggtcaatagccactaaatgtcattcccctgggtggaatagatgaagatccaacgatgaatacttcccagactacaaatggtcagccgcctaatccccggtcatgagttccgctc

SEQ ID NO: 153493 - DNA, 532 bp, Cannabis sativa
ctttgaatttcaagttcatagatgggcttccaagtcaggtcaataggtaattcttcctcttttcatcatatatttttttttaattgaaactagtttatgttttgttctggttatattttttgtcaggttttgttttgtttgcacagaaaccagtttttttatttgatttcatttttttttttgttttattgcagcgactgtggagtgtctgtcatcaaatttgatgaattttttattcgtggaaaaattgatgacatttaagctaagatgtcttattgtgtagcagtatatagagatgatcttgctgtgagtttatttattcatgctaggagaaaacaaattggtggttatataactgatgatgaagtgttgaaaaaggggaagaaatcaaaggataatgcaagtgttaaggcaaaggtcaaagggaaggatattccaaagggaaagggcaaaccgaaatgatttcagatgaatggatagatgtttataataattataattttttttttttttggatttatgttcctatgtt

SEQ ID NO: 153494 - DNA, 559 bp, Cannabis sativa
ctgctgctcttaaggcagaaggctgttgataatgaagctgagatcgcagcccaaaaagaacaaactaaagagatgcaagaggtgatggtcgccatgcaaaaatccatggagacagacgatatccatacacaccctaaggccatcccagcaggactcgaggaaacgccataagagtcctctccaagcactcggaagcacaagtcaagggaaccatatcctatacggtatccctctgaagaaaatcaacgaaaaaaccctacttccatcctagggagaaagaaaaaggtgtaggattcgcgaaaggttcgcttagatttcccgaaaggcaaaggtccttagaggggcaaactccaaaaaggtagtcttggccctcaggatcgagaggaccgaaagagcgtttctgtgcactaggaacccggggaaaaaggaagagggaaccgaagataccctcccatcaatttaagacaccaaatcaacgaaaagcacgatgatctgcgggatcacttggacaaaaagaaacatatgccggcggtccccgcaggaacgctgaacgaaggaa

SEQ ID NO: 153495 - DNA, 699 bp, Cannabis sativa
  modified_base (628)..(667): a, c, t, g, unknown or other
aggccgtctccttgagtcggaatggtaactctcccccatgaagctcactgttctctgttgttgtggccctcgaggtgcaggccgttgctgggtatatgattgcattgcggcagtccgatatcttgataagtagctattgtctcagggtgagtgaggttgtgcacgttgtcgtcaagtctcccttggtgcttgtctcagaaggacatagttatcacgggagacagtgcatcatctttcccatccatgtcccctaggttgaggtacctgtcgagcatggttgtctcagtagtcctctcgcccattttgagagggtcgagacttggaagacgactgggaggttcttccttctgccgtgacatctctcttggggttcgttgatgtggtgctggtgcattagtacgtggaagctcaggatgtgttattagtgatggggcgaacctgattggtgaaggagggtttcgaacatggtctcctcccctctcgtcaacaccaatatccctaggcgctggaggtggttgagatggtgggatcccatttttgtgtgttatgccccctccccacgggagcctcctcatgggggatctgtagcattttcttgtggggcagtagtgttgggttttatgccctnnnnnnnnnnnnnnnnnnnnnnnnnnnnnnnnnnnnnnnnaaagatcagaaataacatttttatgttgcatg

SEQ ID NO: 153496 - DNA, 510 bp, Cannabis sativa
ccctaattagattgggctttagcaaacaaacattggttggatacttatcctaatgcttcctccagtcatctcaattttttttggctctaatcatagagccattaacatgatgctttataattctccaccaaatctcttgaaggttaaaggggataggagattcctcttcaagaatgtttggttgactgaaccatctgggaagaggttatccttaaggcctggactcatagtgctagctctagctctcccatccaaagcctaattccatacaggaagcttgtgttgatcacctgtctaactagaagcataagtctttctttgggttcccagagaaaatagctgtaacaccctaactattttaggcatgttaacgtgatttttaactgactatgcaacaccctaatcatcaagtttattgaaaatcgtgattaattaaaattttacttaattaattaaaaacattaaaataacatacctatataaaactgagatcccttttacaaaatattt

SEQ ID NO: 153497 - DNA, 867 bp, Cannabis sativa
  modified_base (32)..(35): a, c, t, g, unknown or other
ttcattttgtgattaaaaaatttaaaaacaannnngttaccaaacgacaccttagtttattgaaaaaaaaaaactaagtaataggatacccctattataaaaagctgttttttttttttttttaatatggggttagaaaatattttattgtaaaattaatatataaaaaatgagctcatgattagccacgtggcatacacggaacaagttccgccgtatagtatacgtgactgaatcgtttcccttattattattactagtaaacatcccacgctttgcggcggatatataaaatattttaaattatatataaaaaaataaatcgtttattttaattaataataattacttagtaaaattatattaaaatttttattttactattaaaaaatttgttacataaatacttaaaatattaagtttgttactaataaataccgaaatttgaaaaatagtaccataaatcttcatttatggtttaattttttttctaatgtgtgtgctaagttctgagtttgaattttattgtgtgtgtttttaatgtttgagttttaaaattttatggggttctaatgtttgagtttgtatttatttttatagattttaagaacatgaaatttgatgttgtttctattgattattgggattgagagtttgatttttcatacgggaattaaagtttatctgttcacttcattgattgaaaaatattagtagaaagtttatggaatacttgacattaaaattatcatttcaaaaaaagacgtaaagtaggcttttgttaaaaattaattaatattctttaataaatagtaatttttctcgccgaactttgacatatactaaattgtgccccctgaacttttt

SEQ ID NO: 153498 - DNA, 773 bp, Cannabis sativa
tagttaccgaattcttaaacaaaaacatcttaaataaaactaatatttacgtggctcgctctagtatatatatatatattgattgaatagaatacgatggaaggatcacattaccctaaaaattatatttctaagtataatattaataaaatgtatacaatttaatattgtaaaaaattcacgacacaaaaatcttattattattttcttaactaccaaatcatgacacttcactttaacaataatggtcttattgttaataaataataataaaaaagagacaataatggtattattcaaattattataacacctattcacgtgttgtattaattaaatttgatgatatataatattcaattctccaaaaaaaaagttcttataattttttttattatcattattaatgattcagtgttatataaagaactgaaaatgtgagtatagtattagtcattcatcactatattcattaaattttgtacatataattgagctttcatattgtgtcattattcctaatggaaatatcaattgttactaagaacaaagaaggagagagagaagagtctattgatgaaattctggccaagcttgaaaagcttaaggatccaggatctggtaagtgttactatttttatcaaggattttggattttagatattttcttgaaaggtatacttgttagataaattaacaattaacccaagatctatttgtatataacatagaacacaatagtagtatatgataattgagtatgtgtacctgat

SEQ ID NO: 153499 - DNA, 708 bp, Cannabis sativa
  modified_base (666)..(682): a, c, t, g, unknown or other
caagcccagcaagatagtaaatattatctggtattataattaacatatcacatatacaataatgccattcgtaattgtctatttaacatagacccgcgtgttatgatcacacgcccatttatgtctacatggcatagacccacgtgttacgctcacacgtctagatacaataaggccttagaacggttcatcctggttctggttaccgagtccaacctgattatgccttgaacgcataacctaaatctcaatatatatatcacataattaatggtgccaccgcactatttgtctagtatatagacctccgtgttacactcacacgcctgtatatgtctatgtggtataggacccacgtgttacgttcacacatttatttataataagggcttagccaatgacaatgagtcttaatcgtaagcgataattgatataatatatataatatgataagataaatagataaataataaacacagagtttttaaagaggtttggccccgagcagttcgataatagcctactccccttgattcgtattgacttaagaacaaagaatgcattgattcttctcttagagctcttacaacaatatctctgagtatactctcttagatgatttttgttaggttttttgccctaaataaaaccaatttcaatataatnnnnnnnnnnnnnnnnnaaagatcaaaaataacattttatgtt

SEQ ID NO: 153500 - DNA, 508 bp, Cannabis sativa
acaacttcataacctcaaactcaagaaaaagcttaaaaacacaaactaatggtctaaggtttaccttaacttcaagaatgatcaaatccttagcttcaatccaacaaaactccaagatttgagcgtgattccctctggttttgccccaaccgaaagagaaagagagagagagtttcaagagtgtattttttttctattttttttccttttaattttgattttcctcaaagggaaaaggatttctaattaatccttgctgccctttaactttctaggtgtcacaaccacaaccagccacctaactctccccttaataaatgactaaaatacccttaagcctataacttaagcatttaaaaactaggggtaaaatggtcaatttccataaccctgcctattcccggtattttattttctccaatatatttcccatcaagaaataagattctaaacttacccgtgtgatcaatctagccatccatcgcattttccattgtcgtcgagcaaa

SEQ ID NO: 153501 - DNA, 1103 bp, Cannabis sativa
aaaaaaaaaaaaagaacatataaattaaaataactaatcatattatatacatgtcatattttaatttaaagtggatcatcttatgaaatgtaacaaattggtatattatcgaaattataattaatttaaatttactatgaactttactatataaaactattttatatctatgcttatttgttatactatataaaaactaattagtttctactgtaaacttaaaaggtaactaaaaatataattttaaaataactaatgagcaatttaaatatttacaaattttaccaataagttatagaagggttttttttaaaaaaaatttttttacaccaaaaatacaaaatgataactttattactgaaatgccactacacggttatagcaacatttatactttttatctttactttattacatttttaccacatgcacactctccccatgcatcggacacgtgcgtgacccctatcaatcaaccatcaatcacttccctctctttttttcttctttttccttttattttctatttctttttcagtttttttattttaaaaaaaattagtaacctccattgctgaatttccctatccacgatcccacctccattttccctcctctttttgttcttcattttttttttcaactcccagtaacccaatcccataaccgttttccctctttctatttttttttctcaatccgtatataaatatggatgtaacccgttcttcatcatctccttcccctgttcaatagaaaacctctaaaatgggagtgaaatccttagctaataagaacaagggtaaacgacctgttattgaggagggtgactctgattttgctcctccattatctaagtgtggacgagctcctccaaagaagaaatcgaaggtgggtgcccaagaaaaaattgctcaagatgtttctgaaaaaaatgatcatgttggtggtggtcttcaatctgaggtttgctttctgtttctttttggtttccccctttttctaatttttttttgtcttttacatttctcggttttgtatttttggattgtgctattctaggttttccattttagcatttcgtttggttttatttggatttt

SEQ ID NO: 153502 - DNA, 702 bp, Cannabis sativa
gggtttcctggggaccaaccggaattccggttcctacaggtcccccttaaccagtattccagttcagagtaggaatcaccaaaaattgccccacaaactcagtttaaccccaaacaccacaataacttccagacctgttatttagatcacatagaacatattcaaagcaacaaaacacttcaacaagcttaaaatcaagactttccattaaagctccaagtttgagttccaaaactcaaaacttggttaaactaatcaacaaccactaaaacaatctcaattcaacataatcaaaaataatttaactacagagaacacaatttaactccagcagcaagaacaacaactaaatcccaaaaacatgcatgactcactaactttaaaatcaagaaactaaaagggatttgcttgaaaccatacctagagcttgagaccacaaatttcttgcaaaaacaagcttgaatttcacaaagaaccaccaaccctagctgccctaggatttgggagagagagagagagaaagagtgaaagagagagagagagatagagcttcttctttttttttcttatttttggaaaatgggtgaaatgaaattaaagaattgttttattaaatcctttttcagccaaatactaattaataaaatcagatattaagttaaattaaaaaccactaaagacaaagcataaatgggcaaaatg

SEQ ID NO: 153503 - DNA, 722 bp, Cannabis sativa
atacaagttattccgagctataccatgagctgcttccgtcttccaaaaaagctcataaagaatctccacttcttggctgctaatttctggtggggagatacaaaagattataagaaactccattggagcacgtgggataagttatgtagacctaaggaggagggaggtcttggattccgaagcctaactgagttcaaccaagctcttttggccaaacaagggtggaggcttcttcataatcctcaatctcttcttacccgggttttgaagaatagttactatcctaattcttcttttatgaaagcaggttgtcctacgggagcttcttgtgtttggaagggaatttgttggagcagaaaaatactgaaggaaggggctagatggagggttggaaatggtagagagataaatgtgtgggaggataaatggctcccgcgaccacatggggctactctttctcaatttcccagacttccaccctaaaccaagcttcataagtttataacttgggatgggaattggaacatgggggagatcactaatcattttcacaaagatgacatcccttggatacaaggaatccccatagatttatatatggaagacactctaatttggccattcacccctaatggtcaatatattgttaaaagtgggtatagggttggaagggagatgaaccttaatcctactagatgttctaactgttaggttttatgccc

SEQ ID NO: 153504 - DNA, 793 bp, Cannabis sativa
  modified_base (66)..(80): a, c, t, g, unknown or other
aacacaaatacttagcaaaaaattggaaaaataatgaacataagaggaatatagtggttcagtcannnnnnnnnnnnnnnagtccactgttgcaaagattctccccctccattttacagcagatcactcctttatatacaaagtaagtgtcctatcatttacacaaggattgcattcattgtcaatccgtttatacattgatttacaataattaagctaaaaacgtaaacataaatgaaaacagtttccagtttaatacagcaatgtatgcaacttctctagtgcgagttggctattcatattcttgcataagctcgtaggcttaggatgcgctcgagactagtcgagtctaagatatctatgtccttgtaaattcgctttcatggacatcttattatgagtttatagaaccaagacgcgcgaatctatgtcggtttatcgaggctgttgagtcatcagaactagctcacaatatagagaatcaatctctatgttttcgcaggaggatcgcgaggatactcacatatatcttaatctatgcgggctaaagtcattccttggtcctacataatgcgagtcatacaaatacgactagacttggtcatattcgtatcatcttgctgagtctggttcaggcgaggttcatactcgaggagtctctcattgacatgtcagctttcctcggggaaatcgagtacacgtgtcctttagatcagagtctggtctcgagtttcgcgattgacagatgcggtcatgagggaaactataattgagaggcaggcgaagagatgtc

SEQ ID NO: 153505 - DNA, 527 bp, Cannabis sativa
caaaattacaaaattcagaattatgaacaaggacatggttaattaaggatctgcactacccacatataattgaactgcatatgccttcctgaatgtatttatgttgttgtcgttgagcaacattatagctgactcgttgcacttatcagcaatgtgcatttccattatcttaagcatgaatataccacaatctccgctataaagacaaatttaactacgttagcattaatttaacagtttggatttaaaggcagacatattaaataaaacttacgttctcttgttcagaggaatagtatttgcaggagctactattatactaacgccctaaataattaggcacgctacccaagttacagatgttgggatccccaaaaaaatatttacaaaatattattacaagtccatttctttcagccggcctaagaggcaaaatagagtttcaaaaacacaacaccggtagaccccaacccgcttggtctgatatggcccggacatgtacattcttcgtgttgggttttatgccc

SEQ ID NO: 153506 - DNA, 517 bp, Cannabis sativa
tgaggttattcttatttataactggaccaaattgggacttgatttttttataacaaattaaaggttattcttaaatagagtattcttaaataaagattctactctattacattttaagtccataaaatttaatttaataataaataatataaaaaaataataacaattatgagatgccacatagttatatgagttcattaattatgatataattaattaaatacatgtactgatatttgatatataggttctgaggaagaaagatcagctactgcaagaagcagaaagagggcacatcttcgaaggatattgcgagggtacattagcattcaagccaacttataagtacaatgtgggaacaaacaactacgacacaagtcacaaggtacgccctaccttgtacctacctacgtacggtacctctacaaatatatacttatatttatatttatatagtcatcatatggtacaatgcttctacaaaaattcttaaatttaaccatctaaatagtttaga

SEQ ID NO: 153507 - DNA, 566 bp, Cannabis sativa
caaaatctatataccaacaacccataacaactcataaaaaaaaaaaaaaaaaaaaaagacgacaaaattgcatattgagcaaaagaaagagtttttcaagaaaaagaaattaacttcatcatgtatcagtgaagagagatacatatttcatcattatcgttatacgtttcaacacaattttaataaataattggcaataaaacagacacggttaatttggtaaataaattgacattttggtacgtatgcgtaattaatcctaatatatattaatctcatattaatatataatttgtcacatttaaatattttaatctatattatattatatcaaagaatataataatcccccactagattaaaatttgtgacacaccattgtaacattatttaatcaatcaaatattacatatatctcccactttgattgaataaatcaaacacttttatagatatcttgcttagatgcataaaataaaatgtctttcgacttgaattttaccttagtgtagttaccacaaagtttgttgaaattttggttgccgtagcattgaaccactatttct

SEQ ID NO: 153508 - DNA, 630 bp, Cannabis sativa
  modified_base (185)..(186): a, c, t, g, unknown or other
ttaattaattttatttttcaagatacataaacttagataaaagaatattaagtactatttaggaaaaaaatatatatagttagaaaaagtgaatgcaaattacattagaaaacacattatatatttacattctatacatagtaatatataaagcaataatattcaaattatacaataaattattnnagcacatatggtaagttgtcctaacttatgttgagtgacatgagttcaatccttgtaatctccatttgatgggtttttaacacttaattttttttttctattttatttatttcatttttttgaagagttttgtctccactttatcattcttaatagggttgttcatccaatcgcactaagtgcagatttcatatttttggattcaatgtataagaaatattattgatgtcttatcacacgtcttattttattgtatacaacaattaattttttttttaaaaaaaaatctttaagaattgtcccataataacaagtttaattagcaagtagggaacataataaacgcttctagtttatagtcattatttttcctggttgtcccatgtggatcaaaccaagtaccacaagcttggttactcctagttatcacaagtttggttactc

SEQ ID NO: 153509 - DNA, 556 bp, Cannabis sativa
aacctgatcctagagtgagaagaccacgaggcagacctcgcgactcacgaactaggaggtaggagacagcttaggagaaccctcagaatgctcaggaagaacaacctggggaaactgaaggcccccctgaaaatgaacaatcaaatcatcagccagaaccttctcatagaaatgagaatagaaggcgaccagaaaccagggaacaggaaatcccacgtggaaacgagggaaatcctaagactcaacctggaacacatgggtcaccaacgaggcaccgccaacgttcttctcaaaccaatagggaaggggcacgtacaaaccccagtagggggcacataacgaaccacacccaagggagaagaacgggacgtgaagaggcaagtgttacctcgggtgcaaaagaactcacagccgatcaacgcgaggaggagaaagtactcgccgcaacaatgatcgaggaaacacaggcacgagtaagactgcaagtcactcagggacaaggtccatgagcaagacgaggtccatgagtaggacaaagtccgtgagtagaacgagg

SEQ ID NO: 153510 - DNA, 725 bp, Cannabis sativa
actaattttcataattaaaccctaattatctactaattttcaaatataagctaagcggtctttacaggtgcagagcaaaacgaaaccaggatttaagtagttataccgccaaaatttcagtttttgtggttaactgttacaaactgtaaattttcaggtagtttagccgccaatatcccatttaaaaaatattaaaatttaatataattttataatttaattatcactaaaaaataatacaatcgcacgcaaaacgcaatttgtttcctctattaaaatagatataaattaaagtccacaattttccttggcattctttttcttgcgttggtcatttggtcacctaccaaaaggaagtcctccccactaacttcttaatcttattcatagagtttcaatatctggtatattgtctttgtcttttccatatgcttctagagacgttattctagtaagctgttataagttgatgccatcactcactctatataaatatatatggaatatttgacattttattacaatctgaacatttttttttttcaactattactcggagattaataaatacatcacgtttatttttatagttgtatatttatatttatatgcattaaaatttgagtttctgtattgtcttaatttccagcgtacaactaaatatactaaattaaattaatggacagtacattaaaaatatataaatatatatatggaagaggttt

SEQ ID NO: 153511 - DNA, 889 bp, Cannabis sativa
ttgcaattcatcttcaaaaaaaaagtgttttaagaaattgtaacattaacaaagtgttattattgtaacataacttgattgaaatagaaaaaggttctattcttttcaagtgatctagatgtaagagaattgtaataataatattaataatagtgttgtgatttacaggatgttatgtttgatgggggccaagattgttgttgtagtaattaaaattaaatataaaaaatatattcaacttaaaaatcataaatcaaattaatttattttgcaacaaaattttagttgcaaaattcactatttgttatgatattttgttagtaaaaataatttttttaactatatatttgctactaattcaataactatatatatatatatatattttttaaaaatatataatttatgttaatcatatgttttaaggattaaattagtagttaatgtatattcaatatatagtaataattaatcttatgttttaaagaaactaaataattacttggtacatttaaaatattaataattgtaaaataaatattttaagactaatattttagttgtaaaagatcattaacttttactgactaactatttcgtcacaaatttcaaatttttaatgactaaataattttagtcacaaaaaattattagtcacgccactattataatttggcgccacagttttagtgactaaatattattttagtcactaaaaataacaaacagtgactaaaaaattggtcattgattttttcggttctaaataaacattgtttcatgactaaaattatttacgactaaaaattagtcacaaaatctaactattagtgactaagtcgatttggtcacaaaaaatctagtcgctgaaaacgtattttcttgtagt

SEQ ID NO: 153512 - DNA, 580 bp, Cannabis sativa
gaataggcgcatatttttaatttccaaataagcagcattagtaagttattcttgattgcgattagaccaaactagctcttggttacgaaggttgttttagtagtgtggatgccaggcaaaacaccaagagttagggtaactcggtcggatccagtggcggtcaggcagtttagattcccccaaacgtttgtggtcggagcagaggccttagaggtagggcacgaggtcgggttgatgttaactcgccgcaagttgcccaggctacccaagattaggaaaataggtttacctaaatgtaagccaagattattgagcaagacgaagagattcggtgcttgagacagcagggtactcgtgcaatccctactccagaaataccagtagctcctgctcctgctgtgtaggccgaactggtagttgaagtgaactggatgggacccctatatgaaaggttccgtaagcaagcacctccagttttcccgggaggtcccgatgtcatgaaagtcgagcaatagctgactgtgatcaccaggatcttgaattttatgggcgtcaccggtaatgatagggtggcctgtgc

SEQ ID NO: 153513 - DNA, 550 bp, Cannabis sativa
  modified_base (56)..(69): a, c, t, g, unknown or other
aagagtttcagatgaatttatacattatgtacatgtaatcatgaaataaatcatgnnnnnnnnnnnnnnttaaatgttatttctgatctatctgaaaagacattctagaacaattcccacacaacagtagcaaggaaaacacaattgaactcaacatgccattgttgagtcaagtttgagctccattaactcaaacttgctcaaccccaaaaattaaacatcaataacagtacaaacaaccttagaatatcatttaagacctaaacaagctaagcctaatcgaatttcaccaacaacacaaaaccaaaatcatcaaagtcaatcctaaacctaacaaaacttcctattaacatgtataaatccatagttgagaaagcttagggttttaccttagattaagtcttcatattaacacctactagcctctaaaattgaaagaaaactccaccctaagttggtggttcttgctggccaaacaaggaagaagaagaagagtgaaggagcccccctccccccccccttttttttttttttgaacaagaggcaacat

SEQ ID NO: 153514 - DNA, 502 bp, Cannabis sativa
ttgtagtcacaagtgtactcatctaagccaagaaggctgacaatctcaaattggcttcattcaagagaaaatcagccgatcgcaatctaaagggaagacccaacaggattttatggcgctcgaccatctcaggagtaggaattggtcttttagagaccgatgtcaacacaacaaatgaaataagtcagcgagcgcaaagccataaaaatgaaaataactcaagtttttgagataaagtttacttaagtatcttgtgaaatgcaattatgttgataggagaaaggccggttttccagaaaaaattctccttaaactctttcttatttggaaaactcactacaatcctatggtcgtttgtgtgggtcccgagataatagaagcctcatacacatcgcttccttgtggggactactttgacagagtaaagataaacaatttcctggggattgggacactcccatcctaaaatgtggtacaaaacctttagacttgcaagaattct

SEQ ID NO: 153515 - DNA, 533 bp, Cannabis sativa
accttgtcactcgtgaccaaggtagcatgtgtggcaagatgccaacaccaagccaacgtgccaacgcttctatcatgccccattccataccgtccgaacagtcttgtttgtcgcccaaggactcccatacgtccatggaccaaccctcaaggcgccatgcctccacgcatgttggcaggccctcgagacaagccaccaaactagtagcatacgctagacctctgtctctttccaacatggtccatccgtcccatgcgcgtatacaaactagcccacgaatgactacccgtgttatttcgtgttaaggctcgtggccaaggcgcaccacaacgtctctggaaagttttggccacgtcccgtgcaagcggcataccagtaagccaatggaaacgtacccgttaacttctggcagcttcttaaatgtactacttggttggcctgataatgtccatgagtactccaactcatggagacatatgagtcccctcgtggttcgcatatgcccgtcctactagtcccactgaccagtagta

SEQ ID NO: 153516 - DNA, 554 bp, Cannabis sativa
aagagaattttgacgaccaaattacgtgtttttaatcccgaaatgatccaaatgaaaaaataaagagatctatgtgggttttatgcatctaaaacacgtaaaaagttgattttaattccaataaaaatgagttgggtccaaacgtgttctttaaattttttttccagattttgatgtttattcaaatctttttcatgcacgaaatcactctataattttatatgaatgtgatattgcaataaagattcaaaatacacaccaaaaatatatatatatatatttttgaagaacgaaacttaaaactttatgtctatatatatacgtatacaatatatatcacataaaattatcaattcaatgtaaaatatatataaccatacataaatatttatatatatatgaaaggtatatatatatatatgaataaattttatgtaaatatatgtatgcatatatgaaagtatatatatatatatatatatgaacttgaatatgaacgagtatatataaaaataaattgagtacgaatatatataatcgggattatataatat

SEQ ID NO: 153517 - DNA, 621 bp, Cannabis sativa
gggtgttaataaacatacttgtgtgtagatctaaaatcctggtaaaataaatttccaacagaaagttgctttcgaaatataaacatgcaaagataagcataaaggaaattagaaacttacttaagattcgagtgtctgggttcgagcaacgtctatccaaccagtagttgtataaaggcactttggcgactttgaagccaagaaatttttcttttcgctctgaagcttacttagcaaagaagggtgatgaaatgagtttcagtgctaatgttgtggatatttataggcaagtcacaaaaagtggtaattgtctcaaagaaacctcagacgcctcagcttcctgccttgaaaatgaatataggaaatcaaaagtaatcgagtgcaaccctcagccgtggagagagaaaattggatttcaaaatattaattgtcagagcatttattaggtgaaaaccgaagggacgcccagtcaacttcacatctagtctcgaacggtcacgctcgacacgtgtccccacccaaaggcagattagctcggttgaagtctacgcgtaacctcagaggtctcgtacagacttggggggaaaatgtgatcccaaattttgcactctgacgtggcat

SEQ ID NO: 153518 - DNA, 660 bp, Cannabis sativa
  modified_base (323)..(323): a, c, t, g, unknown or other
tttatatacacatatatatattatcaaggaccacctagaagtaaagtagtctctatcttcattgcattctgacacgtgtaaccaattaggacgttccatcaacactttatacaacatgaaaaactctccagtgagagccacgattacatgaagttgtagtttagacttttccttcacatggataaggatattggtccctaactttagtgccaaacgggcttgcaaacatctaagggtattacaagaaaattgaagtaatagactgactttctattctccttcttccatttcttttaatatttgaacatagtacttgaaaatgnagagcagcaaactctccagtgatattggctataaccagaagctactactctagaatggtagtattcagatcgggtgtacttagattcccaatcctaaaaaaaataaaagaaaacactactaaaaaaatactacaacaacaccaaaaaattgaagaataacaaaaacaagcatgaaaaaaatagaacaaaaataatgaaatcacacacctctacaaccctttttccaattattttctcaaccacatctgttgattgcacaatctttaatggggatttaccctttccataaaatttaacaaaacaaaaccaaaacaacaacaatacacaccatcaaaca

SEQ ID NO: 153519 - DNA, 998 bp, Cannabis sativa
  modified_base (683)..(685): a, c, t, g, unknown or other
agggggatatctggattcttcccctagtaaccttttacttacatagtaaataggttgctgctgcttaccctcttctcgcattatagctgcactaatcgcatcgtctgagataaccaaatagagaaatagcatctctccagttattggtttctccaaaacaggaggcgtcgctagatgcctttttatgttctgaaaggcttcttcacactcttttgtccactggaacttcttattgcctcgcaatatgttgaagaactgcacacacttatcagttgactttgaaatgaatctgttaagtgcagccattcttcctgtcagggcttgtacttccttaggctttgttggtgatggaatgtctattaatgccttgattttttcgggatttgcttcaatacccctcgcgttaactatgaatcccaaaaattttcttgaggaaactccaaaggaacatttttttgggtttagcttcatgttatacttctttaatatcttgaagcattcaacgaggtctgtgatatgatctctactttttattgattttaccaacatatcatcgacgtaaacctccatattccgcccgatttggtttgcgaatatttcgtttaccaatcgctaatatgttgccccagcattcttcagtccaaacaacatgactttatagcaatagagtcccatgttggttnnnaagcttgtatgttcttgatctgggacatacatttttatcttgttatatctagaatacgcgtccataaatgtcataagctcgtgcccagcagttgcatccactaactggtcgatcctaggtagtggaaaataatattttgggcacgccttattcagatcagagaaatcaatacaagttctcgaagttctgttaggctacgggacgagaacaagattagctctccacgagggataaaacacctcgtgtataaagtcgttgaccaacaacttatccacttcctattttagtgccccttgtctctcggaatccaagg

SEQ ID NO: 153520 - DNA, 504 bp, Cannabis sativa
tatataaaactaatcgtttttagcttaaaacgtaattaaaccataccttaagttttccctcttcaaggatttgctatcccgctactaccagagtttaaattgctagatttcaggttaaaaattaaagaaaatggataaaagagaagaaaattttgttgaagaatgaggaagaaagttttgtactgtttttttcatttgatataaatatataacatatataatatatatattgtatgaactgataagttttaataatatattaaaataatattataataatataataataagataatattaataataatattattaataaaaagtttattattaatagttatcttattattttttactcactaagaaatttctatttctaaagtattttgccaacttcgagtcccctaaaaaatctcggtatttctaaaatcaatttatcctaataatcccattaatatttctatctaaaattggtgtgacattttttggccttcaatcgggtct

SEQ ID NO: 153521 - DNA, 506 bp, Cannabis sativa
ttttttttttgtaaggaaataaaaatatcattttgtgtaacagtagataatagaaattacaaaataatatttctataaaagaaaaatgctattgaatttggaatacaaaactatatgtaatattttaagtgacacattttttatttaataaattataaattttaattatatatctccaaaaaatttaaaataacaatatttttaaaagttttgtttcaatggtgcgagataggagctgccatacctgaactgaatttttcacgacgttcagagttattagctatgacgatgagagaaagcttcggcgataagagagcttcatctttttttctctttctagaactcgaaatgttttgatcgatcttcagcacaataacttcctccctatatagttcagttcaaagtccctttagcacgcgaaatccaataaaagctaatattatttaaggaataataaatgcccaaccggttacacatcttgttaaatgcccctcaatttttatttg

SEQ ID NO: 153522 - DNA, 591 bp, Cannabis sativa
atgattactactgacgacagtaccacccatgctgaaatggtggataaggcactgcgagctgagggcgcagtggagtgcactttagagtctcgggggactccagttgttggcagggctcttacccctcctggattaggctttagcaggtgaggtagtggttcggccattgatcagaaaagaaaggcatctattgcaaccagtggctcaggtcagaacaagaggttctgggggacctagggtcgaggcaaccgacagagtggcactgaaacccgatacacttacccagagttccccagttgtaaaagcaccatctgagggagtgtaaagggcaggggtgcttttagtgtggcatgtcaggcattaaaaaagggattgtccccagctcaggaccgaaaaaccaaatactgcagcgaaacccactccagcaagggttttcgtaataactcaggctgatgcagaagccagcccctctgtggtaataggtgaactcttggtcaataactcttatttctctgtgttgtttgaatctagggccactcattcctatgtggcggccagaatttttagtaaattggatagaacgcatgatag

SEQ ID NO: 153523 - DNA, 551 bp, Cannabis sativa
tagcccatcttcttatatatggcttaattctctaccatttattccatgtgggacattgtccacaataaggctataatgtgaataggagtttaaatagatcgggtctaatttgatccgtctataatctaattcgatccagatcatataatgatctgtcccgtcctgctagtttagatattcggattggatcatatctgatccaacttattcaaatcaggttcattttttttttcaaatatctaaacttataaattttttttccctaaatccaatttttttaatttaaatttgactaacgggaggaaattgttattgtaatgtgagaaagaattaatagatgtggctctaaataatttggtatgttaagtagtgataagtcacattcaaaaaaaactcatttatatattataaattttgaaatattttttttataatttttaaataataatactaagtgtacaaaaataaacgcattacgtgtacaagcagggccgaccctaaaacaaagtgggtcatagggaaaaaaatttggacccttatattaaaaaaaa

SEQ ID NO: 153524 - DNA, 540 bp, Cannabis sativa
atcgttgataagagctacggtgatctagtcgtcgcagtcgctgctgagaagaaagagagacatgtgccgttgccgtagaaagagagccgcacgggaaagggaaggcttgagtggactgacggagagggaaggctgcgatctgagaagagggaggcgcgatagaaggagagaggagagaagtgagtgagattttttagggttttttagactcgatactgggtttttcttaaatgtccgtgctttttgttttattcctttatgcattttatgagacttttattacacaatattatttgaatcaatatctagattatagtgtattaaaccaatctcactcatagtaatttgagcatttaaaaaaaataaactgtatagatacttaatgaggtctaagtaaatttaattagttttttttttttgtaaggaaagtaaatttaagagaaattacctcatatatttttttttaaaatttttttatcaaatttacggtttaagtttttaaagtagttgcagcgttagttgcagtaagagtttctatac

SEQ ID NO: 153525 - DNA, 722 bp, Cannabis sativa
tacttcattatattacatatacataatactacttgtcgcttacaatctaggctcattgtcattggccaaaagcgaggtcaacatagagctgaactcaaggattactttttatatcaaatctagtcataaacacaatggtggtacagactcgtagaggcgtggttgatccggcgaatccacagaccgtggatcctacactgcagaacccagggaacacaagggttccaccaaccacgaatctcgaaaaaccatcaactgtaggtcacggtgtgacgactcctgtgagtaaaatcgcgcctggtgtgcaagagtctgggaataccagttcagcatctaataagggcattcctaacaccgtcgttctgcccgtaaccaatgtttgaacaaacattggagacaacaccaaaatccaaaacctttgtgctactcttagagtcatgcaagctcataccaacaccctgtatcatgatcaggaggaactccgtgccgcggttacatttgaagagcagaggcgcatgttcgctgagtggagagataaagaaatggaaaagttgagggaatagcaagcagccattgacgaccaaacccggaaggccaccgtgttgatacgaaaaagcctatcaggctaccggaaaatagcctgtaaccgtcattcccttgggcgagacaaacgaagatccatcagtgaacaccttgttggacattattttaccaggatctta

SEQ ID NO: 153526 - DNA, 777 bp, Cannabis sativa
  modified_base (713)..(733): a, c, t, g, unknown or other
tagggcacaaaacctaacagttatgacctagggttggaaacggttaatactgttatgagtaattattcctgaaaccgcagataggtttcttacttgtcgattgcttcatcgaacaacgatagtgacatattcagctcgtggttaatgagtgttaaaagggtactttataaagtacctggattgtgtgtttatgatattgtgtaaatgtgtaagcatgttgatatgagattaaattgatgattattatcggctattattttattcacttttcttgctgactctctgtgactcacgggtgctttgtggtgcaggtaaagggaaggcaaaggttgagcagccatgagttcgaggtcgtagcagcaatctaaatatcaaccgcagtggcacggcccagtgaacaggatgctcaattttgatagtattttggaattgcaaagtttatgttgaaaaagcactaataaactagtttgtaatattttgaaacagggggtccccatagttctcattaattatcttttactaagaagtttttatatgcttagctttaattatcaaaaatttaattacccacacttttggtataattatatagtatttaaataagaattttacaaaagcacacacgtggcgtccatgttggacagggcgttacacctagttttacccaatttgagcctaaatattaacaacatatttttgttgggttttatgcnnnnnnnnnnnnnnnnnnnnntataatcagatttacttattattatagatcagaaataacattta

SEQ ID NO: 153527 - DNA, 915 bp, Cannabis sativa
tattcgaagggattttgaatttagctggtgaagggattcatctagcttactcaaggggatcttgagtgttgaaatcgagggatttaggtttagatctgtaattgtctaaggggaggcaagatggtcctttgtttgaggggaggattgttgagtgtacaaccaaagtcccacattggctagaaatggaaaggatcttgggtttataaggatgaatactatctctattggaatgaggtcttttgggaaggtgcccaaaaacaaatccgcgagggcttaggcccaaagcagacaatatcataccaatagaaaaatagatggtgtccgacggtccttacaatatgagtgtccaaatcacccaaataaattataccacatatactattgtatttccctttattttatttatttagtttctcattattctagttatatttttatctaaataacagttaaccccattacaataaactactgataaactctcattcaatctttctcttcatcttcttttttctttttttcttacctattttatataaattgtgttgaacactactaatctcttacatcaatactccaatagatttaaggtcaatttggcacaatggtaggtatgttgcaagaatagttgtaacaaaattatagaaaaaaattaaactgagtgtttaataaattataaattttaaagtattgtatgttgttaaaattctattacagtaataatgttataatctattttattataatcataattataataataaaaaaagtgatataattttttttttatttttttgtaaatttttaatcatttatttgttgtagtataaattatttatatgcatttaataaagaaaattataatatttttaaattatatatttttttttgagtaatgattaatctttattaaat

SEQ ID NO: 153528 - DNA, 749 bp, Cannabis sativa
aaagcataacataaaacatactaataacccgggttataagctggtgcccatacacccgatcataaccctatccctgtgtcccacacgatactaaatctagaatgttcatacgacaatactatcgactataatgtcagcctatactcaatatgctagtcatactctagccatattgatgtgacagcatcgattagtatttcagccaacatacatttatcagtaatcagtacaactctaagtatactatcattgctatcaatgtaatctaacaggcataaacaacatgtatgttaaacatgtaacaacacatgcatgccattatactaatattacctcaattccagattcaggtgtgccggtcaacttgagtggaataattgctcggcgaattacaggctcctaaataacattgataacaacatgaataagtgacacgctaaatcacaaccgggacttaggttttaaaccaaaaccctatcttctgcaacttaatatggaaataccctaaactagtagggaattaaccaaccaaaaacctgaaactaacacgaatcgacaacctgaatttgtcaggaatcccagctgcaaaaaccggttaaccctgtaaaatcggttacctggtttttcctagaaaacccaaacaagttaatagctcaaccaaattgactccaaaccttccagacctgcataatataccccaataaacattttccaagcaataaaacaactacccaagctcagaattgaaa

SEQ ID NO: 153529 - DNA, 543 bp, Cannabis sativa
aaatattttcactttttcaattaatttatttatttttgtggggtttttttaattttttgtgctataattttcaaatgaaaagaaaaataattaattttttcaatgcattttttttcctgggagctatagccccacaaccttgtgtgtgtgtctgtcactgcttaagttaatgtaaattatatgctatacttaaatagagagtgaaggtatattggacaactcactcataaaagtatgtatattttaataaaatataatatgagggtatttttgattaatggatacaaaaaataggtatttctcaacttatccttttattgttggatcacatttaatatttttaagcatagttagatctaatccaattatatattggatgttagattttactattcgatctgattcaattaattttagtcatccaatcaagatattggattggtttgtttctatctgttggatgtacatatttattggtttactttggatttattcaatattttaaacctagtattcttatagatcggattggatccatccaat

SEQ ID NO: 153530 - DNA, 654 bp, Cannabis sativa
gttaaaccaagaaatgccgttagataagcacttttaatatataaagatatatataagatttgatagctatggtaaactaataattctgataaactgatgtaggattgtaagggtttttttttttttaatactaaaaatgacaaaaaaaaagttacaaaaataatctacacttttacggatttaactttatatttttattttaaaaaaatatggttatttatattaggggtgtatatcggtcgttttggtcggtttatgctacattttattcaattcaatgtaaagatcgggttacaaaaatctaagtgcaactcgtccaattaagaaaaaaaaattaacccgtccaatgaaattgatcgatttgatcggattaacccgtccaaaccgactactaatatttttttttatttttacattcaatagttatattttagttacttgtaattatgagacaaatatagataaattgaattcaaaatttaaatcaaccaccataaaaaaacatattagtttcaactttttattttttaaatgatcatataaattatagggaaaaaaacaaaaaaatacaaaaaaggaaaaaaaattacaaaaatactttgggccggcccattaaacatttatacagtccacatacaaatatttataaaaata

SEQ ID NO: 153531 - DNA, 552 bp, Cannabis sativa
tatatatacacgtgcatagatgtaaatcaaaaaggataagcaagaggtgaattgaataaaaaaagaaggagagacgagtgctactccaaaaaaaaaagaaaaaactgaagaaaaagaagaagaaaaatggagagagttttatttgagtgttatttaggattttagtttagcattttaattttaagattggtaaaaatcaagagaaagaaaaagagaaatttgaaaagaaaagagtcttgtcacaactctaaaatgggtttttatttttatctctattttcttttaaactttataatttttgcacaatctattatgagctaattttttttttgttagaattatttgttgactaaaaattatgatttggtattttgttgttatgtttagtgagttgattttgttcattcaaaagtattttgtgtaaattgcttatttttacttgattatcattagtaagtactagctaatcttgattttgaaaaaaataggattagtggaattgttgaatgatgcatgaatatcactttgaaaaaaatgtgatttgtaaatggc

SEQ ID NO: 153532 - DNA, 582 bp, Cannabis sativa
tttcttgacgatattaccagggcgaatgctaatttttccatttgaggatagcgggtctcagcatctagcaatcgtttacttacatagtacagcgggtattgtcgtccttgatcttcgcgaattagtaccgaactaatcgcatattctgacactgctaggtaattggatgggaccttgccggtcatgggttttgataggattgggggctaccccaaatgtgtttttaaggcttaaaaaagcctcctcgcatttctcgagccattggaacttcttattgccttttataatctgaaaaaactctttgcatttatcaaaggatcgcgatataaagcagtttagagcggcgactttacctgtgaggctttcgacttcttttggcttagtcggtgatggcatttccaccaatgctctgatcttcgcggggtttgcctctattcctcgctgattaaccatgaatctgagaaatttcccagaaccgactctaaagacgcattttagagggtttagccgcattttatatcgtcgcaatatatcaaacactgcctgtaaatgggtgacatggtcttttgcatgttgagattt

SEQ ID NO: 153533 - DNA, 580 bp, Cannabis sativa
actctcaacaagttcttcaaacatattgtatgtgaacctgttgggagttgacacaggatggtaaatagaaacttaatcaggcaatgaccctcaaagacagcaacaaataaatacagcaaaggcaaagacttttttgggctgctagtatggaaatttaggtggaaacatgttggataaattcccatactatctgtctcataaagaagttacaaggaaaaataaaataagaccttttacaagcttcaacagaccattataactcttagagtagtcggttctgttttcataggcttagatctttaaagctctttacaataaagaagtaaataaaatatctcaagactctaactaactttcagctttacaaggaaatatcaacaacagttttctaactgttttctcagctcaaaacaaacacatcacaaccaacaacaacattataaataaggatcaacctgccatttgaagaaagtttttgttttcggcccagagaaaaagagttgcagtagccattttttcttaggagaatcacctcaaaaataagagagaaaaacagagagagttagagagaaatattgta

SEQ ID NO: 153534 - DNA, 796 bp, Cannabis sativa
  modified_base (441)..(449): a, c, t, g, unknown or other
tcccataatcacaacgaaccattattacttagctgagcaacatcatattttatttaaaaatatttaatttaagtactatttatatataaaaaaaaacataataatattcaaaaaaaaaaaaaaaacttttgttaattataaatttagtttaatgatactactttaattttataatacttttatctttttttagaaatattttatactttttctattttttttttcaaaaattaataatagaaaaatattttttagtaattacaatgagacgtacaatagtaattctttaaaaaatataaagccacatttaaaataagataaaaaaataagggcttttttcaattttaaccaaaaagaaaaaagtaacaatattacaaaaatacttccagctggccaaataaataaatacaactcaaataaaaaaaaaattacacaaatacnnnnnnnnnacaccttcaacccaggatccatgctttttgggcaactatcgcgcaatcattgcgcaagccaacgcaaccgaaacaaaaaagaaagagaaccaccattaatttcagcaacttcacctgagaagacgactagaatcaatcaaaacaggggttgtttcgaattcataaaaaaagtgtagaaaaactactacaaaactaaaattctaccgaaaatccagtttaatttacataaaactaatgtcctgacttcaattttcaaatccatgaaagacatatctcaaaaagtttatctagagttcccaaacaatcaaactcaagtataatccaaaaaaaattacatcaatactata

SEQ ID NO: 153535 - DNA, 554 bp, Cannabis sativa
gtcatagcttatgcctcttgtcaattgaaagactatgagtagtgctacccaactcatcacttagagcttgctgctgtagtttttgccctaaagatagggcggcattatctttacggtgaaaaatgtgagatttatactgatcatatgagtctcaagtactttatcacccagaaggatttgaacatgaggcagaggagatggctagaattggttaaagactacgactgtgaaattctgcatcaccctgggaaagccaatgttgtggctgatgctttgtgtagaaaaggtcccgggcaggtttgtaccacggttttgatagcccctcaactagcctctgaaatgattagtgcagggattgagtttgtagttgggaaattgcaaaacttaacacttcaatctgatctgttagagagaattagaaaagctcaaccaaaagatcctgatttagttatagttcgagatgaagtaatggctggtcggcctagagacttttcagtctcaaatagtggaatgttgttgtataaagctctagtttgtgttcctggtattgagga

SEQ ID NO: 153536 - DNA, 600 bp, Cannabis sativa
ttcttcttctcccgaaatttagcaatcatctccgcaggtttgggatagaagtcaagcttgatgttctggccatttgtcgactaggccatgtagacgccttcatcaaagcacttaatgcagcggctgcaggagacaggggagaggagctcatctctcttagccttctttaacgcttgatctttaaagtccttgagctccttaatctccacggctaggttggccctggacttcaagtccgcccggtgcaattcctttaaggacctcaccttggcggccatctcatctaaggcctccgtggcctcccggagctcgcatttagccttggtggtagcctcgccctctaacctcagcgcctcccggtgcctcgcctccagcctgtccctccgaaggacctcctctcggagcatcgcctccgcctggacttccctctgtttagcctcttcctcgaactttgccttagcaagagcctcctttcgctcagcctcctcctggaacgcccgcctttcagcagataggtcttgcaggatcttcacaaccttgtctatgcccccaaattcggacaagacgaagccgtggttaattatggttttggaaaggcgg

SEQ ID NO: 153537 - DNA, 737 bp, Cannabis sativa
catccataacaagaccatctcttcctttttgaaatgataatcttttggaaatagtgagcagtaagcaaaacattgctttacttcagaaagtaaatgaaaataactcaaccacaaagctggaagaattttgacttcatttctttcgtacaactcccatatatcattgtttagaatgttgttccatttctccttgctgcgggttcctcgtaagagatcaccaattgactttattgctaagggaaggcccttacacttgtcaactattttttccccaacttgtttgagatccaagtaatcatttgagtccacaacaagtgaagcatgttttgcaaataatcgccagccagcagcctcatttattcttcctagttgataagttgacccagttttcataatcgatgcaacaactgtgctccgtgttgtcacaataatcttacttccatgttttcctgttttgaaacaattgtttaggacatcccacttggcacgatcctcatcccagacatcatcaacaacaaacagaaacctcttcacacttagagccttctttacttcttcttgaagatcatacggctcctcaatttcacatcttacaaaagtgagcttccccacaattagtttcataactttcatgcagtcgactttgtcatctcccactgtaatccatacttttgtatcaaacattttgttgactctttcgtccttgaaaacaagttgagcaagagtagtctttccaa

SEQ ID NO: 153538 - DNA, 831 bp, Cannabis sativa
cagactttttagtcacaacataaggataataatttataattagtcatcattttttcacttttagtcacaaattttattgcaactaaaagtaagattttttgtattatttatcataatagtactatcttgataaaaaaatcgtttaaactctcaaattatggtaaattagcattggattagtctcatataagaaaagtatttgccaaagtgagcaaaattcacaaaaaaaaaaaaaaaaaaaaattgcaagtcaaaaaattcaacttatatttataaaccacttaactaatcagttagttagcagtaagacattttacttttgttctgttattttatgtttcaagcaacttgtattcaattcttgcttttcgttataaataagaaagtaataagctaaacgattggttaagcttattttgataattttttttctcttttttctttctctttctttcaagtcagttctgttaggggtaccgcaatctttgaaaaaccttcaacaaatcgacgataatactcagctaaactcaaaagttttctaacttcagtagccgattttggtgttggccaaccccgaacatcttcgatcttggccggatcaaccatgatcccatccttatccactatgtgccctaggaaagagacacgcgacaaccagaattcatacttcttgaacttagcgtacaacttatgatctcgtaatcgttgcaatactgatctgagatgtagttcatgtccctcttctgactcagaataaaccaaaatgtcatcaataaacacgatcacacatctgtccaggtaatccttgaacacccgattcataaggtccat

SEQ ID NO: 153539 - DNA, 570 bp, Cannabis sativa
  modified_base (330)..(343): a, c, t, g, unknown or other
  modified_base (421)..(426): a, c, t, g, unknown or other
tctcaaatttacatgccctcattatctctcacattctttctgcgtatttcttctggttgtatctctcttcctagaaattatcaagacccaacttttcgacctttggatattcaatcgcgaagttcttccctacctagaatttctcatcaagacagtaagtgactgttggattatatttcaccaagacctagatttactaacaagtatatttttaacattctaaatatgaacttctaaaacgatggaaattaaagacatataaagtatgagaaacattccattggtttcagcataattaaatgactcctttcgctcagatctctaaccctnnnnnnnnnnnnnngcagagtattatcaagatcttagcgcgacactccttcagttgattggattcttctcagtcttacacactatgattgannnnnnacttgctatgggtgggcatgcattgcactcaatcgctaaggctcgaattttaatggtgaagaacactatagaattttgaaattgtagagaaaaaagaagaagaaaaagtctcaaaacactagttgtctgacagaatgaaaacta

SEQ ID NO: 153540 - DNA, 936 bp, Cannabis sativa
  modified_base (639)..(645): a, c, t, g, unknown or other
  modified_base (720)..(738): a, c, t, g, unknown or other
aactcaaatgaaccttaaaattcgaaccctaaacatttctaaccctaacagccatcaattcacaaaatcacatattcaaacaaaagtagaaacttcaagaactataaggtagagatgctagggcttaccttggctagatttctcttgaatttccttgctgaaatcaccaaagttcagcaacaaaccctcttgttgtagctgggttcgaagagagagagggaagtaaggagagagattttttatttcctttggtttttcttaattgcataaggcttaggaaattgttagtgcaaatgggagtttgttgggattttataccctaaataaaatatattttaatataatcttattcgttatcaatagaagattagaagtcgtttatgtttacatgtattattcatatttatggtttaatatataatttctgttaaatcctgaacacatagttattcacaattacagtgatgtcaaaaaattagaaggtatgcttcaaaagattatgtcccatgatttatcaatgcactagatttacactgatgtgatagtcaacgataaagtttacttacaccttgaataagtgttatgttctttctaggacattggcaaagtatgcttgtatcagatgtatggagtatacannnnnnngggaccgatattgatcttggtaaacatgctatgatcttaccgttgtatcgttctaagtcaatatcactggttgannnnnnnnnnnnnnnnnnnaatcctgatatggttaggttcaatgtcaagagtgttatttatattctgagagttgttagttaaagcctaccaattggttcaggtaacacatacctcttgagaacatgatagtacaattgagtgggaacactaatcatagatacataatctacaacttctatttgggcatagaagtgaaatgatgatttccttcgagct

SEQ ID NO: 153541 - DNA, 577 bp, Cannabis sativa
agttcaaccaccctgaaatccttactcatcgatcgagttctcaactcgcttgttttttgcatttttttctaatttttgacaatgtcgcaaaacatcactaaatgtcactatatcccaaaacatcgctaaatgtctctaattcacaacatcgctaaacacatcgctaaatgtcgtgaaatcacattcaagtttccacgataattagcaatgtttagcgatgtgttatgcattttttagtctcatatcacaaatacatcactaatatcatcgttaaatatataaaacatggccaaatatcactaatcatcgctaaacttcatccataacctcaaatttggtctatcattgtaaatacatcgctaaatatcgcaaaatacacaaaaaaattagaaactaaaaaatgcaaaaaacgagagacgccgtgagagaaggcgaccaaggggaccttgcgtccagggttttcggactatgtgttgacgacaggggttctgggtcggagttaaatgccggagagtgagagagttagagagagaagttttttttaaaatgtaaaagtattttttagagaaaaatatat

SEQ ID NO: 153542 - DNA, 685 bp, Cannabis sativa
ttgatctggaggtgttgggcaggtgtggttcagatttggctcgagtttggggagaaaactctaggctgctgccctgccagaaccggtcgaccgattaccattagaggagagtttccatttttttcctccaggctggttttagggctcggggtggtttttggtgtttaatttggaatgtttataagttgtaaagcgtaacctagaactattgaagataaggattgtccggttttaggaattaagtttattccagagattttggttaaagtatttattgagtgttgttgtcgtgacataggacccgggattgtcaagctttgtttccatttagacaagatgcacgctaaacttctagactgaggtaagaaaagtattaaatactgtataaggttaatattatgattgctacagtatggattaagattgaaatctcggtatatcttgttgtgatttaatcttaatcgaggttaacgttatgtattggttgtggctcgattatgatcgagggaaataataggaaacaattattatcgttgtgactcgatcatgatcgagggaaatgataggaaacgattatcatcgttcacactcgattataatcgagagtaatgatatgaaccgattattatcgttgtgactcgattattatcgagtaaaagatacggtcattaccgttatgagtaat

SEQ ID NO: 153543 - DNA, 1127 bp, Cannabis sativa
cgttttagaagttcaatattaggttgttaaatcaacatacttgcaatagatctaagatcctggataaatataataccaacaaagacgtgttgtacccttagtgatctttcatgcacgaaaaacatcgtgcacacgagagtcatgttgaattttataaagtatgctccgacttttgtgagggatggcgaaagttgcataaaaattcaagcgatgattttgcttaaaaagatcaaaggatgaaaacatcacttggagtgagacagacttcaagcaatccttccatttcaggaaggagggttgaagtcatgtcataaccgcagttatctttcgcgcgtgaaaagcatcatgcgtgcgagagtcatgttaaatttttatgaggcaagcttaagcttctgcgagagaaggctgaaattgtataaaaattctagagatgactttgcttgtaaagatcaaagggtgaatacatcagtaggagtgagacagacttcaagctgtgcttccattccaggaaggagggttgaaaatgtgtcttacccccagtgatctttcacgcattaaaaacatcaggcattcgagagtcaggtttaatttttatgaggcaagcttcggcgtcggtgagagaaggctgaagttgcataaaaattcaagcaatgactttgctgaaaaagatcagagggtgaaagactcactaggagtgagatagacttcaagcagttcttcccttcaaggaaagagggttgaagatgtgtcgtacccctagtgatctttgatgtaagaaaaacatcgtgcacatgagagtcatgttgaatttttataaagcaagctccaacttttgtgagggaaggctatagttgcataaaaattcaagcgctgactttgcttgaaaagatcaaagggtgaatacatcactaggagtgagaaagacttcaagtagtccttccattttgggaaggattgttgaagacgtgtcgtacccccagtgatcttttttattaattgaatagggttaaagatgtgtcctttacacatcttttcttgactcttttgttgaagtatcttgtgactcggtgttggtatgcggcgttggtgatttgcgactcagatcgtttttccttaagtagatccaa

SEQ ID NO: 153544 - DNA, 655 bp, Cannabis sativa
  modified_base (309)..(323): a, c, t, g, unknown or other
  modified_base (501)..(506): a, c, t, g, unknown or other
acatcccagaatgctatgatttaagacgtgttcaaatacacgatcattttgacccagtaaaaacgggtaaatcacagttgtgtgatattcaaaataataattgtctttatactacgtgatatgtaatcaaacctcacaatttcaggggataaatgttgtaaagattacagtcaaccctgtaattaactgcttactatgtgattataaatagagtcaagtgagattgaaaaagggacgaaaaaacgataagaaaaaaaagaaaggccctgaaaaaccattacaaatttaataagattgactcgtggactnnnnnnnnnnnnnnntgcaaaaccacgtaaaaaaatcctttgtgtccatattttctttttctttacggtctttatttttctgtgcaagtttatcatttaggctcaaattttggttaacgaaaatctgcgtgaacactttttaatgttaatcatacataaaaataaaataaaatatatttattaattagtaaannnnnnattttattgtattttttattaatttaaatgaattttttatatattttatcactatgttatttatgtttcttcgctatgtcatttatgtacatcattcacataaaatttatgtatattgcatatatatatgaaatacttcttaatgggta

SEQ ID NO: 153545 - DNA, 934 bp, Cannabis sativa
tgtccttttcttccacatttggtgtaatttgttttgtgtctttgtctcccaaattggtcttgttcttttcttttttggtctttctgctttcaccctttctagtggtggtaatatttcaatatctttgattttttatggaatgtcctaattgcgctaattttctactgggtatatagttgcttcataggtttctagccagttttttgtgttgtagtaatctgaacagtaattctttgggtcgagatacatttttttcatcactgctaagacatgcgcacatgacatttcatctatttaaaacctattgcatgtgcatattttttgttctagattcaccacccatgatctttttactttgtacacttcaaatatgtgttcatttgatgctctaaccttagaacacatatgttgagtatttattttggcattataacacaaacaaatattaattcaacattatgaaattatgtttattaaatattatgtacctttaatttcaaagtagctttgtagttgcccttcatcttcatctctgcagctggagtcaatttttttaatgttccttgtgccattttcctttttttgcatgtccattattggattaaagtcctcaaagcttccattagtattgttattggtagttctctagctgccaggtttgctgcatttaatgattcagcaacattttatgtcatggtactgtatcttttgtttttagaatacaatctggaccatttctcatatccaatattttgtagatatggtcgatcccgtttgtctaaggcgtcgagctctttcatgtgatatttaaattttttagcagtgtatgcctttgctgcacgagaaaatgtctttttaaagaaccttgtatttttcttgaatgttgtcttcaagttgttgagtaggtgatacacacaatatccatgttgtattt

SEQ ID NO: 153546 - DNA, 728 bp, Cannabis sativa
atatgttatatatacatgtctcatgtaaatacatagaaataattatttctacatatttaatctcactaatatatattatatcacatgctctacatatacatatatcatatatttatagggacacgattttttcccattagtttactttaagagatttattccatgatgtacgacagtcgttggatgaagtgattattttatgtgagggctggggttaatgtatgggtatttagggtaaaaaaattgtaaccgattatgtttttgaaattaaaatttattaaatttgaaaaagttgaaactgacaccagccatatcaaccgtcctccacacttctactttcttcttcactttctttcattttcattttctattttcgttttctattttctattttcgtttcagcttagggcaaaactctcctttttcattttcgtttcagcttaggtaaaactcatattttctgttttcttcacttcttttcgtgtaagtgtgttgtgaatattactcatcttctatcattgttgtggttgttacaatcatgggtctcgacggtgggttgtacaaataagtttctccagttttacttttcatacttttcgttcttcacagtgggttttcaaaaaataaatctttttttgaaggcaatgtagtgttagtccattttcgtgtacttaatagtgttattttctctcaggtgtcgacggtgaggtcttcaaggtagttaccat

SEQ ID NO: 153547 - DNA, 678 bp, Cannabis sativa
ttataataacagaccttttctcaacaaaaaaaaaaaaagaattatatataattattttttaataaaaaatatgtataaatattaatataaagaaaaaatatctactctatataataattgagtttgacactacacattttccctcagttttgttgactgtggcgcccatatctgaaagaacgagagagagtctaaaattacaagataattttacttttttattttgttaagctgctgaaaaagaggagttttcatataaaaaaaaaaaaaaaaattgattcttaatataaaggtaaagatatgtaagtaattctaatcactttgtcaaaaaaaaataaataaataaagatatataaggaaatggtgactttaactacaagaaagcaacaacattttttttttttttttttaaactactcaaaatgaggacatgttcattcttctatatatggagatatatgtttattcttctatataaactaggtggttaaaaacgtgcctggcacgtaactcccgttaaaattaatggattaatcattttttttttattaattgtatttaaataaaaacagataaaatatcaaattaaattaatagattaaatataaaaaaaattaaaattctaattgaagttactaaagataagtatatattaatattagggggtaagttgaaaaa

SEQ ID NO: 153548 - DNA, 541 bp, Cannabis sativa
gattttgaatttagttggtgaagggattcatctagcttactcaaggggatcttgagtgttggaatcgagggattcgggtttagatctgtaatcgtccgaggggagacaagatggtcatttgtttgaggggaggattgttgggtgtacaaccaaagtcccacattggctagaaatggaaaggatcttgggtatataaggatgaacactatctccattggaatgaggccttttgggaaggtgcccaaaacaaatctgtgagggcttaggcctaaagcggacaatatcacaccaatagaaaaatagatggtgtccaacggtccttacactatttatagaacataccaaatctaaagacagccacaaaaaagattttctagatgtacaaaactatgtgtaagttaatgattggagttcatattatgtttatatatatatatgaaaatgatttgggattaaccctatttttgaaatctcgataatgtatgactaggattataagtgcttactcaggaatactcgaagatttggaatctccacatac

SEQ ID NO: 153549 - DNA, 519 bp, Cannabis sativa
atcctttgcacagtccgtcaaagtctccacgcgatcctcggttcagtacggcgaagtctcacgacgcaaacatgtttcccctctcaagagcctcccttaggattcggtctagcaaggctaagatttcatatggtgaatagtccgtaaaaaacttgtgttattattaggttgtgttattagtgtgttgtttagtttggatttggcaacatttggatttatacatctgtttttattagttcacgtttggaacttgttattatgttgacagacttgtgtttattttagttttcagaatatattaactttgagattgcaccatacttagcaaatctttagactcacaccatattaagtttgacaatatacccatacttgataaatatttgtcattactgtttaaaacaaatcatttcccatttcttttttccatcgattctaatttgatgcaaagcaattttaagttaccgtaatgatataatttgtacatgattgtacttcactgaaattatttaaccccaa

SEQ ID NO: 153550 - DNA, 612 bp, Cannabis sativa
agtaaaactaaaataactttaatactctttatataatttttaaaaaataaagtagagataattttgtcaatttatcacttacttcaatattcatttcaataccaaaataaatattgtaattaattcctattaccattcttaaaaatagctaaaaaattaaaataaaaagtcatttttattgtagttgttccaattctgctccatattttaattaatatttaattattttaataatatcatataatttgaattttttaaatgtaaattaattttataaaataatggaaaaaataatattatttttatcaaaataatattaaaaatgttaagtaaaaaaatagagagcttcctatttattctctattataaagagtcatttttgtataattaaaatttattttttcaaatctcactccttattttaactaataagcgtgtttaaggagcatagttcgaaatacttttaatttccattaccataacggttatgttctactaaactaaatgtcaccttaattatttatagtttaattaggatttttatctctcaaactttgacatgtactaaaacatgcccttctgaacttttaaggttgttaaaaatgcccatga

SEQ ID NO: 153551 - DNA, 545 bp, Cannabis sativa
  modified_base (187)..(194): a, c, t, g, unknown or other
tttttttttttttttttaggatttgtgtgcaggtcacatcacatcttacatactgcctgaattatatggtccaagagcttggataggggatccctaaattttccttttgttcttcccaaacttacttttttttttcacaaatgctataattttaattttaatctaaatttatctatttaataattannnnnnnntatcaaataaaattatcatttaacttatttattaattagattttacaaaatctaataattaacaaatttaataaactctaaaacttttttttcttttcaaataagttattgcttagtgaaaatttataaacaagatatagtctaatttagaattctaattgattaattaaaacctattaaatgagtctacaagctaatattatctcaactagtgcggggaccatgagcctacataatcaagctcccaataagtagttctaaaatttaccgagtaaattttctatcttattaattcctctagactccattatagattcaaaattacactcttaattacataaaacgctctat

SEQ ID NO: 153552 - DNA, 624 bp, Cannabis sativa
  modified_base (172)..(173): a, c, t, g, unknown or other
ggagtcagaatcagacatgagagctcaatatcaagagttgtttaggttagatttcgaggacaaaatccttttaagggggcgataattgtaaaggccgttcatttggaaataacagataattagggcttaattataaaaattatttatcaatattgaattatttatttatgannatttatttgaattcagaatgcaattttatgtcacatataaaaatttcataaatttgcatgatttgtgtctgacaacattggaatgcagtgtttggctattagaatcacatcctagtatttttggtatagcggaaaaatatagttagtcattgggaatttcgggaatagtcaagattttagaatttcccaaaatacccctaagtgattttaagatagtttggtgtgggcaaggacattttggtctttcgcccattttgtattttgtctttatgtgaatttatttagattaatacaatcagtttttttttactgtatttggctgaaaataaatcaacaaaactattttatttcattctttttacaaaaataagaaaaaattggaaaaaaaagctagaaaactctttctctttcaactctctctctctctctctctctctagatcggaagagcg

SEQ ID NO: 153553 - DNA, 642 bp, Cannabis sativa
cgatggtgggggcggtcggctgcgcggacggtggggacggttgggtgtgggcggcttgcgtggacgggtgtgggcggtctccgtctgtgtccggtgtgcgtgcagttgatggtatgcgagacagagagagaaagagagaggagagtcagatttgaatgagggggtaatgtgagaattaagtaaatgctattctattttactaatatagggtattttagatttaagggaaaatttttccctaaatataaggataaaaaatcaaattttccaaagattatggcatgaaaggtacaaagctaacaagtgaagagagaaagagagtggatgattattatgtatacgtagttgacttaggactgcacttttaaacagttgggccgactaacccaatttggaaatggaaaatttacacaaattatttaaagagaagtttataaaaatattggaatttgagttaacttttacaaaaatactatcacacggaaatatttttaaaaataatgtgcttttataaaacaccagttgtggaaattgatccacaaaaccaacttattatccaactcatttaaaccaactaacttaactaacattcggttatgttagttagttagttggtgctatccttgtttgagttaggactat

SEQ ID NO: 153554 - DNA, 586 bp, Cannabis sativa
cttggccaaactatctctctctctctatcagcttgtggggcgaacttcatagcatgggcacacctcaaagccgtctagcaaaagtaaacatacgtatgagtaatagcaagtaaagtaaaaactaaaacgaatcgaggcacacacaaaatagtaaaatacctttattcccgagatggcagtatcctttaaaatagaatcacgcccgtgggagatgtagaaattatcatcaggttttttgacggcatcaaggagagttttgaaataattctcagccgattcttcgaacggaaaatccttcttgatacggaaagcaggaattttgtcccattcagccgacacccgcggggtatgactgggcagaggcggggagcctcggccagaagaaaaggatgtaggaagagttaaagcaggagaaagggcaagctgggaagacgacgacactccaaggagagaggcagaggttcgaacaagggaggaagatggaagacccggcgtagctattgggaggatcttaggctgagggaaactttcccgaccaggaggccctaaattggtgttggaatttataccctaaataaaactcttt

SEQ ID NO: 153555 - DNA, 990 bp, Cannabis sativa
ccataataattcaagacttttttggtttcgatctaccatcagcttacaatatactgctgggtcgtctagcattaattagactagggtcacttagtttgattaagcacttatccctaaagttttagacaccagtgggtttgggagtagtgtgaggtgatcaaatgctgcctcacaaatgctgacgcatagagctacaacacaaaaaagccagtcaccagctattggtagtcttaactgaagaaggcgagaagaaggatgaagatcttgatcctcggattcaagatgaaagaaacttattgaaacaaattgaagagttggaagaggttgttttggacccaggaaatcccacaaattgtctttacaatgggaagaacctagatgaacaattgaaatagaagctaacaagttttttaaggacgaaccaagatcagctcgcatggagcaatggagatataatagggattgaccgttatattatctgacatgacttaaaagtcgatccaaactacccagcaaagagacagaagaggaggcccttagatttcgagaggtaaagggcactcaaacaggaaatggataagttgttcgtcaatgactttatacgcgaggtattttatccctcgtggattgccaatcctgttgtcgtcccaaaacccatcgaaacttggaaaaattgtattaatttctctgttatgaataaggtgtgcccaaaggattactttccactaccaaggattgaccagttggtggatgcaactgcgcgctaggcatgagcttatgttattcatggatgcatactctagatatgactagataaaaatgcatgtcccagatcaagaaaagacaagcttcataacaaacatgggacttcattgctataaggtcatgctgtttggtttaaagaacgttagggaaacatatcagcgattagtgaatgaaatgtttgcgaatctaattgtgtggaacctggaggtttaggttgatgatatg

SEQ ID NO: 153556 - DNA, 718 bp, Cannabis sativa
gagacaacttagaaatttcacctagcaaaattttggaattaacaatgctcaagatatatgttttgaccaactaaagatgacctcaactaaaggcatgaaggcatctcaaagagtcgtggcattctcatcgagaagaaaaaagatgcactcaacatcaaagtcatttgccaatatgcaatgtaaataacgatgaggctgtgttctcaaaaagattctgactcattcaaagttggccgtaacaaatttagagaaaatggactttgtgaacaatacaatgcccgcacagaggcataggtagatgcactcgatggatgatgtcttcctacaaaatggttggacagagatgtttctacaatggaagaaattcaaacatagaaacagaactctactcatcaaaaactctagttaagtgccctccaacgcaactgaaactgaataagagtacttggaaagcaagaacttcaagaaaggggactttaggcgcatataattctcctacccgactaccattaccattgaatgaaccatcaaggtcctctcaacgcatttccacttgaagcaacgttaaattcgatttgggctttgtggctttccctgaagttctcgttgattgatgcttttcactctttcataaaagttctctatcacccttgacaaataataacatgaaaagattgtatagtttctcttagtatcacgattgtataggtataaaata

SEQ ID NO: 153557 - DNA, 662 bp, Cannabis sativa
tatatatttatatatatcatttttatttttatggggaaagtgggcaaaagatgatggttcaatgtgatttggtcattatcaattaatcagctcatcagtatagcgataataagaagagaaatctttaaaccttgagaaatttcaaaattaattggtgatgagtagagtagtacatatttttatatatggtttaatatttttacatttaatttatatgagacaatgttctttaatattcctcctcaagatggtggctatttttgctcaccaatcttgaatcaactatttactcgcttatttttgttcggatattagcatctttgcactatctggatgggtgtggatcgaaagctcgctaggaatatagctctaatactatgatgagaatcatggaattccatctcaaaactaattggtgatgagtagagtagtccatgttcttatatataactcaagacttttacatttaatctatctgggacaatattctccaataaacttgaatagtcgtgtctagcatcctcttatatattttattgatatttatacaattaagtagtcattaaaaaaattatttttaatgataaattttcaatcacaacataaattttttgtgattaaatgagacttttagtcacaacaaaaaattatttgtaactaaa

SEQ ID NO: 153558 - DNA, 840 bp, Cannabis sativa
acacatctgtatgtattacttctaattatccgagtagtgtggaaggcagactatctcagtaggaacaagtttggctttccaaactacttatcaggacttaactattttaaaatgatctcgtgaagtccaagcatgaagacaatccctacaatcgtgggtttgagttagaggaatatggcaacctgttccaattttctgtttagtgtagcataataatgtaatgaatattctttcctattttacacattgtaagcaaaagggaaactatccctcatccattaaggctctataaatagtgacttagccaaactgtgaaagggaccgaaagaatttcttcagagagagatctaagagaattacttagagatttcattgtaagagcttcgagagagaaaaacactttgttcgttgtctcaagttaatacaatcgaaggggagtagactattaccacacaaacgggatcgaacctctttaaaatctggtgttctttattacttacttattttttgctctatttatattatattcttaatcacttaataattgactcactatcgttggctaaaagcaagatcaacaacatattatacaatgtcatgggttcgaatcccataacactcttttttaatattttttatggccccgaaatctaattcttattaggcccatatattctcaaggtcagccctgaaaagaaccaccataaattttggggacttcaccttagaagacgaccgaaataaatcaaaacaagggttgtttggaattcatgaaaaaaaaattacagagaaaactactacgaaattaaaattcatctagaaattcagtttaatttgcat

SEQ ID NO: 153559 - DNA, 532 bp, Cannabis sativa
ttccgatcttgacaacctttaagtcatataaggctggtcggcctaacataacattaaaagctgatggaacatcaattattagaaattgtgcaatcacacttatgctcttcagagcttgtgcaacagtgaggggtaggcgaattttccccaaaggtgcaacactctggccagagaaaccatacaccggttgggtacaggggattagatctttgagttggagtcccatcttttcatatggtgttttgaacataatatttgtagaagctccattgtctatcatagtccgggccactattttatttgctatatgtacttccacgactaagggatcattgtgcgggaagcagacatggatagcatcttcttcagtgaaggttatagtgggttcccctacccgtggcatttttggcttcctttcttctacggccaaaactaattccttttcttagtgttgtaaagttcacgaatacctctcccgagctttgcccgaatctccagcaatgtgtgggcccccaatgatgacttgtaaatg

SEQ ID NO: 153560 - DNA, 723 bp, Cannabis sativa
ttactattacttctcctttgttacatattaatgccttgtgtgattttccttttgtatcagtgtatataactccaatagcagttggatctgtttcttgaaacaacaataataagtacaaataataatacatttgaaacaataatttatttagtgaagaaaaatcagtaattaatttgtcaaatttaatgaaaggttactaacatctacaataatatattagagctcaaattagtaaaagaatatactgttattcctcttcttatatattacacaatagtaaatgctaagagtctcaccttaagtttgccaatgcaccacatgagttgatgtatagttattttaatatggaatctcacattttttaatttaatatattatatgaaaaattgctaactaattataatgtgtcatgtcaaaattaatggtgttgggctttaaggagccaaatgataatttacaaaaatattgaattttgggcaaaaatttacaattttattgctacacggaattttttataaaaatactatttttttataaaacaattttaaaacaacaaaaaagaataattaataaataacactagaacaacttataaaaaataaccgtggaacaacaatagaaacttaacgcacactacaaaaaactgttacttttagtcacaacataattttttgtgattaaatgtgacttttagtcacagcaaaatgttacttgtgactaaaa

SEQ ID NO: 153561 - DNA, 657 bp, Cannabis sativa
ttgtggcccttttcattgcaataaaagcactctcctttttgcttcgccattgaattagcagcatttgtattcttattagctgtgttaacagctttaagaggcttcttgctattgttccaattcttctttttgttgcgttttgaagtaaaggcaatgttttcctctgccttggccgtaccattagtagtgctagaaccgcgaactttgtttcctcctttctgtggacctccaatcaaattctcaaatgtctgaaggttgttgattaactcgtggaagtcaaaagtcaacttgttcatgaaatagtttgaggtgaagggcggaaaagctggactcaaactatttaggatcaaactcaattaagtttcctaatctataatagctccatgattctcagcttcgtggaagtaactttccatctagaggaggtaatcacgcacgttctgatgaggtttcatccgtgctttgctaaaatttttggttgcctcaaaccgagcttgatctgacgccatctcgaatagttcagtcaattggttcatgatatctgcagttgtgagagtattagcaaacctttttttcaaggtgtcaaccatgctagacagcataaagtatcgagctttattgttagcattctgccaacgcttgaacttttctgtgact

SEQ ID NO: 153562 - DNA, 527 bp, Cannabis sativa
tccgcggaggaatggttcaagaagttggaaccaggatcagtgaactgttggaacaagctgcaagttagttttcagagacagtttgtcgccacgacaaaggttattattttggttagtgccctgagtaacattaagaaactacccacagaaacattgaaaaatttcataaagaggtttaaggaagaagcctcaaagactaagaaagttgatgacggacaacaacttgcacttcttcaagcagggatccatacggggactccattctagaatgaattatagcaagaaggagcctccaaccttcaagatttatagaagagagtccaaaagtacatcaacttagaagaggcccaaatagtggcttatgtgggatactatccgaccggaatagcagggtatgtgctcggagtccagctcccggaaccctaccatcaggtactccaccaatgagcgacatacaattctccgctaccccaagatataatcagagtcaggcattggcccctgtatcttctcattatgggaatcct

SEQ ID NO: 153563 - DNA, 612 bp, Cannabis sativa
tatatataaaggagggttttgaagagatgatgtggcattctcttcttctaatgttctactttttttaatttcttattttttgtttttttatattttttttttttgtatttaacatttataataattatataattaatatttatttttatattaattgaaataaaaataataatatgtcttttcattttataactcttatatcaaattaaatatctattattattattattattatccattctcttcatattctcatatttaatatgtaaccactatttatattatatatactagctattatcatattatttgggcatcaacaaatatttttggccaaccatgtaggcatatattttattattgaagaagcttatactctcgaggaatgatatgtttctcaacgccgtttctacctcttgcctccactagctgtcgtctaattcatcaccaattgtaactgactcgatcaagtttgtataaaaaattattcctatgaaactataaaaaaatatatgtttctatcttatgttttagttaattaatcaacttggtatggcttgtgatcatttattttttactgtccgtacacatatttacattgattttgtaaat

SEQ ID NO: 153564 - DNA, 713 bp, Cannabis sativa
acaacactataggctatagctattaattaaaatatataaatgaaaaaaaaaaactagaaccaaaactcattcaaacccattaattatttcataattacaattactaacaacactataggctatagctattttacttcaaaaaaaaaaaaaaatcagtataattattaatgaaaacgtatacatgaaaaataaaaggaaaattagaaccaaaactcactcaaaaacccacaaaagaaaaaaaatagtctaatccatgtccattatccaatctaatctacaatattatagaccatataaaaaaagtctcaaagtctacaatatagctacaatataatagtattgatcagaatagtattaatcatccaaatctaaattctaatccatatccatatccatatccaatccatacaatatagatcatttcaaaaaaatctcaaagtccaaatctaatccatatccttatcaaaaagtatcaatctatcaatattgatcatattaaaaagtcccaaattctaaatctaatccatatccatatggattatatcaaaaagttctaaagtccaaatctaatccatatccatatatccatatggatcattatatgaaaaagtctcaaaatctaaaatataactattcaaacttcataaccaaaagtatcaataattcatcttcataactattcaaaagtatttacttcccttgtgtatattgtg

SEQ ID NO: 153565 - DNA, 592 bp, Cannabis sativa
acatagggttttctcggcctagtgtgtcaccctggggaggtccggtactgtttgtcaagaagaaagatggatctttacggatgtgcattaactaccagaaactaaacaagctaacaatcaagaataaatatcctttacctaggatcgacgatctttttgatcaacttcaggggaagaaagttttttcaaagattgatctccgatcggactatcatcagttgagaatctgagaggaggacatcccaaagactgcttttcgtactaggtatggacattatgaattactagttatgtcgtttggaataaccaatgctcatgtagctttcatggatctgatgaatagggtattcaaggatttccttaatatcttcgttattgtgtttatcgacaacatccttgtatattctcaatcagaagaggagcatgagtaacatctcttgatggttctgcaacgacttcgagaacataagttatacgccaaattcaagaagtacgaactttggctatctcaggtgtccttccttgggcacattattagcaaggatgggatcaaggtggatccaggaaagatagaatccgccagggattggcc

SEQ ID NO: 153566 - DNA, 1407 bp, Cannabis sativa
  modified_base (822)..(823): a, c, t, g, unknown or other
  modified_base (1247)..(1248): a, c, t, g, unknown or other
agcatttatacatttccacatactatgcattatgagaaaatcacaacaccttacagtcaacaacttcatcgttgcactaaatgaatatctaatgaatacataaccatacattttcagggcttcataaagcattctaatcttacatccctataaacacatattattacatctcatgagtcacagaagctctacatggaaagtgagtaatttcataagcaatataacattcatccagtgacactataataaaaatgtattcaattacagctcatcacataatgtcacgcttaatccatttcacaacatcgtaacgacacaatcctggtacttcataaagtacccttaccactcgttaaccacgagctaaatatgtcactatcgttgcccgatacagcaaacgataagtaagaaacctatctgcggtttcaggaataattactcataacggtaatgaccgtttccaatcctcaccactcgttatccacgagctgcatatgtcactatcgttgcctggtaaagcaaacgataagtaagaaacatatccgcagtttcaagaatgattgttcataacggtaatgaccgtatcttaattcattcataacaacggtgataaccgtgtttttcccttaatcataaacaattcacaaacaacaataattgtttctcatcattacctcgatgaccatcgagtcacaacaaatacatatcgttaacctcaattaagattaagtcacaataaacacataccgagatcttgatcataatcgagactctaacaatcataacattacaatatacggtgcttaatacttttcttacctnnagtccaaagtcaagtatgtgggctaacctgagtggaatgatgctcgacgatctcgggtcctatgtcacgacaaaagtaaatcaataacggtctattccaaaacactgtctaaaacccgcataaaataacttagggttttctaccaaatcttatggtgaaaacaccctagaataaaatacatcttttggctctaatctatgtctcatactgtagagctcttcataagcttcaaaacggtatatagaatgtctaaaacagacacccgagtgaaaagttatggctaaaatacgaaaattagggattcctgaaaattgaccatccagaattctggttggtgtagccctgcaccatccggaattcgggttcactacagcaggaactcgaaaatttcagctcttaaaagtcccaaaacttgctccaaacnnaaccaattgttcccaaacttcacagaacagtatattaactacaatacaacataatccaaccttcaaaacagaacaattcaatcattgaatcaaattcacacattaaagtgaagaaaactcaactttggcttcaacaaaccaaactcaatcaagcagcca

SEQ ID NO: 153567 - DNA, 500 bp, Cannabis sativa
tttttgccataacttttaactcgggactctattttggatgttcttggtattgttagaaagctcgttttgggctctatatgttgatctgtaaatagaatgcaaattttgtgattatgtgaaagtgaattttgggattaaccatatatgtgaaatctcgagaattgttactaggattaccggtgcttgctcaggaacacctgaaggtttggaatctccacatacttgagataccaggtaagaaagtagttagcacgtagagttaagcacggtggcgctcatgttgatattctgcttttgattaaatgagaaatcaagattagggttattaccctaaagtgaacgattatatggtctacgattattactctagtgattaaatgaattttaatgcaatgccatgttacatatattgaaataaagaattatacgggtaaggcataattatgttagactcagtaatcagaaccgagataaaccaatctaaggccttattgtaaata

SEQ ID NO: 153568 - DNA, 655 bp, Cannabis sativa
  modified_base (500)..(505): a, c, t, g, unknown or other
ttttagtcacaacatataaatcatgatttataattagttagactaaaaataaaattttttgtagataagttagattaaaataaaagtagagagccgcctaagataaatttttcttttgttagaaaaaaattctattatttgattttagtttggatttacatattgtttttaacgatgttattggtataataaattatttaaatttttttaaaaactataaagataagttacaattataataatatcattctaaaataattatttagatgagttaattatttgctttcttttctacttgttagcatgtttagactaattattaggtttggtacgaggtgtttaaaataaattgattatagtgaatattacgaaggagaatatgattataggaaaatgtgtaaactgtgtttgattgtgtagggtaatatgtaatcatattcctgttaattaaattaaattgtttggttgagtacaaaaatcttatatattattttaaaaannnnnnataaaaatatttttttatatatttatttaatgttaattatataaatataaaataatcaattattaaagaaatttatttattaattagtaaatattaaattgaggaattacctcatatactgtttttttttaattttttttttcagattta

SEQ ID NO: 153569 - DNA, 783 bp, Cannabis sativa
cttctcccaacaagcagtagcaaagtcacaattaagcagacaatgtgtgatagtttcactagagactaagcaaaatggacagctatagtccaaaggcaccttcctctcaaagagtctcttccttgtagggagactattggtcgctgctctccaaaggacgtctttgaccgtaggcggaactttaacttcccataactctttccaaaactttgaatccccagcccttccatcaacattggtatcacggttcatgagtatttggtatgctgattttacagaataacaacccgaggtttccttcaaccaataccaagaatctatagcatcattcctagctaaagggatacccaaaataaactcagcttccctttcgataaaaatgtcccgaaccacttcctcatcccactccctagcccctaccttaaacaagctttgaactttgaggtcattataagcgcttagatccgaagttggaattggagactcatcccttggtagccacggatccatcgcaaaacgaatagataaaccatccccaaccctccatcttaaacccgccttgagaactccttgagcttccactaaacttctccatataaagctcgggttagagcctaattcagcggtcaaaaagtcaccttgagcaaaatatctcgctttatatacacgactcactaaggaagatgggttagtgacaagacgccacccttgcttacccaacatagcgatattaaactcacgaagacttctaaaccccattcctccttcaagcttatgcttcac

SEQ ID NO: 153570 - DNA, 870 bp, Cannabis sativa
cataactcaggaaaaagaaaataccagagaaaaggcgatgaatcactaactgttcacagaagagttttcacacgacgaaaaactttgcaactgaagttgagatgggtggcatgataaattctgtgaattcctgaggttgagaagtatatttgaagaaatgcgcagaaaatatgtcaatgacaaagagggcatgcaaagcttagagaaatcagaaatggttgttcacaggaagagattgaagtttttggaaagcagaaatggtggaataacggtttattttcaatttttataccttgagattaattatcgttatattaaaagaacagagatccaacggatatgaacatgagagaattgaaaaagattggtaattaatgctaatgatgtgcctcgaaatcatgactgccaaaatttgaaagcatgcaatttttcaaattgggttaagataaatatactctttgcaatcatttaaaaagtaatttttattaaaaaaaaagaactttttaagtggcaattgttatactcaaaatttggctacacttcagagagtgacacgtgtcaataagtggaatataaaccaccagatataataataattatatcatttaacgcaagaagaaataacttactaaatatagaattaatagagtatattcataacttgctgactgtatagtcttaggcgagaaaaggatacacaaactattaattcctgtattgatgaggcactatccagcctcggaagacgcatattcacgacaggattcaaaagaataagggaagtaatccgaatcaaccgcggacaatatatagtgagacatccaccttgctatacataagagaatatggcgaggaaaatcaattgttaaa

SEQ ID NO: 153571 - DNA, 534 bp, Cannabis sativa
gacctcatccaaccccatttccaccgtggggacctcaccttcacaattgctcttccaatagtccacctcccaattctgaggatacaaaatttgaagagcaaccatctaaaaaaaaaaaaacgaaaaaactattaattatcgcacaaacatcgcatacacgtcgcataaaattgcataagagatcaggttgatacacaacatagtaaagtcgcacaaatatcgcatatatgtcgcataaaatcgcagaaaatagcagagccgtattcagcatagtaaaatcgcttaaaaatcgcacaaaaatcgcataaactcgcaaaataaaacagtggcaaatgaaaaaatgtcttaatcgcacaaaaaatcgcattgaaatcgcataaactcgcaaaatgtaacagaggcaaatgaaaaaacatgtttaaatcgcacaaaaatcgcattcaagtcgcataaaatcgttgaaaatcacagtttagcaaaacaaataccaaaacaacaaagaaagtcagattgacatacccttttctcaaatag

SEQ ID NO: 153572 - DNA, 614 bp, Cannabis sativa
  modified_base (429)..(434): a, c, t, g, unknown or other
aagtctcattgtctgatcttcgcattcaacccgtccacgtatttctctttcttgctgaaactagttggcacgattcccgaggccaatctttccaaatggtcaaattaagtcgtgcattcagtaacactcatgttttctttctgattcaactaggtgaattcttttctttttgtgcttctgactacctcattgtaatacttagcattaaatagttcctggaacttttcccaggtcattgttctaacatcgtgagtcaaggacatcatgtcccaccacaccagagcctcttcttgagattgaaatgtgatataggccaccctatcattgctggtgatgcccataaagttcaagtttctagtaatcactgttaaccattgcttggctttcaggacatcaggacctcccaggaaaactggaggtgcctgcttnnnnnncctttcatacaggggttccattcggttcactgtagctacatgtcctgcctgtacatcagggacaggagctggtggtatttcaggtgcagggattgtaggagcactgttacgaaaattattaaataatacgcaagtgcacgcaatcaagtagtaaactcacgcaagtgaggtcgaaccata

SEQ ID NO: 153573 - DNA, 587 bp, Cannabis sativa
  modified_base (52)..(65): a, c, t, g, unknown or other
agcaattaggccccctaccaaaccctaaatcaaaaaagggaatgggggtccnnnnnnnnnnnnnnagaggccccctccggacatttgtcaaacaagaaaacctttgaaagatttcctggacaatattcgggtgcaaacgtctcacagatagtgacagtgcgcataaaagaaaaggaaaaaaggaagggcacaaaactgagaaagacaaagtcttctttatgcccttgaaggccatcacacacaaagaatgagtgagccttcacaaagaataacaataatgtgtaaaaagagtgaccctaacaccagagaagggaaatctaaacgtattacgtaaaaactcagggtgaaacattcccagaaacttcaaacactaaacctaaaaaaataagtaaatagtaaagcatgccatgaacacaacagtaaagtaacagatgcgagaagcttacatgaagtgttggaactgggggttgctgtcgatcaaacaaagagatgtagactgacagtaacgaacgaaggttagcaaagaaatttgtaaagtgtttgaaggttttctggtctgagaattttctctctggaaaactcgaaga

SEQ ID NO: 153574 - DNA, 657 bp, Cannabis sativa
  modified_base (629)..(630): a, c, t, g, unknown or other
aagctgacatggcactaaaatgaaattagtgaaaacagatgcaactaactacagaaaagatgttagaaaaacaaatgctgttgcagaaatactaaacaaaagtattatctaatttgccacacaaaacacgacacttacacaagcaatcaagaactggtttaaatggcttcaacaagattcgaggtggacaagttcaatggttcgaatgattttagcctatggagagtaaaaatgaaggcttttctagttcaccaagaaatctatgaggcacttgatgatgaagccatgaatttaattgaagataacaagaagaaacttgagattgaagccaaagcacatagtgccatcctcctcaatcttggtgatgagattttgagggaagtttcagatgaagacaaggccttgggtctctggaacaagttggcatcaatctacatgaagaaacttcttgcaaacaagttgtttctcaagaagaagttgtacacactttgaatggacgagtcaaaagaattaaaaaggcacctagatgattataacagaatcattcttgatttgaataatcttagggtgaaaattgatgatgaagaccacgctataatcctattgggttcacttcccaagatgtatgnncactttgttgatacgatcttgtatggc

SEQ ID NO: 153575 - DNA, 835 bp, Cannabis sativa
tggcctgttttccggaaggtaaattaaccaagacctaagtaccatttccaactaaagcattcatctcttctgtcattgccgcaagccaaccaggatgagacattgctttatgaacaattttaggaatagtgatagaatcaagagaagcaataaaagagcaagaagaagaggagagatgactataagaaacaaaagaagaaataggaaaagtacattcgcgtttacctttacgtagtgcaatgggaagatcatctttgacttttggatctgatgacgaagatgcgggtgcaggacatcaaacaggaggtggagaggggggcgcctggtgtacactataggaggtcgaaggagtggtagaggtggaggaggtggtggagggggtgggggttatggccgaggcaggtgaaggaacaagagactcgtcagaacatgtagcaggcgaaaaaaataccgaattacacccttaaacagatgcgagtgggcttagaagaatagagtaaagaaccggcaaaagaatgtcgacgaagatgccgtcacatgtgcctccacgcgccagcacatgggaaaacgcacagaaccttcaggcagcacgtgagccccatgcgcgaggtatcggcgaccaaactttggggttttttagatcggcagctgggcaacactcctaagtggacggtgagaataaattcgcactccaaataaaattttcaaaaaagaaccttaaactcaaaccctaatcttttgtttatgaactttaatttcgaattttgaatttcgaatcacaaagctctgataccatgtagaaaatagtgaatcgaattatgtgtatatttcatag

SEQ ID NO: 153576 - DNA, 658 bp, Cannabis sativa
  modified_base (551)..(567): a, c, t, g, unknown or other
agagaagcaagcatatcgaaaggaagtatcacataattagagaatatgtggcaagaggggatgtactggtgcaaaaagtggacacagaggacaacctagctgattcgttccccaaagtctttgcaggaattgcatttgaaaagcactgtcagaatttaggattaattgaaatgtactgattgttttatattagtacaagtgggagtttgctgggttttatgccctaaataaaactccaatttcaatgtaatctttatctttcaaatatcaataaagaaatagaagtattttcatcacttatttgtgtgtcatttggttcatgttatcatttacttgtttatttgatttacaaattcatccaaacccatatcacatttatattcctgtttattgtgtcgtcagaacagtggaaaataatcaaggttatgtgataaaatatatattcctagatttatcagtacacagggtttaattgatatgtgaatctacaacatagtttacttgcaacttggataagtgctatgttttttccagggcattggttaaagtannnnnnnnnnnnnnnnnatggagtatgcatcgaaagggatcgatattgaacttttagttagatttattaaacttaccgtaatagctattcaattcaatatcacctagt

SEQ ID NO: 153577 - DNA, 616 bp, Cannabis sativa
aaaacttacataaaattagtaatcgattctattaactaatcactcaataccaaaattgttaatagaatcgatcctaaaacttaaatgctatgtatatcgtaatctaaatataaactaattacatatgcaaaagataacaataatcatgataaaacttgttactcatgtattataacaaaagtagtaacctataatcaaaggcttcacaaatttggcccactcctcccgtactacattgatcttcttgttactatagggagcgtctgacttgaactaaaacaaaagataaaaaaatattaatcattatataaaccaattatataataccaaaagtgttaatagcaacgatcataaaaattatatcccacgcatcataacaaaaaatggtaatattatactcacttaataatcaaaggcttcataaatgcggctcactcatctcgtactgcattgatctccttgttactgtagggaatgtctaacctaaactgtaaaacaaaagataaaaaatattaattactactatgagtctacgacaattcaatttattaatcaaataaaattcattttactcaaatattaaattttgtaataaaataaataaatttaaaaaatt

SEQ ID NO: 153578 - DNA, 655 bp, Cannabis sativa
  modified_base (150)..(156): a, c, t, g, unknown or other
tttaataattatatgtataccatttatatatatattttgttgaaataatttacagtgtttagtaaaatattttattttatatgtaattgtatttaggagttttttatttttacacttcaaaacagtttttttgtatttttacgaaattcnnnnnnnaaacccctattgcaactagtgctacaacctgaattacaacaaaaaatcgtatagaaacccctacttcaactagcgctgcaaccattttagaaacccaaaccataatttgaaaaaaagttaaaaaaaatagtatacgatgtaattccccttatatttatatacactaatagttatatttaagatattaatgtaattttatattaatagtgtatcaaatttttaattaattaatagtttttattatattaaagagtttaatagtgattcaaatacttttttacctctatttctttaattagaataattctatttttgaatatgatgatggtatgttattttatttgtttttgttgtattatcttaagttaccgtataagttttaaacgcatcttaagttaaaattttaattttaatttaatcgtgggtgatttcgttcagtttggtgttgggttgaatgctgaaatggtggttagttgaatatatcttgttgtttgttttt

SEQ ID NO: 153579 - DNA, 514 bp, Cannabis sativa
ttggcctcctcctcgagcttcgccttggcgagggcctcctttcgctcagcctcctcttggatcgcccgcctctcagcggacatgtcccgcagaatcctcacgacttcgtctattcccccgaattcggtaggacgaagccatgattgactatggtcttggaaaggcggctggtctctgcagtaatcaggaaaaggagataagagtgagaataaagaccttagacaaaatattgaggaaaagaaataaatcacgaatacttaccgcggccatggcgttgctgatgtcctgaacctggtagacggagttcaaggatgcacaagcaacgtactgttgggcgggaattaagtcagatgggagacatactcattggtcagctccgaggcaaaaggggccaaggtgggcccgaggaagcagttgaactagttcgtcagggggtccacgttcagatcccacggatttcggaagttctcctcgttgagagtgttttgcagctcctctcgtaagaccctcttca

SEQ ID NO: 153580 - DNA, 580 bp, Cannabis sativa
  modified_base (160)..(161): a, c, t, g, unknown or other
  modified_base (254)..(263): a, c, t, g, unknown or other
  modified_base (311)..(323): a, c, t, g, unknown or other
  modified_base (366)..(372): a, c, t, g, unknown or other
  modified_base (434)..(444): a, c, t, g, unknown or other
tgcctccaaagctaaaaacctagctttctgatgcgacctcttccttcttcttcttcctcttgaattttcgaaatacctaagtcttccttcacaaaataaattcagccattagtaattgagtaagtgcccacacataaagttggtcctcaatcatagtatnnaagactgtgaagaatccaaacacaaggaaggagaatcgggctaagatcttggtgatactctgctacacaaaggatacaaggattagagatctnnnnnnnnnnagtcatttaattctgttgcacccagtgtaaggtttctcaaactttatnnnnnnnnnnnnncattgttttagagattcatatttaagatgttaaataacatacnnnnnnntaaatctagatcctggtaaaacatcttccaacaactgacctcagagccatggtaatgatttnnnnnnnnnnnatatgaattaaaacgatatttgtgttgatttggatggttccatgttggtttacgtgattatttgatgaatgtatgcaatctacgaaatttttccatgaaaataattttattttctttctgaaaatattttatttgg

SEQ ID NO: 153581 - DNA, 894 bp, Cannabis sativa
aacccccaggttccatcagcagggcatgccgcggcatatgggttccaaacccagaaaccagcagccaaaatcatgaatttcagcaacacaactcaatcaaattcatcccaaataacaatcaaactcccaaaacatgttcacaacttgctaagctcaaagatagggtacaatatatacaattcatgtatcaacttccaataataaacctcaaaattcagattgccaaatcaactcaaaatatgcttaaaactcacaacttcaagctctcaaacttgagcttcaaacccgcatatcaacaataaaaaaaattcagcagcataacaccactaaaatatgaaattccaacctagaaaacttcatacaatctctgcccaaactcatcaaagaagcatacaacaaccacaagcttaattaacaagatcaagtatcacatctaacaacatacataattaagaacaccacatctatttcatgctcctctttataaaaaaattcacttaataactaaagattaaccaagaaaagttacctcaaatctcaattcaaggctaaactccaacaattcccaagtatcaagctccaattcatgcaataatcacaccaataagaaatcaaagattgaaaaacaagagggttagggagagaaagagggttcgggtgagagggagaagcaaccagaaaattcatctatttccctaaaaaaaaatcaattttattaagtgtaaatcaaatatggtcaaaagactattttgcccctagggccttaatacacacactcaccctcacaagtgtaaaattgacatttcaagcataaataaatcccaattaaattttagattatcacatatcaaataaaatgccaaataaacaaatctaatttgcatttcgggcccg

SEQ ID NO: 153582 - DNA, 613 bp, Cannabis sativa
  modified_base (562)..(577): a, c, t, g, unknown or other
aaaaaaaaatgggtttgatgcgtgcataccatccgcacgcgcaaacaagaggggctaatcgagaaacctcggccaaggaggctgcatacagcctgtcccgcacacgcatggcccagtttcagacaaacacgacccttcaaaccgagaaaactcaaatagaccttgtccgaggcaagcgtgaccgagtgaacactcggatccgcgcgcacacatgggtgaccacacccctatttattttttaaacttcaaaaatcataactaattcaaattaaatcgaaatttagttctgtaaaaaattgaacttcttaatttttacaaactatccaacaaaaataattctagaaaaaaattcaaattatttttcgtaacaaatttgcaaacatcaaacactcattaaaaaacacatagatcaacatgaattgcatccaaatcacacatatatcattttaagtccaaatttattgaaagtaaatcaattaccatggctttgaggccagttgttggaatatattttaccatgatataaatttaccaccaagtatgtttttaacatcctaaacannnnnnnnnnnnnnnntataaaataaacacataaaaggtacgagaaacctta

SEQ ID NO: 153583 - DNA, 659 bp, Cannabis sativa
acgagagatgcatctgcaggagtgctcaacccaaactgggagggtccatatgtcatcgaagcagtagttggaattagagtttataaattagctcgactcaatggcttgctattaaagaactactggaatgtggaacatttgctaccctactaccaataaataaatgatgtaactcgcattactcatgtaaaattttaaacttcagttatgaataaagagaataatttatattatctaagtaattacaaagtttaactctttaaaaaacacataagagacatttatgtatgattaagcagagttcatttggaaatacatggtatactgcaaacccaccatttcaaaattttttgaaatttaaaggttctcgactaaacctctttgacgaaagaggagtcgaactgttataactccttgaccaaacctctttgacgagagaggggtcgaattgtttcagctttctgatcaaacctttttgacgaagaagggatcaaacaactataatttttgattaaaaacctatctgacaggaaaggaaaatcaaaagttataactcacgtgtaaaactaaatactaacggttcgcgcgagctaggaaagtgctaaacgagacatcacaatatcttaataaaagtgcttgaacctagaaaatagatagat

SEQ ID NO: 153584 - DNA, 502 bp, Cannabis sativa
acaaggttcttaagtccataaatggacctattgagtttgcaaacttttgcttcctacgctagaagcttataaccttatggttgttccatatagataatctctttaagaattccgttaaagaaagctgtcttgacattcatttgccagatttcataatctaaagtggcagctatggagagaagtattatgatggatttgatcatggctaccagactaaaagtatcctcatagtccacaccttctctttgggtataaccctttgcaacaagtctagctttaaaagtttcgacttctccaccagtacctcttttcttcttgtacacccatttacatccaattggatgataatcatcaggtgcttctacatgttcttagactttttttttcttttcatggaatcctttctaaatccatgccgactgaccattgtttctgttccgtacttgccattgcctgtttatatgttaatggatcgtcatcaataccatcaccaacaaccata

SEQ ID NO: 153585 - DNA, 600 bp, Cannabis sativa
  modified_base (27)..(30): a, c, t, g, unknown or other
actaatcagattgtaaagagttttatnnnnggcataaaacccaacatctttctctgaagcgctagtcgaattttgagtataatatcatacataaaagaaaaaaaaaatctaataactaataattagtcagcacataatattgaacactttaaagtgacacataagaagtataaaaaattatttaccaaaaaataaaaacaacaaaaactattcattaaaaaaaaaaagtaaatgacgacataaatacctaatgtttcagattttatacacttaaatactttatatttattttagaggtaaaaataccaatgttatatttctcttacatccgttactaccactttcgttaattcataaatatggacatgtagagggtccatatgcattacatttatttatttttattttaaaacttaatattcttaatattagaaactaaatgactacttgttaaaaaaaaaaaaccagttgtgaaaacaattttcacatggtattgctacttcaattcgataatcatgtttcatatactgcactggttcactcaactatgcactacaaaaaatcttacttttagtaacaataaaacttgtgactaaaagt

SEQ ID NO: 153586 - DNA, 503 bp, Cannabis sativa
atagtaataaaacaaataaaagtttgtaaaaaagttaaccttttcatattgtaaaaaataatttataaaaagaaaaatcacaatctaaaaagtaaccaatcaaaagacatttactaatcttaaaaacaatcaaataataaattacaatacctttaaaataataaagacaatttgactcttaaaaattaaaaaagagcaactacaatagaaaactttctgtaatgtaaataaaaggaaagaaaaatcatgtaattaagataataaaaaatcataaataatccaaattatatttaaaagtcaaaacaaaaaagccacccatcaagcaattacataaattgtaattaaagacttaacagataaaactaattaatcaattaatgatcaaaaaataaaaaaagagtaactaaaaaagaaaacttactgtgatgtaaataaaaggaaatgaaaaagtaaataattaaaagggcattttacataaatgtatacaatattttaattaatta

SEQ ID NO: 153587 - DNA, 584 bp, Cannabis sativa
  modified_base (92)..(110): a, c, t, g, unknown or other
attggattggattggatcgtacggattggattggatcggatactttgtgaacacccctagaaaaaattactaattaacctaataataataannnnnnnnnnnnnnnnnnnaataataataataataaaatattactaatgtatatgtaggatacttctgctgtatacaggttaattttgtgcgtatatgataagaacaatttatggactgtagatcattaagactttatgatatattggataagtagaatgtagataattacatcagattttttttgggttgagatgcaaaataactttaaatttgaaaattaagttagtaaatgtcccctttttaaaaaaaattaaaaaaattgccaaatataataaattagctaataagaattataaatatatatttatcacatatttttttaagaaaaaatatataataataaaattaagttatatataatttttttagtactgtatattattatattgtaacaaaaataaataaatatattagatcattaaatatatacagtagtatttgatatatcgtagtattgaaaattaatataccctagtaataaaactatatac

SEQ ID NO: 153588 - DNA, 510 bp, Cannabis sativa
  modified_base (171)..(179): a, c, t, g, unknown or other
ccggttagccggttttacccagaaaacctacaaaaataagacccccaaccaaaacgtttccaaattcaaccaaactttccagacctgctaattagaccccaatgaacatttctaaagcaacaaaacaaccctacacgcccagaattaaaatccaccattaaagctccaagnnnnnnnnncaaaactcaaacttggttaaatcaaaaaacatgcatcacaacctgcttaaatctacttaaccaagcatataataactgcaagaaaacatccataaaccataacaacaactgcaacaaccaagatcacctttttactatgaaaatcatagttttgagttaaaaactccatacttgcttaaaatcaactaatcatgcttcaaaacctattctatttcacacatgattaaacctcggaaaacaacacataattccagcagcaacaagaaccaaaaactaagcatgcaaactatcattttgacttaaaaactcaagaaaacatcaagaacaagtt

SEQ ID NO: 153589 - DNA, 1160 bp, Cannabis sativa
  modified_base (418)..(419): a, c, t, g, unknown or other
gatcgaaaagtgtatttgttaccgtagttacttacaacagagctatgtgatccaatctgatcttttagcttaacatgagataaaacaaattacaaatataagaaaatgtactttaaatggtggtcacctgacctgagtactttatttcttttatcgaaacccttgagcgtagtccgcccagcaggccattgacttaaaagcaaatgttcattcagtacttaatgtggtcatctgacctagtactttatctgtagtattttcttaaatgttccccattccaatatcgtggtactgaaacgagttgcattttttcatcatacaactgtcgtactttctttggtgtttaggaatacccttcttaggacaatatctcccacgaagaatttccaagccttcacttgtttgttgaaatatcganntactttttgttgatgggctatcaactttaagtttgcagtggctcgttttttttcaatttcatcaagttattctactaggagtatgtgattggtaccttgattgtacgtcaatcttctgtgggatggtggctcgagttcgacgggcagcatagcttcatatccgtacgccatttcaaatagtgtttgtccggttaccgttttctcagttgtacgatatgaccatagaacttcaggaagctcttctggccagtttcctttggcatcttcgagttttttcttcagtgtatctttcaaggtcttgttgactgttttaacttgaccattttcttgaggatgcgccactgcggagaaacttttgatgatatcatggttcgcacagaaatcagtaaaggattgggtgtcgaattacttgccattgtctgaaactatcttgtacggtagtccgaatcggtagattatgttcttcacaataaagtcttgaactttctttgatgtaatggttgcaagtggttcagcttcgatccacttagtaaagtaatcaaccgctaccactgcatactgcactcctcctttacctttgggtaattgtccgatcaggtcaatcccccaaatggcaaaggtccacgaactttgcatatgtgttaacttgttgggtggagctcgtggtatctttgaaaatctctagcatttgtcacacttctttacataggcttttgaatcttcaatcatcgtaggccagaa

SEQ ID NO: 153590 - DNA, 702 bp, Cannabis sativa
attataaaaagataatttaaaaggcaaacaaaaagacccattcatcttttggatctaaaatttcaaaaaaattatatatgtatgtctttgtagatacatgtaaaagagtcaataatatgtgtttgtagacacacatgaataagtcaatccctttgttcattcatactattatcagagaaagaataaataactcattcaacatatattatattttttcataagtaaagatgcaaaaattcaagtcaaatggacctctatttctccaaccggtaacaatggcagattgtcgatggaggccctagctctctttttgtttctctctcagagctttacggtctaccctcgtcgctctctgccgtgagctcaagcgaaccccatctccgaaatatccaacctctgaaaatcctagccacgttctcctccaaccccctctctctcttattttttcccttctccttcttcttcctttctaaaaacattacagtataaatgaaaaaatacaaagcataaactgtataaaagtttaaatatatgtctaatcgtatttttgtaaataaaatatataatttagtataatcttgtaaaaattccctagaaaaacgggttttggtgacacacattgagtaactctaaaactgtttagtgacacttcaacgcgcatcactaatgagggtgactggaaagacaatttttagtgacact

SEQ ID NO: 153591 - DNA, 893 bp, Cannabis sativa
  modified_base (695)..(698): a, c, t, g, unknown or other
ttgctaaaattgaggtaattttgaattagaaattgagtttagaactttttatagcttaagtccgaacattagtggcgtttgccaatcaagtgctcgattttattttctactacgtaagtatggtagtatgtacggtatatatgtgtcctatgaagtttggagtggtttggacaggttccgatagtgtttcggtgagtgcgtaaacttgaaaaatcacatttttttacctctgaaaaattggccaactggttctggccgaccggtttaccatttcgagttgtctcgggtactccggaatcgtatttttgccataacttttcactcgagtgttcgttttagacgttttatatacagtttcaaagcttacgacgagctctaccgtatggtatatgttttagaccaaaaatataagtttaattttagaatatttaaactacggtttttaataggaaatcctaggttatcctttgcaactgttaagtagtgttttgggataaacacttattggtttattattgttatgacatagggcccgagatcattgatcgttctcaaagaaggtcggccaacatacctgaactaaaacttgaggtaagaaaagtataatgtaccacatcgcatgataggttctgaaattattgattgtctgattacgcaatgataatgtaatgatactatggacataatatatgggnnnncctgattaggtgatgcaatattcctgacgacgtatcgggcgtaggtacgggtgtcagtgatatgaaatttcctggttatggcatagattaaaactattgatggtttctttctggcgacgtatcgggtgtaggtacgggcgtcattgacatatgataagtaccgagcgtaggtacgggatcgtctgattagacgat

SEQ ID NO: 153592 - DNA, 993 bp, Cannabis sativa
  modified_base (187)..(188): a, c, t, g, unknown or other
gttgtgtcagttgtaactgtcaacctcaagctgccttctgctttgtaaatccaactataattctcacataatcaaacaccatcgtacggtacaacaagaaacactttgtctactgcaatttcaaacaaaacaaggtgagtacaggaaaaattacaaaaaaataacaaatatcgacatcccatcgatnnccatcgacattatgtcgataaaaataacagcagaaagtatgacaggtcccatcaacaaatggtcgacatactgtcgacatcatgttgacaacattaccaaacatgtgggtggaagtcctcatcgatatatgatcgacacaccatcgacatactatcgacatggactctacaatgcaatttgcatgtcagacacgtgtacaatggtaattaatccattcaactattgacatgctatcgacattgtattgatattcactcgaaaaattcacattgcatgcgttccatttgtgtggttacacatttaatgttaataaattttacatatgttcccaacaacccttcccaactgccacgttgcatgtcagacacgtgtattgtcgataagctatcgacataatatcgacaaattagtatgccgtttcactaaattggcatgttctcgacataatatcgacatagtatcgatattttgtcgacaaatacacccttcatgtgtttcacttgtacagttacacatttaatggccattaaattttcctacattcccaacatgtatactgctctatagaagcaaatccctttctaattcataagtgctcttgtcttctacttctctcttacacggaaaaatttaaggcaaatttctcttattcttaagttctaaatatggcgcctagaaagaacaagggaaaattcacaatcttaaatcctgaagagctcaagcaggagcctaatgttggcataattactcctcaaatgcaaaaagttctagacgccgatagagctttcgaaaaagaacaaaatc

SEQ ID NO: 153593 - DNA, 553 bp, Cannabis sativa
  modified_base (346)..(346): a, c, t, g, unknown or other
ttaaaaattaaagaatagtgctactaggccttaccttgggttcaagaacctttgaatccctactgaaattccagaaaaacaaaattgaattgaagtgatactcctgtagttttttccccagccgaaagagagaaagagagagagagagttgtattctttggtttttctttaattttcctttattttcttcaaatgaaaagagattcactaattaatctctttctgaataacttagttgctaggtttcatctaattaggcagccacctactcccctttaaacaaaagactaaactgccctccaagttataacataggcaatttccaaaactaggggtaaaatggtcnaattccataaccccgctcaaccccgatatttgattttctctaatatatttcccactaagaaataaagttctaaacttacccatgtgtaacgccctaagcctcagggacgccacgtgtgtgcttttataaacttattatcactaatctataaattttggaaaagtgtggtttaatttaaatctttaattaaattcaaaataaagactt

SEQ ID NO: 153594 - DNA, 584 bp, Cannabis sativa
ttttttggaaaaccgtaaaaatataaaaatacattctttgaacgtaaaaatataaatattttacaaaaaatagtgccttatgtaattattcccttaataattacagattttttcaataatatacttgaattattaattttttataaaaataactaaataaatttcaattacaataatattctgtcacgtcactaaaaaatactttaattctaaaataatatgcctgaaacgacattaatcctaaattttaatttttttcgattattttcttaaattttcaaaaataacattttggttacttatgatattgataagaaactaattagttacttttacgtaaaaaaattacttttaaataatataatttgagatacaatttggttatctataaaattttatttgtaaacatcttaataatcaattagttattttaaattataatcagggtcggcactaaaacaaagtgggccatagggaaaaaaaaatttgggcccttatgttagaaaaaatggggtattttttaaaatcgataaaaaaaaaatataattttaaaagagaaaaaaaaaattgggccctgggttggg

SEQ ID NO: 153595 - DNA, 673 bp, Cannabis sativa
  modified_base (27)..(42): a, c, t, g, unknown or other
aggatgttaatgaaacatacatggtannnnnnnnnnnnnnnngtaaaatatttccaacacacatatatcggcatagttaaatgacatagaatcatgacaatatgatacgaaaattacatgcatggtgatctttccatgtcaatttctaattggtcttactttactttatagagatcaagaatttagcttaatgtacaaagtgaaataaattgaataatataattttcgattagaaaaatatccaaaatagacatattttatgaaacaaataaagcacactaaggataataaagacaaactctcacttaatctagatatcctcataatctaaaacacccatacgagcagtgtactcatgaaagaccttgggtggtaagttcttagtaagaaggtctgcaatcatagagtttgtacctaagtattctatacaaatctgtcaactttataccttttcttttacaacaaggagattgatgtcaatgtgttttgatttcgtcgagctcctgttgttgttggaatgcaatacagctaagttattgtcacaatacaacttaattagtctttcaattccatctacaattcacagtccggtgacaaagttcctcagccatataccatggttggatgcctcataacacgcaacaaattttgttgtcatggtggatgaagctat

SEQ ID NO: 153596 - DNA, 1010 bp, Cannabis sativa
cttgatctcttatgtatacactattcacccatctaagccataagctttcttgattatttgcaatggcccaaatgtacttggacattgcagccttgttccatagctgtagttttttgatccccaatccacctgaagttttagattgacaaatattgtcccaagaaacagccattgctccatggaaaacagcctgccctttccacaaaaaagccctgcaaatatcttcaatggatttcaaaattctttttggcataatcacaatctgactccagtatgcttgtattgcaataagcacagagttaattattgtaattcttcccgcaaaagataatttccttgaactccacgtccttattctagctgtcattctttcaaccagaatctcacactctttccctgaaattttccttacacaaattgggattccaagatatgtaaatggaagctcttgtctcataagcccaaatagttacaaaagcttgtttacactcccctgctgcatgttactagaatatatagccgttttgctagcattggcctgaagtaccgaggtaagagagaatagcttgagtgcatgtagcatgtataggacacttgtaaaatctccatggctgaaaagtaacacatcatcagcaaaagccaagtgattcaacttaagatccgagcatctatcatggaaatggaaatcttctctccccaatcttccccattaatctagaaaaatattccatacccaggacaaatagtagaggagacatagggtccccttgcctaagtcctctcctagattcaaagaatccatgtaaggatccattgaacataagagagaacttaggagtagtgatgcaattcataataagttgaatgaaccttctagggaagtttaggcgtgttagcatttcctccaaaaagtcccactcaaccgtgtcataagctttctggagatcaaatttgatcatacaacttggtttgtttgctttcctgtgataatgcctcaccaaatcctgaca

SEQ ID NO: 153597 - DNA, 752 bp, Cannabis sativa
  modified_base (693)..(709): a, c, t, g, unknown or other
accattttagaaaatacagggttcattttgtcatttaacaaaatagatgatccaattaataacttttgcaaaacacagggtccaaaatgatatttacgtaccctaaaaaaaatatataataaaaaaaatagaggctcacgtgaaagatagtgctaaataaatcaagaatatatatcattaagaatatatcctttaaaaattctagaaaagaaaaatcggcacatgtgtaaccctaaaaagtgctttaaaaaactaattcaatcattaagttatggggttggcaagttctaatttggaaagattaaggatccaattgattaaaataattaatttaggaacgccatctccaataaaatgctatatatatttagcacattttataaaattataattaatgtggattaaatttggtactaaatttagcacaaaatataatatgagctaaatttacaccacaataaatatcacattatttatttattcttttctcactaattaatgtaatttataatattttatattttatttagactaatttgcggcataaatatttaagtttaattcacagttgtaaataaataccaaagtttaatttttagctgtaataatacctaagttatatttttgaaactctgtagtataactgttaaatattagttaagtcgttattcacgtgttattttcttattggtnnnnnnnnnnnnnnnnnttttaaaaaaaaataaaattttaacgacttggaccaatcagga

SEQ ID NO: 153598 - DNA, 876 bp, Cannabis sativa
aaagactcattgaggccgagggctaatacccattaatagaaaagctcgcgtactgccttattctagcaacaagaaaattaaggccttactttcaagctcatcctattcaggtgtacactgacgaaccattacgccagatactgcaaaagccagatgcttctggacgactactcaagtggtcggtagagttgggccaatacgaaattaatttccaaccccgaaaaataatcaaaggccaggccttagcagactttgtggtagattgaacaagcaagaaaaaaagcatacgagaaagcaaccctgagccggtacaaacacctcagccaagtaacaatgaagataagccgacctggaaactcgatgtagatgggtcagctacagatcagctatctggtgcaggagttgcccttgtcacgcctggggggcagctcctgcacgctgtagtcaagtttgcattcaaagcatctaataacgaggccgcgtatgaagccttaattgctggattaaaactacaccgcgcgatgaaagccgaacacattgaaatctacagtgattcacagatggtggtaaatcacgtatccgaagaatgcgaggctcgagagaatagatgatagcatatctgagcaaaatacatgatctgctcggacaattcaaaagctacggtctcagacaaattctaagggaagaaaacacaattgcagaccctttagctccattggcaagaagcaatgtaagtgacaaggcgaagttgattcctattcagttccttgaagaccctagcatcattggcacggaagaaatcgagatgattgatacttccccaaactggatgacaccaataacaacctacctcgactttgggaaactcccagataa

SEQ ID NO: 153599 - DNA, 510 bp, Cannabis sativa
tatgagaaaatgataataagtttttttgcacatattttgtaattaattaaaataatgtatacaaaattgtaaaatgcccaaagaaaaataggcaaactcaatgcttttgcaaaataaaaaatcaattgtgtgaaacattatataactaaataaaaaatttgataaattcttttaaaattgtataaaatttattgtcttaaagtaagtaaaaattttaaatttacttaaactaaaaaaaatcattatattgattaattttatacaaacttgtatttttttttgaacaaatacaaattttgtatttttacaaaaataaatcacttttatttaagtaacaaaaaatttaaggagtttttacactacatattaaaatttttacatttttttttcttttttactttggagcgtaatttttttttaaaaatattgtgtactgtgttaagttttcacaattgttttttaattgtttcactgttgtttcaattgttttgttttgttattttataaaaa

SEQ ID NO: 153600 - DNA, 513 bp, Cannabis sativa
  modified_base (443)..(452): a, c, t, g, unknown or other
tggtaaaataacttccaacaatttcggcccataataaaataggttgatcggaccattttcgggttgggttggccgggttggtcgaaacaactcaacccatgaacagccctaactctacaggagtcttgagaactgatttagatatgatgacatttaaaatatcattcgccatcgttaaagcatatccctagctagaatgacactaacagagttgaatagcttagcgtagaccaaccattttcattagtgtgcgattctgatgctccgaacaccattttgttagggactggatggggcagtatcttgcaattcaattctaggttcaattaaatgatccttgaactacatgttcatatattctccacccctatcagttcgcaagatccttcatgttttacctaattggttttgcgctaaagcatgtgttggaatttattttaccnnnnnnnnnnatctactcacaagcatgttgtttaacaccctaaatatgaactttctaaaacgatatgaaat

SEQ ID NO: 153601 - DNA, 590 bp, Cannabis sativa
ctctcccgacacctggttcacgacaagttgggagtcgctgtagacttctactcttttggcccccacagcctttgctaatatcagccgtgctatcaaggcttcatactcggcctcgttatttgaagcagaaaagtcgaaccgtagggatgcctggagtcgaagtccactcggagatatcattgcaacccccactctggatccattttcgttggaggctctgtccaataatactttccatgctgggactgacggtgtcggtatgttcgcggttgcttcgacttcattacattcagtgatgaagtctgctagcgcttgcccctttatggaaatacggggaacgtagtgtaagtcaaattgacttaactccatttcccatttgaggagccttccgaatgcctctggcttttgtaggacttggcggagtgggtgattggtcaacatcttgattgggtgagcttggaagtagggtctcaacttcctcgaggccattaggagacaaacgaccaatttttcaatgacggggtatcgcgtcttcgcccctatcatgcgcttgctgacgtagtacacgggatgctgagttttctcctctt

SEQ ID NO: 153602 - DNA, 550 bp, Cannabis sativa
aacaacccattatccctaaacccaccagatcagtcgtgcacctcaaaaacctatccatctcaatgattacaaatgtgactttgtcactcaaaccaacactcaacatcctttcactaatttcatctcttatcacaggttttcctctgatttttgagctgctatacttgctcttaatctattctccacacctacatcatataaacaagcttgcaaatacaaaatttggaacaatgctgtggatgtaaagatagatgcccttgaaaaaaaatcacacatggatagttgtcccactaccccctaatcaacatgttattggaaacaattgggtttataggattaaatacaatcctgacggttcagttgagaggtgcaaagctcgtttagttgcaaaagggtatgctcaaaagccagtcattgactatttcgagacctatgcccttgtagcaaaatttaacacattaaaacttctctttggccttgctgccatcaacaattggcacttacatcacatggacataaacaatgcttttttgcatggagaattaaatga

SEQ ID NO: 153603 - DNA, 545 bp, Cannabis sativa
  modified_base (494)..(501): a, c, t, g, unknown or other
cttaaccattatttaagtcataatcataatctgtcgtttgactactatgtattttaaaaatacaatcttttttaggggaaaaaacaaatctatgtattatgtacatatatatagttgcccctttccatgtactaatttattaatttattaattaaattcataatcaatactgatttttttattttttttatttttactctttgaacttttttattaacaaaaatacacttctagtaaaacaataaattatttttttggttgttttctaggcagattagatgaaccttaggagaaaaaaaaacattattggataatttatttaaaaaatatgtggtatttttgaaaattactaaaaaatatgtataattttaaataaaaaatatttttttagcacttgtactggatggaccctaggcgcgaacctagtcagatcctagttttatagtttatttatagttgtattatagttactagggtaaataccattttggacnnnnnnnnttgcaaaagttactaattggaccctgtgttttgttaaatgacaa

SEQ ID NO: 153604 - DNA, 875 bp, Cannabis sativa
gatcttgtgtttgtgtttgatctgggatttctgggttgtttgagggttggcttcgagtttctcggagagaaactctatgctagggtttcgagcaaaacctagggctgagggaaagtgaatgggaaggttctcgatcaattgggttttgtctaaggaaaaacggggtcgtattgacccttctgactttgaaaagtcaggattgtaaaggtcgaaattgaccttgtttaaactgattaaattgattgttggtgtagggcaaaattggtaattggctaatttcctacaatggtatcagagcttgattaagctggaagattcaacgttcaaactaatcagggaggaagaacgctcaagcaagaaatcaagaagcacaaacaagaattttaagaactcaaccttgatctaaagaaatatttaacaaaggatttctgggaacatttctcaaattaatcttaatataaatttcttattatatttatctttatctgattttattaaacatgggcaatttaatggtagacattgacaaatttgatggttctggtgattacaggatttggaggagaaagataaagtcactattggctcaacaaaagctattgagagtacttaatgaccctataaaatggccagaaaggacaaccaagattcaacaagaagaatacttggaaactgcaactggtatcatgatattcaatttatcagatgccattatcaggttgattgacaaagaagaaacccctgccaaaatttggaagaaattaaaagagcagtttcaacaaaaatccttagccaacaagatattcttgaaggaaaggatctttggttttaagatgagttcatccaaaacccttgatcagaatttggatgaattc

SEQ ID NO: 153605 - DNA, 543 bp, Cannabis sativa
tgatgttggaactaagagttgtaaaattctcaatcattgaaatttttgggcacaatttgagatataaaatttattgtgggtgcttgatggtttatagtgtgcttatggtataatatagcctaaataacttttcatctacctattacctaagccaatacattacaacgttgaaagtccttgtgattccgaacaagaattgctgacattagtggagagaggtaagtcatgcaagcatattgatcattggattgtggaaagttagaaagagtagaattgatatgatgtttttcaaatattgaagttaatttacatctttacattatttttcaaagtaagcatccgaattaattttagaattttgggattgaaattctggtttaaataattgattgaagtttcacaggttgcagcagcggtttgattgtctgaaggcttagttaactgtatgttagtttgtgttttttttttctttgacttagtttttagtcttactcgagggcgagtaaggatttagtttgggggaatttgttaggatatttttag

SEQ ID NO: 153606 - DNA, 527 bp, Cannabis sativa
atttactataaatctaagaaatatatataatttatattaattatatatggataaataaaagtttaaaatgtataaatttgaaccttaatcacaacctccaactaacttattgctagcctctagcaattcaagcgaacaaaaataataccaacataatattttttagatcaaaaattgtaaaaatcgcacaagtattcaagaaaaatattagtaacaagctaataagaactataaaattaccttgaataaatctagagttgtgagtgtgtgcaccaaacccgaacctttttaccgcaagccataacacacaaatgctttcgaaaaatataccaagtgaaagtctcaacttcattagcctcacaggtcatgaaaaatatttatatatcgctacgttattcactcatggagttggaaattgaaaagtgagcactcgaaatggatagatcaatttaggacaaacatttgaatagacattgaaaccaagataggttatgaattatttggacaaaccaccataaagaatacca

SEQ ID NO: 153607 - DNA, 619 bp, Cannabis sativa
tatagaacatagaaaccctagagatagccacaaagtcaaatctacagttgtacaaaactttcttaaagaaaatcctgaattacagcatcaaagatagattctgttgcagcaaatcagaccaaaaaaggaaacttgccaaaaatgtgtctaatcatgtatttggtcttgatacctaccaaaaacagtgtgtttgatttgatcttatgaagacataatcgaactcattaaggaaaaataagattagtcaaagtttccataaaaagtaaactttccataagagaatttcttctcttacaagaagtttccatacaagtaaaatggacagctgaaaaataattcttttctaagatagaatagagcaataaaaacatataattaaggtgataaaattgatttatgaatacaaataaatctcaccataaataaaaaatattttggcatctaaatttccaaaaaaaaggactttacaacattagaaacatacaatcaattggtttaaacatatttttattcattgttttaggttttaatattctgtagacatatatatagattgttgggttcactcctttttgttgggcttggaccaataaggactaaatgttggaaattattttac

SEQ ID NO: 153608 - DNA, 578 bp, Cannabis sativa
  modified_base (220)..(223): a, c, t, g, unknown or other
agagttcatttaagtaatagtcgataaatcaggaccaaattagttgacgcaaaaaagattacaaaaattctatcttatatgattttttttatagaggggtgctaattataactttctattacaatctcttaatcaaccttcacgtacaaaatcacatactgaaatattttttttcatagcgttattcattatagttacagtatcatccttgtaaattttnnnnaaattctgaatagtttacaataccgaaaacagagttcctgatatttcagtttatcacgtgtgttcaaaaaatttcaaacgtactttcggcactgtaaattattcgaaaatttttaaaaatttataggaatgatgttgtaagcataatgaataccgccgtgaaaaaaaaattttaaaaaaaaaattcccacatgtattctcgagcgttgaggttgattaagagattgtaacaggaagttgatggtaacactcctcttctttataatatcaagaaaattaatatctattattacatgttattggttacacaaggaaattgtttcttttttttttctttcttttcttttgtttttttt

SEQ ID NO: 153609 - DNA, 709 bp, Cannabis sativa
aaaaattatgttgtaattaaaaatttgtcatgtagctattttttgtagtaaacacttttcaatcaaaagtgtactatcacaccaggaagaatgaatacttcaatgtttatttaaaagtggtacataacaaaagaatcaatggagtgctttcctcacttattaacaacataatcctagagagaacaacaaatcatctaagactctctaacataaaagtggaaaaacttagccttaatcacatggttttggacatccttatataaataccttttacaattaagttggttgggattgtcatagctgacttgatttagaataagtcaagtaagttttcaactaaaaagtttaggttgaataaagcttgaaaattttagaccactccatatattttttgagtctttgggtcagtttggcacagctatgctgtggggaaagattaaatgggactccaatggcagcttttccaatagctagtccttgttttacttcatttgaagcagtatatatatctacaatagaaaatttcatgataaatatactaaaatactgaagaaagaaacaatatttacttactttctttttgttggaagtgaaacccataaaagacagggtttataaatatattgagataaagatctagtcataagcaaagtgaaatcccaacagaaaaggctcttaggactacaaacacaggaaggctacaatataa

SEQ ID NO: 153610 - DNA, 636 bp, Cannabis sativa
aacgagtgaatcaaagaacctaataacatgaacaagagttcatgattactcaagatttaggccgatctactattgatcatcattatgatataaataggtctttatagtaagtggtaagtttgataaagacagctttatccaaaatcagtccttgtcatatataatctctattatatacaacaccttcacttagatatcatgctacatcagtaattcgaatcaagattacttgcaccgaataatgggcattactgacctgcactagcaaccattgattaaagattctcaaacttaacatgatgctgactattttattcatggctaagtgatcttaattctccgtataaatacaagtcacaacctcataaatgaataagaatttttttaatatttatatataaattattcaatattaaatattaataatataatatttatacatatattaaaatatttaactcttatttataatcaaaaatgtctttacaggcttttcaagaaatagaccctaacgctttcaagatgaatctttcttgaaagatgattataagaagttgctagtggattacatggacacctttccatcattgggatgatgaattcctttatcttcctgtgtttggcctttctgctcat

SEQ ID NO: 153611 - DNA, 788 bp, Cannabis sativa
aaacgccttattaaggagaataatatcgattttgagttgtttggttcgcaagaaaattatgtattattttcttttctagttttctcggaaaatcatttcaccagagttagagaacttataatcactgctgttatatataatttcttttttctttttgtacatgtggaattttaattttcactcaaaataaaataaagaagaaaacctttgagcttggtcgatcaacttttcagatgtttactcaatcattttccgtttggttggctagaaatagtaaccgaaaaataaagaaaaaagaatgaaaagaatagaaaattttactttgagaaaatgattttaatgttttgcattgtttgttgtgaatattttacatttcacaagttttgaaacctttttttatttttttgtaaatgtaagaattgtttttgatgtgattttctgcttaactacattttctcttcattccattataaaatacaggggcttgcttatgaaggaatgaagtaaagtgtagtgtgttcacaatcgagagttgggtttgctacttttagaggtacattaattatctgtggtttattttattgtaatgaaaacaaatttaaccttgttgttttcttaattagtttttttgtaaaaaaaatagtaaagtttatggtatatttgaaaagaaacaaattactttctaagccataaaacaaagtttatggtatataagaattgttccacccttacttgggcctcgtaaattcatgagtgattttaatcactttataaaaaaaaaaaaaaaa

SEQ ID NO: 153612 - DNA, 512 bp, Cannabis sativa
tcagtctcttcttcaccttctacatttatattttcaaccatgtcagctggtgcttatgctcctttttctgttgctctatcttttccaaaaataatagctattctctcaaacatggaaaaagatttatttccatcccttagcatccttaatatgatgcacgaataaattaaatatacatcccttagtacttgccacaacatattaaactagtggaaaaacttacaatatataagaaaataaaaataaataatctataaacacgaaacttgagtataggtaaaccaagcttcatcactatcaacctccacacacttttttacaccaactacttgtgttgaccatgacgaagacttgtaattgtttcttcaacattgaatacttgctctcaatgtgttttaccgagatttttagaaactagatatttaagaactaaagaaatttaacttgcaaaaataaaaagatgaaggttttttacgtggttcgggtgttaataaagttggaacttgttttac

SEQ ID NO: 153613 - DNA, 504 bp, Cannabis sativa
ttatttaataattaatttaattattaaaaaaatagtttgggcatttataggattgaaagtacgaaaagttgtatatgtgaaaaatagataaatgattgagaaaaatagaaaaactctaactagtgatggacccacataaggggttggccactaaaccctatttttgcactatttttattattttttattccaaataattcaatcctaacccttgtagaactagtataaaaagaagagaaaagtctcactatcaagactaatgcttctacagctttaaacctagtcttcattctatctgacaactagtgttttctggtttcttcttcttcttttctctcttctaattcaaaatttttagtctctatcactataaaaattctagccttagtggttgagggatccccacccatagcaagttagtcttcaatcatagtgtgtaagattgtgaagaatccaaacaactgaaggagtgttgggcttaaatctgagtggaaggagtcattt

SEQ ID NO: 153614 - DNA, 518 bp, Cannabis sativa
attgctggagaaggtagtcacctcatggcagctctaactttttcttgcccttacctgcaccacatagcacccgtgagtcacaatgacttggcaagaaaaataataataataatcatatagtttattattcgaatattatcatttatacacaataagaatcaaaccattacatattcttcataagataaaatccaaatcactactggcatctgccatgaataagtatcagtatacagatatcgagtaatacaaaatcattatactaataataggaatcacattcatttaaaaatataaattatatatatgttacttcataaactaaccatcttcattacatcacattgcctaataaggcaagtcgatgcttttatatgataatcctgtattgtgttgcctaatcaggcaatctcgtaccatagccttacaccatatatcgcataactgcatcacctaatcaggggagcccgtgccaaaaacttgcacccatatatctattggaaattattttacgagga

SEQ ID NO: 153615 - DNA, 1039 bp, Cannabis sativa
catacatcacaaccgctacaaccacctcagacatcacagccgctacaacaacctcagacatcacagcgctagccatcgagtcttccagagttggataagaacgagagatcaaatgattttttatctcagttgtagaactaaaagactactattatattttttttttttgtaagaactattataatatttatttttctctaattaagttgtcttagttattaatatttgtaagaactatttaattttattatgttattgtgctactatattaatgaagtaatttaaatttgatattaattattatttttaattttatttgttattattattatttttaacaaattaaaaattaatatttcaaataatataaattatataaattttttaatataaaaacctttaggggtgacattatcgcccccaaaagaagtcaacaaatataacaattctgacaacaccttttaggggcgacattttgggtattaggggcgatattgtcgcctctaaaagtgaaaagcagaaattcgtgtttcatttttaggggcgatagtgttgtcccaattgtcaagcgacttttttgtcgcccttaatggtatctttaggcgcaaatttttagaggcgaccttttaagggcgacatgtcgccactaaaagaaattaggagcgatttatagttgttttaggggcgacaaaataaatttgttgtagtgttttttgtgttgttactttttattcttataatttttttgttagatattattttatttttcttataagctttttgcttcttagtaattaatagtagagcaaatcatatgaacttatatttaattagatagaacgactaatgatcttagcttcaataagtaaacttatactacactatgtgcttttttaaacataatttttttaatatttgtttaaacataattgataaaagaaagatacatgtagggatgcacacggggcggggaattagcggggagtgctctccccgtccccatccccgttaaggatttcaatccccatccccgcttatt

SEQ ID NO: 153616 - DNA, 894 bp, Cannabis sativa
aaacaacagaacccaacttacatccttgacagatttcgaagatttggttctctttgccttacaagattcaatcttagctggaaaaagtcttttttgtataaccagatggctctgcaacatcaccattcccttcttcgcaatgtctttcaaacccattttaggataactttagaagactttcttggtatttttcgaattttttttaaggtgaaggggacttggaacccgacctagtcatggccatttatagaagaagaaaattaactgtaagaggaaaaaaaaagtaactatggaaggcaggggagatcatagcatagatgggaggttgaaattcatgggttagggcttcataggggatgctagtgggttatggaaaaagaaaaaaagctaacagaaaataaaagaaaattaaaaaaatgaatgaaagggaagaaggtgacagagatggagtgtaatataggagaaaacccatgacataagcatgcataggtatttttgtaattatcaaactttttaaaatataatattgaaaaataaattttttaaaaatgtttaaataaccgaataaagaaaaaaaaatgtaaaataatggcaaaaaaagacaccaagtgtaaaaattcatattttttttttcttcacaaaaatgcttaaatatatagcactttaaattagcttatgccatgagaaaaattatttgttatatagagataaaatagttaaaattgatattatgtcaaaatttaattaatatttattttaatttttataaaatgaaaaagtcccattttaaattttgtcttaggcctttcaacaccttgaggtggtcctggtttgaatagttcatttatttatagggatattggcggctaaaccacttgaactttacggtttgta

SEQ ID NO: 153617 - DNA, 578 bp, Cannabis sativa
ccaacaacatagagcttaaaagaaagatcaagatggaagcacacactacaccctactcaatgcatccagggtcaaccaaaatgtacaatgacttaaaaaccatgtattagtggccaggattgaagagggatgtagttgaattcctagccagatgtcgcatatgacaacaagttaaggctgaacatcaaagaccagcagggatgttgtaacccttggaaatcccaaaatggaagtgggaagatgtagccatggactttgtgacaagactaccccaaacaaccaagcaacacgactcagttgggtagtcatagatagactcataaagtcagcacactttattcctgtaaagtctacttacaatgtaaggcagtacactgacttgtacgtacaaaagatattgaggtttcatagagttccaaagacgatagtctctgatagaggttcagtattcacctccaagttctaggagagtctacataaggcaatggggacatgattgaaattaagtacaacatttcatccccaaaaagatggaaaatctgaacgcaccatccaaatacttgaggatatgcttcgag

SEQ ID NO: 153618 - DNA, 659 bp, Cannabis sativa
tcaaataataaagagatccacatagattttatgcacgaaaacacgaaaaaaaatataaactttagtaacacgaagtttattgggtctaaaaaagttttaattgaaaattttttccatccttaagtttttcaagggattttcaatgcttagatcgatctataatactatacgaatatagtaatatattaagaattcgaaataaacaccgaaaaaaaatgaaaaacggaaaaaataaattttacaccgataactttatgttatatatatatatatgcatgtatatatatcacataaatgaaaatgaatattatgaatatattatgcgataaaacatatatataatatacaatatatatataaacatatatacacgtaaatatactgaaaaatgaaaatatatatatataccatacgtgtataagtatataatatatatatatgaacagtatgaataaagatatatatatatgtatatacgtatgaaaatatatatacttgggattatatgaatatgagtatatatatatacaccaactgaactaaatgaacagtgtacacaagtgtatatatatatatatatgaaactcaaccaaaatcaaggcagagataaaaccgctctgataccaactgttaggctataatgtagtatatgtaatata

SEQ ID NO: 153619 - DNA, 520 bp, Cannabis sativa
aaggtgaaatgaagaaagagcataaaagaatacaaatattattactcatatctgtctaaatttataacacgttatcagcacgatcactctatctcatcatacacatataggtactctatcttttatacatatatttcaattactctgtaaatatattttatattaatttaaacatctaacacaacatttattattataatatagagaatatatacattgttaacttctaacataattattattattataactaaattaacttctaacataataactaacataacatctaagagattattattattaatctaacttctaatatatattattactctttattattgttaatctaattttaacatattactgtgaatggaaggtaatacctcctaatgcttctatatatataaataaatataacaatatatttgtcattatttactactatttcatttccaattgttatttcataaaatcaagagcatgatcaccattttttgttcttcttattcttactatt

SEQ ID NO: 153620 - DNA, 582 bp, Cannabis sativa
  modified_base (514)..(557): a, c, t, g, unknown or other
tattcacataagacaatctagggttttctaccaaaccccgtggtataaatacacgaaaataaaatttatattttggctctaagacatacaccatattatagaattcatcggaagcttcgaaacagtatatagaatgtccaaaacggactctcgagtcaaaagttatgacaaaaatacgatttctgatctcttagaaatttctaaaaactataaaacacgaaaatctcaattttcgcactcaccgaaacactaccaaaacttatccaaatcacttcaaacttcacagggcacatatataccatgaatactaccattcttatgtaacaaaaattaaaatcgagccctaatacagaaaacgccattaacgctcggactaagctttaaaaagttccaaactcgatttctaatccaaaattacttcaatttcagcaagaaaacaatggaactagtcccatgactacccgagaacaatcctattaggttagaaccttcataactgtaacaccctaactannnnnnnnnnnnnnnnnnnnnnnnnnnnnnnnnnnnnnnnnnnntgctaatcaacaaggtttatggaaa

SEQ ID NO: 153621 - DNA, 680 bp, Cannabis sativa
aaccccacaaattccacctggtttgtttacttgagtaagtatggacacagagcagattaaaggtaaaggcaaaaccgttccatcaataagattttccttcacatgtgaaggatcaacaatctccaatgttcagcaatttcaggcatagcctgaatttctcactagtgacagccttggtgaacatatcagcagggttttcatgtgtgcatattttctttactttgaccaatttgctagcaataatgtctctaatgaagtgtagtttgatgtcaatatgctttgacctctcatggtacatgggattcttcatgagatgaatagcactttgattgtcacaatgtaagaacaagttgtcagattcaattcccagttcagatgtcaagccctttaaccagatagcttcttttacagcctctgttgcagccatatactcggcttcagtggaggataaagcaacaaccttttgtaggtttgctttccaactaacacagcccccaaatacagtgaaaacaaagcctgacagtgacctccttgtatccaagttccctgcataatcagcatctacaaaaccagtaacattgtcattatacttgctgtcatttcccagcagtaaaccagttttgagtgtgccctttagatacctcagtatccattttaatcctttccaatgttcttcacca

SEQ ID NO: 153622 - DNA, 1150 bp, Cannabis sativa
taggcccgatggtgtccgatggtggaccgatgtaggtctgatgggattgggtttatatgtgaattctaggttgaagatgaagtcccgttatttttattttatttgtatcttatttttatttattttatttttattttctgtcaattttacagattcaagaccgccacgccttattattccagtctcagagcattgcaccgggcgtgtcacttggcgtggtggaagttattactatccgaagatcaaggcaaagtttgacaaattccaattattggacaaagtgaaggaatccccttttaaacaattcttcgagaggactccgataaatttttttggggcattgatccattagttattcatgcacaagattaaatctgagaaggcagacgaggtacattttttttggaaaagaagagatgcagatttagccgggtcgagtttgcattggtgatagggttgaacttgttccccggggctacggaagaagatattgaagaaaaaggaaattcaaaaaggttgattatcgagtacttcaacggtaattcatccatcagctttggccaactgcgcaaagttttcgagagttgcatagaagcggatgatgtgtacaagttggggatggcattgtttgttatgggcgtcctcactggtaaggaggagaagactgctattcctccatttgtgataagaatggttaataacctgaatttcttttatgagtaatcgtggggaaagatctctttcaacaagttgatggaaacttgcaacaaagattttgtagaggtgaagactcggatgcacaagaagattgagaagggagtttctcagaaggaggcaaaatactcatcatacggctatactgcagcgttgcagtattgggcctatgaggccatcttggagttgggcaatgaatatgcagtgaggaaatcgcatcgctttacaagaatggttaatttggagagtaaggagaagaccacactcgggaaggatgaagttacaagattatttttgaaaaatgtaagttttttttatgctttgcagtcatatatatgttattttaaattctatctaataagacattggtttttattttcagttgacagtgtactctatgttatgtccccgaaaaaatgaagaggagttcgtgagg

SEQ ID NO: 153623 - DNA, 1211 bp, Cannabis sativa
  modified_base (196)..(205): a, c, t, g, unknown or other
ctcctgaccagttcagacccagtctttggtggtccagactccttagacttggcaaatttgggagtagaaggatttgcagttgtcagctccttggaaaggtcaataacctctctagaagttctcttttgccgaggacccctctccgcccttaagtttcttggccggaggggaggcgctagagcttccgcccatcctnnnnnnnnnngcatcaagcatctgtcgagacatgtctgcacagaacaaaaacagcgtggttagaaaaagctagcaggaaatacaaagcatgaaagtcaagaagctgaaaaagaagtaaaatgcagagtgactgcccgcccagaagatcagaagtccatcagcacctgacatcgcgtttatctcagccatgacaaccttcccttttccagcaaaaggataagattgtcgaacaggtgaaatgggctcccttctgcgaattgcaagttcaacaggcctgggcgtggccgggagtttcttcttcctcttcaatggggtcacctgcccagcctcagccttagtctcggcttcatctttaggattcaagggctcctgagcgtactgtttggccctggcacgtcctttcaacttagcctcccgcttaagttgaatgagctcatcctccttatgagctcgttcaggccggccagcatcagacttcaccttcttccccaccacggacttagaagaaaagtcctctgggtaaagcccatacttcaccagattatcatcggaggtcaactggatgatattcctatcttcctccggcaaccggttacgtttccgagctctatccctaagagcaagggtgaggggaggacggtgatatgtcggaatctgctgaaaccgagtccgggtgatgttcggatctttcactatgaagtacgcatcaacaaaacgccctattttgttgctagccttgtggtccgtgtcgctcaaccacttgaagcctggctgggagaagtagaaataccgcaacctgccttgcttgggggtagacttcaggtcgaaaaacaaggcaatctcgttgggggaacgagcatcccatcctttggaagcgtagaggacgaagaggacagacaagtacttaaagctctttggagtaatatgggccgggcagaggccaaagaagttcgccacatccctaaagtacttatgcaagggcatcaggccccttgctgaccatgagcccccgacca

SEQ ID NO: 153624 - DNA, 540 bp, Cannabis sativa
gagagacctgggttttagaggaatcttctattgagggcaaggttcgtattgaattcagttggaacttggaaattggaagagaaaaacaaatgtttcggttgattcggtctcagtgagttgacaggtgtccagatattactccatctactccgcacaatctaatctaccatgaataaaataccctttctttattttttatttttttttttctgagtacttcgcataatattgattttggtttttaaaatattcggctcatcaatttttttttttttgaatttttatatttacaggaatttagtcattttgttaagttctattctattattctgtgtaaatatatattaaaattcaatttttaaaaattaaattttacgaaaataaacttgagtatatttatttttattaaaaaaatgtagattttttttaagtaacccttatatttttttagtttaatttataacttttttcaaaataattttatatttttattgaatttttaaaaaaattctttatttattaagatatgagtttataaat

SEQ ID NO: 153625 - DNA, 566 bp, Cannabis sativa
  modified_base (193)..(196): a, c, t, g, unknown or other
tggctttccaaacgcgcccttagtaattatagaattatatttactgagttttactgcagtgttcattgatagaatcaattctagtgattagcccttcttatgccgattcataattagttttgatcaaattactgttttacgtttctaactacttctttatcctttaggaccgttaattcactagtgaaagtannnnttagatccaatctaaatttgtgcataactttttagctctagtgttgaccttgcatttatccaatgacagtgagtcaaattaaagcgattaagaataattaaacaataaatatgaattgagattaagtaaagaaaataccagaattatagaggttcaaccccttgatagtggtaatagcctactcccctttagtttgcattgacttgagagtagagaagcaagaaagccttgatctctctcgaaaagctcttacaatgagatctgagtattttactcttgaatctaggttcctcgcaggaaaccaacaaaaattcacaactcaatcaattcaaacccaattcaaacacaaccttccagacctgctatttag

SEQ ID NO: 153626 - DNA, 633 bp, Cannabis sativa
atatatattaggaaattaatatttatgtaaattattttaattttataaataatttctaaaattattttaagagaagctacatatcaattctatttggtttagcttctataacttttttttagtttttagaattaaaacaatcattttaggtttatttagataaaaaatgaaaaattctttttttaaaaaaaaaaatttaaaagtccttttgaaagaagcgttattttttaaattaaaataatttataatacataaattaattaaatattattatattatattgagggggtgactactcaatggttagccattatcattgcatttttttttacctgtaatagcatgttacttttaggtaaaaatccatttttcagaattaattaattataatttactatttttttaaaataattaattgaatatttaacaagacctcttttaacaattaatatttttaaataatttatttttatataaattcctactataattattttaataataaagccatttaattataatatttaacaatgaaattttaattttttttataaaaattagacttctttttaaatagattaaaattctcttctcgtataataaatttttaaataattaactatttttaaatga

SEQ ID NO: 153627 - DNA, 605 bp, Cannabis sativa
  modified_base (548)..(568): a, c, t, g, unknown or other
taatttcaacacaatacactaaaatcagcaaccagaacctagaatcaactgaaaatcagcttagaaatcaaattacacaacctttaaatcctaacagcccctaactttcaaaatttcataaccaaaccaaaaagaacctaaagaaatcaaaagacaaaagcttctaggatttaccttggttaaaatctcctctaactcttgctggaaacaccaaaaaccagcagcaattccttggttcctagctagttcgaagagagagaagggaaagagagaggttctttgatttttggctttttctttcttaatttcctttattttcctcaaatgaaaataagattaattgcattaatcttagctgaaagtagaagctaggtgtcaacatctagggtagccaccaaatcacccatgtggcaaattactaaaatgccctttcttttataacttaggcattttcaagacaatgggtaaaatggtcaaaatccacaaccccgctcaacctcagtactctatttccaccaatatgcatcccactaagaaataaggttctnnnnnnnnnnnnnnnnnnnnnctagccatccattgcatttttcgttgtcgccgagcaa

SEQ ID NO: 153628 - DNA, 536 bp, Cannabis sativa
  modified_base (188)..(188): a, c, t, g, unknown or other
  modified_base (289)..(291): a, c, t, g, unknown or other
ttcacaattatagtgatgtcaacatagagaaaggtaattgtgattatatacttcaaaagataatgtcccattattcataagtacactagatttactttgatgtgatagtcagcgataaagcttacttacaccttagataagtgttatgttctttttaggacactgacaaagtatgctagtatcggatntatggagtatacattggacttggaccgatattgatgttggtaaagatattacaatcttatcgttttctctttctaagtaaatatcactggttgatcttagnnnaaaagatcttaatcttgacatggttaggtttgatctcaagggtgttatttgtgttcttagagttgttagccaaagcctacattttgattcggtaagacgtatttcttgggaacatgatagtacaactgagtaggagcgccaatcttagatatagaatctataacttctatctagacatagaagtgaaatgatgatttccttcgagcttggcttgagataaatagaagagctcttatttcagtaat

SEQ ID NO: 153629 - DNA, 640 bp, Cannabis sativa
  modified_base (398)..(405): a, c, t, g, unknown or other
  modified_base (474)..(477): a, c, t, g, unknown or other
aaggatacactaaagaagaaactcgaagatgccaaaggaaaatggccagaggaacttctcgaagtcctatggtcataccgtacaacggaaaaaatagcaaccggtcagacaccatttgcaatggcgtacggttatgaagctatgttgcctgtcaaactcaagccaccttcccacagaagattgacgtacaatcaaggtaccaatcacatactccttacagaatcacttgatgaaatcgaagaaagacgagcaactgtaaacttaaagttgatggcccatcaacaaaaagtagctcggtatttcaacaaacaagtgaaagctcggaaattcttcgtgggagatatgttcctaagaagggtattactaaacaccgaagacagcacggcaggtgtactagnnnnnnnntgggaaggaccatatcaagttgtcaaagttctcgactcacgagcatacaaattaggtaagtatgacgannnnatgcaactcattctagtaccacgatactggaatggagaacatttaagaaaatactagcaataaagtaccatgttggatgacaactttaagtactaaatgaacattttctcttaagtgaatggcctactgggcggactacgcccaaaggtttcgataaaagaaa

SEQ ID NO: 153630 - DNA, 506 bp, Cannabis sativa
  modified_base (164)..(172): a, c, t, g, unknown or other
gggtctatatttagggacccactgggtaattaactgggagtacgctcccagcctcatttccattaaagattttaattcaatctctgcttattttttattgaggttggaagcagaaacaagacggtgaatctcctaatacaaaataaaatttataataaaaattnnnnnnnnnaaaaatattaaattaattgaaaattaacatattacacattaattattatttaataaattagttattatccaaaagataacttaaaatttataaaaagatattaatatactaaaacaagcaaacataaattattaattataatatattactaaaaatataagagaaaatacaggttcccaggtcctcggggccagtgagtgtcgtttctgttcttcccctgttccacatttagatggaaaattctcaccccattattccataagactaggggtgtgcagaaatcgatccaatccaatgtgaaccgattgatccaattacaaccgaccgccaaaca

SEQ ID NO: 153631 - DNA, 689 bp, Cannabis sativa
cctacggaagttccacactagtgacggaaggtatttttaccgccaaaaatacgactttggtatttatctgctactcgggataaaacttaggtatttatgccgcaaattactctacttaatatatcttaatcatttcttctcttttactaataaataaggaattcatgaatgaattaaagaagaaagaagaagaagaatagaagaacattttagttaccatcaagatttctctaaaggatgccttttttgtttccatacgtaattactactacaacttcaacacacactcaaatattaataacttttttcttttctctaattaaaatttaacacctaccatttatctatatataccatatcattaatataactctaatcaaattaggatttatatttatcttttaattaatttttatttaaaaaaaaatagatattttatcagattttctctcaccgacatcattttcaaatgatattttttaaaaaaaataaaatatatatttttaaacttttttttttttttttgagaaaatatttttaaactatttatttttgtaaactttgattttattgggtagttatgaaataaaagtgattttaaatgggccttagaattgagaggagcccatattgatacagttcttcttcgtcttcttccttcttatccaaacgccatacttaccttactt

SEQ ID NO: 153632 - DNA, 827 bp, Cannabis sativa
ttttagcaagtttctttcatcttgaactcgaggatcaagatcttcatctttcttcttattttcttccgccaagattgtcattaattgatgaccggcttttctatgctgtaactctatgcgatagcaatcgtgagccagcatctggtcgccacgcactactcccacgccatctggtgtttggaattttgaggataagtgcttgatcgaactgactgtccctagtccgatcagtactggacgacccaacaatatgttgtaagccgaaggcaggtcaacaactaagaaatcttgcataacagtagcagttaaaggttcctcgcctaaggttaatgtgagctcgattatgccaaggctatcgatgctatctctggtgaatccacgaaggtttaccatacaagaccttaacttggcatttttgagccccattttctctagggtttccttataaaggatatttaccgagctcccattgtctattaacaccctcttgatccttttattggtgagctaaatggttatcaccaagtggatcgacgtgaggatatctcacatttttctcatcttcctccgtgaatgtaatgggaagttcctcagttttcaccttcttggaaggttctagggcaaagactgactgctcgttctttattgggctggttttatccctagccctgtcttttcacgtactgcttaaaatggcctcgagcaatgagactttccatctcttcttttagttggcgacattcatcggtcgtatgcccaatatccttatggaatttacaatatttgttaggatcctttttgcttctcgaattcctcataggctcggg

SEQ ID NO: 153633 - DNA, 619 bp, Cannabis sativa
ggtaatgatttacttttatgaaaatatgaatgaaaatgattttgataattttttgtgtgatttggatttgttcatattgtgttaatgtgagatttgatgaattttatgtgaaattcaatttgtttttgtgaaaaatatttttattagttattttttaagattaaaaatgttttagaaataaattttggtcaagttttgcattgaaattgagtttgatgatttttatgtgaaagtacatgtaattctatgataaataattttatttttcacattcagtgattaaatttattttaaaattaaagttggcgaaattttaggcatggtagttttttacgaaattgaattcgagtcaaagttggacacaaaaagctgatttgaaggtggctagcttagaatgggcatgcatcaatgcatctgtgcacacaaatctcagacatgaccaagatttctcgatctcgtcccaagatcctgcgtgcatggccccatgatcttttttgttgggaatattttacgaggatctagatttaataacaattatgttgattaacatcctatatatgaatatctctaaaatcatgaaattcaacacataagagtttagaaaatcttacaatgattg

SEQ ID NO: 153634 - DNA, 591 bp, Cannabis sativa
cctttaaggttttattaacggctttcacttgtccatttagtgaagaaatcgactgctaccaccacatacttagctcctcctcgctcagtgggtaatatcccgattaggtcgatcccccatatagcaaatgggtagggcgaggtcatcattctaagttcggttggcggtacacgaggtatatgtgaaaatctctgatatttatcacatttcttgacaaactcatgtgtgtccttattgatcattgaccagtaatattcttgtctaattatctttttagactgtaatatcccgataagtcgaatggtaaataattagggtttatatttatattatgagttaattaggtactaagtgagattataatcctactcatttatttcagcattaaatttaaattttgctataagtgagtaaataattgtaatttgttaattacggagatttatataacatgtgtgaatataatatgagctatatgtggaataaaaatattttcaagtttggggaccctggagactcaatatgtggatatataagcgtaatttgttaattacgaggatttatttcaaatacgtggatataatatgagtt

SEQ ID NO: 153635 - DNA, 891 bp, Cannabis sativa
  modified_base (807)..(832): a, c, t, g, unknown or other
cttcatttgctcaggtgttgacttggcttttcttttagtgagctgagcttccatgtggcactcgttctgtccacgtaggcatgccacatcatgaggaaagaaattaagttaacatttgccccaagtccctgtgtcgacatctgtatggatagggactttaccagctatattgatgttgtcgggactgttgttgcctttgctgaataaaagttgatatgtttgttgaagcactctgtcttgactgtctaatctcattgcaatagagaaataactgctttaattgcctttatgatgtgttggtgaggtaagtgagaaaaaaggggcccaaatgtaatacataagagacattggggagaagacattttttcccttctcattttttacttttattttctctcacaagaaattttctcaaggaagagcttctccttctctctaggttgccaaaaccacaagcttcattatcctagggatttttgtgctatttcaactatccaagcttcccaccttcatcttcatcaaaatcttgtagtgggtaagctttctatccctactccttcacttggtttgattgatttttccatgaatgcatgaacattgtttcttgtttttgaacatgctttgattcttacgttatattgtagtccattaggtatttcgatctttatgatggccttatgatagacaatatgtgatttctagatgaaaaagaactgaacctgacttttgttgtgattcttggctctttgagtcacaaagaacacgaataacatgtttgtgtaggatattattttaccaggatcttannnnnnnnnnnnnnnnnnnnnnnnnncaccctaaatatgaacttctaaaatgattataaattaaacatatagaaagtatgagaaa

SEQ ID NO: 153636 - DNA, 711 bp, Cannabis sativa
  modified_base (33)..(43): a, c, t, g, unknown or other
aaaacacagggtccaatctgtaacttttgcaannnnnnnnnnncaaaatagtatttacccttaaaattatatttgtttgtgctgttacttttcttttatttctctttattgttttaaatcaggttgaaatttttcttgtcacattttgaggccttctgtgttttcctttccaagcattatttaagattagaagtaatattacatgaagataccatgatcgataagtagtgggtgttattttttttattaaattttttattatatatgcttatttcatgagcatttagtggagattttttttttcggatagtaaagaatgattcatataaatatatataggtataactagaagattgtgcttttgtgtttgaacaaacctcatcaatacaatttggctaatatgtatattgattctatatttttaccatattttatatttgtttttaatattgaatacttatcattttttttttaatttgcaaaaatattggttggaattggtgatattagaattgagtgacattgtcactttggagtttggattgataaaggattctatgatattcataatttgtgcactcttgtttatgtaacatgtattatcttatgttataatttaggatagatttatgttgcaatttaggttggatttatgttggacttatgttacaattaggttggatttatgttgggttgtaatattttgaacta

SEQ ID NO: 153637 - DNA, 826 bp, Cannabis sativa
ctcatacctacgctcaatactcatcatatatcactgccgcccgtatgtacgcctagtacgtcatcaagaaaattgtatcacctaactaggtgagctcgtacctatgctcggtactcatcatatatcactaatgcccgtacttacgcccagtacgtcgctaggaaaattgcatcacctaatcaggagccaatatatcatatgcataatgtcattacattatcgatactcaaccaatcaatcttttcattatataataatattaactatatctcaatattaatcaattcattgcaatactaattatattacatacaacgcactatgcagtataatatacttttcttacctcaagttttggttcaggtatgttgaccgacctacttgaagaacgatcgatgatctcgggccctaagtcataacaataatagactaataagtgtttatcccaaaacactgcttaatagttgcaaaggacaacctagggtttcttaccgaaacttgtagttcaaatacactaaaataaaacttatatttttgctgtaaaacatacaccatatggtagagctcgtcgcaagcttcgaaacggtatatacaatgtccaaaacggacacccaagtataaagttatggcaaaaatacgattctcgagttcccgaggttgcctaaaatggtaaatcggttgaccggtttacaaatcgatttaccagtttatcaacgacaaaattatgattttcaagtttacgcagtcactaaaatgctaccggaacctgtccaaaccaccccaaatttcacagggcacatatataccatatatactaccatactta

SEQ ID NO: 153638 - DNA, 785 bp, Cannabis sativa
tatgaataagaaatttttaaatatttattaattatacttctataattaatgtattcatttatcttataattgtgtttcatatactctgtaacatatcatctaacaattacttgcttttagggcataaatcttaacaaaaatatctaaattattttaataaattaaaataactaacaagataaatgacataatatctaggatatttctaacataattttataaattaataaattaaaataatgaaataaactaattttaaaattaaatatggttaagaaaatattttataaataaaataataaattaatgataaatttcaaaattatatcaaattattctaaaatatctctactttaagccttttcaaatttctacaaaaatatttagtttattaaaatatatattttattatttataagtttctggtaagtaaaatggtataatattatatctttaatattatttctcaaacttacgatttttaaataataaattatataataaaataatcaatttttaaatttaaaatattgtagctaagatatcgataaaatatctaagttagtttcaaattttattaatatttaattaacatataagatatttaagaatataatattttaaattaaaagataatgttatcttctaattaaaatatatctaattttaaaaatatttaatctcataaattaatgtgtcatttggtaatacttttgttttttaattttttaatcacaaaatgaagaaaaataaaaatgtgttctataactacttttattttttaa

SEQ ID NO: 153639 - DNA, 571 bp, Cannabis sativa
  modified_base (402)..(404): a, c, t, g, unknown or other
  modified_base (537)..(537): a, c, t, g, unknown or other
ccgacatacatccaactgcgccctcagctcgtagtgctttttccaccatctcagtagaggtgctcttatcgtctgtggtgatcataaggtcatgcttgatcttcacatttaatccatccaaatacttttcctttaactgaagtcagttggcacaattctcgaggccaaccttgccaaccgatcaaactgtgtagtgtactcagtcacactcatattctccttctggatcaggtgggtgaactctttcctcttggcacttctaacgacctcattatagtactttgcgttgaagagttcctggaacctttcccaggtcatggtcgtaacatcgtgaatcttggataccatgtcccaccagactagagcctcctcttgaaactgaaaggtggcacacaccacccnnncattcccggtgacacccataaagttcagtatccttgtaatcaccgttagccactgctcagctttcacgacatcaggacctcatagaaaaactagaggtgcctgcttccgaaacctttcatacaggggttccantctgttcgccactaccactatctcggcctgagca

SEQ ID NO: 153640 - DNA, 519 bp, Cannabis sativa
ttgaattattttttcctatttttgtgggcctcattcacctataaaaggagagctcccttagttcatttttcacattcagaaaactacctacaaggtgagagcatctctctctataaaaactagagtttcaacacttagcctttttctgtaataccatctcgtgagaaataaaaactcgaactagacgtagctctattactgttacgatacagagagtgaaatactataaatttgatgtgtctttcttacaaatacttaacaaatattttattctcgccaatctagcaagcgagtgtggcttaggaatctctatccaaatttctgagttaacataaaccatctctttacttttcttctcaaataagcccttgtttagtaaaattcataaataagataaagtattctttagaattctaattggtttaagaaaccaattaattgagtctataagacaatattatctcagatagtgtggggatcgtggatttatataaataagctcctaataagcagttttag

SEQ ID NO: 153641 - DNA, 605 bp, Cannabis sativa
aataaaagaggaacgatattaccgaatgaagaattctaggttaagtcgcggactatgtcgctctctttaagacgttcgcgacactgcctaggagtgtgcaagtagtcagaaattgtcggtcgtccccaggataaaacagcccagtcgttacactgtatcggaaccccactgcactgtagagcacagtcgaatacacccagaaaatttaatatcgcaaatggaatttttaattttatgaaaactgtatttttctgatacgaaagagatgttttcttcccatcaattcaatggcattatataggcgtatggattgaataaacataacgggaagaataatattttctgaaacgtgaggtgagttggttttgaacgtgtcccgttaactgatacgactaagtaatctgtttcattaaacacgtttcttaattaaattaataaaaaaaataattattttattaaataatttttctgtaaaaaataatatagtgtcacaccacaccaacccaactcggcccggctcggatcagacggacggacggcgcgcgcgcgtgtgtgtggtgggtcaagtgtgtgtgtcctcacccattcgcacaaaactgggtacc

SEQ ID NO: 153642 - DNA, 582 bp, Cannabis sativa
cgatggggtggtggaacttcgtgatgcactttcaagaagaaaattcttagtgaaaggccaaggagtgaagtttgggggtggagaggtcacccgagaaaagacctctatgtctttgaaggatgtttgagacttgtaatttgggggtgccaaaagaaaagaaaaagaaaaaaaagagagaaaaacagaaaaaatattcaataaaggcaccccaagaaaaaagaaaaaaaaaagaaaaaaaaacaagaaaaaaaaatagaaaaaaagaaaaaatatatttatattataattggtttaaataaatgtcatggtgaaattaaggaagtgtttcctttctttgtggagaaaatcaggtgaagaaggctttggaagtgaagaaattttaaattgggcaaagaaattaagtttggggtggaaaagttatgttcagttgctatagcaatggcccagcaataatatttggcaggaaacatatcagacaaatcattgggcttgtacttagtttttcctctttttgatcaaggacagatgagtggataaacaaagttcccaatctcagtaatttaatcaattagttatgggact

SEQ ID NO: 153643 - DNA, 934 bp, Cannabis sativa
  modified_base (462)..(475): a, c, t, g, unknown or other
  modified_base (542)..(580): a, c, t, g, unknown or other
  modified_base (884)..(899): a, c, t, g, unknown or other
agtcttacacattatgattgagtattagacttgctatgggtgggcatgcactcattcactataggctcaaaaatttatgaagaacaataaaggagattacgaaataggtgaagaagaaggaatggaggctctcaaaaactctagttgtctgacagaatgtaaactaggttatatgagttattggataatgaaaccatcgtattccttttatacaatttcaactggggttaggaattaaattatatggaataaaaatgataaaataatagcaaaagtaaacaatagtcatatagatgggccacactagttataattttaccattttttcaaccatttatcttttatttcacaaataccatattttccaattttaatcctataaatgtcaaaactatttatgtaataattataattaattatcaaataaaattgttatctatcttatttattaattagactttnnnnnnnnnnnnnnttaacaaataaaccctaaaacttcttttcttcacaaataagacattacttagtgaaaattcataaannnnnnnnnnnnnnnnnnnnnnnnnnnnnnnnnnnnnnnaaaaccaattaattgagtcttacaaatagtattgtctcaactagtgtgggcaccatgggcctatgtaatcaagcttccaataagtagctctaaaacttaccaagtaaattctctaacttctttattcctccttacaccactatagattcagaattgcacccttaattatatagaacactctatatgttctacgatatagatacactatgaattattcatttttataatcctaataatcaatgatccttgatagatggcctgcatcgagtagggacaaatttatcgttacacccttcaatgtatnnnnnnnnnnnnnnnnttagctacctataaattatatttcagtaaactaat

SEQ ID NO: 153644 - DNA, 502 bp, Cannabis sativa
ttttatagcagaccttcaaataaaatgaaaatctatttaaaaaatatataagagagaattgtttatatatatatataacaaataaaaaatagtgatcaagactacttacttttaatataatattgatttgtgttgttctctatttatctacatactactttgcatgattaaaagttcaaaaatatttattagaaaaaaagaaagaaaaaattgtaggaatttaatggacagagaaatataaatagtagtcaataaatttctcattgatttcagtggaagtgcaaaatgtaaaagtgatattaatttagttaattgtataaatgaagaagtagtaagatctgagtatatatttaatcgggttgtcatatactttttttctaatattattaaatgaaaataattataaaaaaactgcaaattaggtaaagtagaaaattaaaaagataaagtcaccacacttatttttctttcagatttctatgtagatataaaaatatataga

SEQ ID NO: 153645 - DNA, 699 bp, Cannabis sativa
taatggaagagggaagcctgaataggtgaacgtggacatcgtctgtgctttttcatgcactgatattgctttttcttttagtggctttcggagttgctttaacgtctactcataagaatgagtccccctagggaatttgctgaacatttccaaatcatcaaccaatcctaataattttggatcgatgttagcttgttttttgtctccatgcattaagactccagagacgaacaagagtgaagccatctttaatatttcattgttaacttcattcttcttccatgattttttcttttggttttgtcagacaattgttttaatttggtctttaagtcgtcaatgagaatgcatgaaggtctttcacgaaagtgtctatctttgaataattttgactcagcttgagatttccaacctttagcgtactttgaacatttcagtccagatattaatgcatactccatcaatgagaattggattggtatcccattcacaacaaaccacatctctgaatctctgtaacaatctgcttcttgaatgagtaatagccacatcacttggctaaaatgtctatagtagtcaaaaatatggagaaagtggccaaacgaagattctttgagcaattttaagtgagtcgggtcattctttagtacatcattaatgtgccttgtgatatcttccatccgactttttatacttatt

SEQ ID NO: 153646 - DNA, 623 bp, Cannabis sativa
ttcctatttaattaaatctcttaaaaaaaatatcaaatatttatattactaatcatatatatctataacatataaaggagaggtatgaggcggttacgtagcactctaaaattactccaaatagctctatttcttctctctttaattctctcattttttaatctatatagacgtttttcaaagaaagacacttgaagcattactatatctctttaattctctcatttttgaatttttttattagatttataaatattaattatatatttataaaatataaaataatatattatggaaatgagtgtttagtttataataattttttaataagtaaattaaaattctacatatacaatacactaaaataaaatttgatcctaataataataattatttaaaaatatattgaataatttttttttaaaaaaatatcttaacgagttttaatatttagtaaataaaattattaatactaatattttattaataatatatattagaattattttgttttaagttattaattttttttattataattctaaaaacgaattaaaataaccgcgcgaagagccgctatattactttttttttttaaataaaaattataagatttattaatt

SEQ ID NO: 153647 - DNA, 554 bp, Cannabis sativa
  modified_base (279)..(289): a, c, t, g, unknown or other
tagacgaagagggcagacagatacttcatgcccttgggggtgaactgggtcgggcaaaggcagaagaagtctgccacattcttaaagtgcgagtgcaaaggcaacaaaggcctttgctgggcatgagctgttggaaatattttatcggcatattagatttactaataggtatgttgtttaacatcctaaatatgaacttctaaaacgatattatataaacatatataaagtatgagaaaccttacagtggttgaagtggaatataatgtctccttccannnnnnnnnnnaatccttgtatcctttctgtcgcaaagtatcaccaagatctgagcccgaatgtccttctgttgaatttggattcttcacgatcttccacaatatgattgaggtaccacttgatgtgtgtgggcactcactctatcactcaagggttcggtttctatggtgaagaagagagaggaggagtggaagctaggttaaggagagaaggcacttagtttttctttgaaggaataagatgcatcatctttttcctgaagtcatcactaccta

SEQ ID NO: 153648 - DNA, 518 bp, Cannabis sativa
ttaattaattatatttgattaattactattataattaattaaatataattaatttaatttttctaaaaataaaattaatacttttgtcggcgcattactgtgccggtaaaaatagctaattggcgccaactgtcagattggcgccaatagttttgccaaaagcttatcattgcaggttcatggcggataaggccattttttaacaccggcgcttatttttcaccggcgttatttctcgccggtaaaaggaagttttaccggcgcagttactatacgcgccggtaaaaagtcctttactgaccaagcttcccagataatctttgccggcgcccaattgcgccggcaaagctttgccggcgcagttaattttcttgtagtaaaataatattctttgatttttgttaattacattaaactgtttcacatttaatgcttagaagttataattttaaaaataaagaaaaatcaatttttgttagaaaataattagttttattaccgattaaattatgagaatc

SEQ ID NO: 153649 - DNA, 521 bp, Cannabis sativa
  modified_base (453)..(495): a, c, t, g, unknown or other
ctttgtatataaaggagtgatccgtcgtgaaataaacaagacagaatccttgtaacagtggactaagcagaccgagatatgactgaaccactatactctcttgtgttcattgtattttcagttttgctaagtatttttgtgttcttaatttgaatactcgccattctgggtcgactacccgcacatattattcatatcgtattattattattatttatttttggtgttgtaaaaattctttcaacaacatttgtcaccgtctgtgggaacgcaatactttgctgatttagaaggagaatcacaatggctggtaatcagacaaatggagacgtcaacaatggatcaatcaacgttgggacaatgaatgtcccacttccaggaagtagggtacctcccatcgataccatcaacgacggagtaggacggacgaacataatgttgggttttatgccnnnnnnnnnnnnnnnnnnnnnnnnnnnnnnnnnnnnnnnnnnnatagattagaaataacatttaatgtt

SEQ ID NO: 153650 - DNA, 879 bp, Cannabis sativa
agagttacacttatgagaattgtcttgtcataacaagaacaaatggatcaaaagtaaatctaaacttgtgaaatgagtcatatataaattggaagagcaattatattagactcaaacaaagtgatcaatgtaaattcaaaaaattttgaaaaggtaacaagcaattttgaatctaaataatcaaagttgtgaacgaaattcatgagaattttgtaaactttagtgtaatatttgtggttaatcgcattgatgagataattttaaaataatgggtaaaataatcatattattttataaatggtgatgtgagtttgatattttagttttgttgagaagactaagaatatcaaacgacatttttctaataatgatctctaagaggcattttagaaaaatgattaaattaagttgttaaaataatgtggagattatttagataattaaattggtgaaaatgattcttataaaaatttcactttatgctagaaatgtaagggtgagccacaaatttaatcaaaatgtgttgcgacattgttaattaatttatttgattttgaattcaaattataaatcaagtttggctatgtgcatactaaaaatattgacatatttggtgtcaaattttggtaaaaataatttcaagaaggaaattaaatttaagagaaattatagagacaatgtggtcttctatattttaaaatcaagatattatcttgatagtgaaatgtaaaagtgtgagagcgcatactctaatatgagaatttgagacatgcttggtgccttaaaataaagtgatttagacatgtttggtgtctaaattagtgtttaattttgatatgattggtatcaaaatttgagaatttgagttgtgtgaaaatt

SEQ ID NO: 153651 - DNA, 1301 bp, Cannabis sativa
gatccctgaactgatccaacaaaatcaaatggttcctcatcctctgtttggaagatcaccatcttccgtttacaattaatactaggtgagtacttggataagaaatccatcccaagtataatataaaattctgctaaatctaattctactaaatcagcgctcaactctctaccttcaattctaaccagcataaacctaacccaccttttggagataactaatttttcgccgggcagtaaggttccaaacccttaatcatatttatcacatggcctacctaatttaccaattattatggtcaccacataagaatgagtggccccagagtcaaacaaaacaaaatagtaagagttgttgactgagagctgacctataacaactgaggagctagcttctacattagcttgagtaagagcaaatacccttgctagagcgggttttgcttccatattctgttcttctttcttttattgtggacagtctcttttgtaatgtctagttactccacactggaaacatcctcgacctttacactttcccaaatgatgtttcttgcaattaggacattccaggtaagtgtatcgattctccagaccaccctaatggtcaccacgaccatggttccctcgaaaccttttgttctgactcgagccaccagacatagatgaaacttttctcttatgttcaatggttgagtcactaccactcctaccatgaccagaggtaggagaagcaaccaacaatctgaatccctcgggactcctggatgcactcaactgtgctctcagctcgctgtgcattccccaccatgtcaacataggtggtattatcatctgttgtaatcatcatgttgtatttaatttttggattcaaaccgtccaaatatttttctttcttgctaaaattagtttgcacgattcccaaggccaacctagccagtctgtcaaactgtatcgtataccctgtgaccgacatattttctttctgtatcaactgagtaaactccttcctctttgcactacaggctgcttcattgtagtattttgcgttaaacagctcttgaaattcttcccaggtaatagtagtgacatcccgagtaagagctacaatatcccaccaaatcagggcatcctcctagaattggaaagtatcacaggtcactctgtcgtttctagtgattcccagaaaattcaaaatttgaatgataatagttagccactgttcgactttcataacatctggacctcccagaaagactggaggaggtgcctgcttacggaaactttcatacaggggttcca

SEQ ID NO: 153652 - DNA, 531 bp, Cannabis sativa
ccgcagccgaattattggtcgatgcggccaaaacctagcagagagccatcccttttctcgatttttttttggctcgggactccatttgggacgttctttatatcgttggaaagttcgttccgagctttatgtgattatctttatttttaatgtcaattttatactatgggaaagtggaattagagattaaccctatatgagaaaatttcagaatttgtgactaggattaccaatacttgttcaggagcacggggggatttggaatctcttctattccacgcttattttattagtaatctcgtctaggggattattgttacttaaattatcttaggaaacgtgcctaatgacattggagggatttaattagtttaaaaataaaaaatttaacattgaattagtgtgggatataattgattatatatatgtatgtataatttagtaactaagtaacttgttacttgtttttataactagtaggtactgaaataattaattttgtaatttcgttgtatttctttatattatagg

SEQ ID NO: 153653 - DNA, 666 bp, Cannabis sativa
ctttttaggcagccagttcggcctcgtgatcaaccgctttttgccttaggaccagtgttatacctgaaattcggctaccatttcattggaagacatgtgttgaattaaagagaatatggatcaatgtgtgtcatggtaattacatttaatggaataactcattaaatgtggaggtgacagaatatatttttaacttgcaaactataaggtcttatgcgagataaagatatacaaaatgttgcctcgtgtattaatgagaaaccatacggcattggatgcgcgaggcgagacctcaatctcgttatgtacgagtagacgtaagcaagatataataactgtgaaaagacttagcgtataatgtacaatatacaaactaagtataatagccaggtgaactaaagcaactaataagcgaggcacctatctcgctataggaaggtgcgctcctattactttcaccaatcgacttcggacatcttttagtgagatttatagtcttgacgatttagaagctaacgttcaaattatgttaactgctgaagtactctttgttattaagaacttcgattgtcaaaatgaagcattgtaccctcaagcgaagaagcgatgaggcgtacattaccaaccttagagagataggggaaaaaagctccagctcactatcaa

SEQ ID NO: 153654 - DNA, 652 bp, Cannabis sativa
  modified_base (421)..(432): a, c, t, g, unknown or other
tgcccatttgagtagccttccggatgcttctggcttttgtaggacttgtcgtagcggatggttggttagtactttaattaagtgagcttggaagaagggtctcaactttgttgaggccatcaagaggcaaaaaactagtttttcaattaatgggtatcgcgtctctgctcctatcatgcgcttgctgacatagtatacgggatggtgggttttcttctcttcccgaactaaggctgcgctgatcgcattctcggagacggccaagtataggaacaagtcttctccgagaacgggcttcgataggattggtggcttggccatgttctcttttagttttttgcatgcctcctcgcactcttcgaaccattcaaatttctgacacttctttaggatgttgaagaagggaatgcatttgtctgtnnnnnnnnnnnnaaacggctcagggcagcaacctttccggttaggctctagacatctttgtgtttctttggggaaggcctgctcaggagagcttgaattttttttggatttgcctcaattcccctttgacttacgatgaagtccagaaacttccctgacttaaccccgaaagtgcacttctttaggttgagtttcatttcgtatctccggaccacttcgaagcattcttcta

SEQ ID NO: 153655 - DNA, 538 bp, Cannabis sativa
ttattttagattgttattccacattcataatttcttgcaaggtttacaaataaacctaagaaagtcagtaactgtgagcaaatcttatctacatacaatatgatttctcatatttaaaagtttaaggaacacgcaatatagtagtggctttgttttaaaattaacaaagacctttatgttccgagcttcttttgaaacttgatttagacacatatttaaaggtctttactacaaaataatgtcactcataaagatatgcaagttcaatctaacaataagaaatgtattgttaataagaattcttctacattatagcaccaaagattatagaatatatctccacaaataaaatgaatgttagtaaatgatgaaaataatcattacacttgattttactaattttatttagtgctattgtggattgcattaaggaaaagtatactagcaagctaaaatgatgcactttagaaatctatcatattagaaatcatacaagtcaattaattttgaagacatggactcaaattttgcatctctt

SEQ ID NO: 153656 - DNA, 797 bp, Cannabis sativa
ttcgctacggaagcatgctgcctgtagaactcgagccaccttcccatagaagattgatgaacaatcaagataccaagcacgtactcctagcagaatcacttgatgaaagacaagccagtggaaacttaaaattgatggcccatcaacagaaagtagctcgatatttcaaaaaacaagtgaaggctcagaaattcttcgtgggagatattcatgccactgccccacaagttcaaaatgctgacgtggaaaatgtacacggggagagaagataacctttcccatctcaagtacttcgaaatgcaaatggatttgcaaggggtacgaggagatgtatgctgtagaatcttccctgcaactcaatcagaagctgctcagcaatagtatttcaagttggctccaggaaagtttagttcatggaaaaccttctctttggaattccatgcacaattctcctcctcgtgccaactcccattgcatttgggagacttggtcagagttaagcaacgaccagccgagccactccgggcatacatcaacagattcatgatggagccaaccaaagtttcacgggtaactgaggatggaaagttatctgcaatactggggggcatcgaagtcctcggtgaactctggaaggatataagaaagaacgggccagtagattcaatgagtgatttccttgaccgagcgaaggcttcatcaagctcgaagaagctatccaacgagcggaaggtgaacaaaggcctggcaagtcaaaggctcattccactggacatccgcccaacttccccaatacc

SEQ ID NO: 153657 - DNA, 866 bp, Cannabis sativa
  modified_base (70)..(73): a, c, t, g, unknown or other
  modified_base (392)..(394): a, c, t, g, unknown or other
aatgaatgaaaaatacttctgttgctttattgatattgaataatctggattacattgaaatagagttttnnnnagggcataaaacccaacaatgcaggagtcaagtttttgatctaaaatatggaagtggcccaggttgacaaattgtcaacttgagcactgggtgcccaggcaccggggtgctctaggtgctcaaaaattaactttctctgaatctgattctgatgtctcaaatatgtatgtggtatgtctagttcatgtcccaatgcatagtttgatccatttgcactaagtgttgggattttgtgccctaaacaaaacccatttcaatataattaattttttttaattaataaaagatcataaatcattttttgttgcatggttcacannntttatttcatgattatatgtttaatgtataaattctattaaatctaaacatatagttattcatgactatagtgttgctaacacagtggaatataatcatgattacatgttcaaaagtttaagtcctataatttgtcagtacactagatttagactgacatgataataagtgatagagcttacttacaccttggatacgtgttatgtcctttctagagcattggcaaagtatgctacgatcagatgtatggactatacatcagactagaccgatattgaatttggataagatatcattaacttactgttatatctacctaagtatcagttagttgatcttaggtcagtagatcttaatcgtaagatggttgggttcgatctcaattgtattatttatgttcttagagttgttcgagaaagctaaccaatggtttgggcgaacacttacattttgggaacatgatagtgtaatt

SEQ ID NO: 153658 - DNA, 524 bp, Cannabis sativa
gccgtgttattcaagttgtactcctcaaaccgagacttgatttttgcaaaagttccggtgcctctgtaagtcatgcaaccagtaaaatgctcgggtgctggaattatgagtctaggagccatctgaaaaaaaaaaataacaaatcaatattactgccaaaaaattaaaaaatggtcgacaaaatatcgacatgatgtcgatattatgttgacatcatcaaacaaccaatataaattaaaacatgtcgacaacatatcgacatcctgtcgatattcaatcgacaatttcaataggacaacaatttcacaacatgtcgacataatatcgacatcctatcgatatgcacttttataatacaacttaaaagcaatatcctaatcttgtcgacaacacatcgacatactttcgacaagctatcgacaattaagggcaaaaaataagctaaaccctcaatcgacatcctatcgacatacacacgatattctatcgacatacaataacagcaatacaatgcaaacagacac

SEQ ID NO: 153659 - DNA, 596 bp, Cannabis sativa
  modified_base (357)..(381): a, c, t, g, unknown or other
tatatatatatatagatatatttagtgtgagcttgaaataactcaaaaactttaacaaaatatttaccttgaggtttgggcagagactcgtgatgataacgtgttataaaataatatagaataatataaaatatataagaaggaaataaaaggaggaaaaaaaaatttaatgagaatttctcagtacttcatttcaatgagatgatctcttatttatacaaatatgtgagtcatatattaggaaactaagagaagaatagtaattacaattaatggtaatgaataaaaaaaattgggttatttgtatatccagataaacgatattttataacatactaaggtgccgtttggtaacannnnnnnnnnnnnnnnnnnnnnnnncaaaatgaaagtaaaatttttgttcttaaaaattttgtttttgaaaaataaaaatgtgttctgtaagtacttttgtttttcaattttaaaaacaaaaaacaaaatatgttctgtaaaagttcatttttattttcattttatttattttatttaagtcgggtctaggtccggggtcaaattcgaatccgggtcagaggtcgggttcaccacaaggg

SEQ ID NO: 153660 - DNA, 670 bp, Cannabis sativa
  modified_base (266)..(280): a, c, t, g, unknown or other
  modified_base (353)..(358): a, c, t, g, unknown or other
acgtgaatatgaagattagtttcgggttaaaattggttcaaatggcccctaattcaaaaattaaaaatattcttcttttcagaggaaattttaacaagttttttccttacttttacactcgttagtgttctgttaaaatcttaccctacacatttccaaaaatcatgaaatttcactgggatgaagccaagaccgtttttcatcagttttctattggacaggttgagagaaaaaatatttttcatgcactaacaatcattttaatnnnnnnnnnnnnnnnctcacatttatgatagtggtacccttttgtgaaatgtggcccagacccatcttggaatattttttgccactannnnnnatgaattcgtactactaagacgtgaatatgaagattagtttagcgtgaaaattgggttaaatagccccctaattcaaaaattaaaaatattcttcttttcaagagaaattttaacgagttttttccttacttgcagcattctaataaacttgactcaatttgaatttaaataaacatctttattcatttattggtcggtaatatgtctgtcactgtagtaacttacatcaaagctattatgttgatctgatatgatctttagcttagcataaacaaaacaaattgcaaaaaataaaaatcgtactttcaaag

SEQ ID NO: 153661 - DNA, 565 bp, Cannabis sativa
ttcacatatattaaattgtgtgttgaaatttttcaggttgttagaaaattttcgaactattgagattgttgaataaaatacttccgtaaaattttactaataatgtctgatgtagatggaggtttcgaaaccacaatttagtatttattaaattttagaggcacaatataatctataatacatatcaaagttcagaagtagaatttgttataaagataattgcaagcaatggtggagccaactacttaagttaagggcactgatttattttttatatatattttttttgaaaatgagatattaataaaaaaaaatattaattttgtgggataaaatattataggaataaaagtaaaatatgtaaggatataaatgaaaaaaaataaaatacatttataaacaaaaaaaaatgtgtgaaaataaaaagtataaattttataaggataaatactaaaacttcaatttatagaagcaaattaaaaaatatttaaagctttaaatagaactttgttcctgagtacaacattaataaaattgaataaaaatctttaaatttagtaattag

SEQ ID NO: 153662 - DNA, 632 bp, Cannabis sativa
  modified_base (88)..(92): a, c, t, g, unknown or other
aaaaaaaaacacttttcctatatattctgcaaagtaaaaaataaacttcacacatatatatttatgaatacatatatataaataattnnnnnattatttaatttaatattattaatttaatttatatttattattatgtgtttcttaaaaaataattaatttaaaatagatatttttataaaaaatttgaaaataattaatttaaaatagatatttttataaataatagtaaaatattaatttgtaaatttatgctttaattaaatattaaaaaattaagagaattaaggagaaaaaagaaaaataactttggagagattttagaccgccacgtcactgcctcatacttctcctttatatagatatatagatgtatagattttaccttaataaaaaattaaaaaaatgagagaattaatgagagaataattaaaagtatttggagtaattttaaagtgtcacgtcaccgcctcatacttctcctttataaatatatatagatacaaatagaacctctatttaagaatactctattcaagaatgacctctaatttgttataaaaaaattaagtcccaatttgagcctattataaataagaataacctctaaattgtaattagttatacaattt

SEQ ID NO: 153663 - DNA, 775 bp, Cannabis sativa
gctattaggcatcagtggtacttaattagcgatatgtttttaaaagttattatattaaaccatatgagacagatacttagttggactaataacgcgatattgacacataggaaagtgctaggtactactggtgtcttttagcatttatatatatatatatatttatattaatattatcactaccattccaacagtttctctcacattcgtactacttgttagcctcctatgtcttacactcaactccaatgacatttctctatcatactcttagcaccatcaataatttgagtatatgacttttatttaaatttatcgatatatgattatatatatgtttgtgttaatggtatattattaattcataagatatatacatctagttaaatatattgttattgtaagtccgcgggattcagttgtactcaattgtctatccatgtaaatagtatgtaactaaagacttgcttgcttgtgtatttatagggtataagataaattaatccaaaattttaatattttattgggttgagatgcaaaattatccttaatttagaaattaaattagtaaatgtctatttttaaaaaaaaattaaaaaaatgaacaaatataataaattagctaataaaattataaaaatacatttattgcatattatttttttttttaagaaaatagatataataattaaattaagttgtataatctttttagtattgcatattattatattgtaataaaaacgaataaatttattaaatcattaaatatata

SEQ ID NO: 153664 - DNA, 504 bp, Cannabis sativa
aataataataaaacaaatcttattaatatttgaactgatatttgcatatttcaactctatatataaaaatatatatataaaataaattgaaccttaaatcgcatatacaattagtttgttgagagagattaggaaaagaacgaattatatatggaatttttttttaccaaatcgtttaagtttcctctagctatttatcttcatttatatatttttttcaatcgcagtccactcccactattcaagtaaattcttattgccgtctagatagatgagtgaatttgcgaaaaatggaagatctaacgcaaattcactgtgagaaattcaaaaaaatcgtcccccaatttcaggttctgatccaattgggtcttttttttattcgtaaatcatcccgcaatttttaagattaatttttcattttctaacattttgagatttttgtctccttattgaatcttttcaaatctgcattgtttctatcaaaattaatgagctcacatcgtt

SEQ ID NO: 153665 - DNA, 643 bp, Cannabis sativa
ggattcctcgccccatccccaatgtggaataagaggggatagggattaaaatccttaacggggatggggacggggaagaattccctgccaattccctgccccattttcatccccgccaattccctaccccgtttgcatccctagtaccagttcaacaaactctttccgctttgcactgcggaccgcctcattataatatttagcattaaataagtcccgaaattcttcccaggtcattctggtgacatcctttgtgagggacaccatctcccaccacacaaaggcttcttcctggaactgaaacgtggcacatgccaccctgtcattttcggtgagtcccatgaaattagtatcctctccatcacagtcaaccagtgctctacttttagaacatcagcacctcccaagaatactggaggtgcttgcttcctgaacctctcgtacaaaggctccatacggttgtcatcaacaggttgttctgttggcaccgctggaaccacaacagcaagtggttgcgagggaggctcaataggagtatcccgatgtctaagccttcgaatctcttcctcttgttgagtgattcgggcatgcatctcagcaaacctctgctcccaatcaaaaggagcctagggtggattctctt

SEQ ID NO: 153666 - DNA, 558 bp, Cannabis sativa
catgtggaactgaaagagtgactttaagaatttaatcatgtgagcaagtagtctagacacggttggcctaacgtgtaacaaaaggttacaccctagtgtctgcttttgaaatcacgtagtggctatccgtgcacaacttagaaaagtagaggccaccgttgaagaaaaataggagaccatgccaagaaggtcgtgggtactagctcttttatgggttcctgcacgatgatccctattttagtgtttgggtagaagttttgacttcaagttcttgtactcggcagacttgtatgcacctttactgttatcgtgtaacatggtgcagacctttcagctcggtccgaacaagcttgctgtaggggatttgctgtaaaagaatattcttccgggagtaattctcttacaaagaatttctttcctcgatctgttcattcataggcctggtaactccttgtgcgcagccatgttgctataagttgtcttggtttcttcttctttcccattttccaagggatcctgctagcaagatgttgtgtacctcttggtcactgtagacca

SEQ ID NO: 153667 - DNA, 548 bp, Cannabis sativa
catttctcattctttgcactaagtggggaagaatatgcccgagtgattctatcaaccaaatccaaaatggattggtcgactgtaatcgtctcatacaaaaacacaccgccctcatccctcccctcacctaagccagagtgaacatggaataaaaacatgaatcaattaaacttacaatctaaaaaaacagttataataaacacatccattataacaaagaaacaaacatacaaccttatcttcccgaatgagtgacaattgcagcccaccttcatcatcatcatattcaggaagattggattttgaaacaacctacaaagatagaacaaaaaacatagtcataaccggtttctaaacagcaaaagaataaaaaaaaaatagaaaatgcaagaaaataaccggttataaaacacaaaaaataggaaacataaaagatcatagaaaataaaaaataaccggttataaaaacagaaaaacaacaaactaaaagaaaaaatacctcgggagacggcggatcggaaaactcattgtcattcccaccaacatca

SEQ ID NO: 153668 - DNA, 628 bp, Cannabis sativa
taaaaatttgtcactaaatgtagctgtttttttgtagtgacataagtttttggtattagctaagtagaattaataatacttttcgtctgttctgtggttaatatagctttagttcttagaaatacttggtggatagattctggtgctactactctcataagtgtttctatgcagggttgtctgagctattgatagtcaagtgatggtgaaagtttgtggacaatggacaatcggtggaagtggaagcaattgggcattttagattattattgggaactggtttttatttggaattgaaagacacttttgttgtgtcatcttttagacagaatttagtttctgtttccttgttggaaaaatttggatataattgttcatttagaaacaatcaatttactttatctttaaatttaaatattattggaactggttatttgaatgcttatgacaatctttatttgctagaaataattacatcccacaatgaaactttgcatgtggaatcatgaggtacaaagtgcagattaaataaggaaaattcagcgacattgcataaacgctaatatccgctttcttgggtgattaatttttcttttttttttatcttagtttattttgtttgtcaatg

SEQ ID NO: 153669 - DNA, 512 bp, Cannabis sativa
gtcaagcatctgccgagacatgtccgtacagaacaaaaaataacatggttagaaaaaacagacatcagaaacataaggcataaatgtgaagaagctcaaaaaaaagacaaagtagtatgcaaggtgactgcccaaacaagaattgaaagtttttcatcacctgacatcgatcttatttcaaacataacagttttccctttaccgatcacgggaggcgatggccgaataggtgaaatgggctctcttatgcgaatgggatgttcaacaggcatgggcggggcctgaagtttcttcttcctcttcagtggagtcacatgttcttcctcatcctcatcttcaggattaaaaggctcctgagcatactgcttggcccttgcatctcccttcaacttcgcttcgcgcttaagttgagttcattctcttgatgagcttgttcggtctgtccagcaccagatttcctcttcttccccgtcacggacttaggaatgaagtccttgggataaagcccgtac

SEQ ID NO: 153670 - DNA, 588 bp, Cannabis sativa
tcttcccacttccattctggaagtgttagtggctgaagtaatcctgcaggtcgctgatgttctgctttaatttgttgacaggttaagcacttactgacataatctaccacatctctattcatcccaaacaaccagaaataggcttcaaatcttgatacatcttggtggttcctggatgcaatgagtaaggggtagtatgagcttcatccaaaatttctttcttaagctcagtattataagggacacacagtcgtgctttaaacagcagcattccactgtcagagatcgagaagttcttagcttatcctgctaagacatcctctcgaatcttaaacagtttaggatcttctaattgtgccactttaattctttttaacaagtctaactaaagtgtcagattatacaatccctcaatcacaaattcaatatttgccctagacatctccgaagctaactgaggagaaatcattaccatattggaaatctgatctgctccttttcgacttaagacatctaccacaacgtttgcctttccaggatgatacaggatttcacagtcataatccttcatgtaaagcccgcttagtt

SEQ ID NO: 153671 - DNA, 702 bp, Cannabis sativa
atactgggaaggaagatcccttataccacctcaagtatttcgagatgcaaatggacctgcaaggagtacgaggagatgtatgttgttgggtttttcctcccaccctttcagaagccgcccaacaatggtatttgaagttagcacccggaaagttcaactcatagaaggctttctcctcggagttccatgaacaattctcctcctctcgctaacttctgttccacctaggagatcttgtcgaagtaaagcaaagaccaagggagcctctctgagcccacatcagcagattcatgacagaggcgactaaggttacactgctaactgaggacagaaagttatccgcgatacttgggggcattgaagtccttggcaaacattggaagcacataaggaagaatggaccaatagactcgatgattgactttcttgactgcgcagaaggttttattaagcttgaagaagccattcagcgagcagagggtgaacaaaaacctagccagtcaaaagctccttctactaggacatctgtctagctcccccattacccaagcaattcaagcttgggtggtaaatggtccaaaaactataataggcaagagaatgggaaaaagggaaagttcactggcaagaccgaacaagctccccgggagagtcctgccaagtatactgcatttaccctcctaacggaagatatagaaagtg

SEQ ID NO: 153672 - DNA, 633 bp, Cannabis sativa
  modified_base (589)..(597): a, c, t, g, unknown or other
tagtatttcgggccgaacgagttcgggcccgaaatgcaatttgaataaaattattggcatttgatttagtaatgtcaaatctgaaatttaattggggttgaaatgtgcatggaacgactaaattgtccatgtttgaggtgtatgctttattttgccctaggggcattattgtctttttatggcatttgtgatattaccaaagaaatgaatttttgagagtaatgaaaagaaatttctggtctttcctctcttgaacccgacccctctctctctctcccttttgctctttccaattttgatttttctggtgtgaattgcttgatgttggtgttggattgaagctttgtatttgggaattaagcttggttgtggcttgaaattgaggtagttcttctcctcactctttaattttgaatttgtagctgagtttagaaattggaaagtatgctcctctaagctttgagtgttcttgattgcatgttcagtgaattggtgtttgatcttgttggaattgcgcttgttgttgttgtatatttcattgttgagtatgggcagagattttatgatgtttttgttggaaatattttannnnnnnnnagatttactaacaagcatgtttcattaacatcctaa

SEQ ID NO: 153673 - DNA, 786 bp, Cannabis sativa
caacagggaagaaggatcatctagaattctccaagcttgcttggcaagaggagcttgattaaagtggatgaaagaacaaaaacccaatccgccattagcttttgaagtacacaaaagtttttatttcttccaatgaatctttgacttattattaattagtgttagagcccaatcagacattagtcatcatagattcaagttggttgcagaatttcttggaaagactaattaaaacaaccaatgattaatttattaaagtatgattaattaattgaactaaagtctaatttaaatttaaattaagatttatataaaaaaatattatctaattttattgatacttttaaataattatttaagttatattttaatataaataaattaaatttaaatatttaaaattaattatttttttaattgagtgatttagcgataaactttaatgtaaaaaattaataaccgttaaaggaaaattaccctatatactatttttgtaactttttttttcttttttcaaatttacggtttgggtttctaaagtgtttgcagcgctagttgcaatagggatttttatacgtttttttgttacaatttaggttgcagcgctagttgcaatagagatttctatgtagaattccgtaaaaatgcataaaaaaaattattttgaagtgtaaaaatgaaaaagcccctaacaaaaaatacatatatcaattaccagaacatatatatatataaaataataataataataacaataataataaaaatattgttgggttttatgcc

SEQ ID NO: 153674 - DNA, 603 bp, Cannabis sativa
  modified_base (307)..(309): a, c, t, g, unknown or other
aaataagcacccctttttaatttttctatttttttattgttttgtacgaaaaaggcaatacacaaaaaataaataaagcaccattcaacactttagagcaaaaataatgtctaagaaaatagtgaagcataaccaagaaaataacaagaatttttaagaaatcttaattgacaatgtcagtcacacatttttttattattattttattttaaattgaaaagcagtaaaaataacattgatagttttgtcaacaaaaagtaaagaatgtccgcttgtctttgtccctgataaaaaaatcaaactcatnnnaatagtcataaattattttatcaagctcatgaactagtgggatgagatcattccagttacgtaggaaaaatgttgactcagtcaccaagaatatgaaaggtgaatcaaacaatatgtaacagctatataagacaatttttgaatagatgaatattttaccacaaactatgacaagcataagtgtgtgaaagtgtaagcagggaacattgccaaatttgtcaaaaagagttttctaataaattgtaaccataggagacgttgtcacactatctcaatggtagcccttttcaatgg

SEQ ID NO: 153675 - DNA, 705 bp, Cannabis sativa
  modified_base (332)..(344): a, c, t, g, unknown or other
tctcaacatctggtaagtatggtttgtatttgagatactaaattcttatgatctttgaaagcataacatggttatttgtcctttttatgaatcttggaaagatgaatacattagaataacttgatttttgtataaaatattttagtttttttttttattattttgaaaaaaaaatgataattaaaaaaaagtatcatgtgacttgacttttgggctaagaaaaattggtcatttgtctttcttttggtaagtattaaaatgtgctttatttggtaaatttttgatgagtttcctattaaaatttgatttcttattctttatattttgtttannnnnnnnnnnnnattgtttttcagatcttaatttttggaaaatcttgattttttttgtctttggcccttatagataaaaaaaagggggagtatttgggattttaattttgattaattgtacactcaactgtccagggagagttgatgtttatttgagattttaattttgtttgtatactcaactgtctagggggagttaaggtttgtgtttgtgttcatcgttggtcaaagttagctttttatattagtttaatgttgtgcttttcacggagagtttttctatttgtttcgctaactttattttgtaggtgtttgttaactaaaaatattttgattatctaaagtgccaaagggggagattgttaggtctttt

SEQ ID NO: 153676 - DNA, 693 bp, Cannabis sativa
actagttatttattataatctaattactttattaactttttatttttacttaattattaaaaaatatatatatatttgtaagaaaaaaaataacacattaaaaaataaaaaagtacatatttaaattatacatagattaatcccaaatttttattttaaaaaaataataaaaactataataagtttaatgtatacaaaagttaatacaattaaaaaaaaaatcaatgacttaaaactattgttattaatcgttttgtactatttatattttattagttcttttattatacagtactagtttttttttttcgaattgatcactctgtttttaagttgttttttatttttcttatacaagtgaaaattcactctacttctaatacagtatttttaaaatattttttaattattttctttatttaatatagcataaaatgaggttcaataaattaatatactaagtcaatgatgtatttttttttagaaaaaaaaaaggtcaatgataaaaaaaaaaaaaataataaaagtattatagtagctattttttattttaatttgctatactttttactatagaatatatagataaatgtttaaacttacaatttttttataaatattaattgttactttgttttattttaaaatatatgtatatatattattatatttatttttaatgtggttaattct

SEQ ID NO: 153677 - DNA, 602 bp, Cannabis sativa
atgcgggtgagatcacttattttgtttttcacacattcaccacgctgaaaagatcttctatctctcagatgagcgacctgtcagacagtcagttgcatggttcagaaggaaatgcatttgacggtgacgaggaccagagggaagatagctttatcccgacttcgatctcagaggaggaggtcgcacctactggaggtatagaattaggtccgatgtcttccgcagacatcgagagaatggtgtaggagctcgctgaactaggggccactgagaatcgagacagcgagtctacggtgttagcccacgattatcttatccattccaggcatgcccctgacgttgaggtcgaggagatggatgatgattgggcggccccagctccagagtcaggcgaggaagaagaagaggcagaagggagtgggactgattcggtggacaacactcagttgaacgagcccttctcgtgcgaggacttggtttcgagggttaccaaatcggacctcaccacctttacaagactgaatttgctgcgacttgcttctttgcaacctaaaccgactcagagggcgcatctttcttttaccaatccagcgattattccc

SEQ ID NO: 153678 - DNA, 532 bp, Cannabis sativa
aggaacaaatctcatgtatcactccagaattatttaagaaatgtagatttaaaaattagttatattattattatttgaaatcaaatgtatatatatatataatattaaaaatgattttttctatacctatgacgtagatattatcataattttattaattagccaacccttttaaaaacaaaaattatatattatgtattaattttattatcaatctcaatattatattaaaaaaaaatcaactatgattaactgcctttataattttttatttttatttaaaaaaattatattaaaaaaaatcaactatgattaactgcatttatagtttttttttatttaaaaaaaattgtatgtatgattgacaaaatttaacatttagagtgaataactttttttttcttttatcacaatcaatgaattttatttcgccaattagcaatttttactcccgaattttgacatatactaaatcatgccctctgaacatttttggccgttaaaaattccacctgaactattaagattgtta

SEQ ID NO: 153679 - DNA, 608 bp, Cannabis sativa
caagaatggccataaagggtcaagaccttacaaactttgtggctgagtgcacaaactcatctcttgaaatctcttaagattcaggagaaaagcaagagtcagaagcagagcaagagcagcagtaaaaactgtaagaactgacatggaaactccatgttgatggaagctacactaaccaattatccggtgcaggcattgcccttataaatcctgggggcagcaactgcacaaagcaatcaaattcagcttcaaagcctcaaacaacgaggctaaatacaaagccctaatagtcagcctcaagctggcacatgaagtacgggctgaacacctagacatattccgcgactcttgattattcgtgaatcaagtcctaggtgaatacatagcttgaggtgaaagaatgttggcctacttgagcaagatctaagactttctaagtcagctcaaaggctacacaatcagctagattgccagagaacagaatgtacaacagatgcaatttcccgtttggcaagcagcacaatttttgacaaggcaaacctagtgccaatacagttcattaaggaaccaagcattaccatccctgaagaagttgacatgttagatga

SEQ ID NO: 153680 - DNA, 500 bp, Cannabis sativa
caacctctccaaccgatcaaactgcgttgtgtactcagtaacgctcatgttctcattctgggtcaggtgagtaaattcctttctcttagcacttctaacggcatcattatagtacttcgcattgaaaagttcctggaacttttcccaggtcatcgtggtgacatcgtgcatcatggacaccatgtcccaccgtaccaatgcgtcctcttgaaactgaaaaagtggcacacaccactctgtcattcctggtgacgcccatgaaattcaatatcttcataatcattgttagccactgctcggctttcatgacgtctggacctcccagaaaaaccggaggtgccttcttccgaaacctttcatacagaggttccattctattcaccgctactactagttcgtcctggacaacagggggaggtgccactggaacttctggtacaggcactgcaggagcaccctgctgtctcaatctctggatctcattatcttgttcctctatt

SEQ ID NO: 153681 - DNA, 512 bp, Cannabis sativa
taattattaagttgttttttagtttttaagttaattagatcgaatttctaaacaagtttttttttttttggttgcagccaggatcatcttcagcagcctgtactccctaggagaaatagtatgcattagttattgtaattgggtgttaatggtaaataacactcataattcataagtttatactcataaggtgggttcataattcataaatttatactcataaggtgggtgggtatatattctttcagagttaatttatatacataggtgtgttgacgttgctgaattaaaaaacagtcaaaattaaagcatagagaatatgttgggtaatgacacgtctcctcataatattaaaattatcaatcggaagaactttatatatgaaggacggctgcattcttcttcatgcgatacagaacttatttggaccaattaaaagagaaacattcaaatgtacatatagggttcgtttgtaacgccgtattgtaatgtattatattgtgttagattgt

SEQ ID NO: 153682 - DNA, 563 bp, Cannabis sativa
ttcaatgatttcagcatgcatctggaatgcaaaatttgggttctgttgcttttgtatcagttcaattgggttgcagccatgttggatttttaagttgatgatttacaagtatcaaatagtttcagggctacaacactattcatgcatgcatggtcgattcgaagagatgccaacagagcacaacgaaagagtttggggggctttgctgagaggtggcaagaggtgaccagagttagattacttatgaaagcagatgaattttgaaaactctcaagctcagtttgaaataattacataagacattattctttgtaggaaaattacatttttacgtttaaagaattttttcttacatttacgattttcatagaaataacacgaaaagaacaagaacactacataaaagtaacatcaaaataacaacaaaaagtaatatacagataacaaaaaaatcaacaacaaattaataagagtacaacataaaaagacaatatatttttcgtaaataaaattaaaaaacaaatcgtaaaaatatttaaaattccgtgaaactgtatttttgt

SEQ ID NO: 153683 - DNA, 503 bp, Cannabis sativa
  modified_base (340)..(343): a, c, t, g, unknown or other
aaataaattaatttttaatataaatataattttcctatttaattaaatctcttaaaaaatatcaatatttaagtgtctagaataaaatcaactttagatattaatttttcttatttaagttataaggtatttacttattttctaattaaaacaatatattttagtctatttattttaaataaatcattaatgaaaattacttgatttaagttgatgtaaattaattaaccaattgattttaaactttaatctaattttcaaaattgaaaaatttcgaaatatctactttaaaaataatgcaattcaaaatttaaatgggaaataattattaaaataaaannnnatatattctgaaaattattctaaattaagttgatctgaaattgaataacttccgacttcaatataattttttatttaattaaatttattaaaatagaaataattaagtatccagaataaaattaacttaattattaattctaatttaatatgtaagaaaa

SEQ ID NO: 153684 - DNA, 626 bp, Cannabis sativa
atttcatttcatatgtacattttcaataatttgatgataatattctatttcaatttgatagaaaaaagagtgctaggaattagaatttagagttcaagaaacatatctctgttctcatgtctcttcatttttattgtgttcaaattatgttgatatataccaaagaagatattaaaaaatatgtgaactcaatttgccgagttttccttttggaaaggagtagttgacactactacaaatatcagaattcgcgacagtcctaaaaacgatttttttaagagaccgctgctaaaaaaattaactatttaaaattattgagaaaaatttagtattcccgacagtttaaaatcgtagtaaataaaataggcgacgttttttaataaatgcatttttttaatggacccttataagcaacggtcgcctataagggtccatttaaaaatcgtcacctacttttcgccacatttcccacgtgcccacatacttcttttctatttcccacatgcccacctatttcgtctcacctattttttctccttttcccacaccctaaaacaaaaatcttaactctccaaaacaccacccacgcctccgcaccatcgtcctcctctctcgccgtcttcctc

SEQ ID NO: 153685 - DNA, 544 bp, Cannabis sativa
cgactgtgagtaggggagaagctgtgccatcatcgtttgcgagtgggggagttggagtcgtcgactcttttaggcttggtcagagatgaggagatagaactggagagtgatacgatagaggtaagtggatctgatcctgagagagtgcgagaatgagaggaaacgagagaaagagcgactggagcatatccattcacacaaagtggagttgtgcacggttgaagaagttgatagctcgaggtggaagagggataatgatgaaattagggtttctttacccaaattaatgcaatgagtttttgccaattggtactgaaaaaaaaaataaaaaaaataaatagtgtttaataataaaattttattaattttttattttatataaaatttatttatttaattgtattaattttttttttattttttttctcaatttatatttttgaaaagactaagtttttttttaatttttttttccaatttatatttttaaaatatttatttatatatttttgaaaaataattctagtgaaaattcttttttttt

SEQ ID NO: 153686 - DNA, 502 bp, Cannabis sativa
aagtagggagttttcagggcagggatgaagatgtaaatccttgacttggggacccaagcagcaatgttggaactgtggaagaattggaagagatcgagatcgacctagatatcccggccaaaaagctaaagatcgaaaaaggtttgttgctcgaagtaaaatcagaactgataaaatttctgagagcaaacctagacgtcttttccttgtcacatgcggatatggccggaattgatccttctatcattttgcacatcctgaatattgatcgtaactttcagccagttaaacaaaagagaaggctattggaaaaagagcgagcactagccctaaaagaagaagtagaaaagctacgcaacaaaaatttcataattgaagctttctacccaacttgggtcacaaatcctgtactggtgcccaagccgaacaagaaatggcgaatgtgtactgatttcacagacctcaacaaagcatgccccaaagattgttttctacttccaag

SEQ ID NO: 153687 - DNA, 572 bp, Cannabis sativa
attgggatcactataatcaagtttgtcgagacatctccagattcagtaattaaagatgtgtttaatacatgacatttcttacccagtaaaagcgggaaaatcactgctatacgtttttcaaaatcatacaccgcatttatatttcgtgatatgtaatcaaatcccacgattttagggataatggctgtaaatatattctggtcaactttgtaattaatttcccactatgtaattacaaatagtggcaaacaatctcaaaaaagggggacgaaaaaactcacatgaaagaggccttaaaaaaatactcagaaatctgaataagattgacttgtggactatgcagaattttaactgcaaaatcacgcaaaaaaaaccctgtgttcatatattattttttctatagcttttattttttctgtgtggaattattaccgtgaggctcaaattttgttaacgaagatctgcgttgacagtttgattatacatgagagtgaaagtgagagagagagtcctatataataatgtgctaattacgaaaatagtaatatatacatatgggtgcacttttaatg

SEQ ID NO: 153688 - DNA, 540 bp, Cannabis sativa
atacatatatatataaacacatatgtaataaaacacaaaatgtatacatatatattacatatcaagttaataaatatttaccttataagcgcaatccaacgcgcgaacaattgcgacaaaaatctagccaccatgcacacacaacaacataatgttaataaaatagaaatatcctaaaaaaaaattacaaaaacgaaaatctagcaatgtacattaataaaataaatagaaattatatttatatcttaatggacgttgagattcaacgttttctccactaaaatcggtactcagagttataccactacctttttttaatagggccagttgcaatgaaataaggagaaaaaccaaacgtttttagtgtatatgtttaggtatttgaaaatagaagactttaaaagaaaaatagggtaatggtgtagaattgagggagatatagggattttattaagtggttggcgagggttttcgtgtgggttgtgggttctgctatggtgttctttctgaagaagaaggcgaagtggggaagacgaagct

SEQ ID NO: 153689 - DNA, 690 bp, Cannabis sativa
gaattggaaatttaaactaattttggtaaattaaaacttttaacacaaaattaagcaattaaacacttaatcaaataaatgcaagtaatatggccagcaatatattagaacaaataattaaacttgtaaagtaaagggtttagggttagagattccaaactctcgttttttcaaggtttggtagaactaagccacctacgtccttggtcgtcaaagctatggacctagctttgagttccactaccgagcctagttaacgggcttgactaacccttacaactggggaatttttcattaagatttttcccaaacctctcacaatagttttcttccaaggactatcaacctcaccagattgttgaagtgccaatctcactatcggattgttacagtgacagtctcactcttctcgggttatttacaaaaccggtgtcaacctcacctacaaccgattcatttttatattgttgccaacctcacctctcaatacaatagttatttgtttttgaaatacaaagcaaactccctctaataagataaaatacaatatgaaatcctagagagatttgtaagcacactagaaaataagaaaaagtttgactcaagtgtgtgaggttggtatgtttatgaaaagatgataattctttagcttagaacacttagaatgatgttatatgatgaatagaagct

SEQ ID NO: 153690 - DNA, 884 bp, Cannabis sativa
gacatgaccggcataagtccccatttaataacccatgtccttaacattaatctggatatgccaccagttcagcagaagcggcgcccccttaatccagtaaaggcggaagctttggagaaagaggtggacaagctactagctagtgacatgatccaggatgtatattacccagaatggctggccaatccggtattggtgcctaaaccaaaggggacatggcgggtgtgtatagattttaccaatctaaataaggcctgcacaaaaaactgcttcccctaccccagattgaccaaatggtggacgccacttccggattcaagctattatccttcatggatgcctatgccggctacaaagagatcaagatgcacattgtggatcaagaatgtactagcttcagtaccgataagggggtatactgctacttggtcatgcctttcgggctaaaaaatgctagtgcaacatacaaaaggatggttaaccggatgtttaaaggccttttgggacggaacatggaggtgtacgtggacgacatgctggtcaagtcaaaggcatgtacgagtcatgcagagaacctcgaggaatgctttgaagtggttcagagttatggaatgaaacttaacccgaaaaagtgcactttcggggttaaattaggaaagtttttggggtttatcgtcagccaaaggaggatagaggcaaacccagaaaaaattcaagccctcttaaacatgccttctcccaagaagcacaaagatgtgcaaagtctaaccggaaaagttgctgccctgagctggtttatttccctatccatagacaagtgcattccattcttcaacattctgaagaaattgagcttgaggttttggccattagtctgccaggcc

SEQ ID NO: 153691 - DNA, 1060 bp, Cannabis sativa
aagtatttataattggcccaaattaggacttgataattaattttataacaaattagaatttattcttgaatagagtattcttaggtagaggttctactgtacatgaaaaatataaattgatactttatttacaaaaataactccataaggtgtggacaacatttatacctttcatgtaattttaattaccaaaatacctcttacactatcacttatacaatcagacgatggttgcagggtggttgatgcgtggttgcatgatggttgcattagacaaaggtttcaatcagacgatagttgtagggtggttggccaaaggttgcatcagacgaatgtttcaatcagatgatggttgtgggtggttagccaaaggttgcatcagacgaaggtttcaatgagacaaaataactattagcaaaatatttatgcaactgtaatgcaactgttatgaaacattaaaaatcagaactgtatttccacatatgtaactctatctacatgtctcttcataatttaatatgaacaaattcaccattagaaatttagaaaataacgaaaatacaccaggataaatattttactatattgatgtaattttttttggattatatttgagttggattgtttgggatatgaaaattgaagtcaggacattaattttatgcaaattaaacagaatttcggttgaagtttagtttcatagtagtttatctacactttttttttcatgaattcgaaacagcccatgttttgattgattctgttcgtcttctcaagtgaagtccccataattaatggtggatttctttctggttgaatttttgtttcggttgcgttgggttgttgcgtggttgtgtgatggttgcctaggaagcatactgggttgaaggtgtgtaagtggtatttgtgcaattttatttatttgggctgtatatttgtttatttggctagccgtaagtatttttgtaatattgttacttttttttggttaaaactgaaaaaaaccctattttttatctatgatatgatagagaatatatataaattatgcatatatcct

SEQ ID NO: 153692 - DNA, 519 bp, Cannabis sativa
cctacgactgatttagcttaattattatttaactagcttgtcacacatgtttacgacgtaatcatgtgccttcgaattgtagggtaagtttcacaagaattatgttttcaagtttcacattatatcaaatcttgtcttatcatctaatttttgtcatgaagcctcaataagcaatttaaatgcgaaaactaaaattaaaaaaataatgacattgaaatacaccattagtataatgtaatccattattatataagttatgttattaagctcccctacatgacaaaagaaagaaaaagtatagttctttcattcatcatcttgcatggtgagttaaaaatttgaagcttgcataataaagtgaaaaagtgagtgccccaaaggaactcattttatgatagaaagagactaattaggttgtgtttggtctgaggaaattaataaaattatagaaagaaatcaattttcatttcattctaataaaatgaaatcaatttgtttatcagtttttttttttttttt

SEQ ID NO: 153693 - DNA, 736 bp, Cannabis sativa
ataaaaccagaaagtgttttattgaattgaatgaatgagtaaaatacaaaggggaaaggtatatatacaaggggactcgattcctataaaccaggaaataataaaacagacaccaaaaaaatctattaaccacctaaatatctactaaccaattaaccaactaaacaaccactaatggtccaatgttcagtacataaaacagagtagacagaggatagagcaattcttgttaacatcgaaacaacgggttctatggagagaaccaagtaaaaatcattaataattgagtgtttgtaatattagtattggcttgcatagagatgtgggcaagagaattatacctaggagagaaagagagaaaagttttaaagaaattaagccatgacaaagattaaataaagatactaatttatgcattttgatcagatttgtgcatgattttcctttttcttttttttttctggtattttatttatttttgcattttttttagatttaaaacattgtaattcgcctaaatttactgatgcttaatgcccagtttgatggggcgaaacaacatgtttaattatcagggccgaccctgaaatttagtgggccatagaaaaaaatatttttgggccctcatttaaaaaaaaatgtgatattttttaaaattgagaaaaaaatgtgtaatttaaaaagggacaaatttttttgggcccatgagctaggtgggccctaggcacaggcctag

SEQ ID NO: 153694 - DNA, 542 bp, Cannabis sativa
tcacttttctgtgaagaaaaccgccgcaaatatcttacaatgcggtctttactggcccactttgtttaaagacaccaatgatttttgtcgttcttgtgtaaggtgccaaaggttaggttccttgtcccgtcgacacatgatgcccttaaacccaattcttgtcatagaaatatttgattgttgggggatagactttatgggaacatttataccttcttttggttacctctacatccttcttttggttaccatgtcaaaataatgataacgctacagttgtgaaatttttaaaagaaaatgtgttatctaggtttggtacccctcacgctattattggtgatcaaggcactcatttttgcaaccgatcttttgaaggtctcatgcgaacgtacggtgtacttcacaaagttgcaaatgcctatcattcacgaaccaatggtcaagctgagctagctaatagggagatcaaaaacattcttgaaaagacggtaaatcccgaccgcaaagattggtcaacacgtcttcaagatgcactttgggca

SEQ ID NO: 153695 - DNA, 548 bp, Cannabis sativa
gccaggaatatgctgggcatctcctgggggaacagctggagccaatactcctgctgcaccccctggtgctccttgtggccaagctccagctgccggaccttggttcagatggggcaaccggtttttgatccactcgtagaggtgtcccaatcggatcaagttttcaatctcgtccttaagatttttgcattcattggtgttgtgctcaatgtcgctgtggtactcgcatctcttattgggatcccttcgggagctatctttgtacaggggaggcggtctctggtagtgcgtatttgcctagtagcaaaatatacacgttcttgggagtccgttaactccgtgtactgggtatattagggagtataccccctttttttcgcttatcctctgtctgggtactgccttttgaggaccttttactcctcgagccctgggaagcaccgactaaagttgctgtcggagcggagtgcgagggggcttgtccatttatccctgagggatttccaaaatgggacgatgcgggggccaaggcctggccttggctatat

SEQ ID NO: 153696 - DNA, 1244 bp, Cannabis sativa
taaccgctggaaagaggccacctctggatgtctgccagaaatgaaaaatccaaggattctcctaggcaaacattaggtgcaaatatcccaaaggcagcgaaagcaggaaggactcgagtatgaaaaccatttcatactcttaacaatctaaaagcaaaaaaggttgtttggccaaatgaaaaagtagagcacagaggaaaagatacgtagtacgacggtcttctccaagatcatctcaccgtagaaatcaaatgcaactaaaaatttcaaaactctgccctaacatgcaaatgaacaccaaaagtaaaatgtacccagaaaacttacataaaggtcgagaactaggaagtgattatgatcgacggtagaatgcagactggcagcgacgaagaaacaacaacaagaaatctatggtttctgaaattttctcagaggttcttgggtcaaaatggcgagattgcgaagtaacccaatgttgagaaaatgctggattttatagaccaaaaggagtgtaaggcagctgtgatcagacaccatcgtacggtgagaatcgtaatcgattcgcattctacgaatccaacgggtgagattaataggtgtcagggcggttgaaaacgtttgagtacctttctgacactcaaattaaatgtgccgatttttcaatggacgggaagcgaatcgttgtttgcaaaaggaaataaatattaatgatggccatcataaatgcagtccacgcgcctaaggcccgtgtcgttataccaacatactaactggaggcatcaagcaagcctcacttaccctttgctaaatgaggcttggggggtaaatgttgcccttgatttttcccaaaatacgtggacgcggataaaggtgacacgtggatctggaagaacaatcattcatgaaaatcagctaagtcttagacaaaaaaggaacacctcagggaagattcctcccgaaggacagcataagacacatttttactcttcaggaggctagagccttgctaaggcagttccgggaggttaagagattacttgaacaatcacttcgcatttaatgccacatgggggaagacgtattgaaacctccataaaggacatgactgatggcgtaacccccctttcacagtgattacactataatagatgagtctagtgacggctacattatgagaaatcacatcagttaagaggggataaaagattatatccacctaactcctaagatacctacgatatagg

SEQ ID NO: 153697 - DNA, 587 bp, Cannabis sativa
ttgggtatagaagtcatagttagagtgaaggggaagagagttgaccttgtagatttcaagtcaagttattatattaaacaacatgatacagataaaggtcgatatatgttcactcttacagcaaacaaaaagcttaggtaatagagttggttgctagcaacaagaggggttggaggaagaaatattgttttgtcaaaggtgacctgtttggaacgagtgattatgtggttcctacttcatggagaaccttaagtgagtgaggagtgttgatttctttgtcgttttttatttgatacttgatttgtctatgaatactaactattcctctttgtcattgtaggtaaggggctcactcgatgtcctcgcagggggtgttggtctgaagctcgagtcaacgacttgctctctattccttccgatcaaagagcccgtaacaagcttcttgttttaaataaatcttgtgtcggaaatttgtggtgaggtacgcaacgtcaagaaggtagtattttttcactcaacgttgtcaagcgcgcccccatccttttgttgacccgagttttagagaaggttagtggtcccttctcttt

SEQ ID NO: 153698 - DNA, 1143 bp, Cannabis sativa
  modified_base (1072)..(1077): a, c, t, g, unknown or other
aatccgaatttataaggtaagaaatcgaatatgaatgcacaccaatcttaccataaatgggaaaattattttgtcaactaacttgccaaaaaaagactttacatctactttaaccttttaactacttcaagtgaaatttgggtagaaaatacagagcaccattggagatgctagttgttttagtgttgctattacccaattattaatttaactaataatattaaaacttaatctaatacaattcaattatatttttttaaatatataaaatttaatcgagtttaaaatttatttataaaaataatatatctcattaattttattaaacaataaaataagtaaataagtttaaatattttaaataatataactaataaatttgttgtaaagtatgattaattaattaattaaattaaagtctaaatcaaatttaaatgaagatttatataaaaaataattatctaattttgttgatacttttaaattaaatttaaatatttaaactaaacttttttcaaaaaaaaaataattaaataatttaacgatgttagttttaactattagctttaacggaaaaaaaatcattaaaccaacaattttagttagatagccacatttaatatgagagaaattaggtcaatattacgtgcaatgcatgtatacttagttatattcttagtttttattttagatttttagttatataattagtttttttatgttattcaataaacaacatcatttttttgaaaaatgtttaattaaagtgatatttatataaaaaaaaaacataataacatttaaaatttgttgttaattatattttagttttaccgttataatttttctttttatagaaatatcatacacttttctattttttttaaaaaaaaaacaacaaaaaaggtaacaatattacaacaataattctttaagaaacataaaaacttttttattatattattttaaaagaaaacaatagagtttaaatttaaattgtaatgttttgaaaaagaacaatattttctgttacatggagacatttaatataatatatatatctttatatatnnnnnntgcctatctaacggcaattcttggtttaacgtttttgttatttttattctgttaactttaacggag

SEQ ID NO: 153699 - DNA, 611 bp, Cannabis sativa
  modified_base (554)..(562): a, c, t, g, unknown or other
atgacttttccgaagtttgttgtcagtgccggaaaagtcgccggagtagctgctagcgtcagaatagttgtcagaattggggcattgtcaacggaaaaatcaccttagaaaccgatttctgggtgaataaactggtttcttggtgatttttccggcgaaaatgccaattccgacgaatttttcggtgctggcagcaactctgatgacttttccagcaccgaccgctactccggcgacttttccggcaccagcagcaaactccggtgatttttccagcatcaatgacaaataaaacttcctaaataaataaaaacattaaatatgagatttgaaaacctaattacatataaatggcatatcaaatactataaaaagacctaaaaataaaaaaataccatataaattgatcaaacttaaatgtgtcatatttatcataagaacttttaaaatcccatagtaagtgtaattttttctatatatataaataggtattacccatgaatgagcaaaattagaaaattttgagttcttatacttaatttttctatctaatnnnnnnnnnctctcatttttatatcatatgggcagagattgttccatcggcaattttt

SEQ ID NO: 153700 - DNA, 842 bp, Cannabis sativa
tttggtggagatgattcttcaagggatgaattgttgactcctttagttggaatcaaatcattaacttcttggtgtggtggtaattcaagttgtgtaccactttatataatgatgccagtaacatttcctattgggttactctccacttgtgaaggcatagagtttgaacattgaattttatactcactcatagatgtttctattgactctgcaaaattctctaacttttgcaaagattgttgaagtctctacatagtttcatgacaggtttactgaaactgcaaggaattagctgctaacatttcaatcagctcagcagtagttggcttttcactatatgctgcaacatgagtaggttgttgaaactatgcattattctgttccatctaaatagtagaagcctccaaagtgttgagcaggtcagtaagacaataatcttgatcttgtggtgctacaggaggataataagaagttgattgaacatattgactgatcccactataggaagtgctagaataatctccccattattgattgtatgtgtaagtatcgtagtagggatcatattgatacacttgtggcggatataatatggatcacagtattgttgattgtacatcgctatatttccaaagaaagatctgaaaattaaaaccacaactagaagaacaaattagtaaagtaaaaattaaatatgaataataaaataaaataatagcaaccggcaacggcaccaaaaatttgatgtgtgtcgtaagccacaacaaatttattaatatttatttctaataccttcaattattttagtataattgtatgtaagggttgatcccacgaggact

SEQ ID NO: 153701 - DNA, 1312 bp, Cannabis sativa
tttgtaaatatttttgggatcccgacttttgtaacttttagtttataaagtttaaattattacaagtttgttttcattcagtttgttactaaagtttaattttcgcgcatattttatcagtaaccccgtttaggggattagggtttcttaagtatcttgggtagtgtgcctaattatttagggcgttacaacatatttcaaattgtgctcaaaaatttcaatgattgagaattttacaactattagttccaacatcactttatttattcaacacttttttttttctatttttttaatcatcatttttttcagaacataaataacaacagtgatgttgaaaaatacttttacagttcacacattgtctcaatctcccactttaaataataattttatccacacacaatttatctctcccaaacttatttctaagcttatggtataattcaagggacaaggatagagaattgcaagtggattcaaagttagtctcataaagtggctaaaaacaattgaacaggctaagctcaaataggcaaactagggataataaagataaaggtaagcttgtaaggcccaaacgatccaaaaaaaattgcctcatcattttccaaacaagcattgtcaaggatttcgtctcaaaaaataattcatgcaacttctatcctattcaatcaatcttaccacaaaccgaagtaaaataattatgacacaatccaactattgacaatttacatcaataaaaattttcacaagcatccaaattaattcaaagagtaaaaaaaatcaagcacatagtttaaaatttcaatcaattccacaaataataacagcagcaaaatcgacattagcttaattaataactaaaacaaacaaataaagctaaataacaaaaaataaattaagcccttcccccgaacttaaaatttcacattgtccctaatgtgaaacagaaatttaaagagaagaaaacttactttaggtccataccatatcaacaagtggttgacgcccataataagcgtcatgcacgacaacttgaaagttgtttttgaaaatacccttaagcttggcatgtaatgagtttgaaccaaaagctgcaccaacaacacaagactttcgatgatgagcttggggagaaaccgttgataactcgtagagaatacaatatggagaatacggtattagtggaatataagggtccattgattgttcataatatagtgacgttgaagacctcaaatcaacaactacatgtgattcttcagccaccaatgacccctctttttcactttcctcaaataacctctca

SEQ ID NO: 153702 - DNA, 916 bp, Cannabis sativa
  modified_base (50)..(68): a, c, t, g, unknown or other
ctattggtaacctgctattgcaggtcaaaaaaaaatgtaaccatatggtnnnnnnnnnnnnnnnnnnnttgaatagtcacccaaatatatatatatatatatattaattgactatgctaatatttttattttttttagaaatattgatattttattattactattaattattattattattgattttttttttaaaattaaaatattggtaaaataattaataatgtttaatgtggaggttagtttgctattttactatatgcacaatgttttttagaaaaaaactatatacatgattagttagatattttagttgttatattggtgattttgctctatttttatttcaattattaattaacataattaacatatttttttttttttgaaaagaaattaatgtagataaaaattgaggaaaaaattagtgtagagttttatgatattatgtcaccacctccatcttcaactttattccaatagtctttttatgacctttcataaatctcaagagtttgtcattaaaaaaaatgatttttttacatcgaataatttagactaatgactaaattatgatttattcgaagttatcgacaactgtaaaattatcataaagaaaagcttatatttttaaattagagtaatttatggtgaaacccccttatgttttaatttgtatacacttaatccccttatcttttttttggtggcaaaacccctttatgtttttatacatataacccccttattttttttttgtagcaaaacccccttatgttttaatttttatacagtacttaacctctttaacttatattttggtggcaaaccccccttaagtttacttttctttgcaaatttaaagttttagttagatattaccgttaaatactaactggattactactgtatcgac

SEQ ID NO: 153703 - DNA, 596 bp, Cannabis sativa
aaagaacttgaatttaatctaatttaatctgaacgaccataaacgaccttgaatttacattaagcaaccatcatggtcttttattgtcttcaaccaattttaaagaacttgaatttgatctgaacgaccataaacgaccttgaatttatactgtgcgaccataatagtcttttatgtccttcaactaattttaaataacttgaatttgctctgaacaaccataaatgaccttgaatttatattatgtgaccatcatggtcttttatggtgtttaaccaattttaaagaacttgaatttgatctaaacgaccataaatgatcttgaatttacactaggtgaccataatggtattttatgttcttcaaccaattttaaagaactttaatttgcgctaaacgactatgaacgaccttgaatttacactatgtaacttgaatttactctgaacaaccataaatgaccactaaggtcgcacacggtcgcacaggtcgcatggggtcacacatgatcgcactatatattttcataccacgtgcgaccttgttcatttagttaaatttgtaattctttttatactttttatatttatgttctt

SEQ ID NO: 153704 - DNA, 552 bp, Cannabis sativa
  modified_base (28)..(44): a, c, t, g, unknown or other
attttttgttgttatttagatgttattnnnnnnnnnnnnnnnnntagttttcttattattttcgtgctttttctatagaaaacagtaaaaatgaaaaaaaaattctttaaatgtaaaaataaacttttttacaaaaatattgtcttatctaattatctctatcaaaggatgaaattttaaaataaatttaaaaaatgaccttacctattttattataatagaattagcgtttattttctagttttatttcggccagtgtataccaatcaaaacttatacttatctgagatttttagaatgtttgaaaaagttttttttctccttttatctctaatagtgtatatgtcagcttcctctttctttcaatttttttttgtccttttattttttttcttttctgttttgtccttttattcagcataagcacatttttcttttaatttagagtaatttacggcaaaaccctctcaactatcaatttacttgcaaaaaaccatccaaccttatattttggtgggaaaaccctccaaagtactgttccgtttacatttt

SEQ ID NO: 153705 - DNA, 671 bp, Cannabis sativa
  modified_base (265)..(268): a, c, t, g, unknown or other
  modified_base (638)..(641): a, c, t, g, unknown or other
acgacgctcttccgatcttgcactggcaagggtggagtaagagttcgcatcagctcaaatccgctcttggccttctcggatccaccctttgattgctcaggcctgtacgcgcttcctcctcaagaatctttggacttggtaacttttggagtagaggggttcgtatcagttagctccttagaaaggtcaataacctccccgaccggtacatcaacattctagccaaaggaagaagcagtcgcctcaggttcaccataagccactnnnnaagcacagtactcgagatacatgtttttggcctcgcccaggtaatcgaaattttcctgggggttagccttccaaaagtcataaaaaatctcgagaccagttgtctctaaggcctgtactttttcttcctgcctcgccacctccgacttgtacttctcaatctcagatgtaagctcctcccagcagcagctctagagaagattcgttgtcagcaccgaccagctactcacttatctcaggaaccaatcggttcatgtaatgggcgagaatctcctcacctttcttggcctctggatgcattgacaagggtggagtaggagcccgcatctgctcaaatcagctcttggccagctcggatccaccctttgatnnnncaggcctgtccgagcttcctcctcaagaat

SEQ ID NO: 153706 - DNA, 687 bp, Cannabis sativa
  modified_base (633)..(637): a, c, t, g, unknown or other
tacatgcattaaaattccagaattcagattgcaaaagccatctcaaatcatgcataaacatggcacatccaactctttgaacaagagcatcaccttcaactatttctaccattttccagccatgaaaatatcatagcaacacataattcaatactagaaaataccctagaatcaaaatccatgctcaagaacttaaatcccaaaaattatcacactcaattcatcaagattataacaacacttaagaacatgcaatcacaagagcaagatacaacttaaaacatgcttttaccataataatttcagcaagataccactattaaaattcaacaaaaactcagcaagaagttacctaaacttcaagctcaagaatccacaattctaaagctccaattcacacccaacttcaagcaattctcaacaatcaactttgaaaatcaaaagggctttaggaaaagagagggttcgggtgagagagagataaaaccagaaaaataattccttttcctttcaaaaatcatttaattcaaagtaaatcccttatggtcaaatgaccattttgcccttagggctatataacatacacactcaattttaagggcataaatgccatttcacactcaaatattgccnnnnnaatttcagattatcacatgtcaaataaaatgccaaataatcaattcaatt

SEQ ID NO: 153707 - DNA, 674 bp, Cannabis sativa
tttattaaattttcaataattttagtttgattttttaagatatgtgttgataaataaaataaaatttgaaaatattttattaagtaaaattaataatttcttattaatttaatatatatatccaattttttaataactttactatttttcttttgaactaatagaatataattgctttaaaataatagaatgttataattttttatttttttttttaataaaaggggaaaatttttgtattggtcaaagtttaggggaaaaatgctaattttaaatggtaaaagaaacggaacctaacaaaaggggcataattatataactgttacattttatgaagaatttttaacaagctgtatattttagggggcaaaattaggtagtgccaaaagttcagggggcacctcttttcttttgatcaagtttttcagcaaagttttttttagacaaattttatggacatccaagggggagtgttaagaaagattatttatggatgtccaaattaccaaattaattattatcattaatactttgttgtattttcttttattatatttatttagtttcccattcttttagtcatattttgtataaattaataggatttcacctcattggaataaataacggagaaattctcattcagtttctctttctctcttcatcttcttctt

SEQ ID NO: 153708 - DNA, 525 bp, Cannabis sativa
aatcactctcaaacaatctgactccagaatgacccccacccaaccattggactttatccaactcaaagcttccttaaacccgagagcttccacctcatgaggctgcaacagaccaacctttaacactgttcttgcttgaagaaccatcccagccgcacatctagccactaaacccatgccaaaccgagcttcgggggtgaacaatacgccatcaacatttactttgatgtaagggaaatttggagggcaccatttctcacacaacacacttgactgcacaggaagagtttctttttcgaactgttgtgctttgcaccagtccgaaaaattcactttagccacatgaattacctcttcacttgaaggagaaataacattccaaacaacctcattacgcaccttccacactgccctgcttaaaatagttacttaattaaagaatataacacaaaatttctacacttatcgatttttttattattttcttttcagccaatggaccaaccccagtccatataatgtaaa

SEQ ID NO: 153709 - DNA, 728 bp, Cannabis sativa
  modified_base (26)..(26): a, c, t, g, unknown or other
  modified_base (312)..(313): a, c, t, g, unknown or other
aagatgggcttagaattttaaaattntcccactcaaataaggtactgtgatactatgtccaagaactttattggtatcaatttctattacaacagtgacatataaatttaaacaaaatacaggatcaagaataagttctaataatttgctaatttgttcattatattacatccatgtctaatcaaaatatgtgtatcatagagatactgtggtctattgagtataatctagagttcaaaattaaaagtatttaaactgcatatgtcaatagcttcttccaccctaactgttatagagatcatgtgaagttannaatataatctagagttcaatagatataaaagatcattgaactgcatatattactttttatcttcttccacccctatcagatcaaaagatctttttattaaacaaaattttaataattgcttaagaaattaacaattattcataaacattgaatttgaattcaaagtgtttatgtggtatatctctttccagagaataacatacaatagattttgtatcattaataaaatacaaacacatacaaaaaatgataaacatataaatgtattgcacacacaagttaaagaaaaacacgaagctcaattcataatgaaatttcttaaagagaaaactttattaataatctcaaaaatgtcataatgaaatgtctgcataaatatgaaatagggaattaaatcccaaaccaataattgaaa

SEQ ID NO: 153710 - DNA, 607 bp, Cannabis sativa
gtaaaataatttccaacaaagaggagtataagtaatagtgtcatcaacttcttcatcagaagcaatggtagctaccttttcaacaacaacacttggattggaatctggaacctaaaatataaaatttgaacatcagaaaaagaaaaaagttgcaaaactaacataaaactgtcaagaaactaaaataaaactgacatgctaacacaacctaacaaagaatataaactacacttacattgatttatcaacaacctctaaaacagccaacacaacttgctcatcatcaattttaagctagcttaaaccatcaaaaaatcatctccctttacactaaactctttggccttaacattctcaacattcttggccctctcttcactgcctgcaacagtctcaatttgaatcacatcatcagcaggaaatcacaaacaaccttatcaactccagcagcatcaccaccatcttaacccgactcatcaccttcatcgaaattagaatcaatattctctggatcaggtaatcccttgtcatcatcctcatcatcatcagaatcttgggtgacaaattcatcagatgacttaatttggttcaaaaacagtattgcaat

SEQ ID NO: 153711 - DNA, 523 bp, Cannabis sativa
tgactatccgacaggtcgctcatcagaaagatagaagatcttttcagcatggtgaatgtgtgaaaaaacaaaataagtgatctcacccgcatataaactataaaattccattgagagaatggtccgaattctcgcgaatactgaccaccctatcgcaatatgcgagcagagcgaatactaaatatgcaaatagaaaaacgtcccaaaaaatggttaggagtgtcctggtaaccatagcgacatgcatctttcggcatgaccctgaggtgacgaggagacacccaccatttcaaggagtccaactaaaatcgcaacttgcgaataagtcacggatcttgagctaagcgatatacctctaaaaacggctgggagaaactcagtgactcaaggggcatgcgttctcaagcatggccctgaagttactgaggtttcccactgtttcgaggatatctaccagccaaagagtacgcttattagaacattaacgcatgtcggaaatggctgggtgtatctcagtatctca

SEQ ID NO: 153712 - DNA, 557 bp, Cannabis sativa
ataatttagtggtacttaatccaattccctgtgggatcgacctcacctgtgtgagatttactacttgattgcgtatacttgcgtagtgtttaaaattatagcaaaaatattaagcttttcatgattagttttttttttaaaaaaaaaaaaattcacaaaataacgaaaccatcacatcaaaacttttttactattaaatacaataaaaactttcataattaatttttttttaaatatatttatatatatatatgtcactgcgtgacaatcaaattttccatcaacctttattaattttttttaaaaaaaataataaaaaaaaatatcgacaaaaagcataaaagggaaaaacttcatactaattcagtatacaatatgtagattaaacagtaaaaaagaaaatatatgcgtataacagtaaaaaagaaagttttataaaaaaacagtaccgtgtgtaaatatgtcttaatttatggggtgcaaatataactctgttgttacagattcacttatttacccttaagttgaataacaccactcatagggtttgacaaata

SEQ ID NO: 153713 - DNA, 1035 bp, Cannabis sativa
gtggaggagctcaagagggaggtggacgtcctggagacagctgtagttgaggttttctatgatttttggaaggccaatcctgaaggaaactttgattatcttggtgactccaagagcatgtatcttgatttctatgtggctcaggcagccaaaaaaaaccccgaaacaactacctctacagctcctaccgactagagcactgaagttcctgccgctcaaactattgatcctccagctccttcagatcaaactgatctgtactaagagcccgggactcctgctgtttgaatatttttctctctttcttttatatatatgcctgtttggcccttaggccttcttttgagacaaaatgactggccaagcggtttttaaattacttagaatgtgtttttattttttaagacaactggctaaccgagcagcttttaatcctgagtttaccatgctttgttatatataatgaatatcattccttgttatgataattatttgtgcaactgagtttttttagcttgttatttacttttaccaacgctttatatgggtatagttggcccccaagtgaccgagtgaacttttgactattggtcacttgcatttcacaagtacaatttttgtctgttcagttctttgggttcgagtagatctttgtacgcatttaatggtaaatttataacttgcttgataaaattgacacaatttgaatttaaataaacatctttattcatttattggtcgaaacttttttgttaccgtagtaacttacataaaagatattatattgatctaatccgatctttaactaaattaaaaaaaaaacaaattacattaaaaagaaattgtactttcaaaagtcgtcatccgacctgagtactttgtcgtttcacccgaatctttgggcgtggtctgcctagaaggccatttacttaagagtaaatgctcttagattctgtacttagaatggtcatccgacctagtacttttactggtagtattttcttaaatgttccccattccaataccttagtacta

SEQ ID NO: 153714 - DNA, 1131 bp, Cannabis sativa
  modified_base (283)..(296): a, c, t, g, unknown or other
gcgaaagctaaattcgctaagtgttgatcgccctgcacggcttgttgaatatttcattctggatgtgccagcaaggcgtcctgctcggcctattgtctgagaagatgctccaagtggagtccacgtgtcactattctcgtgatgccacgtcagagtgccaaatttgggataacatttgccccccaagtctgtacaggacctctgaggttgcgtgtagacttattccgagctagctctgcctttggatagggacacgtttcgagcatgaccgttcgagactcgnnnnnnnnnnnnnngggcgtcccttcggttttcggctaattaatgctctgacaattaatattttgagaatctggatttctctctccacggctgatggttgcacttgattacttttgatttcccatatttgcttttgaggtaggaagtcgaggcgtctaaggttcctctggatacagttccccctttgcctttaaatactcatcgtactagtacataacccattttatcacccttcgttgctaagtaaactccagagcaaaaagagagttttctggcttcaaagttgccaaagtgccttcagacgattgttggtttgcttgaactcagacattagaatctttgagtaagtttctgattcgttttatgcttttctttgcatgtttacgctttgaatgcaactacgctttagaaagaatgcttaggaaaccctagggttagaaacttttgcgactcttcttttccatgtcttcatatgggctttcagccgtagagcttatttttgaaccgcattgtgtctgtcttccatcttgcttattctaagcttcatgaacttttttgccttagctcaagaaaactttacaacttcttgagttttgacttttctttaaacatagtcgttctttaatctgttaagtactcctgttcggcatagttgcttatttttcgtttgatactccgtggaacactcatcctgtgtgttgtcttttgtagatgaacccaggtgagtcatgggaacttaggcatcagatcgactaggatttgcttcaacttctgcacgaggttcatcctcgtcttcgtgctagtcctccttctagcgaaggaaactcttctgatctcgtacccagccat

SEQ ID NO: 153715 - DNA, 511 bp, Cannabis sativa
gaagtccagatagcaaacaaaatggtggctagaaccatgatcgataatggagcttcttcaaacattttgttcaagactgcttacgagaagagggggctccagctaaaggatctgactccatgcctccagcctgtctatggtttctccggtcaaggagttacacctctaggacaaattcggctacccctcacagttggacaagctccgacgagcataattatcatggcacagttcctaatattggatgttccttcagcctttaatgtaatgcttggccaaccagccttgtatgacctaaaagctgtcacatcaatatttcgctcatgcctgaagttcccaaccaaaaatggggtagggtgtcttagagggaatcagcaatctgctctggaatgttacaaccttgtagtggccaaggctatgaaggaaatatcctccaaacagagcccagacaagggaaaaaacattcccaagtaggaaactccccaagacgaggatgaagatgtggatcctc

SEQ ID NO: 153716 - DNA, 754 bp, Cannabis sativa
tgtcctagaggtgcaactccttgttcggagaaaccatagacaggctggagacatggggttagatccttgagctggagtcccattctttcataagcagttttgagtaggatgttggaagaggctccattatcgatcatgattctgcctaccattttattggctatacggacttccacgactagcgggtcattgtgtggaaatttaattttgatagcgtcttcgtcgttgaacgttatggttggccctcctgcccgtggaattttgggctttctttcttccgcggccaggataacttcttcttgttcgtgctatgttgttcgggcatacctctcctgagcttttcccaaatctccagcaatgtgcgggcctcaaatgataacttgcagatgcccatctaccggtggaggtagcaaatcctagttattgtcgttcctcccaccctggtcggtcttgacataaaactgcagatgtgggttgttgttccttatcaggaattcaatttcccgcttcaggttgttggattcattagtgtcgtggccgtaatctccatggaatcgacaaaactttgtcatgtctctcttgctgacatctttcctcatgggcccgggcttcttatatggggccagtgactgagtttccatgtaaacaatttttatatcttcagtcaagatactgaatgtagtgtatttggcatgattctcccggggagcttgctcagatttgttggcaaattttcctttcttcccattccctt

SEQ ID NO: 153717 - DNA, 1397 bp, Cannabis sativa
atgttatggctactctctaattaattaaaattatttatacatcatatatattctttatctcaaaataataatttgagatgtgatttataatatattgtttatatatataataaatattactcctactgatcttctggtatataattaattccataatgctcttttcaaacttagagaaaaatatgacataatgaaaaacctatttgtaagatgtttgttttaatctatatgtatatttcttaagcttgcatatgttcacaactattagaagaaaatctttatagtcgtctttataccttatcctctagttcactgtttagaattgattagtgaatataaatgagaacaatgccattgttactataatagaatcttttataaagacaagtgagaatgtaaatctcctttgttattgagtcttagtttaaagtgaatttcttagcaatgaatcttgttttatatctttattttttttttttcaagttgcctaatgagtagttatttatctacataatgccctttaagatattcatttcttcattcatgatatattgtaccgcaattttaattttgtgcattccacagtttaatttgtgtctcaaattaatattgtaattgaacacttattatacatagtgtaattactaaaaactattgatcttattattctaataagtcatcttaagaatggaccaacaaactcttaaaatggcaaatagttcaatatccatgtagtttagtaattataaataatttttaaataatatgacttattagaattttattaatgacttgtggattattaatgatcagttatggattatcaataaccattaatcttaagggttgttgtgaatcacaattaatctaatacttgaagtggaagtttaaaaaaattatatgaagaatctttctcaaaaactatatgtttatgtatccataaagatattaaatagactattttattcctttttgcatgtaagtttaatacactttagtatttctcttgaatgttattagagttagtctcacattgctaatgtgtagaaataaattgtgatatataatatgaatgggctactcctcctattgccaattagttttgagataaaacctcattcatcttatccccaaattctaacatggtatcaaagccacttgtgatccgttgtgagcccaagtgccaccagtccaaaaaaccgtttgtgatccattgtgagccaaagtgctgccggtccaaacagatacttccgctgtctcccctttaacctctatttgggacctttcggccaatgcttgccagttttcagtgttggggtctttgacttgtttcaaaaatttacaaattttccgacatgtacacccacaaatttcccaatatttggccttgtgggatt

SEQ ID NO: 153718 - DNA, 520 bp, Cannabis sativa
aggcttcatgccttttgactttgttttgttggatgctattttttttttctctcttcttttttagttttgttggatgttatgagtttgataatttttattttatgcatggtatgtgttactttatttttatttttattttttatctctctttattttgtgaattccttgccaccctttttgatgaatcaaaagggggagaacatccatatgattatttttttttgtgcacaaactcaatttttttttttggatatctaatttttcttaagtgtaaaattgagggggagttttcaaaatcatgcaaggtaaaattaaaaaggtaaattttttgcacacattaagggagagctaatccaatatacattgtttaaattttttcctttccctttttaaaataatcaaatatttaatatcatcaaaaatgaggagatttttaactcaaacttttaggtctccttgttttgatgattaacaaatatttgattattatttgttactaataatttgttgattttgtagc

SEQ ID NO: 153719 - DNA, 1032 bp, Cannabis sativa
  modified_base (332)..(336): a, c, t, g, unknown or other
tcatacatgaggttgtgacttgtagttgtatggagtaagatcacttagccatgaataaaataatcagtaacgtattaaagtttaggaatctttcatcaatggttgctagtatgagtcactgatgcttgttatgtgcaagtaatctcaatttggattactgatgtaacatgacatttaagtgaaggtgttgtatataatagagattatatatgataagaacgaatatgatattaagttgtatttatcaaacatgctgtttactataaagacataattcatatgataaagatgatcaatagtagatcgacctaaatcttaagtaatcatgaacnnnnnttcatgttattagtttctttaattcactcgttaaagtttctcaaagaagataattcttataacttctattttggaatgtaatatgtcgatggctgggaacatgatctaaagttatggaatcttgatttttccaacggatcaaatgttggttccttttatgtgttaattctgaaataaaaaagttgcacacaaatttagattagatctcaattatacattcactagttattcacaattacaacgatgtcatcatagtggaaagtaattgtgattgtatgtttcgaagtttttagttccatgatttatcagtgcattggatttcaattgatgtgataatcatcaataaaatttacttacacttgtataagtgtaatgtcatttctagggcattagcgaaatatactagtatcgaatatatggagtatatatcaaacttgaccaatattgacagtggaaaacatatcataaacttatcgttatatctttctaagtcaatatcgcttagttgatcttagatcaatgagatggttaggttctaggttaactgtattatttgtgttctttgacttgttcgttaaagttgaccaaatggatctttctaatacttacatcttggaaaaatagtagtaaaattgagtgggagtgctaatcatagatatgaaatctatagcttctataattatatagaagtgaaat

SEQ ID NO: 153720 - DNA, 594 bp, Cannabis sativa
tgtgcaaccgcaacattcattgtccgaatgttctcaaattctctgtgaaactctaattttgaatacgtgtaggcacacatgtaaatgtaattcttgaagacgtcagtcttgaacttgtagttgacgttcataataatgtggtggtagcatgcaccgtggtgtgcatcagggaacacgatctccaaagtacgaacaatgctttcatgcttatccaaaataaaggctaagttctcaacatcaccaatcatttctttcaattttctcataaaataggtccaagaattgtggttttcactatcaactatagcaaaagctattggaaagatatggctccctgcatccagtgccactgcacacaacatttgctcaccatacctagtcttcaagaaagacccatcaacgcatacaacaggtcgacaaaacctaaacccccgaatacaaggacccagagagaagaaacaatacttgaagcgatcatcttctaccgcaaaatttgtgatggtacatggatttctcaactgcatgtgcaagtaactaggtaatttcgagtacgaatcttcaggtgtaccatgagctaggtgtagtgccttctct

SEQ ID NO: 153721 - DNA, 795 bp, Cannabis sativa
tagttgagaagagccggcaacaggtgcctcaagactggccgaaacttggtttgcccgagcagtaggtgtatttttctttttgtcaccatatctaggtggaaaaccatggaggaaatagcacttctcaaccaagtgacctggtttaagacaattggaacatgtagggcaaggcttcttgttctgagaaggctaattcgattttagtttggcagacagcagcaacaatgccagtgttgccaagacaacattggcgctcttgttgaacaaccatggataaaaccttggatagtggcaggagaggatcaaagaggatgatgtgagcccatactccccagtaagattcattaagaccgatcaagaactgaaggatctgttctctagcgtagtaatcttgaactttttgcatggcaccataagtgcagccacaagtgtaaggagtatttggttgatactcgttgagttcatcccgaagggtttgtaactgagtgaagtatgtggtgaccgagttatcaccttatttaacattgttaacagaggccttaagttggagaatgcgcgggccattactctgattgaagcggtcatggaggtttgtccacattttgtgagcagtggttttgaacatgatgcttgcaccaatttctcgagacacagattgaaggatccattacattacggtgttgttgcatcgatcccaagcagatagagaaggatcattgagtgttggacggggtaagttgtcgtcaatgaaaggagttttatttttggcaacgatattaatcgaagccgctcgtt

SEQ ID NO: 153722 - DNA, 516 bp, Cannabis sativa
ttgacttcttgcaaatttagctcatatatatacatacacataacgaagactatttcaccaatatcaatatccacccttttgttcatgacctataattttcatcaacgaatattgtaaaagcagttctagaatattgtaaaatgtgttgaagaagtagaagatcattttttttttttctgatttgagtagaagatcgattttatatatatttatatggaaaggtacattctagggaaaaaaggaagaagaagatgagaataaaaaaaaaaataacgagttgtcatatttcttctccttgccagcctggtctgcctaaggtgaactccaagctaggaatttttccttcaaaactgttgttgtttcctacatagctcttcactcgagttgactcgcattcctgttatgttgaaattcactattataatttattcaaatttattagagtcattgcaatcaggagaaattctattattatatgagatataatcaaaacaatgaataagcagatttttttgt

SEQ ID NO: 153723 - DNA, 591 bp, Cannabis sativa
ttggatggggacacgtgtcaagcgtgactgtccgagactcgatgtgacgctgactgggtgccccttcagtttttggctaataaatgctctgacaattaatatttcaaaatttgattttctctcaccacggctgacgactgcacttgattattttttatttcacatatttgcttttaaggagggaactgaagcatctaaggttcctctgaaatgattacccctttttcgtgacttgcgtataaatatccaccaacattggcacataaactcattttcaccatccctctttgctaagtgagttcagagcgaaaagagaggttcttggcttgaagtttgctgccttcatcaaaactgctttgttgattgacgttgctcgaacccagatatctcactcttgagtaagttttcgatttcctttgtgcttattcttgcatgtttacatttcgaatgcaccttcgacttttctatagaaaatatttaggaaaccctaggttaaaaaactctaagattcttctttgtcatggcttcatgcgattttacagtccataatgcttgctttcttaactgcgtaacgtctgtctttcatcttgc

SEQ ID NO: 153724 - DNA, 502 bp, Cannabis sativa
aggagcacccgttcaaggagggcccaacctgataatggtcccaatgctcggaccacacgttcccaaagaactcaacttgatgttggacctagtacgcggacaacacgctcgaggagaactcagcgtgggaatggccagaatcccgaggcgagggatgaagagctcaaccttggaggtacccaatctgttggagaaagaacttatgaaatggagagtcgccatctggaagaggcccagcgtcgaaacactgagttagaatgagaggcagcctcgaccagggcggcacaggggaggaacgcccaaaatcaacctgaacgtacagtgagaagactacaaggcagaccttgtggctcacaaaccaggagataggaaaagtctcgggaagaacaaccaaaggaaaatgagacaccccctgagaatcaggatgaacatccagaaaggagacaaccagaaactgatgaacgagaaatccgtcatgaaaatgaggaggatcttagaactc

SEQ ID NO: 153725 - DNA, 660 bp, Cannabis sativa
tttgtagtgaatctgtaaaattttcttttataaaagtatatgtcaaataaaatctattaattaataatgagaaaataaataaaattgtatctaattctcacacaaaattaaaatcttttttttaaaaaaaggtaattgataaatctaaaaaatatataattcaaagcgaataataataataataataataacgtgtaatagtatatatgttgtattttaaaaattaatattaaaataatataaaattattattttgtaaatttatgttttaataaaatcttaaagatgagacaattaaaaagagaagagaaaaataaattactaaaacaataataaattatcaatttataaatttatgctctaataaaatattaaaaatgagaaaagtaaggtgagaagagaaaaataattttggagagattttaaggtttcacgtcaccgcctggtaattgttggtttaacagaatatactttaaaaataataaaatattctgttaattttaacgtagaagaatcaaaatacattttgcgattcctctctcttctttaacaaaaccccattgcgatttgagagaaagttagatcaaccgaaaatgtcaggggaaaaggaggaaagggtttgggaaagggaggagccaagaggcatcgcaaggttctcag

SEQ ID NO: 153726 - DNA, 674 bp, Cannabis sativa
cgctagtgtacactagccgtaccgatgtgaaacggtcaagtagtacagtattatcaactataatatcagcctatactcagtacgctagtcgtactctagtcgtactgatgtgttatgtcgagtagtacaaatgccaacatacatttatcgatatccaatataatattaaatatactcatgccgttattgtaatgtaacctagcaggaataactaacatgtaaacacatatgcaaagcattatactaatcttacctttgttctgaatgcaagtatgctagtaaccctgagtggaagctactacacgacgatttataagcccctatgtcacaacatacgcacaactgataagtgtttactctagaacacttttcttatgtctaaaaagaacctagggtttgtctaccaaactatgtggtggagacaccctaaaataaagtacacaattttgctctaatttatataccatatcatagagctcgtcataagctttaaaacggtatatagaacgtctaaaacagacacccaaatgaaaagttatggccaaaatactaaaatcggccttacctgatacagtccaacaggaattccagttggtacagccctaaaccatccggaattccggttgtctgggcagaaaaacacaaaaaaattccaatcttccaacccccataac

SEQ ID NO: 153727 - DNA, 709 bp, Cannabis sativa
  modified_base (477)..(486): a, c, t, g, unknown or other
tttttttttaataatatctacaaactgttaaaaaaatacaaaaaaaaaaaaaaaaacatatttaaattattttctaaggttttcaataaattgataaataatgtcccgtttaggcgagagtcaaagatatcatttgttgaatagagtagttagctcatctaaaattaatggacactattttagtaactttttattcgatcaaaataagaatctgacattgtcccgtctaggcgagagttaaggtcattcttatttcatgatcttctaccattgtttcatattttgtaaccccaattttttccagttaatattagggtgatcgttactaagaataaaagaattacaataatacttatcttttaaaaatctatagtattaaattgtctaatgaataaactgttgggttttgcgccctaaataaaactcatttcaatataatcagattactaattaataaagatcagaaatcattttatnnnnnnnnnntcacatgatttatttcataattatgtttaatgtgtaaatttaattaagtccataatatatatatttattcatgattatagtgtcgtcactacagtagaatataatatgattatatgttcagaaatttcattcccatgatttgtcggttcattggatttagactgacatgataatcggtgataaggtatacttactgttgagaatattttaccaggatctaaat

SEQ ID NO: 153728 - DNA, 588 bp, Cannabis sativa
agctagaggtggttatgagtactttgtcagtaacgccctgtccaacaggggcgccacgtgtgtgtatgttttaataaaattcttatttatatactatataattatactaaaagtgtgggtaattaaatttttataattaaaatttgacgtataaaaccatatgataaaagataagtcatattaactacggggttcccctattttaaaaatatttacaaactagtttattagtacttttacaacataaactttgaaattccaaattactatcaaaatggagcatcctgttcactggaccggttcactgcggctgatatgtacattgctgctacgacctcgaactcatggctgatctacctttgctttcccgtaacctgcaccataaagcacctgtgactcacagagactcagcaagaaaagtgaatagaataataacctgtaatatttagcaattcaatctcaaattaactttcatacacatttacacaatattctaaacacaattctggtactttataaagtacccctttaccactcgttaactacgagctgaatatgtcactatcgttgcccgatgaagcaaacgat

SEQ ID NO: 153729 - DNA, 537 bp, Cannabis sativa
atggcttcatgtggtttatgtgttgtaaagaattttttccatgaaaattactttttccaatttttgaaaatattttattcggattctttgtgaaaagcaattttgttttttacggaattcgattccgataaaaattgagaaagttatgaattttggaaaatcgggtgtccatgggtgctcaatcgcacgcatcaggattcggacaaggaaagtcgtgtgcgcgcgtgagcctcggtcacgcaccctgctgtccacccacgatcaccctgctggcgcctagttttctcgcccagctcatcctgctccgcgcgcagaaggctgatttgcagcctcctggggctgcacgtgcagcccttcctaggcagccagcacccaaattgcgatttttgcgggatttttccccaaaaatccgattttttatgggattgttctcgaaatctgatttttccaattttaaaaccccaaattaaaataaaatactatttttaaatatatttgaacttaaatatcatatttcaagttaataatatttatttt

SEQ ID NO: 153730 - DNA, 972 bp, Cannabis sativa
  modified_base (390)..(391): a, c, t, g, unknown or other
tatataatattaatacattcatgtcttacaatttaattatggtaatgtaaatattttcattcaaaagaaaaaaaaatatcaataatcaaccgcaagttacattgttaagcctcactacaacaaatattttcattctataacatatattatttatttttttgaaaaagcataacatataatattataaaatacctaataatttatcaatgtgaaaaaaacattaattataatcattagtttagcctaattataattaatataattaatctaaacaacaaaattaaaataaaatcatagcataattggtaagtatactattacttcaaaatattgtaatgacatatttttcttacagttttgtagtttaaattttagaaatttgaatttctnnaataatattataattaattttgttttataatagagtaaaaataatttttttcttattattatttttatcattcagtattaattttttgtattaaatgaaaatttgaggagtttgtaatttttatggtgattagtcttacatcattatttgttagtctatattaattattgaattaattaggtcaactataaaaaagagaatttatagaaaaaaaaaaatataaaagagaggaataaagaaaattcgaagcgctataaaattcagatcattatatatcagatatttgaacaccccttatagcagcacatgtcttttacttttttatttaacttttcttgtttggtttcataaagtttgacattagtggcttactgttttctctcttaaaatatgatggtacgttggtgactcaatttttagccaacaacacgaagtcacaaatacaataataataattttgtagtatccgctaattccgaaagggtatttttgtaattttttagcggaaagtatttttattattttacatatttatgggtttaaatatgtatgagatatttatgatgatataatatttgata

SEQ ID NO: 153731 - DNA, 891 bp, Cannabis sativa
  modified_base (131)..(147): a, c, t, g, unknown or other
aattattcttatatagaggtatactttgttaatacgggacttaaaaaatgtataactaattacaatttagcggttattcttatttataactggtacaaatctggacttgatttttttataacaaattagannnnnnnnnnnnnnnnngtattcttaaatagagattctagtgtattatcattaaaagcaacaaccaaaagagcaaaaagctcaaatacatgaagatcaggtcactaaaccatacgactaagcatcatgcattcgctatttagcttgagttgactaaaataattatcttttcttaattatttttctaaagtaatcaagattcaattcttaaattaactaatgtgaagcaaaaatgtaataacaataaactcagccatgattaatcagaatacgaaaattaagattcaaaatgcaaataaaaagtgtagaagaaataaatcccaaaattggtgtccctcgtggtcttcttccttcttgtccttgatgctctctctttttctccatttctttttacttctgtttcttcattttctgcttagctctctctatggctgctccctcttttctccaagtggttgagatgagagtttttatctttttgggtttgttgggaaaatctcatattcctcacatgcaaagctaactttaatggactcataagatgcaaattgcaataaaacaaggccccaactatccctttagcttgtcacttcagcttgcattaagccctacttaactgacatgccacatcattctcctttagcacatttgttgggaatacaacaacaaaaaaaagaaaatgctaaaagatactcttgctgtctaacacccaaggttaggggtgttcattaaaccgcccaaaccgctcgcaccgcaaaaaaa

SEQ ID NO: 153732 - DNA, 513 bp, Cannabis sativa
  modified_base (274)..(284): a, c, t, g, unknown or other
ataaattagttaaaagaaatcactatctagaatcttttctttaaactaagtgtatttttataaattaatttaaaaataatctaatggaaaattaattccgtatatttcaaaattaattatgttgctcattcaattttaattaggttaaactaatataattagcctaatgcaattatttaaataaggcaaatgagccttcacaattggggttgttcgtgtgagggagggctgggttcagtatgtcgtacgcactactaatggccccctaactctnnnnnnnnnnncaaaggagaggaatttaaccattatttaaataattgttattcattgaataagtcacttactaattgagcctaaataaaactatcattggtgatattttaatttagcaacctagtccatttaaatatctagaaataaatcgacttcctacatgcatcgaaccccaaaagcaaacatataggctcacatgtcaaatttatttggatggaccctatcatgtttctaggttta

SEQ ID NO: 153733 - DNA, 795 bp, Cannabis sativa
atctctattcacaagtgagaggtaatattcttgttatggatcctttacctgaaattaatagggttttccatttagtgtcacaggaagagaaccaaagaggggggcaaaatgtcactgccgatcccaactccaacatggcttttgcctttcaaggagaaagaaaccctgggaaatctgaagctcccaagaaccaaggacagaaacgtggtaggccttttttcactcattgaaaagtgctacaagatacgcgggtaccctcctggatacaacaaactagagaaatcaaaaggtgctgctgccaatcaatttcagacttcaaaagaaactggttcggatgctaatgacaacaacactatgctgcctcaattaacaccaaaccagtatcaacaacttctgaatctcatagcatctcaatccaccaatctacctgctaccgattctaatccctcctcaggtagttcaggtattgtattaacaaattatgattttttgcctaaagaaaaatcttggatagtggattcgggtgccactagacatatttgttctgatttaaagctttttcaaaatgttcatactgtccatacaactaaattgattcttcctaacaataatcatgtcttggttcacaaatctggcaatgttcgtatcagcaaggatttggttttacaggatgtactctatgttccttcctttcaatataatattgtctctgttagctgtctaactcaagacaataactatgatctaaaatttcttgctaatgagttttacatacaggaaatacacaccaagaag

SEQ ID NO: 153734 - DNA, 517 bp, Cannabis sativa
atatatcgattgctataaatcactataaatcactcatcacttactaaaaatgactcattgtcattggctaaaagcgaggtcaacaaggtgggataagggatcttctttccaagtatgcaccttccaggttggcatcttaaatttgtgggacaattctaggatattaatcttgggggagaaaggggttccatgtgctcggtccaacttaagatcattgttcctctcactggccaggccttggaacatattctttagttcgtccagttgtgcctacatgattggactaatctgttcggtctcttggccgaccagagtcacatcagcatctctttgagcgggattttgagcacgactcgcccgtcatgctgatcgtccacccctctccttctgttcagatcatctcggagatcctgaactgtccgcaaatgattaaatacaaaagcacccagctgtctaagggactcgttggtttggccaatttgctgaccgacatcattacttgttggaatttatttta

SEQ ID NO: 153735 - DNA, 626 bp, Cannabis sativa
  modified_base (52)..(62): a, c, t, g, unknown or other
gagacatttttaacgatcttaaaagtttagaggacatgatttgatacatgtnnnnnnnnnnngggcaaaaatcctaattagtcttaaaattattttgtaataatttttctaaaaggtttttaagagaaattagtgtcttcccaaaaaagaggtcttacatatataagttctatttctatcaatgtcaaaattaagaaagaaagaaaaaaaataataaagacattgtgcattaaagaaactacatttagtgacaacttcttaatcatagcatgattttttttatgactaaatgtgatttttagtcgcaataaaaagttacttgtaacgaaaatataatatttaattagatacaagttattatactgatttagttttagttataacaagtattgtgaataaaaaaacattcagttatataataaattgtgatttttgtgactaatacttttagtcacggatctttaagtcacaacatataaaatataacttataattagtcacaatattttttatttttacttacaaattttgttgtgaataaaaatattatttttttgtagtggtaattgtcctacctacactatcctcatattatttagaatcattccaataataataataataat

SEQ ID NO: 153736 - DNA, 500 bp, Cannabis sativa
gacaacagtgtaatatttgtattttgtatttttcattctagttgaatctgctcgacaaatttattatttttcatgtaattaagatggtaagatatagtataaataattaatttaataaataaaatctacttatactcaagtacaatatttattttatttatttaaaattatatctatggaattcttgaaacctgaattggtggcagggagtattgatgaaatagaggaagaggaagaagaatcgcaacagaagaattgttgtcatagaagaagataatcgcaatgttctatttctatattagtaaataaaaaaaaaatacacaaaataatacttacaatttagaaaacaaatgacctcttccattgggtaacttttggtcaccaataatagattagaaggagagtctcgtgtgtttagtaattagtttatttttaaattttgttttaaatcaagatatttttaattagtatatttttaaaaagtgactcatgaatttctc

SEQ ID NO: 153737 - DNA, 629 bp, Cannabis sativa
agggagccaacaacactagcatatggaactctcgacatctctgacttctcaatctcatcttttggcatctgagtagcactcattttaaagtgttgtgcaaacgctatactcactcccttaaagttactcatttcaaaagtatctagaacttttttaatgtagcttgtctgattcgagtatagtagtcttttctgccttttccttcttatatccatgcctaagatcttactagccgaacctaaatctttcatttcaaactccatctttagctagagtttcaagtgcttaatctcttgtacactcttgttggcgatcagaatatcatctacgtactgcaacgtattcaaagtatctctatttctctctcgaaaatatatacaaggatcaaacttacttctcattagacctatcttggtcacataatcatcaaatctcttgtttcactgtctcgaagattatttcaaaccatacaaagactttcgcaacaagcacaccagtgttcctttttagcctcttcaaatactttaggttgtttcattagaattctttcatccagatgtccatacaagaagacaatcttgacatctaattgttctagttcgagttcttgacacgcaataagtgccaac

SEQ ID NO: 153738 - DNA, 629 bp, Cannabis sativa
gtaagctttgccatcagatcaagaaaagttcgttgtatactatgatgcatccagacaaggtctgggatgtgttctgatgcaagttgacaaagttatagcctatggctctcctcaactgaaggattatgagcagcgctacccaactcatgtcctagagcttgccgccgtggtttttgctctaaagatatggcagcattatctttacggtgaaaaatgtgagatttatactgatcataagagtttcaagtactttttcacccaaaaagatttgaacatgaggcagaggaggtggctggaattggttaaagactacgactgtgagatactgtatcaccccgggaaagccaatgttgtggctgatgccttgagtaaaagaggtcccgggcaggtttgcaccacggttttgatagcccatcaactagcttttgaaatggttagtgcagggattgagtttgtagctggaaagttgcacaaattaacacttcactctgatctattggaaagaattagaaaagctcaactagaagatcctgagctaggtaaggttcgatatgaggtaatggctagtcggcctagagacttttcagtctcgaataatggaatgttgttgtataaagctcgagtttgtg

SEQ ID NO: 153739 - DNA, 600 bp, Cannabis sativa
  modified_base (340)..(344): a, c, t, g, unknown or other
catccaactaacaagagcgaggctcataatcctggcaagtcagaagatttctttatacccgcgatcgacgtaagacatacattgtcgatctcggaaagaagaatgatctcagctcgctatttggatcactacaatgaagtttctatcgagacatctccagattcaacaattaatgacgtgtttaatacaaaatattttttgacccagtaaaagcgggaaaatcacagctatacggttttcaaaatcatacactgcatttacatttcgtgatatgtagtcagatctcacgattttagggataatggctgtaaacacgttctggtcaactttgtaattaacnnnnnacaatgtaattataaatagtggcaaacaatctcaaaagggggacgaaaaaacttatatgaaagaggccctaaaaaaaatactcaaaaatctgaataagattgactcatggactatgtagaattttaactgcaaaaccacgtaaaaaccttgtgttcatatattatttttctatagcttttactttttctgggtgtaattattgccgcgaggctcaaatttggttaacgaaaaatctgtgttaacagtttggtgctt

SEQ ID NO: 153740 - DNA, 519 bp, Cannabis sativa
  modified_base (292)..(292): a, c, t, g, unknown or other
ttaaaaataaaaaataaaagtgtattctgtaaattatatttttattttcatttgttgattttatttaagtcgggtctgggctgagaccaaagttcgagtctgtgttaggatttgggttgggatccgggtccaggtccaagttacaaggtttaggttggggtaggcatctaaactattgataaaaaaaactgtttaaaacttttttaaaagtgatttctttttgtttataaaatttttggtagcgttttgtaatactttttgtttgtaagttttttaatcacaaaaataaaantaaaatttttgtttttaaaaaacaaaaatatattctataaccactttttttagttttaaagattattaaatagaagtgtgttctgtaaattttatttttatttttatttcttgattttatttaagtcgggttcggggatggatccgagttcgggactaggggtgggtacaagtttggggctgggtctgtgtaacaccctaactatcttaggcttattacgtgatttt

SEQ ID NO: 153741 - DNA, 762 bp, Cannabis sativa
atgtatatagtttgttcataagtattagtagagaagtcactactaaaaaaatgggttttagtgacccacattaagtaactctaaaactgtatagtgatatttcaacgcgcgacactaatgaagatgactggaaagacagtttttagtgacacttcacacgtgtcactgaacccttttacattcattttttgcgcgtcactataggcgtatagagttaagttttgtcaaactaaaaaggtaacagcaacacaaataaagtgtcactatatcttttttttctttttttattaatatttttggagatataatgacgcacaaaaagtgccactacattaaatatttttctaaaagaaataatatttaattgttttaattaaaatttgtatataaataaatattttttattattttttttataaaaaatcaatttgttaatttgggcagaataaataattatttttttaatttatcaaataatttatttgtttggtggtcaaaattaaatggaaacaaatgaaaatttacacaaaaatttattatttgcaccctaaaattcagaaaaattacaaaattattatattgcaaaaaaaaaatcttcatatctgtacaatatcaagaacaatatgaacataaatctagatctgtatacacaatgtggcaacaaacgctaactgtggcggccacaaactcaatccactatccttggcaacaaaccctaaattgtcttagtccacctgaacagagagaaagaaacagtgagac

SEQ ID NO: 153742 - DNA, 554 bp, Cannabis sativa
atacatgtttcgggatcccgtaaatatttttacaaaatattacaagactttttcacgagccgacctaagcagcaaaatcagagttacacaatacgtcatcgatagaccccaacccgcttggtatagtgtggcccgaacatgtacaagcatcgtcaagtcctcacactcatggctgatcagtgatagatttatcctttcctgcatagtagagcacccgtgagccaagcccagcaagacagtataaatatcaatattcacaattctacatttcacatacattatgttcatgccattacacttattgtctatttagtatagactcacgtgttacgcttacacgcctatttatgtctatgtggcatagacacacgtgttacgctcacacgtctaaatacaataaggccttagaacggttcatcagttctagttaccgagtccaatcagattacgccttaaacgcataatccttaatctcaatatatatagcatggtataatatttcacactaacaattaccagggtaataaccctaggccattaaaccgctcacttta

SEQ ID NO: 153743 - DNA, 513 bp, Cannabis sativa
gggttgcaaaaaatcagtgctcaacgctttggtgaagctgatgcacttcaaagttctcaataagtggagtaaccattcttttgatatgttactcgccatattggttgagttatttctagagagtacaaaattacccaagtctcattacgagtcgaagatgaaattgtgtaaccttggtttgggttatgaaaccattgatgtatgcaattatacttgtgccttattttgtaaagagaatgaaaaaaaagaagtatgtcctatttgtggcgaaagtcgttggaaaaagagaaatggagacgaaaaaaaagttgctagaaaagtttttttttttttgatgaataagaatcattgtattgctcatccaaaacatttacattgtacatcactttcctcaattatctcttatctttcttagtagtctactgtaggtgttgaccgaagttttcggcaactaataaaatattataaagttagagagctgtaagaaaattagagaaagatttttacgtggtt

SEQ ID NO: 153744 - DNA, 557 bp, Cannabis sativa
gagatctatactctatgtggagtggagtaccgagctacaggagtactcttgataaactcacctatgtgaatgtgggagtgaggccgcttcctatgaaatttggagtaaaatttctagatcgttcactatactaggatagacgtgcatgaccattaacacacatgcttatttgaatacacccttgaaagattagtgcatggtacgatgttagagatagagttcaagacttcgagtcactctagtaaaatctaaatcgtattcactgcgcaagattcaaatcgaaaaatatctttgctcaagcactgtcttatagttgtttgatattgcttgagaaaatatttttaaaaatttcaagtgggggaatataattggaacttttatgaaattatataaaaattgaaaagtgaagtgtgtgattgtttggagtccacatgggataggagcacttcattagaagagcacttcattagaagtgtataaatagtgcatgtttgagaattaggtttgggccccaaggggtacccagttttgtgcgcatgggtgaggactcatacact

SEQ ID NO: 153745 - DNA, 1253 bp, Cannabis sativa
catctttatggcctggcagattaacggtcaaaaccttaagctcgatttctacccaaagcctgaggaggttcttgtccgcttctgggagaaaaagaagaaacttgatgccctgctcgaggagcacagggggcctagccttccgccccgtattgattaagccaaccattaaccattactgctattatcactatctctttttttatttatttacatttacagtcccttttcccccctctcagacaatttatattttttctttggggagacaatttaaggcccgtccccaggcccttaatattcttttagagcttttttgctgggtttgaacatcttttacatctatgcttgaatacatactttgctttttaacttcattaaactttttaacttcgttaaactctttggcatgttttatatttgttcgcgtggtatgccttggtgcccccctgagtgtcatgaaaattggttttaggacactcagctttaaatattaatttagaggttgcacatacttgtctggtacaaatttactttacagagcatgagtttaatttttcgactattggtaatactttcagaggtgatcagcgttccaggccctaggcaccatggttccgtccattcttttgaccttgtaactcccggagccgatttcatcctcgatttcgtatggtccttcccaattaggtcccagtaccctgactctggcttcctgagtggctgggaagacccgtcttaggaccagatcaccaatagtaaattttctatttttaacctttgagttaaagtgtttagccaccttcttttgataagctgcctttcgtatttgagactcatcctggagtttgtcaatctgatccaacacttcttgtaataaagccttgtttgttgttggatcataagtcgttctcctgtgggatgggaatagcgtttccactgggaccattgcctcacagccgaatgccattgaaattgacgagtggccagttgtggttcttggggttgtccagtaggcccataacactcttggcaattcttcaggccaattgtttttgcaggccagcaaattttaggatcttattgacctcttctgcttgtccgttcgtttgtggccttgccaccacggagaagattttgacgactccgtgttggtagcagaagtcggtaaattcttcccagtcaaactactttccattgtctgagactatcttgtgaggcaagccatatcaacacactatgtttttgataacaaa

SEQ ID NO: 153746 - DNA, 555 bp, Cannabis sativa
  modified_base (497)..(509): a, c, t, g, unknown or other
tgaattagttatgtttttttgaaatttggaaaaatcttaggagtggtgacacacccatatgcgcgcggatccgtcttttctcatgtgtctgcggcttcggataggcctaatgtccgagttttctcagtctgatgggcggaataatctgaaattggatcccaggcgcgcctggagaggctgcatgcagcctcctgcgccgtgcattctcggtcagctagcccaatttgtgtgtgaggatggtatgcactacataatatccgtaccaaataaatttttttccaattttttcaattgttcatgttttttcatggaattaatttcaaattttttgtgtagtttttgtatttagatttttattttcatatttcaaatctaattgttagaattaaattaattggtattttttaaattaatttaagatattagtgaaatttaaatttgaatataggtgaaaatttatcttttttgcttaattaattatcttatttttaaaattnnnnnnnnnnnnnttatttttaaatttaaggtcacatatttattttttaaaattattta

SEQ ID NO: 153747 - DNA, 697 bp, Cannabis sativa
tgaggcagatactcaggtaccagacactcaggtaccaatttttggaacttttttttatgattgtataacttgattgttttattgtttttgttctgtgataaaggttacattgtggaattgtcgtatgcttaccgtatttttttggtatatattttttcaggccactgattcagacccttagcccagtgcaccatcttcatcaggcgttcgtggtgccgagtacaatgatttagtggggaggttggataggatcgaggctgaccagaagggtatgtacgtttgtcatgtcgagctgaagaaggcatacgagaccagccatgtagagttgaagggtggtcagaacgcaattatggagcagctcaaaaatatattggccatgttgaatcgtccgccaacgacagcttcagcaccggaggccccaacagatccatctaccccactaccagctgcatcacccccactacaagaggaggaggtctttcctgacgggtacgatccttatgagggagctccagcgactcccatcgatacaggtgttatccatgtacaacctgcaggggttaagagtcggaagaggaagagaaatcctcctgtatggtttcgtgactacacgagatgaagaaaaaacagaggccttcttcgacgtttgatcccttggcgccactggatgagaaattgttggatactttccgaaagt

SEQ ID NO: 153748 - DNA, 537 bp, Cannabis sativa
  modified_base (155)..(159): a, c, t, g, unknown or other
gtgcaaataaactacattgtagattatcctatcagttaaattttgtgtactgacaaatcataagaatacatttaatcccataatcttgattactttccactgtgttgacaacataataaacaagaatatctatgtgataaggatttggatgaatnnnnnaatcaaataaataaataaatgatcacatgaaccaaataatacattaaataagtaatgtaaataaatatgtttctttattgataaatgaatataaaagattacattaaaatagagttttatttagggcacaatgtccaacagagattaaccttatttgtgaaatcctaaaaatgtgtgactaaaattatcggcgcttgctgaagaatacccaagaatttggaatctccacatacttagattatcaggtaagacagtaaactatcacatacagtttagcgtaatggcacttatgtatgttattatgtgtacgttatgtgagaaatcgggattagggttattaccctaaatttagcagttatgtgatctagggttattact

SEQ ID NO: 153749 - DNA, 773 bp, Cannabis sativa
tcacctaagcggtgcacattaacattcaatggcgataaaaattggtatgccggaaatgtcatcaaaaataggggtggtgtatatcaaaacgaccacctcgacgagtagatcacacccatgccaaccatttgtcaaaacagtacacgatatcgtcgaaaagttgccataaaaggccagaactacaaaaacgtcaccgaaaaaagtagcaagttgggaaaagtagcttagtgtaggtttttcttctcgacgaggtgagtttagtggtgaagacggctcgtcaaacggacaccgaaggtggccagaaaatctgttcaaagtttgagcctctaaactttgactggcgatcccgggctaacgacggcgaaaggagcggtgctgcttggggattgaggtcgccgacacttggggtttcgattgatctggtgcgtggggacagacggtggccagagatgggtcaccggagtcacgccgataatggagtttatgggttttctttgtgtggtttgaagagagagaaaaagagagagtgagtgagaaagaggacgactgagtgaaaaaagagagggtctgattgtttgttttttttatacaaatatatattattattattattattattattatttattatatatatgtaaatctaacttttaactcagtcaaaactgagtcttcatattctcccctccttaaagaaatttcgtcccaaaattttaaagtacaacctcaagttgaaaattaaacaagtgaggatacttcatatacatctcgga

SEQ ID NO: 153750 - DNA, 784 bp, Cannabis sativa
gaaatctaaaagtagagcaaattttaaaaaaatctttcacatgcatgtatggatcctctttacctaacccataaaaagatggcaaaagttgatttatggaaagtttaagctcaaaatgtgtagtatttatttcaggaaaaataatgcaagatggaggattagcagaattaggagaaaaatgatccataagagttttttcttccacatttacttgatttggttccatgatgtcagaattttcacttttaatttcaacccacaataattttcttttaaccaaacaatttttagaattttgttcctagcgaatcatacaccaagtatcacaaaaattaaaataacaggaaaaattaggaggcgatgcctaccatataatttcgtaaataaagactgaatttaaaatatagcaggaaataaataatatgtatatatttaatagaaatataaatactaatattaatatatgtgcataaataaagacaaaattataaatgcaaaaataaataattatatatataacataaatataaacattaatattaattataattaataatttataaattttattatatataattataatataatataataataatatattaatattatatataataataataattaataattaatataataatatattaataataataatttatatatatgttataaagttatagtaaagttttaataataataataataataataataataacttaatttataggaattattacatagaaaatataaattgacattttatttacaa

SEQ ID NO: 153751 - DNA, 787 bp, Cannabis sativa
aattttgatgaatttgagtatgctcatgcttgaaactttgatgtggtaattaattgagctatggatgggattctagggtttttctttaccttaaattcaggttgtttgagattagttgttgctgaaattatttggataggttgaagttaagctcaagtttgagagcttgaagtttataagtttaagcatgattttgagatgtttttacaatctgaattcttggatttattatgggattttgatgcataaaatatattagttgagcatctattatttgctagtgatcctatttgttatattgtgagtttggttgtgaatttggggtaaaaggatagaatttcttgctaaaaattcgtggaatacttgctggtttctgggtttggaacccagatgccgcggcatgctctgaagcatgccgcggcccgcccctagttggtggaaactgggttttgtcccaggtcccgcgacatgactttggcatgccgcggcccgccctcgtgtttttgggcagtttcgagttgaatttcaaaaatgcgtaacttttgattccgaactccgatttgggagttgttttatatcgttggaaagctcattccgagctctgtatgattatctaaattttaaatgccatgattgaattctatgagtatggaatcaggggttaaccctaactttgaaaaatcacaaatttgtgtgactaggattactggcacctcatcaggagcaccggaggattcagaatctctatcttttgctggacaacaggtaagagagtgattagcacgta

SEQ ID NO: 153752 - DNA, 539 bp, Cannabis sativa
aagagttttggaaccttgttgcagttgcatgaacactgagtcactgaccagaacacttcttatgttataatatagcctttattattattattattttgctttgattgaatttgaattaaataatggtagatcggattcttagagaaaattctaattgttgaaaataaagtaactgtttctcttagtcttttttgattttgacctcagaaatcatcttgtttgttttttatcttttaaagagtgctctttttcttggatccacttattagagaagttattagagaagttgaaagttactcggaaatagttatcaagataattatgtaaccacctgtaataggttttctagttggtttttagattgtaaatttgcttttatctcgaaattttgtataatattgctaaatgggttgatagtaacaacattaacttgatagcctaaaaagtttgggattactatttggtatatttatatttttggaaaattctttaatagacacccttcaaagagacatatccgtacttctcctagaaagcaa

SEQ ID NO: 153753 - DNA, 796 bp, Cannabis sativa
cttccaaccaatgtaaaactgcatgtgcaaatcctcctcaacatcaaccttcatcttgtgcaacatgacttggtgaaataacaccgatgagaatgtcatgggtacgacattctaaaagttactgaaacggctttctttcgccgtgttattcaaattgtactcctcaaatcgagacttgatttttgcaaaagtactggtgcctctatatgtcacgcggccagtaaaatgctcggatgctggaactatgagttttggagacatctaaaataatatataacaaaaaaatattactgatgccctcaaaaaaattaaattgtcgatattctgtcaatactatcacacttagaaattacagaacaattaaatcacattgtcgacaaaatatcgacatcctatcgacattcgaacaatatgatcacacttattcaaaaaaataaaactgtcgacaaacaaaatgtcaatatatattcattctttctgtcgtcgatattatcacacttagcaatcacataaagtaattaaatcacattgtcgacaacatatcgacatcctgtcaacaaattatcgacatttttttaggtcttaaaattattctacttatcgtgttgacatcctatcgatacacctacgacatcctattaataaatcaactaaattctttcaaaaatatatcttaatcaaaatgtcgaaaaacactcgacaatatatcgataacctatcgatatacagtaacaacacagaaaattctaatgctaaaactactttcaatttcggtcgacattatatcgataaccta

SEQ ID NO: 153754 - DNA, 687 bp, Cannabis sativa
aaaagtatacaattatgatgagacaatatgtatttatagaattagggaggagacttagctacataaccctagttggactgggtttgctcatcgaatacttcagttaactaaaaaatccacacttctgctttaactagattttacacacagatgttaagtctgttttcaaactagatcactaacaatatgagctaacacaacaaaaagttaatgtgatcccaaaataaaagtctaacataaattagttagtttgcattgtgtacttgtgctaattaatttttttttagatgaaatatcaacttcattgaataatttagcattctgaagacaaaagatgtaagacttcaccagaaatagaaatatcagaaatgctacgatcagattgatgctgaaaatgtctagcaacataatgtgctacttggtttgctgatcgtctaatgaaaaataaattaatatttgggagggtagataacaaaagttggcactttgattaaaaggccgaaagtggaccccattgcttgggtgcttcaaatagcttgtactgaaacaagattgtctgtctcaatttgaagatgttgccaattattggtctttacccaactcagagcttctttaatcccatggcttcaatgacttcagttgcatatcttccgctatggcaaccggcccgtgctgcaacaaggtgac

SEQ ID NO: 153755 - DNA, 516 bp, Cannabis sativa
gggtctaggtcgggtactaggtctcggtcctagttctatttcccaagtccctatcctgattctgggtccaggtttggttagcatgtgggtttgggtcccggtctaggtttgggttcaagtcctagtctcggtttgtgtttaagtctctgtctgggttttgatttgggttcgggtttggtttaggtcctagtcctggtcctagtcctagttccatttgcgattctgagtccgagtttaggtttgacttcgagtcagagttcgagtcatggtttgagtttgggttcgagtccagattgaagtctaggtctagatcaggctccgggtgtcggttcgcatcctgggtcgttgtctaggttgggtcgagtccagagttccaatcatgatatgagtctggattaagttctggttctatgtcaatggttctaatccttgtctgggttcgagtttgggtccgggtccaggtccaagttcgggtccctagtgcgggtccaagtttgcgtctgggtcaggatctcg

SEQ ID NO: 153756 - DNA, 620 bp, Cannabis sativa
acatgatttaccacttttaccactaattgtgagtcaattgtgagtcactgtgagtcactgcagatctcaatgtgttcggcgtgcaattcccaaacaagttttagggcaacaataagggctgcatactcagcttcattgttggatgctttaaacccgaacttggctgctccatgcagatgttgccccccaggtgtgacaagggctatccctatgccggatagttgacccatggccgacccatctacatgcaattttcaagtcagttcgtctttgctattgctcagctgaggttcttgtactggctctgggttattgctctcttctttactcgtacactcaactacaaaatctgctaaagtgtgccccttaattgttgttctgggctgaaatatgatttcatactggcccaactccaccgcccatttgagcaaccgtcaagaggcgtaaggtttttccaatacttggcgtaatggttggtcagtatacaccggaacaggatgagcctgaaagtaaggccttaaatttcttattgctaagattagggaataagtgagcttttctatcaacaggtactgaccttcagcttgaatgagtcttttgctgatgtagtagactggatg

SEQ ID NO: 153757 - DNA, 678 bp, Cannabis sativa
tttgccacaactttctgagtttgaaaatcatcatcactcgctgcttgaaggacattagtagccttcttactgactttttagtgcggtgtttgtgagaaacatgatcggcaacgtcgcctttatcctcttgattatcatcctaaaaaaataaacacaaacaaaacagaacaaataaaaaacacacaaacaaaccagttttatataacatagtaaaatccaaaaacaaacatataaaggataaaaaccaactttcgaggaacaaatacttggaaaatttaaacacaataaaaataccaaaccacaatgaaacataaaataaaattgaaaccggatttagtgaaatttaatacatactctaagtttccgtggagatcttcttgttggagctttcaaaggttccacaacattatcacccttaaacaaaacaacacaaaatcagtttcatccaaaaaaaaaaaaaataaataaacaaataaatgaataaacagcaaaaaaatatagagcatactttggatttacgcggagatttcctgattccaacttcaacagatttttcttcttcgagagaaggatcctaataaaagaaaattaaaaccagtttcgtaataaccaaaaaagaaaacatatacaattaataaaaaccggtttcaatacaaaacataaaacatactttagctt

SEQ ID NO: 153758 - DNA, 515 bp, Cannabis sativa
atgtattcttagataatttctttagggtatagtctcgactgaactgtttgtgaccttttgcccaatgaacatgcatcactatttataggactatattcttggagaggaagtctttcccctctcgttacaatggacataaacagaaagatcgtgggattaatgctgagtacaaagatcgtgggattgatgcaggatacactgatcatgggatcgtgtgtatgccatatccctgtagtatgatccccaagttatagttattttgccgatgactcataatgcaaaagctgaattcgttaagtgttggttgccctgcgcggattgatgatttctttgctctgggcatgccagcgaggcatcctgctcggactgtctcctctgagtagatactccaagtggattccacgtctctccattatgtgatgccatgttagagtgcaaaaattgggataacatttgccccccaagtctgtacgggacttctaaagttgtgtgtagacttcatccgagctactgga

SEQ ID NO: 153759 - DNA, 678 bp, Cannabis sativa
aaactacaccttttcgagtgtagacttctgggtacagggtccgtcttcttctcaataagtgcgccatggcatcaagttgctgtgttccaaaagaaaacagtgagacatgtatcgcataaatgttgcacaaatatcgcaggaaatcgcacaagaaattaccaaaattgtttcattaatcgcacaaaaatcgcatactaatcgcacacaagtcgcaaaataatacataaattagtgaattatcgcacgtaaattgcacaaacatcgcataaaaatcgcatataaagatttaacataatgtagttaggtaaacatcgcatacaaatcgcatataagtcgcatataagtcgcataaacattttaaaacacaataaattaattctgttaagaaataacttacagcatcgttgagccattctcctagcaccatcagtttgacgaaccaggattgagtggctacgccagtgtgaacatccctaggacggccgttgtccctagcgtaagtgatccacttctggaaaaattttaacagccgggagtccgccggtttcactgtgtctactaccatgggcccatgtcgttgtttcttcttcctagctgtgtagtccttcaagaaaaccggcttccgatttcgcctaaccttgcagaagtccaccccagctggtggcccctgcaactctt

SEQ ID NO: 153760 - DNA, 767 bp, Cannabis sativa
  modified_base (562)..(564): a, c, t, g, unknown or other
caacgagggatagaggcaaacccagaaaaaatccaagctctcctgaatatgccttctcccaaaaagcacaaagatgtacagagcttaaccggaaagattgtggccttgagccggtttatctcccgatccacaaacaagtgcattcctttcttcaacatcctgaagaaatgccaaaaatttgaatggtccgacgagtgcgaggaggcattcaaaaacctaaaagaacatatggctaaacccctgatcctatcaaaacctgtcctcggagaagacttgttcctatacttggtcgtctccgagaatgcgattagcgtggctttagtacgggaagaggaaaaaactcagcatcttgtgtactatgttagcaaactcatgataggggcggagacacgatacccggtgatcgaaaaactagttttttacctcctaatggcctgaagaaagctaagaccttactttcaggctcacccaatcaaagtattaaccaaccacccgctccgacaagtcctacaaaagccggaggcgtccgggagacttctcaaatgggctatggaattaagcnnntttgatctacattacataccacacacctccataaaaagacaagcgctagcagacttcataacggagtgccatgaggtagaggctaatgcaagagtgcccataccgcaagtcccagcgtggaaagtatttatggatggtgcctccaacgaaaatggatccgaagcgggggtagcaatgatatccccaaacgaacttcgactcca

SEQ ID NO: 153761 - DNA, 576 bp, Cannabis sativa
caccagatccccagcaaacttagacagtcgatcaaactccaaagtgtattcagccactgacatctttccctgagtaagcttcacaaagtcctccatgtgtgaagttgtcacaacaatattttaaaactttcttcaaaaagatttttaaatttttcccaggtcattacactgacatcccgggtctgacccacaatgtcccaccacacgcggcatgatcttgtagcagaaggttgcacagttcactctctcagttttcgtcacccccttgttatcgaggataatgagtaatagtactcatccactgctcggccttagttatatcagtacctcccagaaaagtcggaggttgcaacttcataaatcgctcaaaaacagaatccctatgcggcattatgaacccctgattacccaccacaggcacaagtacaggtggtaacatttgatcaataggggcaaccggtgccggtttccttaatcgtcacaaattttcttcttgatgaagtataatacctcgcatttcatggaaaatctgctgccagtcagtaggaggattagcattgccaacccccgcattat

SEQ ID NO: 153762 - DNA, 615 bp, Cannabis sativa
tttatttatgtatttgttatttaatgtttttgtattaatccattatctcaaaggttatgatattattgataacaaaatgatatgtctctgtgcttgtgatggaagaagccacgtgtgaggtagtgattagggcgtggggaacaggatgagcaatggtggggtggcgaggagaggagctttaggaaaagggctgcggtggcacaaagcaacgatacacattcataacatgagtattttatggttaagaaatgttaaaagaggtacacctctagtaggggtgtacgtcggtcggtttagtcggtttatattacagtttatttaattcaatgtaaagatcagattacgaaaatttaagtacaactcgtccaattaagaaaaacgaaaataactcatccaaacccatcattaattttttttatttttacatttaattgttatattttagtcaaatataataatgagaaaaatatatatagattgaattctaagttaaaattgaccattataaaaaaatatatattaatttactttatattttttaaatagtcatataaattatatgataaatattaaataatatataataaaaacatataaatatattaaaaaaaaata

SEQ ID NO: 153763 - DNA, 560 bp, Cannabis sativa
ttgtgtttacctctgtttttgaaagaaaaaaaatcttctgtaaatcttgttgttcgttcttcgactgtccttagatttagtaggggttactcttcgccggatttgatggttttttcctagttatctccgattccggcccgtccccaaccaggaaggagatcccgttttttgtgtttttttactgtttacagtataaaagtaaagttatttggcttgaacaatacaaacgaaaagaaaacgggcttggacagtaaaaaaagttatgtttgtcgtgtcccagtatatttgaaaacttttggtcaaaaagcagtatttatgtaaatttccctgataaaagcctgaatcattcgggccaaagtctccccgtcaggctgggggcccgatctggcccacaaaaatggcacaaattgtcattcttagctctaacccaccaaataattacacacatactacatttacttcaaaaatactcatccattatgttatataaccggttctattttagttatgaccggtttgagttatttgtgttatttgtttttattcattataacactgtt

SEQ ID NO: 153764 - DNA, 603 bp, Cannabis sativa
cttattttaataaatttcctaatgccttcttcttttttttttatgtgtgggggaaaagcttgaggaacaacttctttatttattttgtcattgtttaaggatttgtaaggatttttctttaaatttacattttcagcttattttcttatcatggttgtttacacgtgggtggtattttttcgaagcgttttgacacctgggaatgcgcatttattgccatttaatgccttatatgtgggtggatttaccttttcatcttccttttatcttaccttggccaccttttgtgttctatttaaataagcattctcctttgttcatggtgtctctttggcgtagcttctaagtttctctttttatacgtatatattttctgctttcctttctcctgtttcaaaaatgtcaaactccccaggttctcctcttcccgagtcttctagcgggtatgagttccattttgacgtcggggatcgatcccccccgagtcctttgattttttctcgttactaccggcccagtggcgaagctattgttggaaggatgatgatggcttacagggctcggtgcaacgatgtgtcttcatcttctgatgaggagtggcta

SEQ ID NO: 153765 - DNA, 693 bp, Cannabis sativa
tgttggtagtgtaacaaacatataagcatgcatatacacttaacatatacatacactcgcatattgatatcacacattagatacagtccttacctcctttccagattcaagtgtgttggccgacttgaatggaaagtctcgtgttggatggatgccctaatcacataatgaaactgggtaaataacatgtttaaaaccctaattcgagaaacctaaacctataactctaggctctgctataatcactagagattacactaactcaggaaatagggaaacacccaactaagacactgaaatggacgagaattgagaaatcgggacatttggggaaccctaccaaaaccggttaatcgattttacaggtactagtaaaccggttaaccggtttatacccgtcctaccccaaaactcaccaattgcctctaaactttccagagtacctaaacaatgtatacacaacatattccaaccagaaatttccaaaagaacacactaaatcaaattatggtattaaagatcaaagcttaggtttcaaagcataaacttgtgaaaatccaacataaagtagtaaaaccagctacgagaaccttcaatcaacttaaattgaacataaaaactgaaccctaagcatttctaaccctaacagccaccaacactaaaaatcactacttgaaaccaaattcaaagctt

SEQ ID NO: 153766 - DNA, 503 bp, Cannabis sativa
aattttgaaaaataaaatttcagaacttttgatacttcaaaattaaatgtgcattatttttttttattttaataagttaaaataaaattttcaagcagaggttattatttttatgtatactattctattttaaaataatttaagtatatagatatttaatttttaaaattatatatttattatatatatattgtataaattaatattatttatagaaagaggttagtgatatttttagaaatatgttaaaataatattttttaataattggtgaactaattttttaaaaaaagtatataagtttttataatttattttcaaacttgtattaaaatattattttaaactaacttaaatgtacataaatcttgtcattagttagtgaatcaatatttttttaaaacttaattatttattatatctaatttattatatattatatataataaataatttcacaaattaattaggtggcatttagtaatatttttttaatcagtttt

SEQ ID NO: 153767 - DNA, 739 bp, Cannabis sativa
tacgtttaaaaatcacgtaattcgcctaagatagttagggtgttacagattccgtctgcaaaaagaccaagacggatattcttaggttcattgccaaattcagaccacctatcatcaattgatttccaagcgggtgagttagctggttgtctcatcttaccatctaattatctattgttggcatgctaaatcaaatttttagcatgattaacattttgaaagaactgaaccaactgaggtattggggttaagtacgataataccttagtagggacaccaacctttacctcgtcgaaattatttttcttttgccacctagactcatcacacgtgggacacgatattacatccataaatatcttacggtataggaggcaatcattaggacatgcatgcatttttttttatattgcatgtctaaggaagaaagtgtcttctttgcctcgtaaaaagataaaggcaccacattaccttcagttaataactctaatagaaaagctagtaaatccgtaaaactcttatcactctacctgtgtttggcttctatattgtataacctaataagtgtcaataatatagtaaacctattgcaattcgggtaaataggcttctcaacatcctctacaaaactttgaattttaatggatcgatatttaattcaaattgtgtatctcctatcatttttagaatgtgatcatcctcaaacatttaaaatgtcagttgccatctgaatagcata

SEQ ID NO: 153768 - DNA, 533 bp, Cannabis sativa
  modified_base (500)..(507): a, c, t, g, unknown or other
aaaattaagcaattttttttttacggaactcgatttcgataaaaattgtaaaagatatgaaagtttgaaattcgtggttgaatgggtgtcaaagcttggtgcacacacgcaccagaggcttcagaatacctcattcgcgcgcgtccttcaaacaaaattttgtctgaatcctcgctcacgctcggacaccagcgcccaggaccctacaatcccgcccgtgagcaccccgtaaacgtcgagtttccacggctgcccttccttcgtgcgcgcgcgtctggctcatttgcagcctccaggggctgaagctgcagcctgtcctgggcacaatgattttttcacccaatttctgaattttgtgggatttttccccaaaatttgatttttccaattttcaaaccctaatatctaaataaaatattatttttaaatatatttaaacttaaatttcatttttttaaattaataatatttattttcttaatagattattattaattttnnnnnnnngaggtttaaatttaaaaattgattat

SEQ ID NO: 153769 - DNA, 609 bp, Cannabis sativa
atgggttcaattcattctcaacagcctgccacctgagtataatggatttgttgtatcatacatgatcaataattttaactcatttgagatagacaagttggacacagaattgtgtgcttatgaacaaactttgccacttgcaaggagggttccctctagttttgcagacaagggcaagaggatagctgaagaaattgaggatgatgcttctgacaatgctgcttctttgagttcaattttgagagctagagtcgaaattgaaccaacaattaaaacaattagagaacaaatgagcagacgtattcttctatgttcacactatagagagaagggatattcgaaagaagatatcccagacttctaaaccattggaacgaaggtaacgcttttgtttttgaatcatgtgttttagagaatgacaaatccatttggattgttgattctaaatctactaaacatgtttgttcttcattgcagctgcttgaaacttgggattgcttaaatctaggaaagttgaagctcaaagttgggaatgtggaattagtatgggcccaagctaagggaaaagtgttggaaattattttaccaggatcatagatctactcacaa

SEQ ID NO: 153770 - DNA, 660 bp, Cannabis sativa
aaggtgagatgagaggcccacacgctacacactcacacggctcttcttcaatcattaagatcttccatacataatccaacataaataattgaactcatttatttattttcaagggaaattatgcatttgttttttttaattagaataggacttttgccattaaactatagttttagtagaggttttttttttaaaaaaaatctgttgtaaaaatttatcattgaactatataaatcgttacaaatatcaccttttataacaatttacttgtgactatgaaatacaagtataattgttatacaaaaatttatttaataagattaagatacctaaaatttactttattagcactaaacatacaaatagtagctataagaatgtaagtacatattctcacaatttattattagattactatttatgtatttacttttaaaaaattctataatgcacctctttaaaagggatacaccaatacacctctatctgttttagtattcgaaataattttttagtcatattttttctcatgatcatgtaaattatagatatttaagatatcttgcaaaattttaagaaattcagaaaagtttaatgcgtcaaaaattgtgtccaaacagtgtgttgcacacatgactattttattttatacacgtgtaa

SEQ ID NO: 153771 - DNA, 553 bp, Cannabis sativa
  modified_base (308)..(314): a, c, t, g, unknown or other
atggcaagtcctgaatagaaacatggtcagccagcatggattcagaaatggattccatgaaaaaaaataaagtctggcaatatgtagacgcatctaatgactatcgtccaattggatgtaagtgggcctacaagaagaaaagaggtgtcctaggcgaagttgaaacttttaaagctagactggttgctatgggttatacccaaagaaaaggtgtggactatgaggaaacttttagttcggtcgccatgctcaaatccatctgaattcctctctccatagccgccacttttgattatgaaatttggcannnnnnngtcaagacagctttccttaacagaattcttgaagaaaccatctatatggagcaacctgaaagatatattcttccagggcaggaaaagaaagtttacaaactcaataggtccatttatggacttaagcaagcttcttgctcctagaataagaggcttgattaaataatcaactcctacgactttaaccaaaatgaagatgaaccttatgtctaccaactcaaggataatcaagtggtagt

SEQ ID NO: 153772 - DNA, 521 bp, Cannabis sativa
taagctgtgcaatcccacatcgcctggggaaggtcaactgtgatgattctgagactgtgtaggtattctgactaacatttcgagcgggttcgacccgaacccgagcaacccgctcaaacccgaactggtgaggccgcaaattttttttaataaaatattcgggcgggttcgcaggttgacgttttaggagtatcgggtttcgggttaaacccgccaacctgcctgccaaaccacaatttaaatatattatatatttttttattacattttatatatatgaaattattaattaaaaaataaaaatcctattttttttaaaaaaaaattaaactctcaacttcttttttttttataatttattttttgttaaataatataaattaaatatatttttatacatataattttttattaaaaatatagatatattatataaaataatttatattcagaaacgtataataattttttaataatttatattaatttaattttaatttattgttatttttattagtttt

SEQ ID NO: 153773 - DNA, 536 bp, Cannabis sativa
caggctaggcctgtgcctagggcccccctagcccaggggcaaaaaaaaaaaatatttcccttttaaaattatacaattttttttactgattttgaaaaatactatatttttgtttctaaataagggcccaaaataaatttttttctatggcccactaaaagtcacggccggccctgctaagaaaaaccaatgagttttttattttgtttgaaatatataagtgtgtcaatttattgttgtgtcttataaatgctggtttgtgtaacatttattttattttgattaatacaatctacttttaatcaaaaaaacaagaaaagaaaaaaaaaagagcattaatatgttcaaacacaagagaatgctagagataaatactaataagcgatgtgaaattaaaatataaaatagtaataaataattgtgtacacatgtagatgatgaaattaaattttatttttagcgtgttaatttttttcaatttttataaaatttttgtatacacatgtagatgatgcaaatttgacagtaaacatttt

SEQ ID NO: 153774 - DNA, 593 bp, Cannabis sativa
atacaaacaagagctacgagcaagacaatgtgcagctttgtttacagaacgtttaacaaaattaatagtgactaagggtaaggaagccaacaatgtacgacaataagtaataagtaattatagtatttgagttatatgcacttgagttgaaaaaaaaataatatgtgattttttttttttaaaaaaaaagtaataataagttgaattattataatattagaataatatgggaatttaaaaattaataagctatatatatgccgatttaaaagaaatttgaaaatagattttcttattaatcaaaataaaatacgtttagtttaaatttttttgataaaatattagaaaaaataataaaatacaatttaaaattataaaaatgagagagttaaggagagattataaaaaactatttagagtgatttgagagtaccacgtcaccgcctcatacttttcctttatagatatatatatacatacttaatgtgacgaaataatttataataagtcataacaatatattactttaacatttattatttgtttctagaaaattcaaagcaacaatgtataggtttcgtaaaattttaaaa

SEQ ID NO: 153775 - DNA, 579 bp, Cannabis sativa
tagatttttctgagcaacctaagtatttttcctaattaatttaacaaataaattaaataattcataataaatcaaataattgcaagaaatggcaggtttcgatgcgtattttcgattggaaaatgttcccaaggatcccagaacctcaaagaagccaaatactactgatatttcatctcaaaatggtcgattttggattgtcttctccaaacacggtacaccggcaaaaatggtgtccaaactaaaatttcgcattctggactacttcgaactgtttctctacgtccaatctactccttagggtctcttaaactcaaatatgacctttcaagaactcacaacacgaagaaaccttgtcaaatccgaaatcattcaagaacaaaaaacttgaacatgaataatggtggatttcgaaacctacaatcttagcgtgtttggtcacgaccattagctttcttagatagtgcagaagctatttaaattgatcaaacaaacccagaaactctctaagtgtttcaaaatcaaaatctctctttctctctctaagtttcacatgagactatcggtccctctctctct

SEQ ID NO: 153776 - DNA, 507 bp, Cannabis sativa
ggtgctccaattatttctcatatgttgttcgctgatgactcgtatgtttattgtaaagctaatggaactgaagctgcaaatgttcttcatctgttatctgtgtacgaaagggcttctgggcagaaagtgaactttgacaagtcttcggtttttttcagcaacaatacaagagatgatgtccgggagtatatttgtagcttcttgggggtgtcggctgctacagaaaatagtacctatcttggtttaccttgtacgatggggcgtagcaagaatgccattttgggttttctcaaggaaaagatgaggaagaaaattctaagctgggagactagatttctttccaaagctgggaaagaagtcttggtgaaatccgttgctcaatccttaccaagttttgccgtgagtgtctttcttcttacgaaagaaatttgtactcaacttgaggggatgatggctaaattttggtggaaatctcaatccaactctagttctaaaggagttagttgg

SEQ ID NO: 153777 - DNA, 530 bp, Cannabis sativa
ccaaatggcatgactttataacaacaaattcccacatttgttacaaaacttctatgctcctgatcagggatatgtattttgatttggttatatccagaatatgcatccataaagtcatcagctcgtgtcttgttgttgcatccactaactggtcgatcttgggtagtgggaaacaatcttttggacatgccttattcaagtctgaaaagtggatacaagttctccaattgccgttcagttttgcgataagaactgggtttgaaatccacaagggataaaaggcctcgtatataaagtcattgctcaataatttatcaacctcttctttaagtgccccttgtctcttggagtctaagggttgccgtttttgtctttttgctaagtaactggggtcgatatttaaaagatgacattatcactttagggtctatctctatcatatctgagtggctccaggcgaatttgtcctagtttgccttcaaaaaatcagttaactgctattttagtttttcatccaaattcttcccaat

SEQ ID NO: 153778 - DNA, 647 bp, Cannabis sativa
  modified_base (95)..(106): a, c, t, g, unknown or other
ccactgcaaatgtacgctggtaaaattttgatctctttgccagcacagtttgcgaaatgcgctggtaaaaaacttttaccagcgcagtagcgaannnnnnnnnnnnaagtgacatttcttgtagtgtgatatgagtccaagctgtatataagctatttgactaattataaactatcattattatattgtgaattttttttgactaattataaactagcattattatattgtgactaaaagttctgtagctaaaagtagtagtcacaaaaatcacaattttctatgaccaaatgtattttaagtcataatacgtattgtgactaaaactaaatccgcgacaaattatatctaaatattatatttagtcacaagtaactttttgttgtaacaaaaaatcacatttatgcacaagaaaattattttgtgactaaaaaatcatcactaaaatagttttttttgtaaagaatcttgtacattattataaatactgagctaaatatagcataaactcatttttttattaaatttagcacaaattttaaatcctaaatcaaaagaattttttacaccaaaaatacaaaataccaattttattacatatatacaacaacacggtcacatcaacatttttaccttctctcttaatt

SEQ ID NO: 153779 - DNA, 569 bp, Cannabis sativa
gtactctaacaaaaatggctagagtaatgttgaatagcaagaagcttacgaggcgtctttgggccgaagcaattaacactgcttgctataccatcagcagagtgttctcacgtctaggtactcacaaaacaccatatgaaatctggaaaggtaagaaaccaaatgtaagtcactttcatgtttttgtatgtgtttgttatattttaagagattgtgattacactagtaaatttgatgctaaaagtgatgaaggtgttttcttaggatattccatcaatagtaggacatatcgtgtgtataacatgagaactcaaactgtcatggaatctgctaatgttgttgttgatgatctaaaagatttgtctgagttttcaacagaagaacaaattgaagacttgcttgaaaagcctgctgctgaggaaaaggaacctgacggagctacataagctgctgtcaaggctacagtgcaggactttattgctacagaaacctcaacaacaaaagaatctgagcattcttcaaattcaatcactgatccaattcagagggaaccatcctccagggttaaa

SEQ ID NO: 153780 - DNA, 539 bp, Cannabis sativa
aaagcaaaagaggtgtttggtcaaaaaggacccaattagcatgattagttttccaaaaaaacaacgaacctgatgtaatcaggtgtatatttatataaacatatgtactaaagggtttgttttacttttatatttattttattccctaaatcctaaatagccacaaacatttttcaagatgcttggaaatattggtagtcttctacatatttattctcggtagtactaatatttgcagctatggagtccaaaagtgcgagaattattttttctacaagtccatcataatactataaaattatgataaacttggggggcaaatgttatccctcaaaaaaccaagataattgtgcacgaatttttgttctagatatggaagtccaaccaaaaggagcattttggcccattgcactcctaccaatggaggactttggcacaaaaggagcactttggcacatttcacctcctaccaatggagcactttgggcgtactaagcttctggctccgtcagttactaaggcacaaagagctcctcagc

SEQ ID NO: 153781 - DNA, 713 bp, Cannabis sativa
  modified_base (198)..(202): a, c, t, g, unknown or other
  modified_base (365)..(368): a, c, t, g, unknown or other
gaaataagttgaaggattttctaggaaaaaaatggctacactcgttgaagaattaaatatttaaagtagctcgcgacttcttccctattctcgtaatctacaaaagttcttatagtgtgcatcagacgatgtgtcgtcatcaggtacataataactctattttggagttgttttgcaacttattgcttgttctaattnnnnntatgatctttttatttgtgttcataaacattcaataaaatattttgtgatagccatggagttggtggataattttcaaatattcaaaggagtatttgaactatataaaaaagtagtcactttctttttagagtgttctcatagtattgtagagggaatagttnnnngttggacaaagtcctttgagacttgtctgggccttgagttaaccggcaaaatcctttgagaattgaagcctttacgcatatattctgcttgaaaaaagtcaaccacagcttcacaaaagttttatcccaaaatatgtcagtaagtagtatttaaaaaaataactaacaaacttttgtggtaaggtgcaaatcttgaatcaaatcaagtacactatattgagaaaatatcttcataataagattaggctaattaagatttcttctccccgaactttgacatgtaccaaatcatgccccctgaattgttttggccgttaaaaattccccctgaactattgagattgt

SEQ ID NO: 153782 - DNA, 505 bp, Cannabis sativa
cgctcatcgatggctgcctgctgaaccttcaatgtttccatttctttatttctccattcgatgaactgatgcctctactcttcgaatgcaagattcactgtagcacaaagctcttcctagtcatgatgcaaggtattggtgtgaccttgcatgaggccaagagcattgcagaggttctaaatctcagtatcatcccctattgtcgtctgagcattagttgtggaagggattccaatgctgggagtactctgatcggctgtcgaactggtgtttccagtctcttgcataccgggtgtaatcccagccagaggggatgtcacaccttggcccacagtaggtgggtgcgtgtttggttgctcaggattggtacctggtgggacccttgtattcctaggagtttgcaatgtaggatttgctaacagtgggtcactctgatcaaccacacctcagcgagtttgcaccaccattttatgtatctgataaaacttaaggcaaagagcaaact

SEQ ID NO: 153783 - DNA, 538 bp, Cannabis sativa
catattaaatacagaatacactaatcaaggaattcggacagcttgccatatctctgtgatatgatcccaaaattatagggattccatctgtgattcacgatttgagtgctaacactactaagtgttggtgtgctatttggattgctcacttcccggttaagaaggcttcgtccgtgcgaatatgagtcgtgctctgatcggcatatctcttacgagcaggtatataaagttgattccacatgtaaccatcatgtgatgccacgtcagagtgcaaaaattgggataactttgcccccaagtctgtacgggacttccgaagttgcctgtagactttatccaagctgcctttacatttgtgtgggtgacacgtgttaggcgcgtctgttcgcgttttgatgtgacgctgaccaggcgtctttttacttattggctaattaatgctctgacttaattagttcctcgaaaaccagttttttctcatcacgttcgacggttacacttgattatatttgatttcccaatattttctttttggggg

SEQ ID NO: 153784 - DNA, 531 bp, Cannabis sativa
  modified_base (178)..(182): a, c, t, g, unknown or other
  modified_base (408)..(430): a, c, t, g, unknown or other
  modified_base (502)..(506): a, c, t, g, unknown or other
gataagtgctatgtccgtgctatgtccttttcaggttattggttaaattggttaaagtaaggttaaagtaagcttgggttggatgcataaagtaagcatcggaagagacccatattgaacttgaactagatatgataaacttattgtaatatcaattcaattcaatatcacctagttnnnnntagatcaaatgatctcaatcttgaaatggttaggttttagttcaattgcattatttgtgctctttaatctattagttaaagtcggccaaatggttcttcccgtgacgtataggttaagaacaatgtagttcaattgactgggaacgctaatcatagatacggaatttatagcttttatctagacatagaagtgaaacgatgaattccttcgagcttggcttaacannnnnnnnnnnnnnnnnnnnnnnttcagtgattatattagttcactgaaatactatttgtatgtagctatgtgttttaaagataaaatacattgnnnnntgtaacggtaaattaatccctatac

SEQ ID NO: 153785 - DNA, 599 bp, Cannabis sativa
taactacgtcaagaatgtaatcaaattcaatagtttcttacttttgtctattttgacttcagattttctttatcggtagtaggaaaatgaactataagatgaagaatgataatcacaccaaaggagaagcaaagaaatcgaaggagaacagagaaatctaaggagaataaaggaaatcgcagataagaatcaaagaattgcaacccattatggagaatagctgagttttgatattttgggtgtgaattttataaataaaaatatccttttataggtattttatttttttctattttttaagttttttatttttttttctagattaagttttttcattaaatgcccatatttttcaaaatgcatttgaaaattttcatatttataaaaaagcccttatttaaataatgattattcattgaataagcgaaatactaattgagcctaaataaaattatcagtgatattttattttagcaacttagtctatttaaataactagaagtaaatgagcttcctatatgcatctaagtccaaaagcaaacatataggctcacacaagtcaaattgatttaaataggccctatcatgtttctaggttt

SEQ ID NO: 153786 - DNA, 631 bp, Cannabis sativa
cttgagacaatatgatgcatttctataatgtactcccttacatttccttgacatttatacttcatgttcattttaaagaaccaagaaatgttaaccgtttttagcaaaatattcctcaagtttttcaaggaaattctcggccatagtaactccttcggattctgtgccccaaaagacttttagaatgttatgtttcattatcattagactcatgcgatttgaatgataccacctctcatattctttttttatcaatatgggaactttacttagtgagaggtgcaggttgtccattccttagagtatagtctaaatccatacatccaaaaactataagtaagctctttttttaatccttgaaattggtctcattaagcatagaaataaaattagtattagcagatattgaggcaatcggagatgaactagctgaatatagaacaaataaaacaagctcacattaatatgcataataaaataataaatttaaaaattggttaatcccatctcaagataccaaacatacattaatatcaagtctttagacagtaatattaactgtaatcggtactcttggtgtaacaattaaacattgacaataaaaatgtgtcaaacaatagattaatctttg

SEQ ID NO: 153787 - DNA, 573 bp, Cannabis sativa
aaaaattatttagttgatgggactcaataaaaaatctagtttattggagtttagaattataagtccatggtccccgaatcgccacctaaaacactgtcaaaggaagggataaatagtagtataatatttttcgaaaaaatctattttgaattgacaaaataataattatttatttttataataaataaataatttttcaaattaattaaataggaaaaagacaaaaattattaagataaaaattttcaagacaatatttgttgggacaaaagttaccaagacaaaagacacaatctttgtcctaaacaagacatggtaggtgtttgtccctttgaatttgtctttttgggttaattaattaattaattcaattagataaatatttaaatttaaaaagtggttcaagatattacaaagttgttgagatattctctcaagtagttgcaggattccctcatgaatattagtaaccgaattcgataataaatatttatttatttaaataattaaatatgatttaattaaagagttttaactactataaatgtaacgccttaatgctaaggcacacta

SEQ ID NO: 153788 - DNA, 751 bp, Cannabis sativa
tgagactagagctcgggcccagacacggtcatgtacccagaccgaaactgagacgcggacttggacctaaatttgggacttgatcccaaacacagacttggacctagatagggatccggatacagacctggactaagacaaagacccacactgggatcgaaatgctggacctaaatctagaccgagatcctgacatagacacaaacttggacccgcacgcgggactcgaacttggacctggacccgaacctagaacaggatcgtggtccagacccaaggctagacttggactcggacccaaactcgaacccagaccaggatcagaacaaaggacctagaccaagacccaacacgctaacccacacccggagcctgatttggacatagactgaaatccagacccgaacccaaactcagaccaggactaaacaagggctaggaccaggacagagaactaaacccgaactgagactaggactcgaacccgaacctataccgcgacccaaacccacacaataaccgagacctagacccagaatgaggatagggaccttggaaaaagaactagcaccgggacctagtacccaaaattgaacctcagacccagctcctgacccagcaccaaaaatggaaccagactgggacccgagatagggatccagctctggaccctggtcttggacaaaacccgtagtcggtgtttggatttgggacccagccctggacgcgaaccctaacaaggacccgaacc

SEQ ID NO: 153789 - DNA, 705 bp, Cannabis sativa
ctttagtgagttgaattgggttattttaagttgatttatttgatttatgttggctgaaaattaatttatcaaaaagaaagaaaatgattaatttacttcattttaacaaaactaaggaaaaaccaattttcactctcaaactctctctctttttcgaacccttagagaagctagggtttgtctttttcttcctcaattcaagcttgttgcagctaggttcttgtgttcttgagccaaggtaagttcttagctccaatctttttagtttcttgaattgtaagaaaatggagttttgcatgaaatgttgttttgcttgctgttcttgttgctgttgttggattatgtttttagtagctatattatgatggtataggttaatttgagcaggttctagtgggtgttagttagatttaaccaaattttgagttttgaactcaaacttggagctttaatggtggtttttgtttctgagcatgttagttggttttgttgcttgggatttgatctttaggatgcttagaacaggtctggaaggtttcatgtggattgggattgttttggttgagttagaatttttaacctttcctgcactgaaccagaattccagttcagggggacctgtaggaaccgaaattccggttgttccccaagaaacccctcagaaccggaattccggttggagcaattttgggaaccctagttttt

SEQ ID NO: 153790 - DNA, 933 bp, Cannabis sativa
aactcaacatactgttcaatagagaaatttgtttgtacaggaaaaaagtgagctgattacccacacacaattgtactgccccgtagtcttaggtgtaaggactcagtttttaccgagtcaaaaagtaaaataaataaataaataaatatatgtttatatataataaataaataaataaatttatatataataaataaataaatatatgtttatatataataaaaataaatgttgggtgctaagttggctcgaagaggagctttgaaactcaaagatggtgagcagtaacagtcctaggcaacatgtcgcccaagcactaggctacatgtcacttactttagaaaatgagagtttctcattttagcgatcaaaatatggtttgagggtatcacttcaggcgacatgtcgcctggagccattttatgagaaaaccaaatggagatgttttcaagagtttgaaactatcaaaatatttatttacatcagttaaatgagttttgaaatgttgggtgctgagttggcttaaagaggagctttaaaactcaaagatggtgagcagtaacagtcctaggtgacatggcaccaaagcactaggctacattttgcctactttagaaaatgagagtttctcgatgttttagcgatcaacatatggtttgagggtatcactcgatgcgacatgtagcttagagccattttctaagaaaatattgtaaaacgttgggaattttttttaacttgaaaacgttgggaatttacaggggacatttctatcatcaatcaccaacgttcttatcttcatttaatgtcatattttggctggtaacatcccataacatccatgggattaggcatggcaaaaagatccattcattcggatcggatcagtgatccgatccgacggatcattactgatccgaaacattcggatag

SEQ ID NO: 153791 - DNA, 601 bp, Cannabis sativa
ttagccttccaaaagtcatagaagagctcaagaccggttgtctccagagcattaaccttctctttcagcttcgtcacctcaaccgaaagctcctcctccttagacttcttctcctcctccacccgacaaagaaccgctcgaagagaagtcctctcatttgaagactgttcacttcagcagctaaggtctcgatgatctcttcaagacggtcagaaacctcgagatccttagtcaactcagctatcttcttttgggcagtaaaaagcttcttgttggcttcacccagctccatccgaatagctccaagttctaccctggcattgttagcgtccttcttggccaagtccaccttcgccctcagggtgttggacagagccgtgttcctggaagcagtagacttagcccgggagtaggtgtaggccaacctcatactggtctgcacaaagaaaaaactttagtatttgagccaagtaaagaagcttaaagaagagtgtcaaggaaaacttaccctggtgaattccttcaagactccgcccatcagaagcaccgaaaaaggtggagtaggggcccgcatctattcgggtccactcttagtcagctc

SEQ ID NO: 153792 - DNA, 537 bp, Cannabis sativa
tattttttaaagttttcaataatttcttcagatcaacttaaaatagaataattttcagaatatattttactttattttagtaatcattttcccacgtaattttgaattgcatttatttattttaaatggagatatttcaatttttcaatgggcagtactcaagtgaagttcagttcctaaggcctgttgcaaggccttccaaaaccatgatgtaaatggaggatctttatcagaaactatgcttgaaggcactccatgcattcgaactatattgtccacataaagtcgagctagcctagtaagcttgtaatcctttctgattggaataaaatgggcagacttagttaaacaatcaataatcacccaaacatcgtcatgcttctaaggtgtcaatggcaacctagtaacaaagtccattgtaatcttgtcccacttccattctggtataggcaaaggttcaagtaaacctgaaggtctttgatcctcagcctttacttgctgacaaactatacacttagctacaaagctggccacatc

SEQ ID NO: 153793 - DNA, 744 bp, Cannabis sativa
actatatcaaaaatatgtttatatacaaatatttaagttaatctcaattttttttttatatttattttgctgaaaaactttttttcttgattttttttttcacccgatggaataatacctatctatataatataaaaataagagatttttttaattaaatagaaaaattaagtataaaatctcaaataatgtattataactacaagtgaattacagtaatgacaaatgatgagacacagtgatgacaacgggtgaaatatgatgatgaaaataagtaaaatacaatgagataacaagtgaaatacaataataacaatagttttgaatgatcgagatataaaaataatgtattatgggaaacaccgtaattttttacaccaccttatttctttatttttataaaaataatttcttttaacaaagtaatttaaaatactacatataataaattttaaatttctcgataaataaattttaaataataattaataaaattacgcatttaatttttaataaataaattattaataataatatgaggtaagataatatatttataattttactatatattagaattatatttttaagtaattatactataatactaaaaaaaaaattaaataagcggctaaattggctagtttatcaaaattgaggaaattacactctatactctttttatattgtccttttttatttttaccctcttttttaaaatctatcatttttacttcttttttt

SEQ ID NO: 153794 - DNA, 544 bp, Cannabis sativa
  modified_base (504)..(514): a, c, t, g, unknown or other
gggggggggggggcttgtatcccgagggaatttgcatgtaaacttcttcatggagatccccatgaaggaaagcattattatgtctaattggtggatatgccaattgtgcattgctgcaagggccaaaaatattttgagggtattaaatttggcaactggagcataagtttgagaaaaatcaatgccttgcctttggttgaaacctttggcgacaaagcgagctttaaatctgtcaacatcaccatgttggttatatttgactttatagacccatttgcacccaatggcttttttgccagggggagtttggtgataatccaagttttattcttttcgagagcttgggtttcattatccatagcctgaagccagtggtgaaaaagtgatgtctcagcatacgtttttggttcaacgtgtgagtatgctgttaagaccgcaacacgaaactgaggatgtaacttgatgtaggatagaaagggttcaatagttcagggagaatttttnnnnnnnnnnnaagttcagggggcataatttagtatatgtc

SEQ ID NO: 153795 - DNA, 685 bp, Cannabis sativa
agttagggatatacttcatttataaggttttttttaactgattatatgatttgttttttattattattaatattattcaatttacttccataatttaatctttttttttcgtgtttgactgtgatatttgttttttaaattttattaaaaaattatatatgtttttaaaatttgaaaattataattttatatatatatatgtattagattattttatcatgtagtaaaataataatgaatatgttatcgatttatgtataataattgataataatatctaataaaaataaaattaaaataaatttaaaaaattattctattttttatttaaaactaattaaaaaataacaatgatcttgatttataatattttcaaatattatcaactacttagtacataaattttttaaaattaaaaaatatcaaaaattaaattttaattttcattgattataacaatcgcgcgaaacacggatgaattttaaaagtcgcgcgatcacataactaatttcatacggtacttatcattttaattgttaggaaagacaaataaacatttccttataaaaataattatacatacaaatcatgacttttcttttcatcattacaatttaaggtatacatttcacatttacataatttattaaaattaatccttttaatttaatatttcatatagaac

SEQ ID NO: 153796 - DNA, 1138 bp, Cannabis sativa
aggcaaaaaaaaaaaaaaaatgggaaactttccaaattttgtctataaaacgagttggagctaggcttttatcatttgaacttggagaccaattttggacattggaggattttataaaatcttcctaattgtgtatttagggactgagagcttagatctaataccattcaaaaattagaaaattcttagcataagaggaaggtttggagcaaaaaacactattggaggattccaaacaatgttctatcttttccatctctatcttttatgtttttaattgaatttttattattttaaaataattttagtgtctaatttcttttaaagattattatgtgacctacttgtatggagaatattgtctcacatggattaaatgtaaaagtattgagccatatataagaaaatgagctactccactcatcaccaattggttttgaggtggaactctatgtttcttgacaacttaaatttattttatggattaattttattgtttaatttcttcttcttcttttaattcaattccatacaatttgttttaattttgtaattatttactggtcatctataattgttatctatgaattcgaatcaaaattttagaaggtgagatttgaatatgctttgatttttatgatacaaatttatttaggacgaaagtatctagattatttgtatgattttataagttactttgcttaatgctttctttatgattaaacttcaccataagaatataaggagttttcacatcaattgggtttataggccttaactagattataaactattcaattcaacttgtcaattgaataagaagatgagaaattgagtaattatattaggaagtaaaataaaggatagataggtatcataataatttttgtctttattattattttttttaaaatttttaattattgtcttgctttatttattttttttcaataatttttattaatcaaataaaaataaaaaaattaattgattggttattaataatcaatcatcggggaaaataaaaaagtgacaaaaattggctcaaagaatgaacaatgacaaaaattagaagctattttaatcgtgttcaccagtaaccactcaccaaattcctatttcaaataatttgatcaca

SEQ ID NO: 153797 - DNA, 541 bp, Cannabis sativa
aacactagtgctttttctatcatttgcaatattatctgcccaattagcatcactaaaacaaacaagattaggttgttcaacatacacttcttccttcaacaaaccattcaaaaaggcagatttaacatccatttgatacaatttaataccaagaatgcaagctatggaaagaagtaacctgatagattccagtcttgctactggagcaaatgattcatcaaagtcaataccctcaacctgagtgtatccttgggcaacaaaccttgccttgtttcgaatgatagtcccaaactcatcagtcttatttttgaagatccacttggttccaatgatgttcacaaatggcagtcttggaatcattttccagactttgtttcgaacaaactgatgtagctcatcctgcatagcaagaaaccaatcttcatccatttgtgcttcttttacagattttggttctaaagaagaaacaaaacataaaaaatgaattatattagcatattttcatcttgtaatcatgctctcatctaagtttccaaggatg

SEQ ID NO: 153798 - DNA, 523 bp, Cannabis sativa
gagagagagagagagagaatttagtaagtgattaaaaaatgatcatttttttaaatatcctaaaaaagctaaaagctaaaatataatgatagattttgaagttatcaattttttaaaacatattatttttaaatatcttaatttttttaaaaaaaaaatctaaaagtacaaaaatattatagccaaaaattttagggggtgtttggaatgagttaatgttagcaatggaatggtaatgttaaacattaccttgtttgtttggagggtttaatcttaaaatgtcattcccttagtaatataaatatccttgagggggtaatgttgatacattaaaaaatggtgggattaattattctcttccattgtattaatttggataacattattttgaattaataaataaatttaaacaccattaatataattatttattataaacaaaatattacgatatatatttagtctgtaagatcggtttttttatagttgagttatttttatgttattagcaataacatatata

SEQ ID NO: 153799 - DNA, 922 bp, Cannabis sativa
tacattgtgttaaaaaatttggtcataataattaatacaatatactattctattcaaacattgtgttatttattatttaatacaatgcgactgttatacacgtaccgaataggccctaaaagtaaataataattaagaacaaaataataaaataactaaaaattaaattaacaaacaatgattttaatcagaatataagactcagagcatttatttccctatttcaaactataaatcttagtttaccaattattccactttattctggagtttgtagtttcaagaatcttaatataatctattaacctctcttgagtgatgatagaattaacttaattaagtaacatgatatctctattcaatattgatcaatcaaataatcaagcaacataattctctttaaatgaactgatagaattaatggaatctctcaatctcacacttttcttatgtcatgtaattctaagtctaatttaaaattacatctctcaagtgtaaaacctaaaatctctatactaattaatggtgatcaagcattaacaagataataattaacacaaaattgcataaacaaataacaagaacaaatatagaataaactaaaaactttaattcataatctaaaatagttccatcaacactctaaaaaaagtgttatttttataatgacaaacataatcacaacaataatcatattcatattcatattcaaataactaaacaaaaagaagaaaaagaaaaagaaaatgattttaagaccaactttaatgaatggtgtatattttaggttaaatttgaccaaaacatacccatgaagctatatttggtctagttattgtatttgtgctccaaagcacaaggtacaaattagccataaaagtcaataataccattaatactcattaaaatatacaaaatatac

SEQ ID NO: 153800 - DNA, 563 bp, Cannabis sativa
  modified_base (215)..(215): a, c, t, g, unknown or other
  modified_base (295)..(296): a, c, t, g, unknown or other
  modified_base (349)..(349): a, c, t, g, unknown or other
atttacttttttacagaactcgattttgattttatttgaataggttatgaatttttgaaaatcggggaaaataagggtcgtgatcacccttcccacgcgcgcggaaatcatgcaagggaggcttgtgccgagttttctcggcagatcccccctgtctgcgcacgcggacgtaccacctgccattttttttttgttttcttcaatttttcatgctntttcatggaattaacttccgatttgttgtgtagttttgtattttgtattttgatttttaattttcatatttcaaatctanntatcagaaataaattaatttaaaaaaaaataattttagatattagtgtaattngaatttgaaaataggtaaaaaaaaaaatttgcttacctcttttctttttttaaaaaaaaaaaatttgattattttatcttaattttaaatctaaggtcagatattaaaatttcttttataaaatattcaattttatgtaatttgaccttattttaaaatgaaataagataattttgctaacttttaaattttgttatttttatttaaattaaat

SEQ ID NO: 153801 - DNA, 930 bp, Cannabis sativa
taattcctcaattattcataattatcgaattagggttttgctaatccatttcttaattctagggtgttacagactttgttgtagagaaattaaaataaaatcatttaattaaaagaaaaagaagaagaaaaacccaattatcctactctctctctccatccttttcgagcctagcaagaaccagccaagacttgggatttttctggagtaattgaggaagtgttagctgaattcatgtggtgttaagcaaaggtaaccctagaactattaatttcttgtattttgaagctttttctttagtttgagtatgtgattttgtgaaatgtgagttgttagggttagaaatgtttagggttcgaattctagggttaatttggattgattttagtttctagtagctggtttggttgtgttgtgatgattttatgcaagtttgagttttgaactcaaagctttagtctttaatggcatgttgtcactactacaattttcacttttagtgacactatatagtgacacgcaaaaaagtgcatgtcactaaaaagtcaagagtgacttttagtgacatgcacaataagactctaaaaattcagtgttagtctcttgtagtgtgagtcactaaaaatatgaagtgtcactaaagactaaaacccaaaatttcctaatttttattaatataaaaaatattggcatatagtgacacgccaggcgcgaatggataaatatatccccacccacgtgtcactatatcataaattatttttttttataaaaaaagtacaactataattaataagtaaataaaaaataaaaaatatatatttaataatagtgaattcttgttattcacgccacctcttttctaatcaattaaaatccaatataaaaagttaaataataaaatataaaataaatatctttatatattaa

SEQ ID NO: 153802 - DNA, 667 bp, Cannabis sativa
cagttcactcctaagggcatcaagtatctgtctaccctcttcgtcctttatgcctcccagaaatggggtatgccctctccccacgagtatgcttggtacttcgatttgaagtccacccctaagcaaggcaggttgaggtacttctacttctctcaaccaggcatcaaggggttgacgggcacggatgataaggccatcagcaagattgggcgctttgttgatgagtacttcatggtggatggcacaggcatcactcgcactctgtttcagcagattttgacctatcactgccctcccctcactcttgctcttagggatagagctcaaaaactagctcggttgccaggggaagaccagaatattatccagttgacctccgaggataactttgtgaggtacaggctctatcccaaggactttactcctaagtctgtgacggggaagaagaaataatctggtgctggccgagtcgaacgagctcatcaagagaatgaactcattccacttaagcgcaaagataagttgaagggagatgcacgggctgagcagtatgctcaggagccattgaatcccgaggatgatgctgaggaagagcaggtgactccactgaagaggaagaagaaactccatgcctcgcccaggcctattgaacatgcgattcgcataa

SEQ ID NO: 153803 - DNA, 528 bp, Cannabis sativa
  modified_base (387)..(389): a, c, t, g, unknown or other
ccccagcccttcgatttcacaatcagaagctaacttagccagatagtccacgtgagcgttcttttcccgggggattctttctactttgtggtccgtgaactcgtggaccagtccccggactattgttacatacgcgaccattcgctcgccacgcgtttggtactctcgcgatatttgatttacgaccaactgtgagtcactgtagacttccactctcttggcccttacggctttcgctagcctcagccctgctatcaagacctcgtattcggcctcgttgtttgaagttgagaagtcgaaccgtagggctgcctggagtcgcagtccggtcggggatatcattgccacccctgctcgggaaaaattttcattggaggctccgtccannnatactctccatgtggggaccgatgttgttggcgcatttgtggttgcctctgcttcattacattgggtaatgaagtctgccaaggcttggccttttatggagattcggggaatgtagtgtaagtcgaactgacttaactc

SEQ ID NO: 153804 - DNA, 640 bp, Cannabis sativa
gaagattgtcacgacatgtaaactcatcatcagcagttagctcgtttcatggtttattaagcttttattgcttagtagtttattttctatagtatgatttaataaaagcatgttgggaagcatgttagtagcttgatagtagaataggagcatgtttttaattttcaaataggcggcattagtaagtttccctttgatcacaatctgacaagactagctcttggttacgtaggctgttcagattagtatggacgccaggcaaaataccaggagccagggcaattcggttggatataatgctggtcaaggagctcagatccccctaaatgtccgtggccgaggtagaggtctcacaggcagggcacgtggctggggtgatgttaacccaccacaggttgcccaagcttcccaagccgctcaagatgcccaaaattgggaaaataggtttgcagcaatgcaagccagaatcgaggaacaagataatgagattcaacggttatgacagtagggtgttcctgcaatgcctgctccagaaattccagtggcacctgcccctgctgtccaggccgaactagtggcgactgtgaatcggatggaacccctgtatgaaaggttccgcaagcaagcacctccagttttt

SEQ ID NO: 153805 - DNA, 506 bp, Cannabis sativa
aactatcccttccctcctccaatccctcttgccaaacaagtagatttgttatcttctcccatctttcctctccatccatccacttctccctcctacctaacatagtattaatgttttgttacctacgaaagttctaaaatataacttaaatattattaccgtaaaaaattaaacttaaaaatttatctacaattgaagttaaacttaggtatgtatgccacaaattccataatactccattatatgatttaggcctttaagaatttgatttcgcactgtagtaatttgtgaatgatacttctaatctgatataattgatgaaaatgtggcctttatataagctgattacatagtagaattaggcaacaatcaaggaaattaggaatgaaaatacaacctaaactcagctgtcaaaaacaccctaaatataactgtacaaataactttagctatttacaaagatatttctacactccccctcaagctgagttgtatatgttatacaa

SEQ ID NO: 153806 - DNA, 1205 bp, Cannabis sativa
  modified_base (1053)..(1068): a, c, t, g, unknown or other
tgatttgagaagtggggttttaggtgaacaaagaaaaattaaaaccttaaataaaactaacaacaggtggctcgccacgtaacattcacctaatattatgtaatgtgcacacatatatatatattagttggatacaattataattatatatatataactaatctcatatctatttataaatatatctttttttagcaaagattgaagagaatttctactattttgtatcaatttgatgatatctattatcatctagatctaacattagaaataagcatcatatttttgttttgttttaatatatattaatcagatacaattataatatatataactaattttatacctatatatatgtttctatcaaaaattgaagagagctttcactattttgtatcaatttgatgatatctattattatctagattggatattagaggtaagcgttattttttttttattattttatatatatttttaaaaatattgcttattcactcataaaaaattgtgttaaattgcatgatgtaatatatatatcattatatatattaacactattcacaactatttttgataatgatgcacatagaatttattatttaacggcatatttgtattttttttttatgttgaatatttaactatattattagttaattcttaaaggtggtgatgtactctataatttaaaaaataaagttattactcaatatttatctattgaaaaattcatatataatacattaacagtctagagaatgattatgtattaatgtgatgaaataacatatcttatattttttgtctttaaatttatttgtttagtgattatattttagtatttttttttatagaaaatcctaaaaaggcttataatttaattttaacatcatattattataactttataatcaattatatttttacttgtgtaatattaattatttgaattttttaactaacataaatatcgatctatatttatctatatattacaaataacataaaaaaataaaaagacaacttacattagtttattattattattannnnnnnnnnnnnnnntattattattattattatttagtgttcacagttatactagtataaatattaaattttaagagttaaattgtaattaactctctttatttattatcaatgttgtcctttcatttttataacactcaccattattatta

SEQ ID NO: 153807 - DNA, 939 bp, Cannabis sativa
tatatacaactgacatttgcaaaaacacggtttttcaagttgaattcttagaacatcacgagagctgctatgggtaaatttttacactaaaacacctataatcataaaaaaaaagttactataaaactaataacttttataattttgtgttatcaattttttttttttataattctgagtattgttgaaattgttgcccatgtgtgtgtaagatttataatactagatttttctctataattaattggaagatttggtttgttataaatattgtaacctctaatggttatgtttctttttcctatacctagattgttctacatgatgagattgaaattgatgagaatgatctggttgaactcttgtttcttaatatggacactgataacagtaactaaggaaaggtagtttcttatctaattggaaaggcacaatctccaatagaaagtctttttttttttttgataaaatctccaatagaaatttgaaattcaaacatttgaatatgggtttggaattcacataattacatatttagttgttttttattcttctgcaatacaatgcaactattggaacttgagagtcaaataaaagagaaaattctaccatcttaaaatctttagaggatctaaattttgtatgcaaataataattctactactgtaggcttatgtttttttttttttttttttttttaatataattaacttcaattatgttatctcttttttatgatttttgagatgtgacttagttttaatcattttatggttctacaacttatcttgttcaatgtaattattatatcccctgtatatgggtacgtttaatatttatcaattgtaataaaaataatcgtaactaaaaatgactgagaaagagtaaacaaggaatcaaggattttgtttccttctgccaatttttgttatacatatg

SEQ ID NO: 153808 - DNA, 932 bp, Cannabis sativa
  modified_base (543)..(553): a, c, t, g, unknown or other
  modified_base (710)..(712): a, c, t, g, unknown or other
atactattcaaattaatataatgagatgtaataattcaatcttatctttttttaaggtatcactattaccttcctcaagagtagttatattaataaaggaataacattctcaggctaaatcttcaaaacaaataaggtaatgttttacattaacattctcttgctagcattaacccattctaaacagccccttagagcatctccaatggtaaaattttagagaatgcttggtgagatggacatattatgtgacaaaataatattgagatgttataccattggagagaaaatgatgccattttagaaatttgcatagatgctatgttgtagcattgatgctattcattttttttaataaaaaattgaagctaaaaaattattgtagctaaaaattaagatatatattaaataataatatgtgagataacatttttaaagagtgttatacattggagtatttttagaagtaagagtgtaaaaaatagagttatttgcggcataacctccttaagtggtcaggtttttgcaactaacccccaattnnnnnnnnnnngtggtaaaacctcctaaactcatgttctattaacagttagccatttccatccatttttaggtgttaagtgctacactgtattgtctacgtggacaatatgtacacatggcattatattattggtccacgtaaataaatattaaaaaaaataaaaaannnattattttaaaaataaaaaataataaaaaaattattaaaaattaattaatttaaaattaaaaaaacaaattttaaaaaataaaaataaaaaaaaaaccctaatttcttaaaaaattctcttcttctcgttctctctctctctctctctctcattgctctaaacctagctgccatccccgtcgaagccaccatcaccatccaccacaattggtgactacca

SEQ ID NO: 153809 - DNA, 588 bp, Cannabis sativa
tgcacttgatattcagagcaagttatcgatggtcttgatcgagctgtaaagaatatgaagaaaggggaagttgctttggtgactattcaccccgagtatgcttttggctcatctgattcgtcacaggatttggctgttgttccagctaattctgttgtttactatgaagttgagctcgtctccttcgttaaggtgggtgccatatgctctctcttcgttgtccaaaccaatgtttctgcttgccttcacaatgacacttaaaagagatttgcttaatgtgtgcagggaaatgaatcttgggatatgaacacacaggagaagatcgaagccgcggggaagaaaaaggaagaaggcaatgccttgttcaaggctggtaaatatgaaagagcctcaaaaagatatgagaaggtatatttgagtataactaaatacatatttttctacaaacccctttaatcaggccctaatgataacacctctttcggttaacaggctgtgagtttcgtcgaatatgattcttccttcagtgatgaagagaagcaacaagcaaaggtgctgaaaattacatgtaatcttaacaatgcagct

SEQ ID NO: 153810 - DNA, 505 bp, Cannabis sativa
aatttcattgggcaggttactattttcttttttcttaattggatggattgtacttaaatttttatgacctgatttttacattgggttgaataaaatgtagcataaaccaactaaaccgactgacatacacccctatttcttataagaatactattatgagagatttgggaaaaactttgtaaagacttctccgattataaagtttagtcaagcccgttacatgactcgatagttgaactcaaagctaggtctataactttgaagactaagaacgtaggtagcttagttctatcgaaccttataaaaatcgagagtttgcaatttttatccctatactttttatatttcaagtttgctatttgtttatatttatatttatttatgtgattgtattaagtaggggtgtacatcggtcgttttggtcgggttataatatatttttattaacccaatataaatattgggttacaaatatttaatcgtaacttgcccaattaaaaattag

SEQ ID NO: 153811 - DNA, 692 bp, Cannabis sativa
aatatgaccttgagcttaattttcaataattttttttttttaataaaaccattttgaagacaattcttaacacgaataaatatataaaatgtaaacatttttgtcataacgcacttagattagattattattaaattttattttgacaaaaaacagttcagggtcctatttatactattttaaaaaatacaggatctattttgttatttaagaaaacagagggtccaattagtaaattctgtaaaacatagtgtccaaaatagtatttaccctttattatttaaataaagtaatttggtaaataaaaaatataactttagtaaatgaagtataataattagtggtattatagcctataggaaataaaaaatagtatttattgtaaactaaatttgacatattgtgctaaatttagtacaactttgacacattttttagaataccatttgagttagttttccttaattgtactaaaatataatactacacattttttagcactctattgaagatgctctaagaaatatttttggaaagagaaactatatttgcaccctaataagttatagaaatatattacaatgcacctttttaaaagagaattaccgatgtatttttatttgttttggtatccgaaataattttttagttaaattttttctcatggtcatgtacgttatacttatttaaga

SEQ ID NO: 153812 - DNA, 741 bp, Cannabis sativa
  modified_base (642)..(674): a, c, t, g, unknown or other
catattatttcatataataatattaatgataaagtttttttgtatttttaataaaaaatattaactaaatattatttcttgcatcatgtttagcaattgtacattggagtacaatgctaaaagttgatggaaatctatcacaaagtcatttttgtatcgaatataacacacttttacatctcccactagagatggtcctacataaatattttggaccccgatcctacaattggaccctgcctctttaaacgctgaccctgacccctgacccagaccttgacctaaggcatggctctgacctcgacccgaacacgaaccccaccccatccaaaacctcgacccttaccgaactcaaaccctaacttcgaagcacgaactcgaaccccgaaacagacctttgcctgaactcaaaccttggctcagccccgaacctcggcgaccgacacccaacttggcgtagacgcgatcgccaccatagggccctagacctagtgtttgaccttgttggggttttatgtaggtatgcatattttctccatggggatggggctccgcatggacctgcccctaatgggatgggaattccctatctaaatggggaatggggcaaggacggggatctttttgttggaaatattttannnnnnnnnnnnnnnnnnnnnnnnnnnnnnnnntaacatcctaaatatgaatatttccaaaataataaaattaaacacataagggttaagaaaaccttac

SEQ ID NO: 153813 - DNA, 804 bp, Cannabis sativa
aggtgattcatcattgctgtgtattacgaggtgattcatcattgactgcgtattacgaggtgattcatcactgactgtgtattacaagcagctacaagagctttgttgcgagatgttgaatgtttatcaaaataacattcgacaatgctaaaatacctcacttcatgaaccttgtgatctttatttagatgagatcacctcacaggttgagtcctgagtttttttacctatcccacaatgtatttattgtgagaatttattatttatgccacgtagcattcaatttgaattttccattaaatagtctaaaaaataggtataataattgcctatgagttagtttttcgtggtttacacaaagctgacttattatgcattgccttcccattctttttggcaccactctaagcagcttgtttgtgtttctcatgatctatgcatggcagagtaggtgctacgacctgaagcatgtgagtatataatacgaccacatgcgtgagagtgtgtactacgaccagatgcgtaagagtgtgtactacgaccagaagcatggggagtatgtactacgaccagatgcatgtagacagtggcagacccataatttaaagtgagggggcgtaattttttttttttgtaaaggggggagggcataaataaattgaaaaaaaaaatataaagtgtagtccttcaccctctaacatatttgcatctaccttaaccattataccaagcttactattatgttaataaatatcattttttaatacaaatatatgttgtaactaattaaaatacacatacttt

SEQ ID NO: 153814 - DNA, 587 bp, Cannabis sativa
actttattttaagtcaataatcaaatttttatgttaatatggggctgagtatatcaagtaatcaaagcaatttcttcattttatgaaaattagaaaagttggaaaattaaccccattttcactctcaagcttctctctctttcggcctcctttgagcagtaaggggttgagtatttttctttgaattacaagtaatttctcatcaagtttagtgattcctagttgttggtaagcttctatcaacccttcttttagtttcttgaagtttaaggaagtaaaatatttgcatgttgtgggattttagtgttgctgttattgttgatgtttgtcggttgattcaatagttaattcgtgattgtttaagtgtattcaagctgattttgttagttggttagtaggttttatccaacgttgagttttgaactcaaaactttggatttcaatggtgaaatgttaaattagtttatgtgtatattgtttgtgtttgggtgatgttttctgcagttatattatggttgtttgagtagattaaattaggttctgatgcatgttagggagatttagccaagcttgagttttgaactcaa

SEQ ID NO: 153815 - DNA, 626 bp, Cannabis sativa
  modified_base (354)..(354): a, c, t, g, unknown or other
aattgctacccttgtaaagacatgattttttattatttattattaatttaacttttaaattaatttaataatttaaaatttttgttttaaacaatatgtatcgaatacactatacaaattttaaggttgtaattataatagtgaacaataaaataatacatacattaataaataatattcaaatgaaaagttatggctctctttgtcaaagcaaattatgcataataaatagataaaaagttttgcactaaaaaaaaatctaaatgatctcgattactgttgatctcattcaaattagatagtatatgataactctaatgactgtttaagatcaatattttggattattaaatnattagggttaattgcaatattgagttattaattatgatttacatgtttgtggagatttatttaaattcaaaatgtattatattatgctatatgtgtgaattttgcgttttttgtgcttgtgttcggtaacggtggaaagcgacgtgggctattagagagtcacgtttggtatgatttagaatgtcaatagcggggtactattgttaggcattggagatatcggggatttgtcgggagtggtaaatgaataaactacccttgctacaattaaa

SEQ ID NO: 153816 - DNA, 653 bp, Cannabis sativa
  modified_base (380)..(385): a, c, t, g, unknown or other
agaagagctcaagaccgactgtctttaaagcattaaccttctctttcagccttgccaccgcggccgaaagctcctcctcctccacctgacgaagaaccgctcgaagagtagtcctctcatcttgaagactgttcacttcagcagataaggtctcgatggtctcttcaagacggtcagaaacctcgagatccttagtcagctcagctatcttcttctgggcaataaagagcttcttattggcttcacccagctccatccgaacagctccaagttctgccttggcgcgtcagcgtccttcttggccaagtccacctccgccctcatggtgttggacagagccgtgttccttgaagcgacagacttagcccgggagtaagtgnnnnnnaacttcagaccggcctgcacaaagaaaaaactttagcatttgagctaagtatagaagattaaaggaaagtgtcaagaaagacttaccctggtgaattccttcaagactccgcccacagcagctccaaagaagagtcattgtcagcaccagccagttgttcactaacctcatgaatcaactggttcatatagtgggcaagcatctctttacccttcttagcctctggaagcaccgacaaaggtggagtaggggcccgcatctgttcggg

SEQ ID NO: 153817 - DNA, 518 bp, Cannabis sativa
aaattaaatgaaatgttacttgttcctaccatttctaaaaatctccttagtgtttccaaacttacctctgataatgatgtaataattgaatttcattcaaactcttgttttgtgaaggacaaagtaacaaggagggttctgcttcaagggatgcttaaggatggaggactctaccaacttcaaaatcctcctcaaaacaagtcagcctatctcagcttttcaacacctaagttccactggtttctgattgtaataccctttactggtttagcttttaaaaccaaatcttgtgtaaaacagtcaaaaactgataagtttactatttccacaaaagatgtttggcataggagactaggccatccatcctctagagttttacatcaagttttaaatacttgcaatgttaaaatttcgaaaaatgaaactgatcatttctgtgatgcatgtcaatatggcaaatctcattctcttccctttaagaattccaacagtagagccttaaaagtcctagatcttgt

SEQ ID NO: 153818 - DNA, 702 bp, Cannabis sativa
ataagaaaatatcacgtgaataatgatgatttgacacttaacgatcaagtacctactaaaattttagaaatataacttaaatattattactgtgaaatgttaaacttatatttatatgtaactaagaattaaatttaaatgcattacacgttatttatttatttatttacattggtggaccagtattcgaagttaaaacaatttttttttcaagaattactactaaattatgtttatgtgatattaaatgtatatatttatattattttgtattaaaagttatttatttatcaagaaaaaagtggttgactaacttttaagttcaattactttttgtaaatattgtccattaattttatgaaaattgcatccttaagaacaacatgttcattctaatttgcgttgagaaatcaataattttaggtaacaaattaaattttaattttagtcacctaagtgtctaacttgtcaatcaatttgtaactatcctatattaaaattagaacattgctaatcaatgcggaattagaatgtgtttatataatgggatatttgttacaggagtttaagatcttagcaatacggagggtttatgttaatgtaagcctccttcttaagggtgcgtttggaaagccacaatataattggatttgtgtgtaattggaagtaattacataatttggcatatttgtctgaccatgt

SEQ ID NO: 153819 - DNA, 662 bp, Cannabis sativa
ttatagaataaattggatcatttttttttaaaaaaaagttcggtttgggcgttttaaactgaccaaaccgacgttcaaaacggtcggttttaggataggttctcgattggtcagttggttttcgaattgcaccaatctagaccgaaaatcgaattttggatttttatatagaaaaaaactgaccaaaccgactgatgctcaatctcctatttctcatcagatatatatttttattatttatttatttattttttaaccataccataaaatctctagatctaagcatctttaatccttttgtttctttctcttccgatctcgcttccttctttgtcgaaagtacccatgcctagcaccaaatactttggtttctcaccacctggtttgacgaagatgacgaagatggaactttgggttcgagagcagcaagaccatccatggcctccggttggaccaacggtggcatctcgaaccagaccgagatgaacgagagagagagagatagagagacgaagaaagaggaagcgagggagagagatcaagttgggtttccaagatctacgagcaccatggtggtgctgattccgtcgatcgacgactggagatagccactccagaaactgcagggtgcgccacacgggttggagagagagagagagaga

SEQ ID NO: 153820 - DNA, 1114 bp, Cannabis sativa
cgagagctgaccagttaccactgaagggctggcttctgcatcagcctcagctatcgcgaacacccttactggagtgggtttcgcttcagtcttgagttaggaacaatcccttttgtaatgccttggcataccgcactaaaaaaaaccctgcccttcacactctcccaaatggtgctttttacagctggggcactctaggtaagtgtattgggtttcggtgccactttgtggcaattgcctcgaccctagttccctcggaacctcttattctaacgtgagtcgctgtatgcagtaggtgcctttcttttctgattagtggtcgagccattacctcccctactaaagcctgatgtaggaggagtaggagccccgccaacaaccggagtccctcgagactctaagttgcactttactgtgccctcagttcgctgtgccttatccaccatttcagcgtaggtggtgctgtcatcagtagtgatcatcaagtcatgtctgatcttcgcattcaacccatccaggtatttctttttcttgctgaaattggttggtacaattccggaggccaacctcgccaagcgatcaaaatgagtcgtgtattcagtaacactcatgttctccttctaagtcagctgggtgaattcttttcttttagcacttatggctgcctcattgtaatacttggcattgaatagttcctggaacttttcccaggtcattgtcgtaacatcatgaatcatggatatcatgtcccaccaaaccagagcgtcttcttaaaattggaaagtggcacatgctaccttatcattaccggtgacgcccataaaattcaagattctggtgatcacagttagccagtgctcgactttaatgacatcgggacctcccaggaaaactggaggtgcctgcttacggaaccttttatacaggggttccatccagttcatcgcagctacaggtttggcctgcacagcaggggcaggagctaatggtatttctagagcaagaattgcaggagcaccctactgcctgaaccgccaaatctcttcatcttgttcattaatcttggcttgcatcgctgcaaacttgttttaccaattctgggcagcttgggcag

SEQ ID NO: 153821 - DNA, 642 bp, Cannabis sativa
taattattaattaattttttgtaatttattattaaataaggatcttttagcaattttttttgcccttaagttattaaaaattttatcgcaaaactttttataatttaaaattatacacatataatttcataattaaaattttattataattatattttaatttaaattattacacttaattatttacttaatactttttatatttaaatatttaaaaagtaaacaatgaattaagttaaatgtattttttttttttaaaaaaaaagttcctctatctttttttttttgataaggagtcatttactcaaaaaaccaaaccagagtcaaaaaacaaagtcaagctcccccaaaaaacaaagcaacctcaaactcgaatagaaaacctcatacttagttcttctagttataaaaaaataattttatatcattttaaaaataattaattatttaaaaatttattatacaagaagagaattctaatttaggtaaaaagaagtctaatttttgtaaaaaaataaaaataaagtttcattgtaaatattataattaaatggcttaactattctctaaaaaaatgacttaactgttaaaataattataatagggatttatataaaaaaatatttataattattaattgct

SEQ ID NO: 153822 - DNA, 519 bp, Cannabis sativa
caccatcttctgcttgcagtcgattgttgccccatacttagacagaaaatccattcccaggattatatcaaaataagacagctgaagctctattagattggaagttaattcacaaccgtctatgaaaaaagacaaagatcgaatccaccttgtggatactataacgtctcccaaagataacagggtaccaaaccctgaagcatatccatcacatggtttatgaaaatttcaattatcataatcgacatgtaggaatgagtagctcccgagtcaaacaatacagtataagaacaaccatttatagataattgacctgtcaccactgatggactagcctcagcgtcaaccagagtcatggtaaaaagtcgccccgggttctgagtagtattcttttttgggtcctccttcttggcctgaggaaaatctctgataaagtggcccaccatgctgttgggttttatgacctagataaaactccatttcaatgtaatccagtttattcaatatcaataaagaaac

SEQ ID NO: 153823 - DNA, 861 bp, Cannabis sativa
tccttttgctttttcataggtcagaccaaaattccaagtgccctttaagtatatcaataactattcgagggccttccactgttcaatgttaggattggacatgaactagcttaggatgcttatagtgtgagctatgtccagtctagtgctcaccatcatatacattaaacatcttaagaccatagcatatatagggtacatccttcatttcctctttctcctttgaactgtttgaacactcttccattaaaaaaaacaaactttccccctaacagattagggttgagcatcggtcagtttggtcggttttttcctatataaaaatccaaaaatcagttttcggtctggattggtgcaatctgaaaaccgaccgaccaatccagaacctatcttaaaatcgacaaccgcccaaaccgaacttttttttaaaaaaaatgatccaacttattctataaatacattattctacattttacaattacaaacatacaaattaatttttcaaaaactaattatcttattcttttaactttaatattaataaaaaaagttaatatattatttttatatattattagtaactataatacatgcaaaaaaaaatttaataaattaatatgtatatatgtataacggtcggtttcggttttttcggtctatttattacccaaaaagaatttaccgttcaatggcggttttaaccgttaccagtattttcagttttcggtttggtcgatttcggttccaacagtgttagataggtcagtttaaacggtttttttcgattttttggatttatgctcccccttataacagattatatgaactctttgcatcttccatgttgaaaatctgaataat

SEQ ID NO: 153824 - DNA, 595 bp, Cannabis sativa
agaatgtcgggttgatggattagtgaaattaccaaaatgtccctaggttttttttttaaaaaattgtgccatttgatttttggggtagattagtcttttggtaaaaatttaaattgtgccatttgatttttggggctgcctattatttaaaaaaaaaaaaagaaatgaaatgaatgaaaaccctatttaaagaagaaaacttacaaggcaaggaaaaccaattcccttctccctctctctctctcgtgcaacttggagccagccaagtttgggagaaagtttgattcaaattcatcttttttcttgctgaatcactctttagaacatcataggagttgaggtaagtctttgttgtatgttttccttaaaattctaggttttaagttagtttaagtagggttttgtttctttgttgctgtgggactcaaggtgagtttgggttttgtttaggctaggtttttgaatttgttagagattggttgagagggttttcatggttgcttgaattgaatgtggtttgttgaagccaaagttaagttttcctcactttaaagtgtgattttgagcaaattgataaattgtgatgaattagttg

SEQ ID NO: 153825 - DNA, 1029 bp, Cannabis sativa
  modified_base (125)..(129): a, c, t, g, unknown or other
  modified_base (890)..(891): a, c, t, g, unknown or other
gtaaatattattttggactctataaaagttaataattaaactatctgttttattaaataccaaaatatatcctatatttttcaaaatagtaaaaataggaccttgagctcaattttcaacaattnnnnnttttaatataaccaactttaagactatttttaatacgaactgatacagaaaatataaccagttttatcttaacatctctagatcagattattacaaagttttattttgataaaaaaaattagttcaaggccacttttagaaaatacagaatctattttgtcatttaacaaaagagaggttccaatttataatttttgtaaaacacaaggtctaaaatgatatttacccttttattattagaaaataacatttaatataatattttaaaagattttttccttaaatatgatagatatataactttattcatttttcatgtttttttttttaatttttttatgtgcgtaggttagtcatatatattgttatgagataagttgagaaatatttctcttttatatctgtaaataaaaaatactctcattttatgtctcattaaaatgtacccatttttgtgagtaggttacccaatgtaacattaccttccacttaaatatagcatataattttcatcaacttaaagggtataatgagacatcatttataaaaacaggtatatcttaaaaaatataggaataaaggtaaaaattaaaacatgtaaaattaagtgggtatacacaaaaatttctattataataaagagattatttcacaaacaaaaaaaaattacaaaatacggttgtaatgaattttaaataattttatttacaaaaaatacgatcttttttatgttgcaatgttgttaatttgttgttgatttnntgttatctgtatgttattttttgtggttgtttttatgttgttcggatgttattttcctattatttttatgtagtttttcttattgttttcatattatttctatagaaaactgtaaaaatgtaaaaagaaatctttaaa

SEQ ID NO: 153826 - DNA, 648 bp, Cannabis sativa
  modified_base (614)..(616): a, c, t, g, unknown or other
catgtggaacattgctctcagtaaaaagacgatcagaccaaaaacaagcaccgcgagcaacacaatgtgcgactttgttagcagatcgtttaaaatgacaaatagaaacattatttaaagaagaaagagccaattgacactcctgaacaaacaaaccaaagaccgatggaagagcaaccgagctactaagagcttgaacagcagcaatacaatccgtctcaactagcacattggacaaattcttcaacttcaaccaactaagggcctccttgacgctcaaaacttcagcaacagccggtcgacaaaccccaggatgcgaagaggaactagcttcgattaacttcccatgacaatctctaatgaccatgcatgtaccatattgatttgttgcttaaaaaatttccccatcagtgttgattttcagcatccccgcaagcggcttcacccaacaaacactactaccaacaaccgtagcatcaaacaacaacggttcaaacctgttctcttgagccgacagccaactagaatgacacgatcttgccacccgaaccacatccgcagcctgagaagaacgacccaaccaaagaagctcatttcgagctttccaaataccnnntgctaccatcaagagctcatccaccaaagcca

SEQ ID NO: 153827 - DNA, 1098 bp, Cannabis sativa
  modified_base (872)..(874): a, c, t, g, unknown or other
taagtagagaaatagtgcattttgtatattaagatagtgagatcaaatataaatggagaatactacattaaaattcgtgagtatggataaactcgcagtacatttgcaaagtttcttttaaaaacatgggttcattgcccgatacatatgcttggtacacccaactaatggtgtgtagtagatttaagaaactaagcattattggacatggggtggagcctacatagcaaactccaaacatttcttatatccttgtcggttgatattcttcaacgggattgtacatatctaatcgtgttcgaactaaagttgtttctcaaacatatttcgagttatgataaggttggaaactgactttatgacatgtacacattttagaaatatccgtatacagtcagagtacaattgtcaaagaaaagatctgggcctaaataccataaatgagcatttcatcagaaaagctataaggtctaacagttatatattttattatcaatctcacaatactagaactctggaattaagaattgacttaatcagtgagagctattgatctaggaatctagtttctagaaaagatcatttattttcccaaacagtcaaacttacaccacaagtattagattaattatgattcacaagaacctttaattttaatggttattgagaatccataattaataatccacaagtcattgataaaattctaataagtcatgttatttagtaattaattacaatttttagacaacatacatgttgaaattttttctctttaatgagtattttggtccatccttaagatgacttattataacaataagatcaatattttatagtgattacattttgtacaataagagttcaaatannntattaatttgagacgcaaattaaattatggaatgcacaaaattgaaattgtggtacaatatgtcatgaatgaataaatgaatatcttaaagagcaatgaagtctatctttagtaaagttacttaatggggtagagagcattcattaagcataagttttttcaccaataaatactcgttaggcaacatggagaaatataaagatataaaaccaaattcattgcta

SEQ ID NO: 153828 - DNA, 679 bp, Cannabis sativa
  modified_base (615)..(630): a, c, t, g, unknown or other
aacgtttccaccgccttaattgcaaatcaatctggtccgttgatcttcgagaatgcgaatcgtgcgtttcccccaccgtttgattggtaggtgacgacgcctgttcctcatgcagctttgcctataaaagccaccacctttccttcatttcgggtacttcccatttcttgccaactttgctcaaatttcccagagagaaaaaattctcagacccagaaaaacactgctgaacactttgcaattttttccagttcatcttcgttcactactgtcagtccttcttatcttcacagcaggacccccagtctcagcacttcattgtaagtttcttgcaccctttgttttattgttaatatgcatggcatgctgttacttatctgcttgttttttctgggttttgtattcgaagtttctgggaatgcaaatgtttagattcttcacgtaatcggtctaggttcaccattctggtgataggattactcttgtcacgcatttgttattatcctttttttttaaaaaaaaaagaccatacgttcttggtatattggtcgcttagggcataggatagatcactttcttttgactttctgccctttctttttctctggtgcgcannnnnnnnnnnnnnnnatttattgcacccgactcttgtccgggatatccttctagggtttcctgt

SEQ ID NO: 153829 - DNA, 909 bp, Cannabis sativa
tggtaaaataattccaacaatatcgtgggtcagacccaggatgtcagtgtaatgacttaggaagagtttaaaaatctatttgaagaaatcatttataacattgctgtgagaacttcacacacggagggctttgtgaagcttactcagggaaagatgttagtgaccgaatacaccctggagtttgattagctgtctaagtttgctggtgatcagtttcccacagatttcaccaggaaacagaaatatgtgaggggacttaatgccacgatcattcgggacttgaaagttaccactactcatgacactttgtataagaaagtggtacagctagccttgattgctgaggaggctgagcaacatgtagcaaaagagcatattgtaaaggatgtcgtcacggtatcgaatctgcctgctagtggtaatattagtaaggggaccgacagtggcaaccctgatcacaaacggaaggctgactctttcggagcatcagggggtaatagaaagcttcggggaaattgaggttgtcatcaaggtcacgaatctagaatattcaaatgcaagaacaccatcagggtgaatgacgggccaaggctgcatactgtatatttgatatggattatatgaatcggatgtttcaggattacatgaacagatgtgtgatcgtgtttatcgatgacatcttgatgtattttgaatcaaaagaagaacatgatttgcatctcaaagcagttttgtaacgattacgggatcacaagttgtatgctaaattcaagatgtgtgaattttggttatctcgtgtttcctttttggggcatagtggataaagatgggatcaaggtggatccggccaaaattgaagctgttcgagattggccaacaccaaagtcaactactgaagttagaagtttt

SEQ ID NO: 153830 - DNA, 617 bp, Cannabis sativa
tttttaaataagtactaaaattaacacaaaataatgtgagaaaaataattttaaaaaaaatattaagagtgatttttaaaaattattttaactttatttttttataagatattaggatgtacttatactacaagaaatgtaacttttaacagcacaattcgttactgcgctggtgaactggtaaaagtaactttaaccagcggatttcgcaaactatgctgggaaaaacgttaaagttttaccagggcatatttgcagtgactaaaatctaacttttttcagcgcatttacgcactggaaaaaagccatttttgcaacacttttcattttgtactggcaaaagttctaataccaacgttgatttgccaacccctttcaccaacacatcaaaagtaaattttattttactagcgcaataccaaacttttgccagtacaaaaatgtgttggcaaaagtgacatttcttggagttaatttatcgggtgcaaataaaatttttcatatatttaattaaataagttccctcaaaataaaaaatcatgttgaatacacgtgcggcgcacgtgagcctatagttcaaatattttttttttaataaatttgtaatatgttgattt

SEQ ID NO: 153831 - DNA, 552 bp, Cannabis sativa
  modified_base (69)..(79): a, c, t, g, unknown or other
cattaaataatgcaattttgaaatgggtgggaaaataattaataaaataaaataaatatattttgaaannnnnnnnnnnttaagttgttctaaaattaaaatttccaacttaaatataattttctatcttttttttttgaaaaatagcaatgtacttcattaaatagaaccaaaagttagacctcacggtcattacatagtaggttttccggcaaagcagagaccggaatacatccaaacatctggtgggaaaacgcccacttagccacattatgggccgcatagttacactgtctactaatgttcaaaaagttacaattaataaaagaaggagttgatctcaaacaaaaggaggcatagttctcaagagcccaatgggaatccttcccattgagaatataattttctatctaattaaatatctttgaaaataactattaagtgtctagactataatcaacttaaatatttaattttctatttatttaaatatatattaaatataagaaacaaataattaagtatctagaatagaattaacttaattattaa

SEQ ID NO: 153832 - DNA, 544 bp, Cannabis sativa
ggcaagctactgtgctgatacggaaagcctaccaaactgtcggaaaaaaagtgtcatccccttgggtgagacggacgaagatccagcaatgaatacttcccagactacatatggtcagccgccaaatccacggtcacaagttccgcttgtgggcctagcggtaggcgggcagaccttgtctagtaattcatcaggcgaggtcattcctgatagttccaaccaggttaacgatgccattccacctgacaccaaggaaatcaatcactaagacagccagtcgcttctgtattcgaaaggttggggacgaatcatgacctaaggagtgatctgaatagaaggagaggagtagacgatcagattgtcatgacgatcgtacagcctggagcccgtgcttaaattcctgctcagaaagataaagacgtgattcaaatcgaccagaatgctgagaatattagcccacccgtacaggcacagctagacgaattgaaaaatatgttccaagggatggctggacagagaaataatgatctcgagttggaccgag

SEQ ID NO: 153833 - DNA, 751 bp, Cannabis sativa
ttttacatcagtattgcgagttacatcatttatttattggtagtagggttgcaaatgtcccatgttccattagtcttttattagcgagtcattgagtggagccaataaataaactccaactccaactactactttgatgacatatggaccctccaaatttttggttgaacactcctgcagatgcatctctcctatttgtaaatactcgtcttagcaccaagtctctaacattgaatagtcttttcttgacactttttttaaagtatcatgtaacttggtgttggtatgctgcattgctgatttgcgactcagttcgtttttcctcaagtagatccaaggacaatttcaaaagttcctagttttcttcttgattataagaatctcttctatgagtcaagatgttcacttaaacaggcgacattgcttccgagccaaatgctaatgagaaaggagtgcgtcccgttgctattttcttggtagttctatgagcccagagtacctgaggtagctcgttaacccatctgcctttggcagcgtctagcttcttcttgatagtatcctttaaggttttattaacaacttccacttgtccattttcctgaggcctggatgccgacgagaagcttttgataattttattcttctcgcacaatttagtgagcaagtcgccatcaaattgggttccattatcaaatactatctttatgggaattccaaacctacatacaatattcttgacgacaaagtcaag

SEQ ID NO: 153834 - DNA, 653 bp, Cannabis sativa
agagagagagagagagaagaaataccattaaagagatggtcgactgaagagatggtgtcgatttctcaggcgactgaagagacgggcactgttaaggtgactgaagtagactgccgactgaagatctagattggtcggcaagggctcaagatcaggactggtggtaggagatgaaagcgactgtaggagaaagagaagaaagtgaaatgattattaggtttaaaattttttaggtcagattctttttttttttttttgaaatttaggtcagattatattatatattattactagaaattaatattatattatatatattataatttttttaaatatataattaagtgcagatcggattggatcaattactttttgaggtcaaacaacatccaatccacacaagtgcagattgtagattttttatagattttttaatcttttttaatccaattcaccaattcaatctgcacaagtgcggatatccacattttgcggattggatcatgcggattggatactttatgaacatatatttatttattttgagtatgtttgtttatgtggtgaattaacacctattaagtaggggtgtgcagaaagtcatccaatccaattccaccaatcccaaccgatccaatagaatcggatatcca

SEQ ID NO: 153835 - DNA, 532 bp, Cannabis sativa
ttgaaatgaattttatttagggcgtaaaacccaacacgagtctataactgaagcataagaatcgatccttcttcctggaaaagggacagaccacttcccacgttcgttcttcagaatagggaaattcaaccatcagaggctctataaaaggagaacccaggagtcttgaaggatcattgcatcttcactcactgaacacttattcaagcatttacgaaatacattactattattattaccagtccttctccatcactctacagtagaagtatatgttttctatcttatttatttacattcagatattctttatttgaattatttactgacttgatcgtcggagtcccttcggctggcaccatcccaatatcccaagttctcaatgatcctttttcctttgttctacaggttgtcactgcctgcgatccttccattccgatcattgtagattttgccctctacaaaaactcacacacaaaaaccagttaaataaaataactcaaacaaaaacatccattcaacatgctctaac

SEQ ID NO: 153836 - DNA, 505 bp, Cannabis sativa
ggtccaggtctgggtctcagttcccgtctaggtacacgaccttgtccgggcccgagttcaagtctgagtttggttttgaggctaggtctatgttcggttctaggtctaggtgtgtgtgggtcctggtcacggtcctagtcttgttctaggctcttcgttcagcgattcttgttcaggatctaattttgggtcctatgtctaggtcttggttcgggtttggttcttcgtctaggttctggtcgtagtctgagtcccagatctatacaccgacaactggtcttttccaggccccgttacccgaatcctaagtaaaaatctagatcactgtcacgggtctcggtctggttctggttcaggtcccagggcccatttctgagttttggttcgggattgagacttgaatgcggttctaggtcacgaagctggttctgtgtccatggtcttgttccatgtttgggtctgagttcaggttcgagttcgggtcccgagtccaggtttgggttgg

SEQ ID NO: 153837 - DNA, 619 bp, Cannabis sativa
cataaacagattatatattctgattgtatcaagatacaatcgaatttaatgaggataagacatttaatcaaggtttcctttataaactaactttccataagagaaaagatattcttttacaagaaatttccaaacaaaggaaagattcagcattaaaagcatctttcctaaccaagaaaagatcaactaaatccaaatatacaaggtaagacaatcgatcataaatgcataaaatcttaccattaaataaaaaaatattttgtcaactaacttgccaaaaagaactttacagattaaaaagggatcggtattttatcaaaataaacaaattaattataagaaattaaataaaaaataaagaaaatattgtctgtgtaataaatatgtatatttttttttacttcagataaagaataaatgaataaaatgttaaatatatatgcaagggaaaaaaaataagaaaataaaaaagatttcaaatataaacaagataataaaagaaaggaaaataaaatacaaaataacatatttttggagtataaaggagacaaaaaaaagtactacaaaaataatagactatacataaaggaaaaataaaattataaaaaggaaactattt

SEQ ID NO: 153838 - DNA, 646 bp, Cannabis sativa
aaatttttatttataaaaatacttgtaaagtttaaaattacaaaaatacactctgctcaataaaacataagaaaacaactaaaaaataacaagaaatcaacctcatgacaactataaataaactataaaacagtgaaaaacaaactagaaacataatttcatgacaactatattacaactatatataaactataaaattaaaaacaaaaaaaacttgtaattactgaagaagtatttttgtaaatgaaaaaaattaaagtgtaaaaataaaaagaattcatgttgtcatatattttttttttaaaaaaaaaaaattcagtttattttgtaaattttttaatattatatttgtttatatattataatttagaataaaattattaactttatgtaaataaatttataaatatatattttattctattaaaaaaacactaaatattatgttatcaaaaaaaaaaaaacactaaatattttctattaagatataattattttcatataaagatatactattttaataggaaaaattacataaactgtttttttaaaggggctaattaggatttttgtcccctaaattttgacatgtaccaaattatacccctgaacttttaaggtcgttaaaaatgccccatgaactatt

SEQ ID NO: 153839 - DNA, 906 bp, Cannabis sativa
tttgctaaggctgctattttatttcctgatcgtcgtttcagtttggagcatgttccaactgatttgttaccttgtttagtagcagaagtttatggctaataaagattttcgactattcaaaaaaaatatatataattttaattgataaatacttttttttatatataattaaagtaccaaatataatcttatataatttatcaaaattagagtttctaatgcacataatgagaatatgacctataaaattgggtataaattaaagagtagtaaaataaaggtaaaatttaaaataagaaataaagtgtgtatagagtataattttctcacagtcatggcctttccttgaggaaattagattctatatcttttttatattgtttttttttattttttttttatttttacctacttttaaaagtttattatttttacctctttttttaaacattgtatcaatttttccctatcattgggtacaatatatataaaaagagatatattttaattaaataaaaattagaaataaatttagttaattgattaataaaaaaaaacattttttaacttaccccatttccttgggcttgttgggcttctgcaaaatttgttggacttgacccaatcttcttgtcagatgtgagagtcgtatcaaaccatttttattagggaaagttactttgtttagggataattatataaaataaaattatagttttacttttaatatttcttttatatttttaccatttttataaaaacaagaaaataataagaaaattatatgaaattaacaggaaaataatatctaaacaatatgaaactaacaacaaaaaataacatacagataataaaaaataaacaaaaaattaacaagaatacaataaaaaaaatattttctataaa

SEQ ID NO: 153840 - DNA, 866 bp, Cannabis sativa
  modified_base (94)..(106): a, c, t, g, unknown or other
  modified_base (133)..(145): a, c, t, g, unknown or other
  modified_base (364)..(364): a, c, t, g, unknown or other
  modified_base (623)..(629): a, c, t, g, unknown or other
atcactctagattttaccttatgctaagaaatttgaaatgtttgagaaatttcatgaatttctagcaatgttgaaaatcattaaggtaagtggnnnnnnnnnnnnngttgaaaatcattaaggtaagtggttnnnnnnnnnnnnnactgataggggtggagaaatattgatgataatataaagtttatgattagttactagcagttgcctaagttcttctagggatataccctagtgataggaaaatttcaaaatgatggaatggttgtatacttagtgtataccaatactagaatcatgcatgtcgtgatcgtgactttaagaaaaactagaactgttaaccaaggtttgcatgtttgatagntattctaagtgattaggggtgggccatcctatggtcattaagataataaagtatttgtttaaacaaatactacttttctaagaaaatgactcagtctgaaaacaaagtagcaaagtagaggagatattttttatgattccaaaactgttctatcatcttattcgaaataagatggtcccattgcctctgttgtcttgacacaaccgaagatgtcaataccatttagtgttcttagaaaaaagtcacggtaccttgtcgnnnnnnnagggtttcaaggaactcaccctgttatgacttggaagacaacagtgattaaaatccattgttagattaaacaagtaacggatagtcagaataaggaactaagtaaagccaagagaactacaatggttgaaacctttcatatggaacaaccaaaagttttctactacaaggacaagaaaggaagttttatctgtaagtctattcaatggacttaaccaaacttcctgttcctagtatt

SEQ ID NO: 153841 - DNA, 646 bp, Cannabis sativa
ctcatttataacttttgattttccactcccgtcagataggtttttaatcaaaaattatacttgtttgatcccttttttgtcaaaaaggtttaatcaagatgttataacaattcgacccctttcttgtcaaaaaggtttggtcaggaagttataacagttcgactcctctctcgtcaaagaggtttaggtgagaacctttaaaattcaaaaaaaaaatattatttttgaaatggtgggtttacatcataccatgtatttctagatgaattccggtttatcatacataaatgtcccttaagtaatttttaaaagtaaaaccttataattacttaatataaatgattctctttattcataactgaagtttaaattttacatcagtaatgcaagttacatcatttatgggtagtaaggtcgcaattgtttcacattccaatagtttttaattagcgagtcgttgagtcgagccagtttgtaaactccaattccaacaattttagaagttcctagttttcttcttgattataagactctcttctgtgagtcgacatgttcactaaaacaggcagcattaccttcgagacaaaagctagcgagaaaggagtgtgtcccgttgccgtcttctcggtagttatgtgagcccaga

SEQ ID NO: 153842 - DNA, 500 bp, Cannabis sativa
aatataaaaattaatttgattaataattatgaatcccaactatgatggtcgagctctactaattacagctgagtcatataattacattttttactaatctcaactacatatagtcgagctcaactgctctcagttgagctattttttgaaattttgattaataattataaatctcaaccatgtatagtcgagttccacgtatttcacttgagccttatacttttaatctataataatatcaaccacttatagtcgagctcaactaacgtcaattgagccatttcctgaaaactaatttaataattataaattttaaccatacattgtcgagctcaactattgtcagtagagccctatgttcaaagtctgataaatatataaaaatctcaacgacatataatcaagttaactcaaaccaatcgagttctaactaaagcttacacacaaaaacactaaaatattcaaatacattgatatgaattaattaaccatagtaattt

SEQ ID NO: 153843 - DNA, 875 bp, Cannabis sativa
  modified_base (244)..(246): a, c, t, g, unknown or other
agtaagtgatttctctctttattttcttacatgcttttgattttgcgtttctaggtttgatcactagtttcttagttaacacctttgccccgtcatttggttttagcaactttagggttcaattgtttctgggtaaatgttagagtttaggcactgtagatttttgggtttctcaaatttaccaacttttggtttgataaatttcatccaggaattgggattgctttctctttgcagcaatgtnnnaatctggttcagaagtttatcgtccaaaatatttagaaacagaatgtcccactgaacttgccatcccatataaatctagaatttcaggacccaaatccaaattagagataaatgatgcaaaaataagggaacacttggtaaaaaccccatcaagatgacattgccaatcgccacagacgcttcttgcaagaaattacagaaggcaaaggtcatttcttgggagatgctacttagcctgaatccccaaatttatcgtcaattcttctagctaggcttttatttttacagaaagtcacaattgcttttaaactaggtgacttggactttgaaattatgacctccaaccctcgaaaatcaaagactccctaggatcctaacatcaccttcgaggctgaactaatagagtcgaaggtgcaagctatcggagattatgtaggtaatatcctaaggacttgtggtattaaatataagtgagaatgtcggttagatcggtggcttttggcgagttcaactgttacccaccagaacgacttattcgcgaagcatctgaggggaccagtggcgaggccagtatgagtggctcgacaaggataggcgcttggagcctcaaacacatctgggctggagct

SEQ ID NO: 153844 - DNA, 505 bp, Cannabis sativa
aacaaaaaataatttttgaagttttcaaaacacatgtcgcgtttggttagtattttctaaaaataatattgatcaaaagtgaattgttttttaaataatattgatcaaaagtaaattattttttaaaatggaaaacaacattttgttgttttcaaaattcttatttttgtaattttatttttttgaatattgtttaaaaaaaataaggccaaacaagcttaattgttttcaaaaaataatttctatttttaaaaataaaaaacatttttatagttatgataccaaacatacacttaatatttctaaaattataagtcttaaaatataagaaataaaattaatcttgaactataagtgttgcccctgatttcgcctaaaatacgtggaccaaccggatggtgacacgtaaatggaaaagggtttagcgtttgaataaatcagctaagtctccttaagcgcaggattactctaggcatgcctcctgttatagtgagattcttctcac

SEQ ID NO: 153845 - DNA, 755 bp, Cannabis sativa
tttcatgcccctaaatagtaattcacaaagatttcttctgttttggcatccactgtttttgctttttggttccctttggatgtggagcacttgggaaaacaagtctttcgaatgctgacactcgtggggtagatgtgcttgcttcaagtctatcaaataccgacactcgcggggaacgtgtaggaacatcgtcgctgtgaaacattttttgttcctcctctatttgctcgtcaggttcaaaagaagcttttaaacaatcactattttgatggattgtgactcctttttgcttcttgaaatgaaactttttcttctgtgttttgaaggtttttggagttacagaagtggaggagttattgagagtaacgacctttttatttttcttgctatctttaccaaaggaaattgaaatttgcattttacccttgggtagtgactgattgattttccttagtggtaaagtaaagcttgccatcaggactgtcattgaatcttcgattggtctcaaagctttttgccctattcctcgttgacttttagggttatacttgaaggttcgtttttagttagataccttcaagttctcctctttgggccgagaagatttcacaggggatagttgcttaatttgtagagagttttgtgcggttgagctttcatgacattttctctcttcacgtttcccttttagaatggtgacattagctggcttgtaaaattttgcatcagcgtaattcacttgttccccgtaaaag

SEQ ID NO: 153846 - DNA, 745 bp, Cannabis sativa
aagttagcatccaaggcccatcagcgggttaatcatggcactaacccgaacaaagtctatttttattttactattcctagcaccaaagcaagggactctaatgatccacatgagccaactagctgttaaaaaggtcaccaagacaaagatcagaattgaagacgatccgatcaatcaagatgcaaaatctggagaaagcagttctgaggatgctgaagataacactcaggacacactcgaggatatgcattaagatgatcctgaggataaggctattgacgatgatgttggtgagaagaaccaacttcacaagtcaacccccgtggtcatcatggctaaaaactttaaatggcagaaagcaaattaactcgacaaaataaattcaatgaggtactactcacaaagatgaccagaatggagagcgtaatgacttccctgactaagatagttcctgaagtaaaaacttctccaacaactgatgcccctgagaaagcatatccaaactatcctagaacatcaggtgtttgtaaagtcaaaggcaaaagaatagccatcaaagaactgaaaaaagactccttccaccaagcagcataaaaagtctaaagctactgaccaacctcaacagaggaggaaaggaaaccatgctttagggcatggtgactagacaacctctagcggtagagtcacgtagaaaaataagactgatgttggagtctagaagctagagtcatggatggataagcat

SEQ ID NO: 153847 - DNA, 712 bp, Cannabis sativa
  modified_base (415)..(420): a, c, t, g, unknown or other
aagtgtctcaactcatgaagccagatagtagacaatgggacttagagcttattgaggacttgtttgattcccgtgatgttgagctcatcaaacaggtacctttgaatgttaatcttcggagtgatagttggttttggaataataattcaactggttttttcactgtcaaaagctcctataatcacttataggcaatcaatggtaattggaactcatccatggaggatgatgtttggaagatgctgtggaagattaaagccccacctaaggttttacattttgcttggaaagctctttcgggttgtttgcctacacgtactcaactttatagtaaacatgttcctatggatctacattgtgtgttgtacaactatggggaagagtcaattttccatgttttggttcaatgctcctnnnnnnattcatgttggctctgatcggcgttaggtgttggccattctgcagcaaccaatttttttgactggtttatggaagtgttggcagtaggcaatatggggttggttgaagaagctgatggttagttgggcaatttggaaggctcggaatgatatgctttggaatggtaaaagttgtagtgctgctgatgttgtttggctggctcgtaccactctccgacaatagaagtgtgcttagtctaagcggctggactcgatttccctggcttccaatcgcactgacacaagagaacgct

SEQ ID NO: 153848 - DNA, 687 bp, Cannabis sativa
gctttcatttagagcagaatcaagaatcgctctaaccacaagtacgattgtggtacacactcgtaggggcctggtggatcaagcaaatcagcaggcggtggatcctgcattgcagaacccaggaaacacaagggttctgtcagctgttaatcctgaacagccggcaaacgtaggtcgtggtgtaacaactcctgtagatgaaatcacatctggtgtgcaagagactgggaataacagtttagtacccaatagggcactcataacacagtcgtttcgcctgctaccaacactcaaacaaccattggagatgatactgagatccaaaatctctgtgcttctctcggactcatgcagggtcataccaacaccctacatcatgattaggaagaactccgcactgcggtaaatttcgcgttcgagcaacgaagacgcatgtttaccgagtggagagacaaagagatggaagtgttaagggctcatcatacaaagattgaaaatcgtagtcggcaagcaactttgcttatacgaaaagcctaccaaattgttgggcagcaacccccgagtgtcatctccctgggtgagacggacgaagatccagcgatgagtacttcccagactataaatggtcattcaccaaatccccggtcacaagtttcgcttgtaggcctagtggtaggcaggcagacc

SEQ ID NO: 153849 - DNA, 543 bp, Cannabis sativa
  modified_base (51)..(67): a, c, t, g, unknown or other
  modified_base (144)..(155): a, c, t, g, unknown or other
gtaaccaaacccaaaggagagaaagagatcaaggtttagatcttgataatnnnnnnnnnnnnnnnnnaatcaagggctagagatcttgagcagaaggtgtcatattattctgttgtaatcaattcatatttaggatgttaattnnnnnnnnnnnntagtaaatctagatcctagtaacatattcctaacaattggcctcagtacgatggtaatgatttactttcatgtaatatggatttaaaacgatgaatattatttttgtgttgatttggatgtgtacatgttggtttatgtgttatttgatgatggaatgtgttttacaaaattttcgttgaaaataattttattttcgttctgaaattattttattttgattcctcgtaaaaaattaagcaattttggtttttacagaactcgattcagataaaaattgagaaagttatgaaagtttgaaaatcgggtttcaaaggtgtcgagattgggtgctaacgcgcaccagcatctccatcaaggagaggctactggcgtcgaggaatgccactc

SEQ ID NO: 153850 - DNA, 732 bp, Cannabis sativa
aaattatgcactaactttagacactaaacatgtctaagttatactcaagttgtagacattaagcatacctaaatttcacatatcattcaatcttttactaaatttgtttgataatattggatatcacccctatatttttacatttatatgaaaataaataccactttgtctctaacactttttatttcctcctcgaaataattttacactaactttgacactaagcatgccaaagtttatcatcttttgcactcataattaatcaaacaaactttgatttattttatggatctcacccccatatttctacaaggtcaaatcaccatatcactttacaaataaaacttcttccattttattctacatatacatacaattttcatgaatcttttgagatttcatagtaatctctcaaaagattaaaaaatgaactaaaccgctttgttagtttatttttgctctttatttgcctaaaagcaaactatcaactccaagtagattacatatttaggtgtgtgcaatattttcctcaagaaatagtcactaaatgacctttaaataaaacacttgttttattttatttccacatattattttttcaagataataatttattcacggtttatcattaatcttttgaaattatataaaacttctcaaaaatacaaaataatacacacctactcatgataagaaatacaagaacaataatattgataaaataatgttaca

SEQ ID NO: 153851 - DNA, 595 bp, Cannabis sativa
aggggaccaagcttccttgggatgagaagcagggctagggaatagagaagtatgcagatcaacataagaaatacaaatagcatcaacactttttttcatatccactgggcagttattatggactttatcattccggaccctccaaactgtatccacaagtatcgaagcatataagaacacctcctcgacttgaacccctctgcgatttagatcccaaatgaacttgaccgaatcccaaacacggatgcctgtattacaaacaggataaatgccccaaggagaagatctccataagtgaaaagccacatcacaggacaggaacaggtgctccatggattcttccccagtgccacaaagaggacagttagtatcctcaatatggaatcttttattaatcacagatcttataggcaaagcattagacaagatacaccaccacaataccttatgacgttccaaaactttgctattccaaagtctattctagagattcggagccacctcgcactgggggctctatctaaggcttgaactagataagccgatttgcacgagaattgcccattacttatcagagtccatatccatctatcag

SEQ ID NO: 153852 - DNA, 663 bp, Cannabis sativa
aggccaatagtaccctgattggaacacttttgcggctgttctttgtccaccatagggagatgaatgacaatgctctaggatgcttgcaacttcctcttccggcacacaacgtcgcattattcgatctacacactgcctgtacaagaaaggctcatcctaatagtagaatcttacatcatgaaagaatttttttagttgctgcctattcaaatcaggaggctgcaatacactcactaagtaatttacaaaattagcataccaaggagtgtttgcttgagctacaacaagcagctgctcatccagaaaagttttttgaatttgcatttcggcttccttttcaccacctgtttccaactgagataagtggtcagccacttggttctccgtcccttttctatctctaatttctaaatcaaactctcgaagaagtaacacccaaaaaatgagtcttggcttcgcatctttcttggcaattaaatatttgatggctgaatggtcagtgttgacaatcaccttcgttcccacaagataagatcgcaatttgtcaaaagcaaatactacaactagcaactccttttcgatggttgaaaaatgaatttgaacatcgatgagagtcttgcttgcatagtaaattgttaggctatttttagcctaagtttcggg

SEQ ID NO: 153853 - DNA, 920 bp, Cannabis sativa
agggcctcttgcataagagttttttcgtcctctttattgagattgtttgccactatttataattgaatagtggtagttaattacaaggctgaccagaatgtaattatagtcattatcccttaaattgtgggacctgattacatatcatgaaatgtaaatgcggtgtacgattttgaaaaccatgtagctgtgattttcccgattttattgggtcagaaatatcgtgtattaaacacgtcttcaattgttgagtctagagatgtctcgacagaaacttaattgtagtgatcccaatggcgagctggaaccattctcatttctgaggtcgacatgatatgatttacgtcgattgctggtatatgaaaatcttctgacatgccaggattatgagtctcgcttccattaattggatgaaactataggaagtttcctcgaagcgagctggtcatctcgcattcttgttatttgagcgaatccgactttgacactgagtttgcttattgtaagctaaggtatgtgatactcttctccagtgccttgctattctcctttagcgacttatggtttctcgttaatacactaagtaccagttcgtacattaataactcgcctaaagccttacagtcagcatgttacaaatatactccgatacttacgcagttaatgagttattccaaaagagatatggcatcgattcacattccctttatcttgacacgtgtcctccagccgaatttcgggcataacaattgccccttaaaaagttcttttttagtaaaaagagctttctaataaccacggagggcatttttgccaaaatcgtttcttggaaaggacgcctcctttgattatggcggttgtatggtttcgaagatcattatgaatcgcctattcatattctgcacgattcccagccgtta

SEQ ID NO: 153854 - DNA, 606 bp, Cannabis sativa
ttgtttttcatcaagcagatcaaaggacaattttaaaagtccctagttttcttctttgttataaaactctcttctgtgagtcaatatgttcacttcaacaggcagaattgctttcgaggcaaatgctagcaagaatggagtgtgtgccattgtcctcctcttggtagttctgtgagcccagagtaattgaggtagctcatcgacccacctgcctttggcaacgtctatgttcttcttgatagtatcctttaaggttttattaactgcttccatttgtccattcgcttgaggcctagatactaacgataagcttttgataattttgttcctctcacagaagtcagtgaacaagtcgccatcaaattgggttccattttcaaataatatcttcatgggaattccaaacctacagacaatgttcttgacaacaaagtcgaggactttcttccaggttatggaaactgatggctcggcctcagtctttttggtgaggaatttgactggtactactgcatacttagctcctcctcacccagtgggtaatgccccaattaggtcaattccccatatagcaaatgggtggggcgaggtcatcattcttagttc

SEQ ID NO: 153855 - DNA, 500 bp, Cannabis sativa
atgaagagaaaaaaaaaaaaaaatgtttcaatcttgatttagatatcttaaattatttgtaatttcttgaatattacagaacatctcgtggaattatatgtatatactatcatataatatattagaattgtaacttatccacaaactaaaaatactaaaagtactataaattcattaaaaaaagtaccgatttgattaaaaattatggatgatttcataattattcaaaaataataaaatgtttaagtttgtcttgatctatagtttttctttttttttttttcaattttttactaatttttttttaatacagattattattttttcaatttctttattttagaaaataatattatttttacgttactacaacattatagtactatattttctcaatgtgaaaataatattgttcttcaagaaaaaagaagaactaagaaaacaatagtccataaaagaacggtaattttttttaaaaaaaatacaattttaggtgcttt
